United States Patent Application Publication US 2022/0040281 A1 - sequence listing, part 4

SEQ ID NO: 6809 - RNA, 1571 nt, Artificial Sequence
  mRNA Design a-3 (hSL-A64-N5) comprising derived and/or modified sequence from Pf(3D7)__XP_001351122.1__Pf-CSP(199-377)_L(PVTN)_HBsAg (opt1)
aggagagggcgcuuggcuugcaaggacccugagcugcggcauugaagcacacccaacccaacucgacugaagucagccucacugaaccggaucugagaaucuucucucucugggcuugccagggcucuccgaaccuagcuagcauccucuucaauuccaacuagaaagcuuaccauggaccccaacgccaaccccaacgccaacccgaacgcgaaccccaacgccaaccccaacgccaacccgaacgccaaccccaacgccaaccccaacgcgaaccccaacgccaacccgaacgccaaccccaacgccaaccccaacgcgaaccccaacgccaacccgaacgccaaccccaacgccaaccccaacgccaaccccaacgcgaacccgaacgccaaccccaacaagaacaaccagggcaacggccaggggcacaacaugcccaacgaccccaaccgcaacgucgacgagaacgccaacgccaacuccgccgugaagaacaacaacaacgaggagccgagcgacaagcacaucaaggaguaccugaacaagauccagaacucccucagcacggaguggucccccugcagcgugaccugcggcaacgggauccagguccggaucaagcccggcuccgcgaacaagcccaaggacgagcuggacuacgccaacgacaucgagaagaagaucugcaagauggagaagugcagcuccgugccggugacgaacauggagaacaucaccagcggcuuccuggggccccuccuggugcugcaggccggcuucuuccuccugacccgcauccugaccaucccgcagucccucgacagcugguggaccucccugaacuuccucgggggcagccccgucugccuggggcagaacucccagagccccaccuccaaccacagccccaccuccugcccgcccaucugccccggcuaccgguggaugugccugcgccgguucaucaucuuccuguucauccuccugcugugccucaucuuccugcuggugcuccuggacuaccagggcaugcugcccgugugcccgcucauccccgggagcacgaccaccaacaccggccccugcaagacgugcaccacccccgcccaggggaacuccauguucccgagcugcugcugcaccaagcccacggacggcaacugcacgugcauccccauccccuccagcugggcguucgccaaguaccugugggagugggccuccguccgcuucagcuggcugucccuccuggugccguucgugcagugguucgucgggcugagccccaccguguggcucuccgccaucuggaugaugugguacuggggccccagccuguacagcaucgugucccccuucaucccgcugcuccccaucuucuucugccugugggucuacaucugaggacuagucccuguucccagagcccacuuuuuuuucuuuuuuugaaauaaaauagccugucuuucagaucucaaaggcucuuuucagagccaccaaaaaaaaaaaaaaaaaaaaaaaaaaaaaaaaaaaaaaaaaaaaaaaaaaaaaaaaaaaaaaaaagaauu

SEQ ID NO: 6810 - RNA, 1613 nt, Artificial Sequence
  mRNA Design a-3 (hSL-A64-N5) comprising derived and/or modified sequence from Pf(3D7)__XP_001351122.1__Pf-CSP(199-387)_L(PVTN)_HBsAg (opt1)
aggagagggcgcuuggcuugcaaggacccugagcugcggcauugaagcacacccaacccaacucgacugaagucagccucacugaaccggaucugagaaucuucucucucugggcuugccagggcucuccgaaccuagcuagcauccucuucaauuccaacuagaaagcuuaccaugauggccccggaccccaacgccaaccccaacgccaacccgaacgcgaaccccaacgccaaccccaacgccaacccgaacgccaaccccaacgccaaccccaacgcgaaccccaacgccaacccgaacgccaaccccaacgccaaccccaacgcgaaccccaacgccaacccgaacgccaaccccaacgccaaccccaacgccaaccccaacgcgaacccgaacgccaaccccaacaagaacaaccagggcaacggccaggggcacaacaugcccaacgaccccaaccgcaacgucgacgagaacgccaacgccaacuccgccgugaagaacaacaacaacgaggagccgagcgacaagcacaucaaggaguaccugaacaagauccagaacucccucagcacggaguggucccccugcagcgugaccugcggcaacgggauccagguccggaucaagcccggcuccgcgaacaagcccaaggacgagcuggacuacgccaacgacaucgagaagaagaucugcaagauggagaagugcagcuccguguucaacguggucaacagcuccaucgggcuggggccggugacgaacauggagaacaucaccagcggcuuccuggggccccuccuggugcugcaggccggcuucuuccuccugacccgcauccugaccaucccgcagucccucgacagcugguggaccucccugaacuuccucgggggcagccccgucugccuggggcagaacucccagagccccaccuccaaccacagccccaccuccugcccgcccaucugccccggcuaccgguggaugugccugcgccgguucaucaucuuccuguucauccuccugcugugccucaucuuccugcuggugcuccuggacuaccagggcaugcugcccgugugcccgcucauccccgggagcacgaccaccaacaccggccccugcaagacgugcaccacccccgcccaggggaacuccauguucccgagcugcugcugcaccaagcccacggacggcaacugcacgugcauccccauccccuccagcugggcguucgccaaguaccugugggagugggccuccguccgcuucagcuggcugucccuccuggugccguucgugcagugguucgucgggcugagccccaccguguggcucuccgccaucuggaugaugugguacuggggccccagccuguacagcaucgugucccccuucaucccgcugcuccccaucuucuucugccugugggucuacaucugaggacuagucccuguucccagagcccacuuuuuuuucuuuuuuugaaauaaaauagccugucuuucagaucucaaaggcucuuuucagagccaccaaaaaaaaaaaaaaaaaaaaaaaaaaaaaaaaaaaaaaaaaaaaaaaaaaaaaaaaaaaaaaaaagaauu

SEQ ID NO: 6811 - RNA, 797 nt, Artificial Sequence
  mRNA Design a-3 (hSL-A64-N5) comprising derived and/or modified sequence from Pf(3D7)__XP_001351122.1__HsALB_Pf-CSP(19-152) (opt1)
aggagagggcgcuuggcuugcaaggacccugagcugcggcauugaagcacacccaacccaacucgacugaagucagccucacugaaccggaucugagaaucuucucucucugggcuugccagggcucuccgaaccuagcuagcauccucuucaauuccaacuagaaagcuuaccaugaagugggugaccuucaucagccugcucuuccuguucuccagcgccuacucccuguuccaggaguaccagugcuacggcuccagcuccaacacccgggugcucaacgagcugaacuacgacaacgcggggaccaaccuguacaacgagcucgagaugaacuacuacggcaagcaggagaacugguacagccugaagaagaacucccgcagccugggggagaacgacgacggcaacaacgaggacaacgagaagcuccggaagcccaagcacaagaagcugaagcagccggccgacgggaaccccgaccccaacgccaaccccaacguggacccgaacgccaaccccaacgucgaccccaacgccaaccccaacguggacccgaacgcgaaccccaacgccaaccccaacgccaaccccaacgccaacccgaacgcgaaccccaacgccaaccccugaggacuagucccuguucccagagcccacuuuuuuuucuuuuuuugaaauaaaauagccugucuuucagaucucaaaggcucuuuucagagccaccaaaaaaaaaaaaaaaaaaaaaaaaaaaaaaaaaaaaaaaaaaaaaaaaaaaaaaaaaaaaaaaaagaauu

SEQ ID NO: 6812 - RNA, 917 nt, Artificial Sequence
  mRNA Design a-3 (hSL-A64-N5) comprising derived and/or modified sequence from Pf(3D7)__XP_001351122.1__HsALB_Pf-CSP(19-192) (opt1)
aggagagggcgcuuggcuugcaaggacccugagcugcggcauugaagcacacccaacccaacucgacugaagucagccucacugaaccggaucugagaaucuucucucucugggcuugccagggcucuccgaaccuagcuagcauccucuucaauuccaacuagaaagcuuaccaugaagugggugaccuucaucagccugcucuuccuguucuccagcgccuacucccuguuccaggaguaccagugcuacggcuccagcuccaacacccgggugcucaacgagcugaacuacgacaacgcggggaccaaccuguacaacgagcucgagaugaacuacuacggcaagcaggagaacugguacagccugaagaagaacucccgcagccugggggagaacgacgacggcaacaacgaggacaacgagaagcuccggaagcccaagcacaagaagcugaagcagccggccgacgggaaccccgaccccaacgccaaccccaacguggacccgaacgccaaccccaacgucgaccccaacgccaaccccaacguggacccgaacgcgaaccccaacgccaaccccaacgccaaccccaacgccaacccgaacgcgaaccccaacgccaaccccaacgccaaccccaacgccaacccgaacgccaaccccaacgcgaaccccaacgccaaccccaacgccaacccgaacgccaaccccaacgccaaccccaacgcgaaccccaacgccaacccgugaggacuagucccuguucccagagcccacuuuuuuuucuuuuuuugaaauaaaauagccugucuuucagaucucaaaggcucuuuucagagccaccaaaaaaaaaaaaaaaaaaaaaaaaaaaaaaaaaaaaaaaaaaaaaaaaaaaaaaaaaaaaaaaaagaauu

SEQ ID NO: 6813 - RNA, 1157 nt, Artificial Sequence
  mRNA Design a-3 (hSL-A64-N5) comprising derived and/or modified sequence from Pf(3D7)__XP_001351122.1__HsALB_Pf-CSP(19-272) (opt1)
aggagagggcgcuuggcuugcaaggacccugagcugcggcauugaagcacacccaacccaacucgacugaagucagccucacugaaccggaucugagaaucuucucucucugggcuugccagggcucuccgaaccuagcuagcauccucuucaauuccaacuagaaagcuuaccaugaagugggugaccuucaucagccugcucuuccuguucuccagcgccuacucccuguuccaggaguaccagugcuacggcuccagcuccaacacccgggugcucaacgagcugaacuacgacaacgcggggaccaaccuguacaacgagcucgagaugaacuacuacggcaagcaggagaacugguacagccugaagaagaacucccgcagccugggggagaacgacgacggcaacaacgaggacaacgagaagcuccggaagcccaagcacaagaagcugaagcagccggccgacgggaaccccgaccccaacgccaaccccaacguggacccgaacgccaaccccaacgucgaccccaacgccaaccccaacguggacccgaacgcgaaccccaacgccaaccccaacgccaaccccaacgccaacccgaacgcgaaccccaacgccaaccccaacgccaaccccaacgccaacccgaacgccaaccccaacgcgaaccccaacgccaaccccaacgccaacccgaacgccaaccccaacgccaaccccaacgcgaaccccaacgccaacccgaacgccaaccccaacguggaccccaacgccaaccccaacgccaacccgaacgcgaaccccaacgccaaccccaacgccaacccgaacgccaaccccaacgccaaccccaacgcgaaccccaacgccaacccgaacgccaaccccaacgccaaccccaacgcgaaccccaacgccaacccgaacgccaaccccaacgccaaccccaacgccaaccccaacgcgaacccgaacgccaaccccugaggacuagucccuguucccagagcccacuuuuuuuucuuuuuuugaaauaaaauagccugucuuucagaucucaaaggcucuuuucagagccaccaaaaaaaaaaaaaaaaaaaaaaaaaaaaaaaaaaaaaaaaaaaaaaaaaaaaaaaaaaaaaaaaagaauu

SEQ ID NO: 6814 - RNA, 1319 nt, Artificial Sequence
  mRNA Design a-3 (hSL-A64-N5) comprising derived and/or modified sequence from Pf(3D7)__XP_001351122.1__HsALB_Pf-CSP(19-272)_L(AAY)_Pf-CSP(310-3 27)_L(AAY)_Pf-CSP(346-375) (opt1)
aggagagggcgcuuggcuugcaaggacccugagcugcggcauugaagcacacccaacccaacucgacugaagucagccucacugaaccggaucugagaaucuucucucucugggcuugccagggcucuccgaaccuagcuagcauccucuucaauuccaacuagaaagcuuaccaugaagugggugaccuucaucagccugcucuuccuguucuccagcgccuacucccuguuccaggaguaccagugcuacggcuccagcuccaacacccgggugcucaacgagcugaacuacgacaacgcggggaccaaccuguacaacgagcucgagaugaacuacuacggcaagcaggagaacugguacagccugaagaagaacucccgcagccugggggagaacgacgacggcaacaacgaggacaacgagaagcuccggaagcccaagcacaagaagcugaagcagccggccgacgggaaccccgaccccaacgccaaccccaacguggacccgaacgccaaccccaacgucgaccccaacgccaaccccaacguggacccgaacgcgaaccccaacgccaaccccaacgccaaccccaacgccaacccgaacgcgaaccccaacgccaaccccaacgccaaccccaacgccaacccgaacgccaaccccaacgcgaaccccaacgccaaccccaacgccaacccgaacgccaaccccaacgccaaccccaacgcgaaccccaacgccaacccgaacgccaaccccaacguggaccccaacgccaaccccaacgccaacccgaacgcgaaccccaacgccaaccccaacgccaacccgaacgccaaccccaacgccaaccccaacgcgaaccccaacgccaacccgaacgccaaccccaacgccaaccccaacgcgaaccccaacgccaacccgaacgccaaccccaacgccaaccccaacgccaaccccaacgcgaacccgaacgccaaccccgccgcguaugagccgagcgacaagcacaucaaggaguaccugaacaagauccagaacucccucgcggccuacaucaagcccggcuccgcgaacaagcccaaggacgagcuggacuacgccaacgacaucgagaagaagaucugcaagauggagaagugcagcugaggacuagucccuguucccagagcccacuuuuuuuucuuuuuuugaaauaaaauagccugucuuucagaucucaaaggcucuuuucagagccaccaaaaaaaaaaaaaaaaaaaaaaaaaaaaaaaaaaaaaaaaaaaaaaaaaaaaaaaaaaaaaaaaagaauu

SEQ ID NO: 6815 - RNA, 1280 nt, Artificial Sequence
  mRNA Design a-3 (hSL-A64-N5) comprising derived and/or modified sequence from Pf(3D7)__XP_001351122.1__HsALB_Pf-CSP(19-272)_L(AAY)_Pf-CSP(346-3 65)_L(AAY)_P2 (opt1)
aggagagggcgcuuggcuugcaaggacccugagcugcggcauugaagcacacccaacccaacucgacugaagucagccucacugaaccggaucugagaaucuucucucucugggcuugccagggcucuccgaaccuagcuagcauccucuucaauuccaacuagaaagcuuaccaugaagugggugaccuucaucagccugcucuuccuguucuccagcgccuacucccuguuccaggaguaccagugcuacggcuccagcuccaacacccgggugcucaacgagcugaacuacgacaacgcggggaccaaccuguacaacgagcucgagaugaacuacuacggcaagcaggagaacugguacagccugaagaagaacucccgcagccugggggagaacgacgacggcaacaacgaggacaacgagaagcuccggaagcccaagcacaagaagcugaagcagccggccgacgggaaccccgaccccaacgccaaccccaacguggacccgaacgccaaccccaacgucgaccccaacgccaaccccaacguggacccgaacgcgaaccccaacgccaaccccaacgccaaccccaacgccaacccgaacgcgaaccccaacgccaaccccaacgccaaccccaacgccaacccgaacgccaaccccaacgcgaaccccaacgccaaccccaacgccaacccgaacgccaaccccaacgccaaccccaacgcgaaccccaacgccaacccgaacgccaaccccaacguggaccccaacgccaaccccaacgccaacccgaacgcgaaccccaacgccaaccccaacgccaacccgaacgccaaccccaacgccaaccccaacgcgaaccccaacgccaacccgaacgccaaccccaacgccaaccccaacgcgaaccccaacgccaacccgaacgccaaccccaacgccaaccccaacgccaaccccaacgcgaacccgaacgccaaccccgccgcguauaucaagcccggcuccgcgaacaagcccaaggacgagcuggacuacgccaacgacaucgaggcggccuaccaguacaucaaggccaacagcaaguucaucggcaucaccgagcugugaggacuagucccuguucccagagcccacuuuuuuuucuuuuuuugaaauaaaauagccugucuuucagaucucaaaggcucuuuucagagccaccaaaaaaaaaaaaaaaaaaaaaaaaaaaaaaaaaaaaaaaaaaaaaaaaaaaaaaaaaaaaaaaaagaauu

SEQ ID NO: 6816 - RNA, 1274 nt, Artificial Sequence
  mRNA Design a-3 (hSL-A64-N5) comprising derived and/or modified sequence from Pf(3D7)__XP_001351122.1__HsALB_Pf-CSP(19-272)_L(AAY)_Pf-CSP(346-3 65)_L(AAY)_PADRE (opt1)
aggagagggcgcuuggcuugcaaggacccugagcugcggcauugaagcacacccaacccaacucgacugaagucagccucacugaaccggaucugagaaucuucucucucugggcuugccagggcucuccgaaccuagcuagcauccucuucaauuccaacuagaaagcuuaccaugaagugggugaccuucaucagccugcucuuccuguucuccagcgccuacucccuguuccaggaguaccagugcuacggcuccagcuccaacacccgggugcucaacgagcugaacuacgacaacgcggggaccaaccuguacaacgagcucgagaugaacuacuacggcaagcaggagaacugguacagccugaagaagaacucccgcagccugggggagaacgacgacggcaacaacgaggacaacgagaagcuccggaagcccaagcacaagaagcugaagcagccggccgacgggaaccccgaccccaacgccaaccccaacguggacccgaacgccaaccccaacgucgaccccaacgccaaccccaacguggacccgaacgcgaaccccaacgccaaccccaacgccaaccccaacgccaacccgaacgcgaaccccaacgccaaccccaacgccaaccccaacgccaacccgaacgccaaccccaacgcgaaccccaacgccaaccccaacgccaacccgaacgccaaccccaacgccaaccccaacgcgaaccccaacgccaacccgaacgccaaccccaacguggaccccaacgccaaccccaacgccaacccgaacgcgaaccccaacgccaaccccaacgccaacccgaacgccaaccccaacgccaaccccaacgcgaaccccaacgccaacccgaacgccaaccccaacgccaaccccaacgcgaaccccaacgccaacccgaacgccaaccccaacgccaaccccaacgccaaccccaacgcgaacccgaacgccaaccccgccgcguauaucaagcccggcuccgcgaacaagcccaaggacgagcuggacuacgccaacgacaucgaggcggccuacgccaaguucguggccgccuggacccugaaggcggccgccugaggacuagucccuguucccagagcccacuuuuuuuucuuuuuuugaaauaaaauagccugucuuucagaucucaaaggcucuuuucagagccaccaaaaaaaaaaaaaaaaaaaaaaaaaaaaaaaaaaaaaaaaaaaaaaaaaaaaaaaaaaaaaaaaagaauu

SEQ ID NO: 6817 - RNA, 1331 nt, Artificial Sequence
  mRNA Design a-3 (hSL-A64-N5) comprising derived and/or modified sequence from Pf(3D7)__XP_001351122.1__HsALB_Pf-CSP(19-272)_L(G4S)_Pf-CSP(310-3 27)_L(G4S)_Pf-CSP(346-375) (opt1)
aggagagggcgcuuggcuugcaaggacccugagcugcggcauugaagcacacccaacccaacucgacugaagucagccucacugaaccggaucugagaaucuucucucucugggcuugccagggcucuccgaaccuagcuagcauccucuucaauuccaacuagaaagcuuaccaugaagugggugaccuucaucagccugcucuuccuguucuccagcgccuacucccuguuccaggaguaccagugcuacggcuccagcuccaacacccgggugcucaacgagcugaacuacgacaacgcggggaccaaccuguacaacgagcucgagaugaacuacuacggcaagcaggagaacugguacagccugaagaagaacucccgcagccugggggagaacgacgacggcaacaacgaggacaacgagaagcuccggaagcccaagcacaagaagcugaagcagccggccgacgggaaccccgaccccaacgccaaccccaacguggacccgaacgccaaccccaacgucgaccccaacgccaaccccaacguggacccgaacgcgaaccccaacgccaaccccaacgccaaccccaacgccaacccgaacgcgaaccccaacgccaaccccaacgccaaccccaacgccaacccgaacgccaaccccaacgcgaaccccaacgccaaccccaacgccaacccgaacgccaaccccaacgccaaccccaacgcgaaccccaacgccaacccgaacgccaaccccaacguggaccccaacgccaaccccaacgccaacccgaacgcgaaccccaacgccaaccccaacgccaacccgaacgccaaccccaacgccaaccccaacgcgaaccccaacgccaacccgaacgccaaccccaacgccaaccccaacgcgaaccccaacgccaacccgaacgccaaccccaacgccaaccccaacgccaaccccaacgcgaacccgaacgccaaccccggaggcggaggaucugagccgagcgacaagcacaucaaggaguaccugaacaagauccagaacucccucggcggagguggaaguaucaagcccggcuccgcgaacaagcccaaggacgagcuggacuacgccaacgacaucgagaagaagaucugcaagauggagaagugcagcugaggacuagucccuguucccagagcccacuuuuuuuucuuuuuuugaaauaaaauagccugucuuucagaucucaaaggcucuuuucagagccaccaaaaaaaaaaaaaaaaaaaaaaaaaaaaaaaaaaaaaaaaaaaaaaaaaaaaaaaaaaaaaaaaagaauu

SEQ ID NO: 6818 - RNA, 1316 nt, Artificial Sequence
  mRNA Design a-3 (hSL-A64-N5) comprising derived and/or modified sequence from Pf(3D7)__XP_001351122.1__HsALB_Pf-CSP(19-272)_L(G4S)_Pf-CSP(310-3 27)_Pf-CSP(346-375) (opt1)
aggagagggcgcuuggcuugcaaggacccugagcugcggcauugaagcacacccaacccaacucgacugaagucagccucacugaaccggaucugagaaucuucucucucugggcuugccagggcucuccgaaccuagcuagcauccucuucaauuccaacuagaaagcuuaccaugaagugggugaccuucaucagccugcucuuccuguucuccagcgccuacucccuguuccaggaguaccagugcuacggcuccagcuccaacacccgggugcucaacgagcugaacuacgacaacgcggggaccaaccuguacaacgagcucgagaugaacuacuacggcaagcaggagaacugguacagccugaagaagaacucccgcagccugggggagaacgacgacggcaacaacgaggacaacgagaagcuccggaagcccaagcacaagaagcugaagcagccggccgacgggaaccccgaccccaacgccaaccccaacguggacccgaacgccaaccccaacgucgaccccaacgccaaccccaacguggacccgaacgcgaaccccaacgccaaccccaacgccaaccccaacgccaacccgaacgcgaaccccaacgccaaccccaacgccaaccccaacgccaacccgaacgccaaccccaacgcgaaccccaacgccaaccccaacgccaacccgaacgccaaccccaacgccaaccccaacgcgaaccccaacgccaacccgaacgccaaccccaacguggaccccaacgccaaccccaacgccaacccgaacgcgaaccccaacgccaaccccaacgccaacccgaacgccaaccccaacgccaaccccaacgcgaaccccaacgccaacccgaacgccaaccccaacgccaaccccaacgcgaaccccaacgccaacccgaacgccaaccccaacgccaaccccaacgccaaccccaacgcgaacccgaacgccaaccccggaggcggaggaucugagccgagcgacaagcacaucaaggaguaccugaacaagauccagaacucccucaucaagcccggcuccgcgaacaagcccaaggacgagcuggacuacgccaacgacaucgagaagaagaucugcaagauggagaagugcagcugaggacuagucccuguucccagagcccacuuuuuuuucuuuuuuugaaauaaaauagccugucuuucagaucucaaaggcucuuuucagagccaccaaaaaaaaaaaaaaaaaaaaaaaaaaaaaaaaaaaaaaaaaaaaaaaaaaaaaaaaaaaaaaaaagaauu

SEQ ID NO: 6819 - RNA, 1316 nt, Artificial Sequence
  mRNA Design a-3 (hSL-A64-N5) comprising derived and/or modified sequence from Pf(3D7)__XP_001351122.1__HsALB_Pf-CSP(19-325) (opt1)
aggagagggcgcuuggcuugcaaggacccugagcugcggcauugaagcacacccaacccaacucgacugaagucagccucacugaaccggaucugagaaucuucucucucugggcuugccagggcucuccgaaccuagcuagcauccucuucaauuccaacuagaaagcuuaccaugaagugggugaccuucaucagccugcucuuccuguucuccagcgccuacucccuguuccaggaguaccagugcuacggcuccagcuccaacacccgggugcucaacgagcugaacuacgacaacgcggggaccaaccuguacaacgagcucgagaugaacuacuacggcaagcaggagaacugguacagccugaagaagaacucccgcagccugggggagaacgacgacggcaacaacgaggacaacgagaagcuccggaagcccaagcacaagaagcugaagcagccggccgacgggaaccccgaccccaacgccaaccccaacguggacccgaacgccaaccccaacgucgaccccaacgccaaccccaacguggacccgaacgcgaaccccaacgccaaccccaacgccaaccccaacgccaacccgaacgcgaaccccaacgccaaccccaacgccaaccccaacgccaacccgaacgccaaccccaacgcgaaccccaacgccaaccccaacgccaacccgaacgccaaccccaacgccaaccccaacgcgaaccccaacgccaacccgaacgccaaccccaacguggaccccaacgccaaccccaacgccaacccgaacgcgaaccccaacgccaaccccaacgccaacccgaacgccaaccccaacgccaaccccaacgcgaaccccaacgccaacccgaacgccaaccccaacgccaaccccaacgcgaaccccaacgccaacccgaacgccaaccccaacgccaaccccaacgccaaccccaacgcgaacccgaacgccaaccccaacaagaacaaccagggcaacggccaggggcacaacaugcccaacgaccccaaccgcaacgucgacgagaacgccaacgccaacuccgccgugaagaacaacaacaacgaggagccgagcgacaagcacaucaaggaguaccugaacaagauccagaacugaggacuagucccuguucccagagcccacuuuuuuuucuuuuuuugaaauaaaauagccugucuuucagaucucaaaggcucuuuucagagccaccaaaaaaaaaaaaaaaaaaaaaaaaaaaaaaaaaaaaaaaaaaaaaaaaaaaaaaaaaaaaaaaaagaauu

SEQ ID NO: 6820 - RNA, 1493 nt, Artificial Sequence
  mRNA Design a-3 (hSL-A64-N5) comprising derived and/or modified sequence from Pf(3D7)__XP_001351122.1__HsALB_Pf-CSP(19-384) (opt1)
aggagagggcgcuuggcuugcaaggacccugagcugcggcauugaagcacacccaacccaacucgacugaagucagccucacugaaccggaucugagaaucuucucucucugggcuugccagggcucuccgaaccuagcuagcauccucuucaauuccaacuagaaagcuuaccaugaagugggugaccuucaucagccugcucuuccuguucuccagcgccuacucccuguuccaggaguaccagugcuacggcuccagcuccaacacccgggugcucaacgagcugaacuacgacaacgcggggaccaaccuguacaacgagcucgagaugaacuacuacggcaagcaggagaacugguacagccugaagaagaacucccgcagccugggggagaacgacgacggcaacaacgaggacaacgagaagcuccggaagcccaagcacaagaagcugaagcagccggccgacgggaaccccgaccccaacgccaaccccaacguggacccgaacgccaaccccaacgucgaccccaacgccaaccccaacguggacccgaacgcgaaccccaacgccaaccccaacgccaaccccaacgccaacccgaacgcgaaccccaacgccaaccccaacgccaaccccaacgccaacccgaacgccaaccccaacgcgaaccccaacgccaaccccaacgccaacccgaacgccaaccccaacgccaaccccaacgcgaaccccaacgccaacccgaacgccaaccccaacguggaccccaacgccaaccccaacgccaacccgaacgcgaaccccaacgccaaccccaacgccaacccgaacgccaaccccaacgccaaccccaacgcgaaccccaacgccaacccgaacgccaaccccaacgccaaccccaacgcgaaccccaacgccaacccgaacgccaaccccaacgccaaccccaacgccaaccccaacgcgaacccgaacgccaaccccaacaagaacaaccagggcaacggccaggggcacaacaugcccaacgaccccaaccgcaacgucgacgagaacgccaacgccaacuccgccgugaagaacaacaacaacgaggagccgagcgacaagcacaucaaggaguaccugaacaagauccagaacucccucagcacggaguggucccccugcagcgugaccugcggcaacgggauccagguccggaucaagcccggcuccgcgaacaagcccaaggacgagcuggacuacgccaacgacaucgagaagaagaucugcaagauggagaagugcagcuccguguucaacguggucaacagcuccugaggacuagucccuguucccagagcccacuuuuuuuucuuuuuuugaaauaaaauagccugucuuucagaucucaaaggcucuuuucagagccaccaaaaaaaaaaaaaaaaaaaaaaaaaaaaaaaaaaaaaaaaaaaaaaaaaaaaaaaaaaaaaaaaagaauu

SEQ ID NO: 6821 - RNA, 1631 nt, Artificial Sequence
  mRNA Design a-3 (hSL-A64-N5) comprising derived and/or modified sequence from Pf(3D7)__XP_001351122.1__HsALB_Pf-CSP(19-384)_TM domain HA (opt1)
aggagagggcgcuuggcuugcaaggacccugagcugcggcauugaagcacacccaacccaacucgacugaagucagccucacugaaccggaucugagaaucuucucucucugggcuugccagggcucuccgaaccuagcuagcauccucuucaauuccaacuagaaagcuuaccaugaagugggugaccuucaucagccugcucuuccuguucuccagcgccuacucccuguuccaggaguaccagugcuacggcuccagcuccaacacccgggugcucaacgagcugaacuacgacaacgcggggaccaaccuguacaacgagcucgagaugaacuacuacggcaagcaggagaacugguacagccugaagaagaacucccgcagccugggggagaacgacgacggcaacaacgaggacaacgagaagcuccggaagcccaagcacaagaagcugaagcagccggccgacgggaaccccgaccccaacgccaaccccaacguggacccgaacgccaaccccaacgucgaccccaacgccaaccccaacguggacccgaacgcgaaccccaacgccaaccccaacgccaaccccaacgccaacccgaacgcgaaccccaacgccaaccccaacgccaaccccaacgccaacccgaacgccaaccccaacgcgaaccccaacgccaaccccaacgccaacccgaacgccaaccccaacgccaaccccaacgcgaaccccaacgccaacccgaacgccaaccccaacguggaccccaacgccaaccccaacgccaacccgaacgcgaaccccaacgccaaccccaacgccaacccgaacgccaaccccaacgccaaccccaacgcgaaccccaacgccaacccgaacgccaaccccaacgccaaccccaacgcgaaccccaacgccaacccgaacgccaaccccaacgccaaccccaacgccaaccccaacgcgaacccgaacgccaaccccaacaagaacaaccagggcaacggccaggggcacaacaugcccaacgaccccaaccgcaacgucgacgagaacgccaacgccaacuccgccgugaagaacaacaacaacgaggagccgagcgacaagcacaucaaggaguaccugaacaagauccagaacucccucagcacggaguggucccccugcagcgugaccugcggcaacgggauccagguccggaucaagcccggcuccgcgaacaagcccaaggacgagcuggacuacgccaacgacaucgagaagaagaucugcaagauggagaagugcagcuccguguucaacguggucaacagcuccaagcucgaguccacgcggaucuaccagauccuggcgaucuacagcaccgucgccagcucccuggugcucguggucagccugggggccaucuccuucuggaugugcagcaacggcucccugcagugccgcaucugcaucugaggacuagucccuguucccagagcccacuuuuuuuucuuuuuuugaaauaaaauagccugucuuucagaucucaaaggcucuuuucagagccaccaaaaaaaaaaaaaaaaaaaaaaaaaaaaaaaaaaaaaaaaaaaaaaaaaaaaaaaaaaaaaaaaagaauu

SEQ ID NO: 6822 - RNA, 1343 nt, Artificial Sequence
  mRNA Design a-3 (hSL-A64-N5) comprising derived and/or modified sequence from Pf(3D7)__XP_001351122.1__HsALB_Pf-CSP(82-397) (opt1)
aggagagggcgcuuggcuugcaaggacccugagcugcggcauugaagcacacccaacccaacucgacugaagucagccucacugaaccggaucugagaaucuucucucucugggcuugccagggcucuccgaaccuagcuagcauccucuucaauuccaacuagaaagcuuaccaugaagugggugaccuucaucagccugcucuuccuguucuccagcgccuacuccgacaacgagaagcuccggaagcccaagcacaagaagcugaagcagccggccgacgggaaccccgaccccaacgccaaccccaacguggacccgaacgccaaccccaacgucgaccccaacgccaaccccaacguggacccgaacgcgaaccccaacgccaaccccaacgccaaccccaacgccaacccgaacgcgaaccccaacgccaaccccaacgccaaccccaacgccaacccgaacgccaaccccaacgcgaaccccaacgccaaccccaacgccaacccgaacgccaaccccaacgccaaccccaacgcgaaccccaacgccaacccgaacgccaaccccaacguggaccccaacgccaaccccaacgccaacccgaacgcgaaccccaacgccaaccccaacgccaacccgaacgccaaccccaacgccaaccccaacgcgaaccccaacgccaacccgaacgccaaccccaacgccaaccccaacgcgaaccccaacgccaacccgaacgccaaccccaacgccaaccccaacgccaaccccaacgcgaacccgaacgccaaccccaacaagaacaaccagggcaacggccaggggcacaacaugcccaacgaccccaaccgcaacgucgacgagaacgccaacgccaacuccgccgugaagaacaacaacaacgaggagccgagcgacaagcacaucaaggaguaccugaacaagauccagaacucccucagcacggaguggucccccugcagcgugaccugcggcaacgggauccagguccggaucaagcccggcuccgcgaacaagcccaaggacgagcuggacuacgccaacgacaucgagaagaagaucugcaagauggagaagugcagcuccguguucaacguggucaacagcuccaucgggcugaucauggugcucagcuuccuguuccugaacugaggacuagucccuguucccagagcccacuuuuuuuucuuuuuuugaaauaaaauagccugucuuucagaucucaaaggcucuuuucagagccaccaaaaaaaaaaaaaaaaaaaaaaaaaaaaaaaaaaaaaaaaaaaaaaaaaaaaaaaaaaaaaaaaagaauu

SEQ ID NO: 6823 - RNA, 695 nt, Artificial Sequence
  mRNA Design a-3 (hSL-A64-N5) comprising derived and/or modified sequence from Pf(3D7)__XP_001351122.1__HsALB_Pf-CSP(93-192) (opt1)
aggagagggcgcuuggcuugcaaggacccugagcugcggcauugaagcacacccaacccaacucgacugaagucagccucacugaaccggaucugagaaucuucucucucugggcuugccagggcucuccgaaccuagcuagcauccucuucaauuccaacuagaaagcuuaccaugaagugggugaccuucaucagccugcucuuccuguucuccagcgccuacuccaagcugaagcagccggccgacgggaaccccgaccccaacgccaaccccaacguggacccgaacgccaaccccaacgucgaccccaacgccaaccccaacguggacccgaacgcgaaccccaacgccaaccccaacgccaaccccaacgccaacccgaacgcgaaccccaacgccaaccccaacgccaaccccaacgccaacccgaacgccaaccccaacgcgaaccccaacgccaaccccaacgccaacccgaacgccaaccccaacgccaaccccaacgcgaaccccaacgccaacccgugaggacuagucccuguucccagagcccacuuuuuuuucuuuuuuugaaauaaaauagccugucuuucagaucucaaaggcucuuuucagagccaccaaaaaaaaaaaaaaaaaaaaaaaaaaaaaaaaaaaaaaaaaaaaaaaaaaaaaaaaaaaaaaaaagaauu

SEQ ID NO: 6824 - RNA, 935 nt, Artificial Sequence
  mRNA Design a-3 (hSL-A64-N5) comprising derived and/or modified sequence from Pf(3D7)__XP_001351122.1__HsALB_Pf-CSP(93-272) (opt1)
aggagagggcgcuuggcuugcaaggacccugagcugcggcauugaagcacacccaacccaacucgacugaagucagccucacugaaccggaucugagaaucuucucucucugggcuugccagggcucuccgaaccuagcuagcauccucuucaauuccaacuagaaagcuuaccaugaagugggugaccuucaucagccugcucuuccuguucuccagcgccuacuccaagcugaagcagccggccgacgggaaccccgaccccaacgccaaccccaacguggacccgaacgccaaccccaacgucgaccccaacgccaaccccaacguggacccgaacgcgaaccccaacgccaaccccaacgccaaccccaacgccaacccgaacgcgaaccccaacgccaaccccaacgccaaccccaacgccaacccgaacgccaaccccaacgcgaaccccaacgccaaccccaacgccaacccgaacgccaaccccaacgccaaccccaacgcgaaccccaacgccaacccgaacgccaaccccaacguggaccccaacgccaaccccaacgccaacccgaacgcgaaccccaacgccaaccccaacgccaacccgaacgccaaccccaacgccaaccccaacgcgaaccccaacgccaacccgaacgccaaccccaacgccaaccccaacgcgaaccccaacgccaacccgaacgccaaccccaacgccaaccccaacgccaaccccaacgcgaacccgaacgccaaccccugaggacuagucccuguucccagagcccacuuuuuuuucuuuuuuugaaauaaaauagccugucuuucagaucucaaaggcucuuuucagagccaccaaaaaaaaaaaaaaaaaaaaaaaaaaaaaaaaaaaaaaaaaaaaaaaaaaaaaaaaaaaaaaaaagaauu

SEQ ID NO: 6825 - RNA, 1310 nt, Artificial Sequence
  mRNA Design a-3 (hSL-A64-N5) comprising derived and/or modified sequence from Pf(3D7)__XP_001351122.1__HsALB_Pf-CSP(93-397) (opt1)
aggagagggcgcuuggcuugcaaggacccugagcugcggcauugaagcacacccaacccaacucgacugaagucagccucacugaaccggaucugagaaucuucucucucugggcuugccagggcucuccgaaccuagcuagcauccucuucaauuccaacuagaaagcuuaccaugaagugggugaccuucaucagccugcucuuccuguucuccagcgccuacuccaagcugaagcagccggccgacgggaaccccgaccccaacgccaaccccaacguggacccgaacgccaaccccaacgucgaccccaacgccaaccccaacguggacccgaacgcgaaccccaacgccaaccccaacgccaaccccaacgccaacccgaacgcgaaccccaacgccaaccccaacgccaaccccaacgccaacccgaacgccaaccccaacgcgaaccccaacgccaaccccaacgccaacccgaacgccaaccccaacgccaaccccaacgcgaaccccaacgccaacccgaacgccaaccccaacguggaccccaacgccaaccccaacgccaacccgaacgcgaaccccaacgccaaccccaacgccaacccgaacgccaaccccaacgccaaccccaacgcgaaccccaacgccaacccgaacgccaaccccaacgccaaccccaacgcgaaccccaacgccaacccgaacgccaaccccaacgccaaccccaacgccaaccccaacgcgaacccgaacgccaaccccaacaagaacaaccagggcaacggccaggggcacaacaugcccaacgaccccaaccgcaacgucgacgagaacgccaacgccaacuccgccgugaagaacaacaacaacgaggagccgagcgacaagcacaucaaggaguaccugaacaagauccagaacucccucagcacggaguggucccccugcagcgugaccugcggcaacgggauccagguccggaucaagcccggcuccgcgaacaagcccaaggacgagcuggacuacgccaacgacaucgagaagaagaucugcaagauggagaagugcagcuccguguucaacguggucaacagcuccaucgggcugaucauggugcucagcuuccuguuccugaacugaggacuagucccuguucccagagcccacuuuuuuuucuuuuuuugaaauaaaauagccugucuuucagaucucaaaggcucuuuucagagccaccaaaaaaaaaaaaaaaaaaaaaaaaaaaaaaaaaaaaaaaaaaaaaaaaaaaaaaaaaaaaaaaaagaauu

SEQ ID NO: 6826 - RNA, 680 nt, Artificial Sequence
  mRNA Design a-3 (hSL-A64-N5) comprising derived and/or modified sequence from Pf(3D7)__XP_001351122.1__HsALB_Pf-CSP(98-192) (opt1)
aggagagggcgcuuggcuugcaaggacccugagcugcggcauugaagcacacccaacccaacucgacugaagucagccucacugaaccggaucugagaaucuucucucucugggcuugccagggcucuccgaaccuagcuagcauccucuucaauuccaacuagaaagcuuaccaugaagugggugaccuucaucagccugcucuuccuguucuccagcgccuacuccgccgacgggaaccccgaccccaacgccaaccccaacguggacccgaacgccaaccccaacgucgaccccaacgccaaccccaacguggacccgaacgcgaaccccaacgccaaccccaacgccaaccccaacgccaacccgaacgcgaaccccaacgccaaccccaacgccaaccccaacgccaacccgaacgccaaccccaacgcgaaccccaacgccaaccccaacgccaacccgaacgccaaccccaacgccaaccccaacgcgaaccccaacgccaacccgugaggacuagucccuguucccagagcccacuuuuuuuucuuuuuuugaaauaaaauagccugucuuucagaucucaaaggcucuuuucagagccaccaaaaaaaaaaaaaaaaaaaaaaaaaaaaaaaaaaaaaaaaaaaaaaaaaaaaaaaaaaaaaaaaagaauu

SEQ ID NO: 6827 - RNA, 920 nt, Artificial Sequence
  mRNA Design a-3 (hSL-A64-N5) comprising derived and/or modified sequence from Pf(3D7)__XP_001351122.1__HsALB_Pf-CSP(98-272) (opt1)
aggagagggcgcuuggcuugcaaggacccugagcugcggcauugaagcacacccaacccaacucgacugaagucagccucacugaaccggaucugagaaucuucucucucugggcuugccagggcucuccgaaccuagcuagcauccucuucaauuccaacuagaaagcuuaccaugaagugggugaccuucaucagccugcucuuccuguucuccagcgccuacuccgccgacgggaaccccgaccccaacgccaaccccaacguggacccgaacgccaaccccaacgucgaccccaacgccaaccccaacguggacccgaacgcgaaccccaacgccaaccccaacgccaaccccaacgccaacccgaacgcgaaccccaacgccaaccccaacgccaaccccaacgccaacccgaacgccaaccccaacgcgaaccccaacgccaaccccaacgccaacccgaacgccaaccccaacgccaaccccaacgcgaaccccaacgccaacccgaacgccaaccccaacguggaccccaacgccaaccccaacgccaacccgaacgcgaaccccaacgccaaccccaacgccaacccgaacgccaaccccaacgccaaccccaacgcgaaccccaacgccaacccgaacgccaaccccaacgccaaccccaacgcgaaccccaacgccaacccgaacgccaaccccaacgccaaccccaacgccaaccccaacgcgaacccgaacgccaaccccugaggacuagucccuguucccagagcccacuuuuuuuucuuuuuuugaaauaaaauagccugucuuucagaucucaaaggcucuuuucagagccaccaaaaaaaaaaaaaaaaaaaaaaaaaaaaaaaaaaaaaaaaaaaaaaaaaaaaaaaaaaaaaaaaagaauu

SEQ ID NO: 6828 - RNA, 1226 nt, Artificial Sequence
  mRNA Design a-3 (hSL-A64-N5) comprising derived and/or modified sequence from Pf(3D7)__XP_001351122.1__HsALB_Pf-CSP(98-374) (opt1)
aggagagggcgcuuggcuugcaaggacccugagcugcggcauugaagcacacccaacccaacucgacugaagucagccucacugaaccggaucugagaaucuucucucucugggcuugccagggcucuccgaaccuagcuagcauccucuucaauuccaacuagaaagcuuaccaugaagugggugaccuucaucagccugcucuuccuguucuccagcgccuacuccgccgacgggaaccccgaccccaacgccaaccccaacguggacccgaacgccaaccccaacgucgaccccaacgccaaccccaacguggacccgaacgcgaaccccaacgccaaccccaacgccaaccccaacgccaacccgaacgcgaaccccaacgccaaccccaacgccaaccccaacgccaacccgaacgccaaccccaacgcgaaccccaacgccaaccccaacgccaacccgaacgccaaccccaacgccaaccccaacgcgaaccccaacgccaacccgaacgccaaccccaacguggaccccaacgccaaccccaacgccaacccgaacgcgaaccccaacgccaaccccaacgccaacccgaacgccaaccccaacgccaaccccaacgcgaaccccaacgccaacccgaacgccaaccccaacgccaaccccaacgcgaaccccaacgccaacccgaacgccaaccccaacgccaaccccaacgccaaccccaacgcgaacccgaacgccaaccccaacaagaacaaccagggcaacggccaggggcacaacaugcccaacgaccccaaccgcaacgucgacgagaacgccaacgccaacuccgccgugaagaacaacaacaacgaggagccgagcgacaagcacaucaaggaguaccugaacaagauccagaacucccucagcacggaguggucccccugcagcgugaccugcggcaacgggauccagguccggaucaagcccggcuccgcgaacaagcccaaggacgagcuggacuacgccaacgacaucgagaagaagaucugcaagauggagaagugcugaggacuagucccuguucccagagcccacuuuuuuuucuuuuuuugaaauaaaauagccugucuuucagaucucaaaggcucuuuucagagccaccaaaaaaaaaaaaaaaaaaaaaaaaaaaaaaaaaaaaaaaaaaaaaaaaaaaaaaaaaaaaaaaaagaauu

SEQ ID NO: 6829 - RNA, 1295 nt, Artificial Sequence
  mRNA Design a-3 (hSL-A64-N5) comprising derived and/or modified sequence from Pf(3D7)__XP_001351122.1__HsALB_Pf-CSP(98-397) (opt1)
aggagagggcgcuuggcuugcaaggacccugagcugcggcauugaagcacacccaacccaacucgacugaagucagccucacugaaccggaucugagaaucuucucucucugggcuugccagggcucuccgaaccuagcuagcauccucuucaauuccaacuagaaagcuuaccaugaagugggugaccuucaucagccugcucuuccuguucuccagcgccuacuccgccgacgggaaccccgaccccaacgccaaccccaacguggacccgaacgccaaccccaacgucgaccccaacgccaaccccaacguggacccgaacgcgaaccccaacgccaaccccaacgccaaccccaacgccaacccgaacgcgaaccccaacgccaaccccaacgccaaccccaacgccaacccgaacgccaaccccaacgcgaaccccaacgccaaccccaacgccaacccgaacgccaaccccaacgccaaccccaacgcgaaccccaacgccaacccgaacgccaaccccaacguggaccccaacgccaaccccaacgccaacccgaacgcgaaccccaacgccaaccccaacgccaacccgaacgccaaccccaacgccaaccccaacgcgaaccccaacgccaacccgaacgccaaccccaacgccaaccccaacgcgaaccccaacgccaacccgaacgccaaccccaacgccaaccccaacgccaaccccaacgcgaacccgaacgccaaccccaacaagaacaaccagggcaacggccaggggcacaacaugcccaacgaccccaaccgcaacgucgacgagaacgccaacgccaacuccgccgugaagaacaacaacaacgaggagccgagcgacaagcacaucaaggaguaccugaacaagauccagaacucccucagcacggaguggucccccugcagcgugaccugcggcaacgggauccagguccggaucaagcccggcuccgcgaacaagcccaaggacgagcuggacuacgccaacgacaucgagaagaagaucugcaagauggagaagugcagcuccguguucaacguggucaacagcuccaucgggcugaucauggugcucagcuuccuguuccugaacugaggacuagucccuguucccagagcccacuuuuuuuucuuuuuuugaaauaaaauagccugucuuucagaucucaaaggcucuuuucagagccaccaaaaaaaaaaaaaaaaaaaaaaaaaaaaaaaaaaaaaaaaaaaaaaaaaaaaaaaaaaaaaaaaagaauu

SEQ ID NO: 6830 - RNA, 1622 nt, Artificial Sequence
  mRNA Design a-3 (hSL-A64-N5) comprising derived and/or modified sequence from Pf(3D7)__XP_001351122.1__HsALB_Pf-CSP(199-377)_L(PVTN)_HBsAg (opt1)
aggagagggcgcuuggcuugcaaggacccugagcugcggcauugaagcacacccaacccaacucgacugaagucagccucacugaaccggaucugagaaucuucucucucugggcuugccagggcucuccgaaccuagcuagcauccucuucaauuccaacuagaaagcuuaccaugaaguggguaaccuuuauuucccuucuuuuucucuuuagcucggcuuauuccgaccccaacgccaaccccaacgccaacccgaacgcgaaccccaacgccaaccccaacgccaacccgaacgccaaccccaacgccaaccccaacgcgaaccccaacgccaacccgaacgccaaccccaacgccaaccccaacgcgaaccccaacgccaacccgaacgccaaccccaacgccaaccccaacgccaaccccaacgcgaacccgaacgccaaccccaacaagaacaaccagggcaacggccaggggcacaacaugcccaacgaccccaaccgcaacgucgacgagaacgccaacgccaacuccgccgugaagaacaacaacaacgaggagccgagcgacaagcacaucaaggaguaccugaacaagauccagaacucccucagcacggaguggucccccugcagcgugaccugcggcaacgggauccagguccggaucaagcccggcuccgcgaacaagcccaaggacgagcuggacuacgccaacgacaucgagaagaagaucugcaagauggagaagugcagcuccgugccggugacgaacauggagaacaucaccagcggcuuccuggggccccuccuggugcugcaggccggcuucuuccuccugacccgcauccugaccaucccgcagucccucgacagcugguggaccucccugaacuuccucgggggcagccccgucugccuggggcagaacucccagagccccaccuccaaccacagccccaccuccugcccgcccaucugccccggcuaccgguggaugugccugcgccgguucaucaucuuccuguucauccuccugcugugccucaucuuccugcuggugcuccuggacuaccagggcaugcugcccgugugcccgcucauccccgggagcacgaccaccaacaccggccccugcaagacgugcaccacccccgcccaggggaacuccauguucccgagcugcugcugcaccaagcccacggacggcaacugcacgugcauccccauccccuccagcugggcguucgccaaguaccugugggagugggccuccguccgcuucagcuggcugucccuccuggugccguucgugcagugguucgucgggcugagccccaccguguggcucuccgccaucuggaugaugugguacuggggccccagccuguacagcaucgugucccccuucaucccgcugcuccccaucuucuucugccugugggucuacaucugaggacuagucccuguucccagagcccacuuuuuuuucuuuuuuugaaauaaaauagccugucuuucagaucucaaaggcucuuuucagagccaccaaaaaaaaaaaaaaaaaaaaaaaaaaaaaaaaaaaaaaaaaaaaaaaaaaaaaaaaaaaaaaaaagaauu

SEQ ID NO: 6831 - RNA, 1532 nt, Artificial Sequence; identical to SEQ ID NO: 6801
  mRNA Design a-3 (hSL-A64-N5) comprising derived and/or modified sequence from Pf(3D7)__XP_001351122.1__Pf-CSP (opt1)

SEQ ID NO: 6832 - RNA, 1463 nt, Artificial Sequence; identical to SEQ ID NO: 6802
  mRNA Design a-3 (hSL-A64-N5) comprising derived and/or modified sequence from Pf(3D7)__XP_001351122.1__Pf-CSP(1-374) (opt1)

SEQ ID NO: 6833 - RNA, 1316 nt, Artificial Sequence; identical to SEQ ID NO: 6803
  mRNA Design a-3 (hSL-A64-N5) comprising derived and/or modified sequence from Pf(3D7)__XP_001351122.1__Pf-CSP(1-325) (opt1)

SEQ ID NO: 6834 - RNA, 1532 nt, Artificial Sequence
  mRNA Design a-3 (hSL-A64-N5) comprising derived and/or modified sequence from Pf(3D7)__XP_001351122.1__HsALB_Pf-CSP(19-397) (opt1)
aggagagggcgcuuggcuugcaaggacccugagcugcggcauugaagcacacccaacccaacucgacugaagucagccucacugaaccggaucugagaaucuucucucucugggcuugccagggcucuccgaaccuagcuagcauccucuucaauuccaacuagaaagcuuaccaugaagugggugaccuucaucagccuccuguuccuguucuccagcgccuacucccuguuccaggaguaccagugcuacggcagcuccagcaacacccgcguccucaacgagcugaacuacgacaacgccgggacgaaccuguacaacgagcucgagaugaacuacuacggcaagcaggagaacugguacucccugaagaagaacagccggucccugggggagaacgacgacggcaacaacgaggacaacgagaagcuccgcaagcccaagcacaagaagcugaagcagccggcggacgggaaccccgaccccaacgccaaccccaacguggacccgaacgccaaccccaacguggaccccaacgccaaccccaacgucgacccgaacgccaaccccaacgcgaaccccaacgccaaccccaacgccaacccgaacgccaaccccaacgcgaaccccaacgccaaccccaacgccaacccgaacgccaaccccaacgccaaccccaacgcgaaccccaacgccaacccgaacgccaaccccaacgccaaccccaacgccaaccccaacgcgaacccgaacgccaaccccaacguggaccccaacgccaaccccaacgccaacccgaacgccaaccccaacgcgaaccccaacgccaacccgaacgccaaccccaacgccaaccccaacgccaaccccaacgcgaacccgaacgccaaccccaacgccaaccccaacgccaaccccaacgcgaacccgaacgccaaccccaacgccaaccccaacgccaaccccaacgccaacccgaacgcgaaccccaacaagaacaaccagggcaacggccaggggcacaacaugcccaacgaccccaaccggaacguggacgagaacgccaacgccaacagcgccgucaagaacaacaacaacgaggagccguccgacaagcacaucaaggaguaccugaacaagauccagaacagccucuccaccgaguggagccccugcuccgugaccugcggcaacgggauccaggugcgcaucaagcccggcagcgccaacaagcccaaggacgagcuggacuacgcgaacgacaucgagaagaagaucugcaagauggagaagugcuccagcgucuucaacguggugaacuccagcaucgggcugaucaugguccucagcuuccuguuccugaacugaggacuagucccuguucccagagcccacuuuuuuuucuuuuuuugaaauaaaauagccugucuuucagaucucaaaggcucuuuucagagccaccaaaaaaaaaaaaaaaaaaaaaaaaaaaaaaaaaaaaaaaaaaaaaaaaaaaaaaaaaaaaaaaaagaauu

SEQ ID NO: 6835 - RNA, 1550 nt, Artificial Sequence
  mRNA Design a-3 (hSL-A64-N5) comprising derived and/or modified sequence from Pf(3D7)__XP_001351122.1__HsIns-iso1_Pf-CSP(19-397) (opt1)
aggagagggcgcuuggcuugcaaggacccugagcugcggcauugaagcacacccaacccaacucgacugaagucagccucacugaaccggaucugagaaucuucucucucugggcuugccagggcucuccgaaccuagcuagcauccucuucaauuccaacuagaaagcuuaccauggcccuguggaugcgccuccugccccugcucgcccugcuggcgcucuggggcccggaccccgccgccgcccuguuccaggaguaccagugcuacgggagcuccagcaacacccgggugcugaacgagcucaacuacgacaacgccggcaccaaccuguacaacgagcuggagaugaacuacuacgggaagcaggagaacugguacucccucaagaagaacagccgcucccugggcgagaacgacgacgggaacaacgaggacaacgagaagcugcggaagcccaagcacaagaagcucaagcagcccgcggacggcaacccggaccccaacgccaaccccaacgucgaccccaacgccaacccgaacguggaccccaacgccaaccccaacguggaccccaacgcgaacccgaacgccaaccccaacgccaaccccaacgccaaccccaacgccaacccgaacgcgaaccccaacgccaaccccaacgccaaccccaacgccaacccgaacgccaaccccaacgcgaaccccaacgccaaccccaacgccaacccgaacgccaaccccaacgccaaccccaacgcgaaccccaacgccaacccgaacgucgaccccaacgccaaccccaacgccaacccgaacgccaaccccaacgcgaaccccaacgccaaccccaacgccaacccgaacgccaaccccaacgcgaaccccaacgccaaccccaacgccaacccgaacgccaaccccaacgccaaccccaacgcgaaccccaacgccaacccgaacgccaaccccaacgccaaccccaacgccaaccccaacgcgaacccgaacaagaacaaccagggcaacgggcagggccacaacaugcccaacgaccccaaccgcaacguggacgagaacgccaacgccaacagcgccgugaagaacaacaacaacgaggagcccuccgacaagcacaucaaggaguaccugaacaagauccagaacagccuguccacggaguggagcccgugcuccgugaccugcgggaacggcauccagguccggaucaagcccgggagcgccaacaagcccaaggacgagcucgacuacgcgaacgacaucgagaagaagaucugcaagauggagaagugcuccagcguguucaacgucgugaacuccagcaucggccugaucauggugcuguccuuccucuuccugaacugaggacuagucccuguucccagagcccacuuuuuuuucuuuuuuugaaauaaaauagccugucuuucagaucucaaaggcucuuuucagagccaccaaaaaaaaaaaaaaaaaaaaaaaaaaaaaaaaaaaaaaaaaaaaaaaaaaaaaaaaaaaaaaaaagaauu

SEQ ID NO: 6836 - RNA, 1529 nt, Artificial Sequence
  mRNA Design a-3 (hSL-A64-N5) comprising derived and/or modified sequence from Pf(3D7)__XP_001351122.1__HsSPARC_Pf-CSP(19-397) (opt1)
aggagagggcgcuuggcuugcaaggacccugagcugcggcauugaagcacacccaacccaacucgacugaagucagccucacugaaccggaucugagaaucuucucucucugggcuugccagggcucuccgaaccuagcuagcauccucuucaauuccaacuagaaagcuuaccaugcgcgccuggaucuucuuccugcucugccuggccggccgggcgcuggcccucuuccaggaguaccagugcuacgggagcuccagcaacacccgcgugcugaacgagcugaacuacgacaacgccggcaccaaccucuacaacgagcuggagaugaacuacuacgggaagcaggagaacugguacucccugaagaagaacagccggucccucggcgagaacgacgacgggaacaacgaggacaacgagaagcugcgcaagcccaagcacaagaagcugaagcagccggccgacggcaaccccgaccccaacgccaaccccaacgucgacccgaacgcgaaccccaacguggaccccaacgccaaccccaacguggacccgaacgccaaccccaacgccaaccccaacgcgaaccccaacgccaacccgaacgccaaccccaacgccaaccccaacgccaaccccaacgcgaacccgaacgccaaccccaacgccaaccccaacgccaaccccaacgccaacccgaacgcgaaccccaacgccaaccccaacgccaaccccaacgccaacccgaacgccaaccccaacgucgaccccaacgcgaaccccaacgccaacccgaacgccaaccccaacgccaaccccaacgccaacccgaacgcgaaccccaacgccaaccccaacgccaaccccaacgccaacccgaacgcgaaccccaacgccaaccccaacgccaaccccaacgccaacccgaacgccaaccccaacgcgaaccccaacgccaaccccaacgccaacccgaacgccaaccccaacaagaacaaccagggcaacgggcagggccacaacaugcccaacgaccccaaccggaacguggacgagaacgccaacgcgaacagcgccgugaagaacaacaacaacgaggagccguccgacaagcacaucaaggaguaccucaacaagauccagaacagccuguccacggaguggagccccugcuccgugaccugcgggaacggcauccagguccgcaucaagcccgggagcgccaacaagcccaaggacgagcuggacuacgccaacgacaucgagaagaagaucugcaagauggagaagugcuccagcguguucaacgucgugaacuccagcaucggccucaucauggugcuguccuuccuguuccucaacugaggacuagucccuguucccagagcccacuuuuuuuucuuuuuuugaaauaaaauagccugucuuucagaucucaaaggcucuuuucagagccaccaaaaaaaaaaaaaaaaaaaaaaaaaaaaaaaaaaaaaaaaaaaaaaaaaaaaaaaaaaaaaaaaagaauu

SEQ ID NO: 6837 - RNA, 1532 nt, Artificial Sequence
  mRNA Design a-3 (hSL-A64-N5) comprising derived and/or modified sequence from Pf(3D7)__XP_001351122.1__IgE_Pf-CSP(19-397) (opt1)
aggagagggcgcuuggcuugcaaggacccugagcugcggcauugaagcacacccaacccaacucgacugaagucagccucacugaaccggaucugagaaucuucucucucugggcuugccagggcucuccgaaccuagcuagcauccucuucaauuccaacuagaaagcuuaccauggacuggaccuggauccuguuccucguggccgccgcgacccgcguccacagccuguuccaggaguaccagugcuacggcuccagcuccaacacgcgggugcugaacgagcucaacuacgacaacgccgggaccaaccuguacaacgagcuggagaugaacuacuacggcaagcaggagaacugguacagccucaagaagaacucccgcagccugggggagaacgacgacggcaacaacgaggacaacgagaagcugcggaagcccaagcacaagaagcucaagcagccggccgacgggaaccccgaccccaacgccaaccccaacguggacccgaacgccaaccccaacgucgaccccaacgcgaaccccaacguggacccgaacgccaaccccaacgccaaccccaacgccaaccccaacgcgaacccgaacgccaaccccaacgccaaccccaacgccaaccccaacgccaacccgaacgcgaaccccaacgccaaccccaacgccaaccccaacgccaacccgaacgccaaccccaacgcgaaccccaacgccaaccccaacgccaacccgaacgccaaccccaacguggaccccaacgccaaccccaacgcgaacccgaacgccaaccccaacgccaaccccaacgccaacccgaacgccaaccccaacgcgaaccccaacgccaaccccaacgccaacccgaacgccaaccccaacgcgaaccccaacgccaaccccaacgccaacccgaacgccaaccccaacgccaaccccaacgcgaaccccaacgccaacccgaacgccaaccccaacaagaacaaccagggcaacggccaggggcacaacaugcccaacgaccccaaccgcaacgucgacgagaacgccaacgccaacuccgcggugaagaacaacaacaacgaggagccgagcgacaagcacaucaaggaguaccugaacaagauccagaacucccugagcaccgaguggucccccugcagcgugaccugcggcaacgggauccagguccggaucaagcccggcuccgccaacaagcccaaggacgagcucgacuacgccaacgacaucgagaagaagaucugcaagauggagaagugcagcuccguguucaacguggucaacagcuccaucgggcugaucauggugcugagcuuccucuuccugaacugaggacuagucccuguucccagagcccacuuuuuuuucuuuuuuugaaauaaaauagccugucuuucagaucucaaaggcucuuuucagagccaccaaaaaaaaaaaaaaaaaaaaaaaaaaaaaaaaaaaaaaaaaaaaaaaaaaaaaaaaaaaaaaaaagaauu

SEQ ID NO: 6838 - RNA, 1697 nt, Artificial Sequence
  mRNA Design a-3 (hSL-A64-N5) comprising derived and/or modified sequence from Pf(3D7)__XP_001351122.1__Pf-CSP_L(G4SG4)_TM domain HA (opt1)
aggagagggcgcuuggcuugcaaggacccugagcugcggcauugaagcacacccaacccaacucgacugaagucagccucacugaaccggaucugagaaucuucucucucugggcuugccagggcucuccgaaccuagcuagcauccucuucaauuccaacuagaaagcuuaccaugaugcgcaagcuggccauccucagcguguccagcuuccuguucgucgaggcccuguuccaggaguaccagugcuacggcuccagcuccaacacccgggugcucaacgagcugaacuacgacaacgcggggaccaaccuguacaacgagcucgagaugaacuacuacggcaagcaggagaacugguacagccugaagaagaacucccgcagccugggggagaacgacgacggcaacaacgaggacaacgagaagcuccggaagcccaagcacaagaagcugaagcagccggccgacgggaaccccgaccccaacgccaaccccaacguggacccgaacgccaaccccaacgucgaccccaacgccaaccccaacguggacccgaacgcgaaccccaacgccaaccccaacgccaaccccaacgccaacccgaacgcgaaccccaacgccaaccccaacgccaaccccaacgccaacccgaacgccaaccccaacgcgaaccccaacgccaaccccaacgccaacccgaacgccaaccccaacgccaaccccaacgcgaaccccaacgccaacccgaacgccaaccccaacguggaccccaacgccaaccccaacgccaacccgaacgcgaaccccaacgccaaccccaacgccaacccgaacgccaaccccaacgccaaccccaacgcgaaccccaacgccaacccgaacgccaaccccaacgccaaccccaacgcgaaccccaacgccaacccgaacgccaaccccaacgccaaccccaacgccaaccccaacgcgaacccgaacgccaaccccaacaagaacaaccagggcaacggccaggggcacaacaugcccaacgaccccaaccgcaacgucgacgagaacgccaacgccaacuccgccgugaagaacaacaacaacgaggagccgagcgacaagcacaucaaggaguaccugaacaagauccagaacucccucagcacggaguggucccccugcagcgugaccugcggcaacgggauccagguccggaucaagcccggcuccgcgaacaagcccaaggacgagcuggacuacgccaacgacaucgagaagaagaucugcaagauggagaagugcagcuccguguucaacguggucaacagcuccaucgggcugaucauggugcucagcuuccuguuccugaacggcggcgggggcagcgggggcggcgggaagcucgaguccacccgcaucuaccagauccuggccaucuacagcaccguggccuccagccugguccucguggugucccugggcgccaucagcuucuggaugugcuccaacgggagccugcagugccggaucugcaucugaggacuagucccuguucccagagcccacuuuuuuuucuuuuuuugaaauaaaauagccugucuuucagaucucaaaggcucuuuucagagccaccaaaaaaaaaaaaaaaaaaaaaaaaaaaaaaaaaaaaaaaaaaaaaaaaaaaaaaaaaaaaaaaaagaauu

SEQ ID NO: 6839 - RNA, 1571 nt, Artificial Sequence
  mRNA Design a-3 (hSL-A64-N5) comprising derived and/or modified sequence from Pf(3D7)__XP_001351122.1__Pf-CSP(199-377)_L(PVTN)_HBsAg (opt1)
aggagagggcgcuuggcuugcaaggacccugagcugcggcauugaagcacacccaacccaacucgacugaagucagccucacugaaccggaucugagaaucuucucucucugggcuugccagggcucuccgaaccuagcuagcauccucuucaauuccaacuagaaagcuuaccauggaccccaacgccaacccgaacgccaaccccaacgcgaaccccaacgccaaccccaacgccaacccgaacgccaaccccaacgccaaccccaacgcgaaccccaacgccaacccgaacgccaaccccaacgccaaccccaacgcgaaccccaacgccaacccgaacgccaaccccaacgccaaccccaacgccaaccccaacgcgaacccgaacgccaaccccaacaagaacaaccagggcaacgggcagggccacaacaugcccaacgaccccaaccgcaacguggacgagaacgccaacgccaacagcgccgucaagaacaacaacaacgaggagccguccgacaagcacaucaaggaguaccugaacaagauccagaacagccucuccaccgaguggagccccugcuccgugaccugcgggaacggcauccaggugcggaucaagcccgggagcgcgaacaagcccaaggacgagcuggacuacgccaacgacaucgagaagaagaucugcaagauggagaagugcuccagcgucccggugacgaacauggagaacaucaccuccggcuuccugggcccccuccuggugcugcaggccggguucuuccuccugacccgcauccugaccaucccccagagccucgacuccugguggacgagccugaacuuccugggcgggucccccgucugccucggccagaacagccaguccccgaccagcaaccacucccccaccagcugcccgcccaucugccccggguaccgguggaugugccugcgccgguucaucaucuuccuguucauccuccugcugugccucaucuuccugcuggugcuccuggacuaccagggcaugcugcccgugugcccccucaucccgggcuccaccacgaccaacaccgggcccugcaagaccugcacgacccccgcccagggcaacagcauguuccccagcugcugcugcaccaagccgaccgacgggaacugcacgugcauccccauccccuccagcugggccuucgcgaaguaccugugggagugggccuccguccgcuucagcuggcugucccuccuggugcccuucgugcagugguucgucggccugagcccgaccguguggcucuccgccaucuggaugaugugguacuggggccccagccuguacuccaucgugagccccuucaucccccugcucccgaucuucuucugccugugggucuacaucugaggacuagucccuguucccagagcccacuuuuuuuucuuuuuuugaaauaaaauagccugucuuucagaucucaaaggcucuuuucagagccaccaaaaaaaaaaaaaaaaaaaaaaaaaaaaaaaaaaaaaaaaaaaaaaaaaaaaaaaaaaaaaaaaagaauu

SEQ ID NO: 6840 - RNA, 1613 nt, Artificial Sequence
  mRNA Design a-3 (hSL-A64-N5) comprising derived and/or modified sequence from Pf(3D7)__XP_001351122.1__Pf-CSP(199-387)_L(PVTN)_HBsAg (opt1)
aggagagggcgcuuggcuugcaaggacccugagcugcggcauugaagcacacccaacccaacucgacugaagucagccucacugaaccggaucugagaaucuucucucucugggcuugccagggcucuccgaaccuagcuagcauccucuucaauuccaacuagaaagcuuaccaugauggcccccgacccgaacgccaaccccaacgcgaaccccaacgccaaccccaacgccaacccgaacgccaaccccaacgccaaccccaacgcgaaccccaacgccaacccgaacgccaaccccaacgccaaccccaacgcgaaccccaacgccaacccgaacgccaaccccaacgccaaccccaacgccaaccccaacgcgaacccgaacgccaaccccaacgccaaccccaacaagaacaaccagggcaacgggcagggccacaacaugcccaacgacccgaaccgcaacguggacgagaacgccaacgccaacagcgcggucaagaacaacaacaacgaggagcccuccgacaagcacaucaaggaguaccugaacaagauccagaacagccucuccaccgaguggagccccugcuccgugaccugcgggaacggcauccaggugcggaucaagcccgggagcgccaacaagccgaaggacgagcuggacuacgccaacgacaucgagaagaagaucugcaagauggagaagugcuccagcgucuucaacguggugaacuccagcaucggccugggccccgucacgaacauggagaacaucaccuccggguuccucggcccccugcuggugcuccaggccggguucuuccugcugacccgcauccucaccaucccccagagccuggacuccugguggacgagccugaacuuccucggcggguccccggugugccugggccagaacagccagucccccaccagcaaccacucccccaccagcugcccgcccaucugccccggcuaccgguggaugugccugcgccgguucaucaucuuccucuucauccugcugcucugccugaucuuccugcucguccugcuggacuaccaggggaugcuccccgugugcccgcugauccccggcagcaccacgaccaacaccgggcccugcaagaccugcacgacccccgcccagggcaacuccauguucccgagcugcugcugcaccaagcccaccgacggcaacugcacgugcauccccauccccuccagcugggcguucgccaaguaccugugggagugggccuccgugcgcuucagcuggcucucccugcuggucccguucgugcagugguucguggggcucagccccaccgucuggcuguccgccaucuggaugaugugguacuggggccccagccuguacuccaucgugagccccuucaucccgcuccugcccaucuucuucugccuguggguguacaucugaggacuagucccuguucccagagcccacuuuuuuuucuuuuuuugaaauaaaauagccugucuuucagaucucaaaggcucuuuucagagccaccaaaaaaaaaaaaaaaaaaaaaaaaaaaaaaaaaaaaaaaaaaaaaaaaaaaaaaaaaaaaaaaaagaauu

SEQ ID NO: 6841 - RNA, 797 nt, Artificial Sequence
  mRNA Design a-3 (hSL-A64-N5) comprising derived and/or modified sequence from Pf(3D7)__XP_001351122.1__HsALB_Pf-CSP(19-152) (opt1)
aggagagggcgcuuggcuugcaaggacccugagcugcggcauugaagcacacccaacccaacucgacugaagucagccucacugaaccggaucugagaaucuucucucucugggcuugccagggcucuccgaaccuagcuagcauccucuucaauuccaacuagaaagcuuaccaugaagugggugaccuucaucagccuccuguuccuguucuccagcgccuacucccuguuccaggaguaccagugcuacggcagcuccagcaacacccgcguccucaacgagcugaacuacgacaacgccgggacgaaccuguacaacgagcucgagaugaacuacuacggcaagcaggagaacugguacucccugaagaagaacagccggucccugggggagaacgacgacggcaacaacgaggacaacgagaagcuccgcaagcccaagcacaagaagcugaagcagccggcggacgggaaccccgaccccaacgccaaccccaacguggacccgaacgccaaccccaacguggaccccaacgccaaccccaacgucgacccgaacgccaaccccaacgcgaaccccaacgccaaccccaacgccaacccgaacgccaaccccaacgcgaaccccugaggacuagucccuguucccagagcccacuuuuuuuucuuuuuuugaaauaaaauagccugucuuucagaucucaaaggcucuuuucagagccaccaaaaaaaaaaaaaaaaaaaaaaaaaaaaaaaaaaaaaaaaaaaaaaaaaaaaaaaaaaaaaaaaagaauu

SEQ ID NO: 6842 - RNA, 917 nt, Artificial Sequence
  mRNA Design a-3 (hSL-A64-N5) comprising derived and/or modified sequence from Pf(3D7)__XP_001351122.1__HsALB_Pf-CSP(19-192) (opt1)
aggagagggcgcuuggcuugcaaggacccugagcugcggcauugaagcacacccaacccaacucgacugaagucagccucacugaaccggaucugagaaucuucucucucugggcuugccagggcucuccgaaccuagcuagcauccucuucaauuccaacuagaaagcuuaccaugaagugggugaccuucaucagccuccuguuccuguucuccagcgccuacucccuguuccaggaguaccagugcuacggcagcuccagcaacacccgcguccucaacgagcugaacuacgacaacgccgggacgaaccuguacaacgagcucgagaugaacuacuacggcaagcaggagaacugguacucccugaagaagaacagccggucccugggggagaacgacgacggcaacaacgaggacaacgagaagcuccgcaagcccaagcacaagaagcugaagcagccggcggacgggaaccccgaccccaacgccaaccccaacguggacccgaacgccaaccccaacguggaccccaacgccaaccccaacgucgacccgaacgccaaccccaacgcgaaccccaacgccaaccccaacgccaacccgaacgccaaccccaacgcgaaccccaacgccaaccccaacgccaacccgaacgccaaccccaacgccaaccccaacgcgaaccccaacgccaacccgaacgccaaccccaacgccaaccccaacgccaaccccaacgcgaacccgugaggacuagucccuguucccagagcccacuuuuuuuucuuuuuuugaaauaaaauagccugucuuucagaucucaaaggcucuuuucagagccaccaaaaaaaaaaaaaaaaaaaaaaaaaaaaaaaaaaaaaaaaaaaaaaaaaaaaaaaaaaaaaaaaagaauu

SEQ ID NO: 6843 - RNA, 1157 nt, Artificial Sequence
  mRNA Design a-3 (hSL-A64-N5) comprising derived and/or modified sequence from Pf(3D7)__XP_001351122.1__HsALB_Pf-CSP(19-272) (opt1)
aggagagggcgcuuggcuugcaaggacccugagcugcggcauugaagcacacccaacccaacucgacugaagucagccucacugaaccggaucugagaaucuucucucucugggcuugccagggcucuccgaaccuagcuagcauccucuucaauuccaacuagaaagcuuaccaugaagugggugaccuucaucagccuccuguuccuguucuccagcgccuacucccuguuccaggaguaccagugcuacggcagcuccagcaacacccgcguccucaacgagcugaacuacgacaacgccgggacgaaccuguacaacgagcucgagaugaacuacuacggcaagcaggagaacugguacucccugaagaagaacagccggucccugggggagaacgacgacggcaacaacgaggacaacgagaagcuccgcaagcccaagcacaagaagcugaagcagccggcggacgggaaccccgaccccaacgccaaccccaacguggacccgaacgccaaccccaacguggaccccaacgccaaccccaacgucgacccgaacgccaaccccaacgcgaaccccaacgccaaccccaacgccaacccgaacgccaaccccaacgcgaaccccaacgccaaccccaacgccaacccgaacgccaaccccaacgccaaccccaacgcgaaccccaacgccaacccgaacgccaaccccaacgccaaccccaacgccaaccccaacgcgaacccgaacgccaaccccaacguggaccccaacgccaaccccaacgccaacccgaacgccaaccccaacgcgaaccccaacgccaacccgaacgccaaccccaacgccaaccccaacgccaaccccaacgcgaacccgaacgccaaccccaacgccaaccccaacgccaaccccaacgcgaacccgaacgccaaccccaacgccaaccccaacgccaaccccaacgccaacccgaacgcgaaccccugaggacuagucccuguucccagagcccacuuuuuuuucuuuuuuugaaauaaaauagccugucuuucagaucucaaaggcucuuuucagagccaccaaaaaaaaaaaaaaaaaaaaaaaaaaaaaaaaaaaaaaaaaaaaaaaaaaaaaaaaaaaaaaaaagaauu

SEQ ID NO: 6844 - RNA, 1319 nt, Artificial Sequence
  mRNA Design a-3 (hSL-A64-N5) comprising derived and/or modified sequence from Pf(3D7)__XP_001351122.1__HsALB_Pf-CSP(19-272)_L(AAY)_Pf-CSP(310-3 27)_L(AAY)_Pf-CSP(346-375) (opt1)
aggagagggcgcuuggcuugcaaggacccugagcugcggcauugaagcacacccaacccaacucgacugaagucagccucacugaaccggaucugagaaucuucucucucugggcuugccagggcucuccgaaccuagcuagcauccucuucaauuccaacuagaaagcuuaccaugaagugggugaccuucaucagccuccuguuccuguucuccagcgccuacucccuguuccaggaguaccagugcuacggcagcuccagcaacacccgcguccucaacgagcugaacuacgacaacgccgggacgaaccuguacaacgagcucgagaugaacuacuacggcaagcaggagaacugguacucccugaagaagaacagccggucccugggggagaacgacgacggcaacaacgaggacaacgagaagcuccgcaagcccaagcacaagaagcugaagcagccggcggacgggaaccccgaccccaacgccaaccccaacguggacccgaacgccaaccccaacguggaccccaacgccaaccccaacgucgacccgaacgccaaccccaacgcgaaccccaacgccaaccccaacgccaacccgaacgccaaccccaacgcgaaccccaacgccaaccccaacgccaacccgaacgccaaccccaacgccaaccccaacgcgaaccccaacgccaacccgaacgccaaccccaacgccaaccccaacgccaaccccaacgcgaacccgaacgccaaccccaacguggaccccaacgccaaccccaacgccaacccgaacgccaaccccaacgcgaaccccaacgccaacccgaacgccaaccccaacgccaaccccaacgccaaccccaacgcgaacccgaacgccaaccccaacgccaaccccaacgccaaccccaacgcgaacccgaacgccaaccccaacgccaaccccaacgccaaccccaacgccaacccgaacgcgaaccccgccgccuacgagcccagcgacaagcacaucaaggaguaccugaacaagauccagaacucccucgccgccuacaucaagcccggcagcgcgaacaagccgaaggacgagcuggacuacgccaacgacaucgagaagaagaucugcaagauggagaagugcuccugaggacuagucccuguucccagagcccacuuuuuuuucuuuuuuugaaauaaaauagccugucuuucagaucucaaaggcucuuuucagagccaccaaaaaaaaaaaaaaaaaaaaaaaaaaaaaaaaaaaaaaaaaaaaaaaaaaaaaaaaaaaaaaaaagaauu

SEQ ID NO: 6845 - RNA, 1280 nt, Artificial Sequence
  mRNA Design a-3 (hSL-A64-N5) comprising derived and/or modified sequence from Pf(3D7)__XP_001351122.1__HsALB_Pf-CSP(19-272)_L(AAY)_Pf-CSP(346-3 65)_L(AAY)_P2 (opt1)
aggagagggcgcuuggcuugcaaggacccugagcugcggcauugaagcacacccaacccaacucgacugaagucagccucacugaaccggaucugagaaucuucucucucugggcuugccagggcucuccgaaccuagcuagcauccucuucaauuccaacuagaaagcuuaccaugaagugggugaccuucaucagccuccuguuccuguucuccagcgccuacucccuguuccaggaguaccagugcuacggcagcuccagcaacacccgcguccucaacgagcugaacuacgacaacgccgggacgaaccuguacaacgagcucgagaugaacuacuacggcaagcaggagaacugguacucccugaagaagaacagccggucccugggggagaacgacgacggcaacaacgaggacaacgagaagcuccgcaagcccaagcacaagaagcugaagcagccggcggacgggaaccccgaccccaacgccaaccccaacguggacccgaacgccaaccccaacguggaccccaacgccaaccccaacgucgacccgaacgccaaccccaacgcgaaccccaacgccaaccccaacgccaacccgaacgccaaccccaacgcgaaccccaacgccaaccccaacgccaacccgaacgccaaccccaacgccaaccccaacgcgaaccccaacgccaacccgaacgccaaccccaacgccaaccccaacgccaaccccaacgcgaacccgaacgccaaccccaacguggaccccaacgccaaccccaacgccaacccgaacgccaaccccaacgcgaaccccaacgccaacccgaacgccaaccccaacgccaaccccaacgccaaccccaacgcgaacccgaacgccaaccccaacgccaaccccaacgccaaccccaacgcgaacccgaacgccaaccccaacgccaaccccaacgccaaccccaacgccaacccgaacgcgaaccccgccgccuacaucaagcccggcagcgccaacaagcccaaggacgagcuggacuacgccaacgacaucgaggcggccuaccaguacaucaaggccaacuccaaguucaucggcaucaccgagcucugaggacuagucccuguucccagagcccacuuuuuuuucuuuuuuugaaauaaaauagccugucuuucagaucucaaaggcucuuuucagagccaccaaaaaaaaaaaaaaaaaaaaaaaaaaaaaaaaaaaaaaaaaaaaaaaaaaaaaaaaaaaaaaaaagaauu

SEQ ID NO: 6846 - RNA, 1274 nt, Artificial Sequence
  mRNA Design a-3 (hSL-A64-N5) comprising derived and/or modified sequence from Pf(3D7)__XP_001351122.1__HsALB_Pf-CSP(19-272)_L(AAY)_Pf-CSP(346-3 65)_L(AAY)_PADRE (opt1)
aggagagggcgcuuggcuugcaaggacccugagcugcggcauugaagcacacccaacccaacucgacugaagucagccucacugaaccggaucugagaaucuucucucucugggcuugccagggcucuccgaaccuagcuagcauccucuucaauuccaacuagaaagcuuaccaugaagugggugaccuucaucagccuccuguuccuguucuccagcgccuacucccuguuccaggaguaccagugcuacggcagcuccagcaacacccgcguccucaacgagcugaacuacgacaacgccgggacgaaccuguacaacgagcucgagaugaacuacuacggcaagcaggagaacugguacucccugaagaagaacagccggucccugggggagaacgacgacggcaacaacgaggacaacgagaagcuccgcaagcccaagcacaagaagcugaagcagccggcggacgggaaccccgaccccaacgccaaccccaacguggacccgaacgccaaccccaacguggaccccaacgccaaccccaacgucgacccgaacgccaaccccaacgcgaaccccaacgccaaccccaacgccaacccgaacgccaaccccaacgcgaaccccaacgccaaccccaacgccaacccgaacgccaaccccaacgccaaccccaacgcgaaccccaacgccaacccgaacgccaaccccaacgccaaccccaacgccaaccccaacgcgaacccgaacgccaaccccaacguggaccccaacgccaaccccaacgccaacccgaacgccaaccccaacgcgaaccccaacgccaacccgaacgccaaccccaacgccaaccccaacgccaaccccaacgcgaacccgaacgccaaccccaacgccaaccccaacgccaaccccaacgcgaacccgaacgccaaccccaacgccaaccccaacgccaaccccaacgccaacccgaacgcgaaccccgccgccuacaucaagcccggcagcgccaacaagcccaaggacgagcuggacuacgccaacgacaucgaggcggccuacgccaaguucguggccgccuggacccucaaggcggccgccugaggacuagucccuguucccagagcccacuuuuuuuucuuuuuuugaaauaaaauagccugucuuucagaucucaaaggcucuuuucagagccaccaaaaaaaaaaaaaaaaaaaaaaaaaaaaaaaaaaaaaaaaaaaaaaaaaaaaaaaaaaaaaaaaagaauu

SEQ ID NO: 6847 - RNA, 1331 nt, Artificial Sequence
  mRNA Design a-3 (hSL-A64-N5) comprising derived and/or modified sequence from Pf(3D7)__XP_001351122.1__HsALB_Pf-CSP(19-272)_L(G4S)_Pf-CSP(310-3 27)_L(G4S)_Pf-CSP(346-375) (opt1)
aggagagggcgcuuggcuugcaaggacccugagcugcggcauugaagcacacccaacccaacucgacugaagucagccucacugaaccggaucugagaaucuucucucucugggcuugccagggcucuccgaaccuagcuagcauccucuucaauuccaacuagaaagcuuaccaugaagugggugaccuucaucagccuccuguuccuguucuccagcgccuacucccuguuccaggaguaccagugcuacggcagcuccagcaacacccgcguccucaacgagcugaacuacgacaacgccgggacgaaccuguacaacgagcucgagaugaacuacuacggcaagcaggagaacugguacucccugaagaagaacagccggucccugggggagaacgacgacggcaacaacgaggacaacgagaagcuccgcaagcccaagcacaagaagcugaagcagccggcggacgggaaccccgaccccaacgccaaccccaacguggacccgaacgccaaccccaacguggaccccaacgccaaccccaacgucgacccgaacgccaaccccaacgcgaaccccaacgccaaccccaacgccaacccgaacgccaaccccaacgcgaaccccaacgccaaccccaacgccaacccgaacgccaaccccaacgccaaccccaacgcgaaccccaacgccaacccgaacgccaaccccaacgccaaccccaacgccaaccccaacgcgaacccgaacgccaaccccaacguggaccccaacgccaaccccaacgccaacccgaacgccaaccccaacgcgaaccccaacgccaacccgaacgccaaccccaacgccaaccccaacgccaaccccaacgcgaacccgaacgccaaccccaacgccaaccccaacgccaaccccaacgcgaacccgaacgccaaccccaacgccaaccccaacgccaaccccaacgccaacccgaacgcgaaccccggcggcgggggcagcgagcccuccgacaagcacaucaaggaguaccugaacaagauccagaacagccucgggggcgggggcuccaucaagcccggcagcgccaacaagccgaaggacgagcuggacuacgccaacgacaucgagaagaagaucugcaagauggagaagugcuccugaggacuagucccuguucccagagcccacuuuuuuuucuuuuuuugaaauaaaauagccugucuuucagaucucaaaggcucuuuucagagccaccaaaaaaaaaaaaaaaaaaaaaaaaaaaaaaaaaaaaaaaaaaaaaaaaaaaaaaaaaaaaaaaaagaauu

SEQ ID NO: 6848 - RNA, 1316 nt, Artificial Sequence
  mRNA Design a-3 (hSL-A64-N5) comprising derived and/or modified sequence from Pf(3D7)__XP_001351122.1__HsALB_Pf-CSP(19-272)_L(G4S)_Pf-CSP(310-3 27)_Pf-CSP(346-375) (opt1)
aggagagggcgcuuggcuugcaaggacccugagcugcggcauugaagcacacccaacccaacucgacugaagucagccucacugaaccggaucugagaaucuucucucucugggcuugccagggcucuccgaaccuagcuagcauccucuucaauuccaacuagaaagcuuaccaugaagugggugaccuucaucagccuccuguuccuguucuccagcgccuacucccuguuccaggaguaccagugcuacggcagcuccagcaacacccgcguccucaacgagcugaacuacgacaacgccgggacgaaccuguacaacgagcucgagaugaacuacuacggcaagcaggagaacugguacucccugaagaagaacagccggucccugggggagaacgacgacggcaacaacgaggacaacgagaagcuccgcaagcccaagcacaagaagcugaagcagccggcggacgggaaccccgaccccaacgccaaccccaacguggacccgaacgccaaccccaacguggaccccaacgccaaccccaacgucgacccgaacgccaaccccaacgcgaaccccaacgccaaccccaacgccaacccgaacgccaaccccaacgcgaaccccaacgccaaccccaacgccaacccgaacgccaaccccaacgccaaccccaacgcgaaccccaacgccaacccgaacgccaaccccaacgccaaccccaacgccaaccccaacgcgaacccgaacgccaaccccaacguggaccccaacgccaaccccaacgccaacccgaacgccaaccccaacgcgaaccccaacgccaacccgaacgccaaccccaacgccaaccccaacgccaaccccaacgcgaacccgaacgccaaccccaacgccaaccccaacgccaaccccaacgcgaacccgaacgccaaccccaacgccaaccccaacgccaaccccaacgccaacccgaacgcgaaccccggcggcgggggcagcgagcccuccgacaagcacaucaaggaguaccugaacaagauccagaacagccucaucaagcccggguccgccaacaagccgaaggacgagcuggacuacgccaacgacaucgagaagaagaucugcaagauggagaagugcagcugaggacuagucccuguucccagagcccacuuuuuuuucuuuuuuugaaauaaaauagccugucuuucagaucucaaaggcucuuuucagagccaccaaaaaaaaaaaaaaaaaaaaaaaaaaaaaaaaaaaaaaaaaaaaaaaaaaaaaaaaaaaaaaaaagaauu

SEQ ID NO: 6849 - RNA, 1316 nt, Artificial Sequence
  mRNA Design a-3 (hSL-A64-N5) comprising derived and/or modified sequence from Pf(3D7)__XP_001351122.1__HsALB_Pf-CSP(19-325) (opt1)
aggagagggcgcuuggcuugcaaggacccugagcugcggcauugaagcacacccaacccaacucgacugaagucagccucacugaaccggaucugagaaucuucucucucugggcuugccagggcucuccgaaccuagcuagcauccucuucaauuccaacuagaaagcuuaccaugaagugggugaccuucaucagccuccuguuccuguucuccagcgccuacucccuguuccaggaguaccagugcuacggcagcuccagcaacacccgcguccucaacgagcugaacuacgacaacgccgggacgaaccuguacaacgagcucgagaugaacuacuacggcaagcaggagaacugguacucccugaagaagaacagccggucccugggggagaacgacgacggcaacaacgaggacaacgagaagcuccgcaagcccaagcacaagaagcugaagcagccggcggacgggaaccccgaccccaacgccaaccccaacguggacccgaacgccaaccccaacguggaccccaacgccaaccccaacgucgacccgaacgccaaccccaacgcgaaccccaacgccaaccccaacgccaacccgaacgccaaccccaacgcgaaccccaacgccaaccccaacgccaacccgaacgccaaccccaacgccaaccccaacgcgaaccccaacgccaacccgaacgccaaccccaacgccaaccccaacgccaaccccaacgcgaacccgaacgccaaccccaacguggaccccaacgccaaccccaacgccaacccgaacgccaaccccaacgcgaaccccaacgccaacccgaacgccaaccccaacgccaaccccaacgccaaccccaacgcgaacccgaacgccaaccccaacgccaaccccaacgccaaccccaacgcgaacccgaacgccaaccccaacgccaaccccaacgccaaccccaacgccaacccgaacgcgaaccccaacaagaacaaccagggcaacggccaggggcacaacaugcccaacgaccccaaccggaacguggacgagaacgccaacgccaacagcgccgucaagaacaacaacaacgaggagccguccgacaagcacaucaaggaguaccugaacaagauccagaacugaggacuagucccuguucccagagcccacuuuuuuuucuuuuuuugaaauaaaauagccugucuuucagaucucaaaggcucuuuucagagccaccaaaaaaaaaaaaaaaaaaaaaaaaaaaaaaaaaaaaaaaaaaaaaaaaaaaaaaaaaaaaaaaaagaauu

SEQ ID NO: 6850 - RNA, 1493 nt, Artificial Sequence
  mRNA Design a-3 (hSL-A64-N5) comprising derived and/or modified sequence from Pf(3D7)__XP_001351122.1__HsALB_Pf-CSP(19-384) (opt1)
aggagagggcgcuuggcuugcaaggacccugagcugcggcauugaagcacacccaacccaacucgacugaagucagccucacugaaccggaucugagaaucuucucucucugggcuugccagggcucuccgaaccuagcuagcauccucuucaauuccaacuagaaagcuuaccaugaagugggugaccuucaucagccuccuguuccuguucuccagcgccuacucccuguuccaggaguaccagugcuacggcagcuccagcaacacccgcguccucaacgagcugaacuacgacaacgccgggacgaaccuguacaacgagcucgagaugaacuacuacggcaagcaggagaacugguacucccugaagaagaacagccggucccugggggagaacgacgacggcaacaacgaggacaacgagaagcuccgcaagcccaagcacaagaagcugaagcagccggcggacgggaaccccgaccccaacgccaaccccaacguggacccgaacgccaaccccaacguggaccccaacgccaaccccaacgucgacccgaacgccaaccccaacgcgaaccccaacgccaaccccaacgccaacccgaacgccaaccccaacgcgaaccccaacgccaaccccaacgccaacccgaacgccaaccccaacgccaaccccaacgcgaaccccaacgccaacccgaacgccaaccccaacgccaaccccaacgccaaccccaacgcgaacccgaacgccaaccccaacguggaccccaacgccaaccccaacgccaacccgaacgccaaccccaacgcgaaccccaacgccaacccgaacgccaaccccaacgccaaccccaacgccaaccccaacgcgaacccgaacgccaaccccaacgccaaccccaacgccaaccccaacgcgaacccgaacgccaaccccaacgccaaccccaacgccaaccccaacgccaacccgaacgcgaaccccaacaagaacaaccagggcaacggccaggggcacaacaugcccaacgaccccaaccggaacguggacgagaacgccaacgccaacagcgccgucaagaacaacaacaacgaggagccguccgacaagcacaucaaggaguaccugaacaagauccagaacagccucuccaccgaguggagccccugcuccgugaccugcggcaacgggauccaggugcgcaucaagcccggcagcgccaacaagcccaaggacgagcuggacuacgcgaacgacaucgagaagaagaucugcaagauggagaagugcuccagcgucuucaacguggugaacuccagcugaggacuagucccuguucccagagcccacuuuuuuuucuuuuuuugaaauaaaauagccugucuuucagaucucaaaggcucuuuucagagccaccaaaaaaaaaaaaaaaaaaaaaaaaaaaaaaaaaaaaaaaaaaaaaaaaaaaaaaaaaaaaaaaaagaauu

SEQ ID NO: 6851 - RNA, 1631 nt, Artificial Sequence
  mRNA Design a-3 (hSL-A64-N5) comprising derived and/or modified sequence from Pf(3D7)__XP_001351122.1__HsALB_Pf-CSP(19-384)_TM domain HA (opt1)
aggagagggcgcuuggcuugcaaggacccugagcugcggcauugaagcacacccaacccaacucgacugaagucagccucacugaaccggaucugagaaucuucucucucugggcuugccagggcucuccgaaccuagcuagcauccucuucaauuccaacuagaaagcuuaccaugaagugggugaccuucaucagccuccuguuccuguucuccagcgccuacucccuguuccaggaguaccagugcuacggcagcuccagcaacacccgcguccucaacgagcugaacuacgacaacgccgggacgaaccuguacaacgagcucgagaugaacuacuacggcaagcaggagaacugguacucccugaagaagaacagccggucccugggggagaacgacgacggcaacaacgaggacaacgagaagcuccgcaagcccaagcacaagaagcugaagcagccggcggacgggaaccccgaccccaacgccaaccccaacguggacccgaacgccaaccccaacguggaccccaacgccaaccccaacgucgacccgaacgccaaccccaacgcgaaccccaacgccaaccccaacgccaacccgaacgccaaccccaacgcgaaccccaacgccaaccccaacgccaacccgaacgccaaccccaacgccaaccccaacgcgaaccccaacgccaacccgaacgccaaccccaacgccaaccccaacgccaaccccaacgcgaacccgaacgccaaccccaacguggaccccaacgccaaccccaacgccaacccgaacgccaaccccaacgcgaaccccaacgccaacccgaacgccaaccccaacgccaaccccaacgccaaccccaacgcgaacccgaacgccaaccccaacgccaaccccaacgccaaccccaacgcgaacccgaacgccaaccccaacgccaaccccaacgccaaccccaacgccaacccgaacgcgaaccccaacaagaacaaccagggcaacggccaggggcacaacaugcccaacgaccccaaccggaacguggacgagaacgccaacgccaacagcgccgucaagaacaacaacaacgaggagccguccgacaagcacaucaaggaguaccugaacaagauccagaacagccucuccaccgaguggagccccugcuccgugaccugcggcaacgggauccaggugcgcaucaagcccggcagcgccaacaagcccaaggacgagcuggacuacgcgaacgacaucgagaagaagaucugcaagauggagaagugcuccagcgucuucaacguggugaacuccagcaagcuggagagcacccggaucuaccagauccucgccaucuacuccacggucgccagcucccuggugcugguggucagccucggggccaucuccuucuggaugugcagcaacggcucccugcagugccgcaucugcaucugaggacuagucccuguucccagagcccacuuuuuuuucuuuuuuugaaauaaaauagccugucuuucagaucucaaaggcucuuuucagagccaccaaaaaaaaaaaaaaaaaaaaaaaaaaaaaaaaaaaaaaaaaaaaaaaaaaaaaaaaaaaaaaaaagaauu

SEQ ID NO: 6852 - RNA, 1343 nt, Artificial Sequence
  mRNA Design a-3 (hSL-A64-N5) comprising derived and/or modified sequence from Pf(3D7)__XP_001351122.1__HsALB_Pf-CSP(82-397) (opt1)
aggagagggcgcuuggcuugcaaggacccugagcugcggcauugaagcacacccaacccaacucgacugaagucagccucacugaaccggaucugagaaucuucucucucugggcuugccagggcucuccgaaccuagcuagcauccucuucaauuccaacuagaaagcuuaccaugaagugggugaccuucaucagccuccuguuccuguucuccagcgccuacuccgacaacgagaagcugcgcaagcccaagcacaagaagcucaagcagccggccgacggcaaccccgaccccaacgcgaaccccaacgucgacccgaacgccaaccccaacguggaccccaacgccaaccccaacguggacccgaacgccaaccccaacgccaaccccaacgcgaaccccaacgccaacccgaacgccaaccccaacgccaaccccaacgcgaaccccaacgccaacccgaacgccaaccccaacgccaaccccaacgccaaccccaacgcgaacccgaacgccaaccccaacgccaaccccaacgccaaccccaacgccaacccgaacgcgaaccccaacgucgaccccaacgccaaccccaacgccaacccgaacgccaaccccaacgccaaccccaacgcgaacccgaacgccaaccccaacgccaaccccaacgccaaccccaacgccaacccgaacgcgaaccccaacgccaaccccaacgccaaccccaacgccaacccgaacgcgaaccccaacgccaaccccaacgccaaccccaacgccaacccgaacgccaaccccaacaagaacaaccaggggaacggccaggggcacaacaugcccaacgaccccaaccggaacguggacgagaacgcgaacgccaacagcgccgugaagaacaacaacaacgaggagccguccgacaagcacaucaaggaguaccugaacaagauccagaacagccuguccaccgaguggagccccugcuccgucacgugcggcaacgggauccaggugcgcaucaagcccggcagcgccaacaagcccaaggacgagcucgacuacgccaacgacaucgagaagaagaucugcaagauggagaagugcuccagcguguucaacgucgugaacuccagcaucggccugaucauggugcuguccuuccucuuccugaacugaggacuagucccuguucccagagcccacuuuuuuuucuuuuuuugaaauaaaauagccugucuuucagaucucaaaggcucuuuucagagccaccaaaaaaaaaaaaaaaaaaaaaaaaaaaaaaaaaaaaaaaaaaaaaaaaaaaaaaaaaaaaaaaaagaauu

SEQ ID NO: 6853 - RNA, 695 nt, Artificial Sequence
  mRNA Design a-3 (hSL-A64-N5) comprising derived and/or modified sequence from Pf(3D7)__XP_001351122.1__HsALB_Pf-CSP(93-192) (opt1)
aggagagggcgcuuggcuugcaaggacccugagcugcggcauugaagcacacccaacccaacucgacugaagucagccucacugaaccggaucugagaaucuucucucucugggcuugccagggcucuccgaaccuagcuagcauccucuucaauuccaacuagaaagcuuaccaugaagugggugaccuucaucagccuccuguuccuguucuccagcgccuacuccaagcugaagcagcccgccgacggcaacccggaccccaacgcgaaccccaacgucgaccccaacgccaacccgaacguggaccccaacgccaaccccaacguggaccccaacgccaacccgaacgccaaccccaacgcgaaccccaacgccaaccccaacgccaacccgaacgccaaccccaacgcgaaccccaacgccaaccccaacgccaacccgaacgccaaccccaacgccaaccccaacgcgaaccccaacgccaacccgaacgccaaccccaacgccaaccccaacgccaaccccugaggacuagucccuguucccagagcccacuuuuuuuucuuuuuuugaaauaaaauagccugucuuucagaucucaaaggcucuuuucagagccaccaaaaaaaaaaaaaaaaaaaaaaaaaaaaaaaaaaaaaaaaaaaaaaaaaaaaaaaaaaaaaaaaagaauu

SEQ ID NO: 6854 - RNA, 935 nt, Artificial Sequence
  mRNA Design a-3 (hSL-A64-N5) comprising derived and/or modified sequence from Pf(3D7)__XP_001351122.1__HsALB_Pf-CSP(93-272) (opt1)
aggagagggcgcuuggcuugcaaggacccugagcugcggcauugaagcacacccaacccaacucgacugaagucagccucacugaaccggaucugagaaucuucucucucugggcuugccagggcucuccgaaccuagcuagcauccucuucaauuccaacuagaaagcuuaccaugaagugggugaccuucaucagccuccuguuccuguucuccagcgccuacuccaagcugaagcagcccgccgacggcaacccggaccccaacgcgaaccccaacgucgaccccaacgccaacccgaacguggaccccaacgccaaccccaacguggaccccaacgccaacccgaacgccaaccccaacgcgaaccccaacgccaaccccaacgccaacccgaacgccaaccccaacgcgaaccccaacgccaaccccaacgccaacccgaacgccaaccccaacgccaaccccaacgcgaaccccaacgccaacccgaacgccaaccccaacgccaaccccaacgccaaccccaacgcgaacccgaacgucgaccccaacgccaaccccaacgccaaccccaacgccaacccgaacgccaaccccaacgcgaaccccaacgccaacccgaacgccaaccccaacgccaaccccaacgccaaccccaacgcgaacccgaacgccaaccccaacgccaaccccaacgccaaccccaacgcgaacccgaacgccaaccccaacgccaaccccaacgccaaccccaacgccaacccgugaggacuagucccuguucccagagcccacuuuuuuuucuuuuuuugaaauaaaauagccugucuuucagaucucaaaggcucuuuucagagccaccaaaaaaaaaaaaaaaaaaaaaaaaaaaaaaaaaaaaaaaaaaaaaaaaaaaaaaaaaaaaaaaaagaauu

SEQ ID NO: 6855 - RNA, 1310 nt, Artificial Sequence
  mRNA Design a-3 (hSL-A64-N5) comprising derived and/or modified sequence from Pf(3D7)__XP_001351122.1__HsALB_Pf-CSP(93-397) (opt1)
aggagagggcgcuuggcuugcaaggacccugagcugcggcauugaagcacacccaacccaacucgacugaagucagccucacugaaccggaucugagaaucuucucucucugggcuugccagggcucuccgaaccuagcuagcauccucuucaauuccaacuagaaagcuuaccaugaagugggugaccuucaucagccuccuguuccuguucuccagcgccuacuccaagcugaagcagcccgccgacggcaacccggaccccaacgcgaaccccaacgucgaccccaacgccaacccgaacguggaccccaacgccaaccccaacguggaccccaacgccaacccgaacgccaaccccaacgcgaaccccaacgccaaccccaacgccaacccgaacgccaaccccaacgcgaaccccaacgccaaccccaacgccaacccgaacgccaaccccaacgccaaccccaacgcgaaccccaacgccaacccgaacgccaaccccaacgccaaccccaacgccaaccccaacgcgaacccgaacgucgaccccaacgccaaccccaacgccaaccccaacgccaacccgaacgccaaccccaacgcgaaccccaacgccaacccgaacgccaaccccaacgccaaccccaacgccaaccccaacgcgaacccgaacgccaaccccaacgccaaccccaacgccaaccccaacgcgaacccgaacgccaaccccaacgccaaccccaacgccaaccccaacgccaacccgaacaagaacaaccaggggaacggccaggggcacaacaugcccaacgaccccaaccgcaacguggacgagaacgcgaacgccaacagcgccgugaagaacaacaacaacgaggagcccuccgacaagcacaucaaggaguaccucaacaagauccagaacagccuguccaccgaguggagcccgugcuccgucacgugcggcaacgggauccaggugcggaucaagcccggcagcgccaacaagcccaaggacgagcuggacuacgccaacgacaucgagaagaagaucugcaagauggagaagugcuccagcguguucaacgucgugaacuccagcaucggccucaucauggugcuguccuuccuguuccucaacugaggacuagucccuguucccagagcccacuuuuuuuucuuuuuuugaaauaaaauagccugucuuucagaucucaaaggcucuuuucagagccaccaaaaaaaaaaaaaaaaaaaaaaaaaaaaaaaaaaaaaaaaaaaaaaaaaaaaaaaaaaaaaaaaagaauu

SEQ ID NO: 6856 - RNA, 680 nt, Artificial Sequence
  mRNA Design a-3 (hSL-A64-N5) comprising derived and/or modified sequence from Pf(3D7)__XP_001351122.1__HsALB_Pf-CSP(98-192) (opt1)
aggagagggcgcuuggcuugcaaggacccugagcugcggcauugaagcacacccaacccaacucgacugaagucagccucacugaaccggaucugagaaucuucucucucugggcuugccagggcucuccgaaccuagcuagcauccucuucaauuccaacuagaaagcuuaccaugaagugggugaccuucaucagccuccuguuccuguucuccagcgccuacuccgccgacggcaaccccgacccgaacgcgaaccccaacgucgaccccaacgccaaccccaacguggacccgaacgccaaccccaacguggaccccaacgccaaccccaacgccaacccgaacgcgaaccccaacgccaaccccaacgccaaccccaacgccaacccgaacgcgaaccccaacgccaaccccaacgccaaccccaacgccaacccgaacgccaaccccaacgcgaaccccaacgccaaccccaacgccaacccgaacgccaaccccaacgccaaccccugaggacuagucccuguucccagagcccacuuuuuuuucuuuuuuugaaauaaaauagccugucuuucagaucucaaaggcucuuuucagagccaccaaaaaaaaaaaaaaaaaaaaaaaaaaaaaaaaaaaaaaaaaaaaaaaaaaaaaaaaaaaaaaaaagaauu

SEQ ID NO: 6857 - RNA, 920 nt, Artificial Sequence
  mRNA Design a-3 (hSL-A64-N5) comprising derived and/or modified sequence from Pf(3D7)__XP_001351122.1__HsALB_Pf-CSP(98-272) (opt1)
aggagagggcgcuuggcuugcaaggacccugagcugcggcauugaagcacacccaacccaacucgacugaagucagccucacugaaccggaucugagaaucuucucucucugggcuugccagggcucuccgaaccuagcuagcauccucuucaauuccaacuagaaagcuuaccaugaagugggugaccuucaucagccuccuguuccuguucuccagcgccuacuccgccgacggcaaccccgacccgaacgcgaaccccaacgucgaccccaacgccaaccccaacguggacccgaacgccaaccccaacguggaccccaacgccaaccccaacgccaacccgaacgcgaaccccaacgccaaccccaacgccaaccccaacgccaacccgaacgcgaaccccaacgccaaccccaacgccaaccccaacgccaacccgaacgccaaccccaacgcgaaccccaacgccaaccccaacgccaacccgaacgccaaccccaacgccaaccccaacgcgaaccccaacgucgacccgaacgccaaccccaacgccaaccccaacgccaaccccaacgccaacccgaacgcgaaccccaacgccaaccccaacgccaacccgaacgccaaccccaacgccaaccccaacgcgaaccccaacgccaacccgaacgccaaccccaacgccaaccccaacgcgaaccccaacgccaacccgaacgccaaccccaacgccaaccccaacgccaaccccugaggacuagucccuguucccagagcccacuuuuuuuucuuuuuuugaaauaaaauagccugucuuucagaucucaaaggcucuuuucagagccaccaaaaaaaaaaaaaaaaaaaaaaaaaaaaaaaaaaaaaaaaaaaaaaaaaaaaaaaaaaaaaaaaagaauu

SEQ ID NO: 6858 - RNA, 1226 nt, Artificial Sequence
  mRNA Design a-3 (hSL-A64-N5) comprising derived and/or modified sequence from Pf(3D7)__XP_001351122.1__HsALB_Pf-CSP(98-374) (opt1)
aggagagggcgcuuggcuugcaaggacccugagcugcggcauugaagcacacccaacccaacucgacugaagucagccucacugaaccggaucugagaaucuucucucucugggcuugccagggcucuccgaaccuagcuagcauccucuucaauuccaacuagaaagcuuaccaugaagugggugaccuucaucagccuccuguuccuguucuccagcgccuacuccgccgacggcaaccccgacccgaacgcgaaccccaacgucgaccccaacgccaaccccaacguggacccgaacgccaaccccaacguggaccccaacgccaaccccaacgccaacccgaacgcgaaccccaacgccaaccccaacgccaaccccaacgccaacccgaacgcgaaccccaacgccaaccccaacgccaaccccaacgccaacccgaacgccaaccccaacgcgaaccccaacgccaaccccaacgccaacccgaacgccaaccccaacgccaaccccaacgcgaaccccaacgucgacccgaacgccaaccccaacgccaaccccaacgccaaccccaacgccaacccgaacgcgaaccccaacgccaaccccaacgccaacccgaacgccaaccccaacgccaaccccaacgcgaaccccaacgccaacccgaacgccaaccccaacgccaaccccaacgcgaaccccaacgccaacccgaacgccaaccccaacgccaaccccaacgccaaccccaacaagaacaaccaggggaacggccaggggcacaacaugccgaacgaccccaaccgcaacguggacgagaacgcgaacgccaacagcgccgugaagaacaacaacaacgaggagcccuccgacaagcacaucaaggaguaccugaacaagauccagaacagccucuccaccgaguggagccccugcuccgucacgugcggcaacgggauccaggugcggaucaagccgggcagcgccaacaagcccaaggacgagcuggacuacgccaacgacaucgagaagaagaucugcaagauggagaagugcugaggacuagucccuguucccagagcccacuuuuuuuucuuuuuuugaaauaaaauagccugucuuucagaucucaaaggcucuuuucagagccaccaaaaaaaaaaaaaaaaaaaaaaaaaaaaaaaaaaaaaaaaaaaaaaaaaaaaaaaaaaaaaaaaagaauu

SEQ ID NO: 6859 - RNA, 1295 nt, Artificial Sequence
  mRNA Design a-3 (hSL-A64-N5) comprising derived and/or modified sequence from Pf(3D7)__XP_001351122.1__HsALB_Pf-CSP(98-397) (opt1)
aggagagggcgcuuggcuugcaaggacccugagcugcggcauugaagcacacccaacccaacucgacugaagucagccucacugaaccggaucugagaaucuucucucucugggcuugccagggcucuccgaaccuagcuagcauccucuucaauuccaacuagaaagcuuaccaugaagugggugaccuucaucagccuccuguuccuguucuccagcgccuacuccgccgacggcaaccccgacccgaacgcgaaccccaacgucgaccccaacgccaaccccaacguggacccgaacgccaaccccaacguggaccccaacgccaaccccaacgccaacccgaacgcgaaccccaacgccaaccccaacgccaaccccaacgccaacccgaacgcgaaccccaacgccaaccccaacgccaaccccaacgccaacccgaacgccaaccccaacgcgaaccccaacgccaaccccaacgccaacccgaacgccaaccccaacgccaaccccaacgcgaaccccaacgucgacccgaacgccaaccccaacgccaaccccaacgccaaccccaacgccaacccgaacgcgaaccccaacgccaaccccaacgccaacccgaacgccaaccccaacgccaaccccaacgcgaaccccaacgccaacccgaacgccaaccccaacgccaaccccaacgcgaaccccaacgccaacccgaacgccaaccccaacgccaaccccaacgccaaccccaacaagaacaaccaggggaacggccaggggcacaacaugccgaacgaccccaaccgcaacguggacgagaacgcgaacgccaacagcgccgugaagaacaacaacaacgaggagcccuccgacaagcacaucaaggaguaccugaacaagauccagaacagccucuccaccgaguggagccccugcuccgucacgugcggcaacgggauccaggugcggaucaagccgggcagcgccaacaagcccaaggacgagcuggacuacgccaacgacaucgagaagaagaucugcaagauggagaagugcuccagcguguucaacgucgugaacuccagcaucggccugaucauggugcucuccuuccuguuccugaacugaggacuagucccuguucccagagcccacuuuuuuuucuuuuuuugaaauaaaauagccugucuuucagaucucaaaggcucuuuucagagccaccaaaaaaaaaaaaaaaaaaaaaaaaaaaaaaaaaaaaaaaaaaaaaaaaaaaaaaaaaaaaaaaaagaauu

SEQ ID NO: 6860 - RNA, 1622 nt, Artificial Sequence
  mRNA Design a-3 (hSL-A64-N5) comprising derived and/or modified sequence from Pf(3D7)__XP_001351122.1__HsALB_Pf-CSP(199-377)_L(PVTN)_HBsAg (opt1)
aggagagggcgcuuggcuugcaaggacccugagcugcggcauugaagcacacccaacccaacucgacugaagucagccucacugaaccggaucugagaaucuucucucucugggcuugccagggcucuccgaaccuagcuagcauccucuucaauuccaacuagaaagcuuaccaugaagugggugaccuucaucagccuccuguuccuguucuccagcgccuacuccgaccccaacgccaacccgaacgcgaaccccaacgccaaccccaacgccaaccccaacgccaacccgaacgccaaccccaacgcgaaccccaacgccaaccccaacgccaacccgaacgccaaccccaacgcgaaccccaacgccaaccccaacgccaacccgaacgccaaccccaacgccaaccccaacgcgaaccccaacgccaacccgaacgccaaccccaacaagaacaaccagggcaacgggcagggccacaacaugcccaacgaccccaaccgcaacgucgacgagaacgccaacgccaacagcgcggugaagaacaacaacaacgaggagccguccgacaagcacaucaaggaguaccugaacaagauccagaacagccucuccaccgaguggagccccugcuccgugaccugcgggaacggcauccagguccggaucaagcccgggagcgccaacaagcccaaggacgagcuggacuacgccaacgacaucgagaagaagaucugcaagauggagaagugcuccagcgugccggugaccaacauggagaacaucaccuccggcuuccugggcccccuccugguccugcaggccggguucuuccuccugacccgcauccugacgaucccccagagccucgacuccugguggaccagccugaacuuccugggcgggucccccgugugccucggccagaacagccaguccccgaccagcaaccacagccccaccuccugcccgcccaucugccccggguaccgguggaugugccugcgccgguucaucaucuuccuguucauccuccugcugugccucaucuuccugcuggugcuccuggacuaccagggcaugcugcccgucugcccccucaucccgggcagcacgaccaccaacaccgggcccugcaagacgugcaccacccccgcccagggcaacuccauguuccccagcugcugcugcaccaagccgacggacgggaacugcacgugcauccccauccccuccagcugggcguucgccaaguaccugugggagugggccuccgugcgcuucagcuggcugucccuccuggugcccuucguccagugguucgugggccugagcccgaccguguggcucuccgccaucuggaugaugugguacuggggccccagccuguacuccaucgucagccccuucaucccccugcucccgaucuucuucugccuguggguguacaucugaggacuagucccuguucccagagcccacuuuuuuuucuuuuuuugaaauaaaauagccugucuuucagaucucaaaggcucuuuucagagccaccaaaaaaaaaaaaaaaaaaaaaaaaaaaaaaaaaaaaaaaaaaaaaaaaaaaaaaaaaaaaaaaaagaauu

SEQ ID NO: 6861 - RNA, 1532 nt, Artificial Sequence
  mRNA Design a-3 (hSL-A64-N5) comprising derived and/or modified sequence from Pf(3D7)__XP_001351122.1__Pf-CSP (opt2)
aggagagggcgcuuggcuugcaaggacccugagcugcggcauugaagcacacccaacccaacucgacugaagucagccucacugaaccggaucugagaaucuucucucucugggcuugccagggcucuccgaaccuagcuagcauccucuucaauuccaacuagaaagcuuaccaugaugcgcaagcucgccauccucuccgucuccuccuuccucuucgucgaggcccucuuccaggaguaccagugcuacggcuccuccuccaacacccgcguccucaacgagcucaacuacgacaacgccggcaccaaccucuacaacgagcucgagaugaacuacuacggcaagcaggagaacugguacucccucaagaagaacucccgcucccucggcgagaacgacgacggcaacaacgaggacaacgagaagcuccgcaagcccaagcacaagaagcucaagcagcccgccgacggcaaccccgaccccaacgccaaccccaacgucgaccccaacgccaaccccaacgucgaccccaacgccaaccccaacgucgaccccaacgccaaccccaacgccaaccccaacgccaaccccaacgccaaccccaacgccaaccccaacgccaaccccaacgccaaccccaacgccaaccccaacgccaaccccaacgccaaccccaacgccaaccccaacgccaaccccaacgccaaccccaacgccaaccccaacgccaaccccaacgccaaccccaacgccaaccccaacgucgaccccaacgccaaccccaacgccaaccccaacgccaaccccaacgccaaccccaacgccaaccccaacgccaaccccaacgccaaccccaacgccaaccccaacgccaaccccaacgccaaccccaacgccaaccccaacgccaaccccaacgccaaccccaacgccaaccccaacgccaaccccaacgccaaccccaacgccaaccccaacgccaaccccaacaagaacaaccagggcaacggccagggccacaacaugcccaacgaccccaaccgcaacgucgacgagaacgccaacgccaacuccgccgucaagaacaacaacaacgaggagcccuccgacaagcacaucaaggaguaccucaacaagauccagaacucccucuccaccgaguggucccccugcuccgucaccugcggcaacggcauccagguccgcaucaagcccggcuccgccaacaagcccaaggacgagcucgacuacgccaacgacaucgagaagaagaucugcaagauggagaagugcuccuccgucuucaacgucgucaacuccuccaucggccucaucaugguccucuccuuccucuuccucaacugaggacuagucccuguucccagagcccacuuuuuuuucuuuuuuugaaauaaaauagccugucuuucagaucucaaaggcucuuuucagagccaccaaaaaaaaaaaaaaaaaaaaaaaaaaaaaaaaaaaaaaaaaaaaaaaaaaaaaaaaaaaaaaaaagaauu

SEQ ID NO: 6862 - RNA, 1463 nt, Artificial Sequence
  mRNA Design a-3 (hSL-A64-N5) comprising derived and/or modified sequence from Pf(3D7)__XP_001351122.1__Pf-CSP(1-374) (opt2)
aggagagggcgcuuggcuugcaaggacccugagcugcggcauugaagcacacccaacccaacucgacugaagucagccucacugaaccggaucugagaaucuucucucucugggcuugccagggcucuccgaaccuagcuagcauccucuucaauuccaacuagaaagcuuaccaugaugcgcaagcucgccauccucuccgucuccuccuuccucuucgucgaggcccucuuccaggaguaccagugcuacggcuccuccuccaacacccgcguccucaacgagcucaacuacgacaacgccggcaccaaccucuacaacgagcucgagaugaacuacuacggcaagcaggagaacugguacucccucaagaagaacucccgcucccucggcgagaacgacgacggcaacaacgaggacaacgagaagcuccgcaagcccaagcacaagaagcucaagcagcccgccgacggcaaccccgaccccaacgccaaccccaacgucgaccccaacgccaaccccaacgucgaccccaacgccaaccccaacgucgaccccaacgccaaccccaacgccaaccccaacgccaaccccaacgccaaccccaacgccaaccccaacgccaaccccaacgccaaccccaacgccaaccccaacgccaaccccaacgccaaccccaacgccaaccccaacgccaaccccaacgccaaccccaacgccaaccccaacgccaaccccaacgccaaccccaacgccaaccccaacgucgaccccaacgccaaccccaacgccaaccccaacgccaaccccaacgccaaccccaacgccaaccccaacgccaaccccaacgccaaccccaacgccaaccccaacgccaaccccaacgccaaccccaacgccaaccccaacgccaaccccaacgccaaccccaacgccaaccccaacgccaaccccaacgccaaccccaacgccaaccccaacgccaaccccaacaagaacaaccagggcaacggccagggccacaacaugcccaacgaccccaaccgcaacgucgacgagaacgccaacgccaacuccgccgucaagaacaacaacaacgaggagcccuccgacaagcacaucaaggaguaccucaacaagauccagaacucccucuccaccgaguggucccccugcuccgucaccugcggcaacggcauccagguccgcaucaagcccggcuccgccaacaagcccaaggacgagcucgacuacgccaacgacaucgagaagaagaucugcaagauggagaagugcugaggacuagucccuguucccagagcccacuuuuuuuucuuuuuuugaaauaaaauagccugucuuucagaucucaaaggcucuuuucagagccaccaaaaaaaaaaaaaaaaaaaaaaaaaaaaaaaaaaaaaaaaaaaaaaaaaaaaaaaaaaaaaaaaagaauu

SEQ ID NO: 6863 - RNA, 1316 nt, Artificial Sequence
  mRNA Design a-3 (hSL-A64-N5) comprising derived and/or modified sequence from Pf(3D7)__XP_001351122.1__Pf-CSP(1-325) (opt2)
aggagagggcgcuuggcuugcaaggacccugagcugcggcauugaagcacacccaacccaacucgacugaagucagccucacugaaccggaucugagaaucuucucucucugggcuugccagggcucuccgaaccuagcuagcauccucuucaauuccaacuagaaagcuuaccaugaugcgcaagcucgccauccucuccgucuccuccuuccucuucgucgaggcccucuuccaggaguaccagugcuacggcuccuccuccaacacccgcguccucaacgagcucaacuacgacaacgccggcaccaaccucuacaacgagcucgagaugaacuacuacggcaagcaggagaacugguacucccucaagaagaacucccgcucccucggcgagaacgacgacggcaacaacgaggacaacgagaagcuccgcaagcccaagcacaagaagcucaagcagcccgccgacggcaaccccgaccccaacgccaaccccaacgucgaccccaacgccaaccccaacgucgaccccaacgccaaccccaacgucgaccccaacgccaaccccaacgccaaccccaacgccaaccccaacgccaaccccaacgccaaccccaacgccaaccccaacgccaaccccaacgccaaccccaacgccaaccccaacgccaaccccaacgccaaccccaacgccaaccccaacgccaaccccaacgccaaccccaacgccaaccccaacgccaaccccaacgccaaccccaacgucgaccccaacgccaaccccaacgccaaccccaacgccaaccccaacgccaaccccaacgccaaccccaacgccaaccccaacgccaaccccaacgccaaccccaacgccaaccccaacgccaaccccaacgccaaccccaacgccaaccccaacgccaaccccaacgccaaccccaacgccaaccccaacgccaaccccaacgccaaccccaacgccaaccccaacaagaacaaccagggcaacggccagggccacaacaugcccaacgaccccaaccgcaacgucgacgagaacgccaacgccaacuccgccgucaagaacaacaacaacgaggagcccuccgacaagcacaucaaggaguaccucaacaagauccagaacugaggacuagucccuguucccagagcccacuuuuuuuucuuuuuuugaaauaaaauagccugucuuucagaucucaaaggcucuuuucagagccaccaaaaaaaaaaaaaaaaaaaaaaaaaaaaaaaaaaaaaaaaaaaaaaaaaaaaaaaaaaaaaaaaagaauu

SEQ ID NO: 6864 - RNA, 1532 nt, Artificial Sequence
  mRNA Design a-3 (hSL-A64-N5) comprising derived and/or modified sequence from Pf(3D7)__XP_001351122.1__HsALB_Pf-CSP(19-397) (opt2)
aggagagggcgcuuggcuugcaaggacccugagcugcggcauugaagcacacccaacccaacucgacugaagucagccucacugaaccggaucugagaaucuucucucucugggcuugccagggcucuccgaaccuagcuagcauccucuucaauuccaacuagaaagcuuaccaugaagugggucaccuucaucucccuccucuuccucuucuccuccgccuacucccucuuccaggaguaccagugcuacggcuccuccuccaacacccgcguccucaacgagcucaacuacgacaacgccggcaccaaccucuacaacgagcucgagaugaacuacuacggcaagcaggagaacugguacucccucaagaagaacucccgcucccucggcgagaacgacgacggcaacaacgaggacaacgagaagcuccgcaagcccaagcacaagaagcucaagcagcccgccgacggcaaccccgaccccaacgccaaccccaacgucgaccccaacgccaaccccaacgucgaccccaacgccaaccccaacgucgaccccaacgccaaccccaacgccaaccccaacgccaaccccaacgccaaccccaacgccaaccccaacgccaaccccaacgccaaccccaacgccaaccccaacgccaaccccaacgccaaccccaacgccaaccccaacgccaaccccaacgccaaccccaacgccaaccccaacgccaaccccaacgccaaccccaacgccaaccccaacgucgaccccaacgccaaccccaacgccaaccccaacgccaaccccaacgccaaccccaacgccaaccccaacgccaaccccaacgccaaccccaacgccaaccccaacgccaaccccaacgccaaccccaacgccaaccccaacgccaaccccaacgccaaccccaacgccaaccccaacgccaaccccaacgccaaccccaacgccaaccccaacgccaaccccaacaagaacaaccagggcaacggccagggccacaacaugcccaacgaccccaaccgcaacgucgacgagaacgccaacgccaacuccgccgucaagaacaacaacaacgaggagcccuccgacaagcacaucaaggaguaccucaacaagauccagaacucccucuccaccgaguggucccccugcuccgucaccugcggcaacggcauccagguccgcaucaagcccggcuccgccaacaagcccaaggacgagcucgacuacgccaacgacaucgagaagaagaucugcaagauggagaagugcuccuccgucuucaacgucgucaacuccuccaucggccucaucaugguccucuccuuccucuuccucaacugaggacuagucccuguucccagagcccacuuuuuuuucuuuuuuugaaauaaaauagccugucuuucagaucucaaaggcucuuuucagagccaccaaaaaaaaaaaaaaaaaaaaaaaaaaaaaaaaaaaaaaaaaaaaaaaaaaaaaaaaaaaaaaaaagaauu

SEQ ID NO: 6865 - RNA, 1550 nt, Artificial Sequence
  mRNA Design a-3 (hSL-A64-N5) comprising derived and/or modified sequence from Pf(3D7)__XP_001351122.1__HsIns-iso1_Pf-CSP(19-397) (opt2)
aggagagggcgcuuggcuugcaaggacccugagcugcggcauugaagcacacccaacccaacucgacugaagucagccucacugaaccggaucugagaaucuucucucucugggcuugccagggcucuccgaaccuagcuagcauccucuucaauuccaacuagaaagcuuaccauggcccucuggaugcgccuccucccccuccucgcccuccucgcccucuggggccccgaccccgccgccgcccucuuccaggaguaccagugcuacggcuccuccuccaacacccgcguccucaacgagcucaacuacgacaacgccggcaccaaccucuacaacgagcucgagaugaacuacuacggcaagcaggagaacugguacucccucaagaagaacucccgcucccucggcgagaacgacgacggcaacaacgaggacaacgagaagcuccgcaagcccaagcacaagaagcucaagcagcccgccgacggcaaccccgaccccaacgccaaccccaacgucgaccccaacgccaaccccaacgucgaccccaacgccaaccccaacgucgaccccaacgccaaccccaacgccaaccccaacgccaaccccaacgccaaccccaacgccaaccccaacgccaaccccaacgccaaccccaacgccaaccccaacgccaaccccaacgccaaccccaacgccaaccccaacgccaaccccaacgccaaccccaacgccaaccccaacgccaaccccaacgccaaccccaacgccaaccccaacgucgaccccaacgccaaccccaacgccaaccccaacgccaaccccaacgccaaccccaacgccaaccccaacgccaaccccaacgccaaccccaacgccaaccccaacgccaaccccaacgccaaccccaacgccaaccccaacgccaaccccaacgccaaccccaacgccaaccccaacgccaaccccaacgccaaccccaacgccaaccccaacgccaaccccaacaagaacaaccagggcaacggccagggccacaacaugcccaacgaccccaaccgcaacgucgacgagaacgccaacgccaacuccgccgucaagaacaacaacaacgaggagcccuccgacaagcacaucaaggaguaccucaacaagauccagaacucccucuccaccgaguggucccccugcuccgucaccugcggcaacggcauccagguccgcaucaagcccggcuccgccaacaagcccaaggacgagcucgacuacgccaacgacaucgagaagaagaucugcaagauggagaagugcuccuccgucuucaacgucgucaacuccuccaucggccucaucaugguccucuccuuccucuuccucaacugaggacuagucccuguucccagagcccacuuuuuuuucuuuuuuugaaauaaaauagccugucuuucagaucucaaaggcucuuuucagagccaccaaaaaaaaaaaaaaaaaaaaaaaaaaaaaaaaaaaaaaaaaaaaaaaaaaaaaaaaaaaaaaaaagaauu

SEQ ID NO: 6866 - RNA, 1529 nt, Artificial Sequence
  mRNA Design a-3 (hSL-A64-N5) comprising derived and/or modified sequence from Pf(3D7)__XP_001351122.1__HsSPARC_Pf-CSP(19-397) (opt2)
aggagagggcgcuuggcuugcaaggacccugagcugcggcauugaagcacacccaacccaacucgacugaagucagccucacugaaccggaucugagaaucuucucucucugggcuugccagggcucuccgaaccuagcuagcauccucuucaauuccaacuagaaagcuuaccaugcgcgccuggaucuucuuccuccucugccucgccggccgcgcccucgcccucuuccaggaguaccagugcuacggcuccuccuccaacacccgcguccucaacgagcucaacuacgacaacgccggcaccaaccucuacaacgagcucgagaugaacuacuacggcaagcaggagaacugguacucccucaagaagaacucccgcucccucggcgagaacgacgacggcaacaacgaggacaacgagaagcuccgcaagcccaagcacaagaagcucaagcagcccgccgacggcaaccccgaccccaacgccaaccccaacgucgaccccaacgccaaccccaacgucgaccccaacgccaaccccaacgucgaccccaacgccaaccccaacgccaaccccaacgccaaccccaacgccaaccccaacgccaaccccaacgccaaccccaacgccaaccccaacgccaaccccaacgccaaccccaacgccaaccccaacgccaaccccaacgccaaccccaacgccaaccccaacgccaaccccaacgccaaccccaacgccaaccccaacgccaaccccaacgucgaccccaacgccaaccccaacgccaaccccaacgccaaccccaacgccaaccccaacgccaaccccaacgccaaccccaacgccaaccccaacgccaaccccaacgccaaccccaacgccaaccccaacgccaaccccaacgccaaccccaacgccaaccccaacgccaaccccaacgccaaccccaacgccaaccccaacgccaaccccaacgccaaccccaacaagaacaaccagggcaacggccagggccacaacaugcccaacgaccccaaccgcaacgucgacgagaacgccaacgccaacuccgccgucaagaacaacaacaacgaggagcccuccgacaagcacaucaaggaguaccucaacaagauccagaacucccucuccaccgaguggucccccugcuccgucaccugcggcaacggcauccagguccgcaucaagcccggcuccgccaacaagcccaaggacgagcucgacuacgccaacgacaucgagaagaagaucugcaagauggagaagugcuccuccgucuucaacgucgucaacuccuccaucggccucaucaugguccucuccuuccucuuccucaacugaggacuagucccuguucccagagcccacuuuuuuuucuuuuuuugaaauaaaauagccugucuuucagaucucaaaggcucuuuucagagccaccaaaaaaaaaaaaaaaaaaaaaaaaaaaaaaaaaaaaaaaaaaaaaaaaaaaaaaaaaaaaaaaaagaauu

SEQ ID NO: 6867 - RNA, 1532 nt, Artificial Sequence
  mRNA Design a-3 (hSL-A64-N5) comprising derived and/or modified sequence from Pf(3D7)__XP_001351122.1__IgE_Pf-CSP(19-397) (opt2)
aggagagggcgcuuggcuugcaaggacccugagcugcggcauugaagcacacccaacccaacucgacugaagucagccucacugaaccggaucugagaaucuucucucucugggcuugccagggcucuccgaaccuagcuagcauccucuucaauuccaacuagaaagcuuaccauggacuggaccuggauccucuuccucgucgccgccgccacccgcguccacucccucuuccaggaguaccagugcuacggcuccuccuccaacacccgcguccucaacgagcucaacuacgacaacgccggcaccaaccucuacaacgagcucgagaugaacuacuacggcaagcaggagaacugguacucccucaagaagaacucccgcucccucggcgagaacgacgacggcaacaacgaggacaacgagaagcuccgcaagcccaagcacaagaagcucaagcagcccgccgacggcaaccccgaccccaacgccaaccccaacgucgaccccaacgccaaccccaacgucgaccccaacgccaaccccaacgucgaccccaacgccaaccccaacgccaaccccaacgccaaccccaacgccaaccccaacgccaaccccaacgccaaccccaacgccaaccccaacgccaaccccaacgccaaccccaacgccaaccccaacgccaaccccaacgccaaccccaacgccaaccccaacgccaaccccaacgccaaccccaacgccaaccccaacgccaaccccaacgucgaccccaacgccaaccccaacgccaaccccaacgccaaccccaacgccaaccccaacgccaaccccaacgccaaccccaacgccaaccccaacgccaaccccaacgccaaccccaacgccaaccccaacgccaaccccaacgccaaccccaacgccaaccccaacgccaaccccaacgccaaccccaacgccaaccccaacgccaaccccaacgccaaccccaacaagaacaaccagggcaacggccagggccacaacaugcccaacgaccccaaccgcaacgucgacgagaacgccaacgccaacuccgccgucaagaacaacaacaacgaggagcccuccgacaagcacaucaaggaguaccucaacaagauccagaacucccucuccaccgaguggucccccugcuccgucaccugcggcaacggcauccagguccgcaucaagcccggcuccgccaacaagcccaaggacgagcucgacuacgccaacgacaucgagaagaagaucugcaagauggagaagugcuccuccgucuucaacgucgucaacuccuccaucggccucaucaugguccucuccuuccucuuccucaacugaggacuagucccuguucccagagcccacuuuuuuuucuuuuuuugaaauaaaauagccugucuuucagaucucaaaggcucuuuucagagccaccaaaaaaaaaaaaaaaaaaaaaaaaaaaaaaaaaaaaaaaaaaaaaaaaaaaaaaaaaaaaaaaaagaauu

SEQ ID NO: 6868 - RNA, 1697 nt, Artificial Sequence
  mRNA Design a-3 (hSL-A64-N5) comprising derived and/or modified sequence from Pf(3D7)__XP_001351122.1__Pf-CSP_L(G4SG4)_TM domain HA (opt2)
aggagagggcgcuuggcuugcaaggacccugagcugcggcauugaagcacacccaacccaacucgacugaagucagccucacugaaccggaucugagaaucuucucucucugggcuugccagggcucuccgaaccuagcuagcauccucuucaauuccaacuagaaagcuuaccaugaugcgcaagcucgccauccucuccgucuccuccuuccucuucgucgaggcccucuuccaggaguaccagugcuacggcuccuccuccaacacccgcguccucaacgagcucaacuacgacaacgccggcaccaaccucuacaacgagcucgagaugaacuacuacggcaagcaggagaacugguacucccucaagaagaacucccgcucccucggcgagaacgacgacggcaacaacgaggacaacgagaagcuccgcaagcccaagcacaagaagcucaagcagcccgccgacggcaaccccgaccccaacgccaaccccaacgucgaccccaacgccaaccccaacgucgaccccaacgccaaccccaacgucgaccccaacgccaaccccaacgccaaccccaacgccaaccccaacgccaaccccaacgccaaccccaacgccaaccccaacgccaaccccaacgccaaccccaacgccaaccccaacgccaaccccaacgccaaccccaacgccaaccccaacgccaaccccaacgccaaccccaacgccaaccccaacgccaaccccaacgccaaccccaacgucgaccccaacgccaaccccaacgccaaccccaacgccaaccccaacgccaaccccaacgccaaccccaacgccaaccccaacgccaaccccaacgccaaccccaacgccaaccccaacgccaaccccaacgccaaccccaacgccaaccccaacgccaaccccaacgccaaccccaacgccaaccccaacgccaaccccaacgccaaccccaacgccaaccccaacaagaacaaccagggcaacggccagggccacaacaugcccaacgaccccaaccgcaacgucgacgagaacgccaacgccaacuccgccgucaagaacaacaacaacgaggagcccuccgacaagcacaucaaggaguaccucaacaagauccagaacucccucuccaccgaguggucccccugcuccgucaccugcggcaacggcauccagguccgcaucaagcccggcuccgccaacaagcccaaggacgagcucgacuacgccaacgacaucgagaagaagaucugcaagauggagaagugcuccuccgucuucaacgucgucaacuccuccaucggccucaucaugguccucuccuuccucuuccucaacggcggcggcggcuccggcggcggcggcaagcucgaguccacccgcaucuaccagauccucgccaucuacuccaccgucgccuccucccucguccucgucgucucccucggcgccaucuccuucuggaugugcuccaacggcucccuccagugccgcaucugcaucugaggacuagucccuguucccagagcccacuuuuuuuucuuuuuuugaaauaaaauagccugucuuucagaucucaaaggcucuuuucagagccaccaaaaaaaaaaaaaaaaaaaaaaaaaaaaaaaaaaaaaaaaaaaaaaaaaaaaaaaaaaaaaaaaagaauu

SEQ ID NO: 6869 - RNA, 1571 nt, Artificial Sequence
  mRNA Design a-3 (hSL-A64-N5) comprising derived and/or modified sequence from Pf(3D7)__XP_001351122.1__Pf-CSP(199-377)_L(PVTN)_HBsAg (opt2)
aggagagggcgcuuggcuugcaaggacccugagcugcggcauugaagcacacccaacccaacucgacugaagucagccucacugaaccggaucugagaaucuucucucucugggcuugccagggcucuccgaaccuagcuagcauccucuucaauuccaacuagaaagcuuaccauggaccccaacgccaaccccaacgccaaccccaacgccaaccccaacgccaaccccaacgccaaccccaacgccaaccccaacgccaaccccaacgccaaccccaacgccaaccccaacgccaaccccaacgccaaccccaacgccaaccccaacgccaaccccaacgccaaccccaacgccaaccccaacgccaaccccaacgccaaccccaacgccaaccccaacaagaacaaccagggcaacggccagggccacaacaugcccaacgaccccaaccgcaacgucgacgagaacgccaacgccaacuccgccgucaagaacaacaacaacgaggagcccuccgacaagcacaucaaggaguaccucaacaagauccagaacucccucuccaccgaguggucccccugcuccgucaccugcggcaacggcauccagguccgcaucaagcccggcuccgccaacaagcccaaggacgagcucgacuacgccaacgacaucgagaagaagaucugcaagauggagaagugcuccuccguccccgucaccaacauggagaacaucaccuccggcuuccucggcccccuccucguccuccaggccggcuucuuccuccucacccgcauccucaccaucccccagucccucgacuccugguggaccucccucaacuuccucggcggcucccccgucugccucggccagaacucccagucccccaccuccaaccacucccccaccuccugcccccccaucugccccggcuaccgcuggaugugccuccgccgcuucaucaucuuccucuucauccuccuccucugccucaucuuccuccucguccuccucgacuaccagggcaugcuccccgucugcccccucauccccggcuccaccaccaccaacaccggccccugcaagaccugcaccacccccgcccagggcaacuccauguuccccuccugcugcugcaccaagcccaccgacggcaacugcaccugcauccccauccccuccuccugggccuucgccaaguaccucugggagugggccuccguccgcuucuccuggcucucccuccucguccccuucguccagugguucgucggccucucccccaccgucuggcucuccgccaucuggaugaugugguacuggggccccucccucuacuccaucgucucccccuucaucccccuccuccccaucuucuucugccucugggucuacaucugaggacuagucccuguucccagagcccacuuuuuuuucuuuuuuugaaauaaaauagccugucuuucagaucucaaaggcucuuuucagagccaccaaaaaaaaaaaaaaaaaaaaaaaaaaaaaaaaaaaaaaaaaaaaaaaaaaaaaaaaaaaaaaaaagaauu

SEQ ID NO: 6870 - RNA, 1613 nt, Artificial Sequence
  mRNA Design a-3 (hSL-A64-N5) comprising derived and/or modified sequence from Pf(3D7)__XP_001351122.1__Pf-CSP(199-387)_L(PVTN)_HBsAg (opt2)
aggagagggcgcuuggcuugcaaggacccugagcugcggcauugaagcacacccaacccaacucgacugaagucagccucacugaaccggaucugagaaucuucucucucugggcuugccagggcucuccgaaccuagcuagcauccucuucaauuccaacuagaaagcuuaccaugauggcccccgaccccaacgccaaccccaacgccaaccccaacgccaaccccaacgccaaccccaacgccaaccccaacgccaaccccaacgccaaccccaacgccaaccccaacgccaaccccaacgccaaccccaacgccaaccccaacgccaaccccaacgccaaccccaacgccaaccccaacgccaaccccaacgccaaccccaacgccaaccccaacgccaaccccaacaagaacaaccagggcaacggccagggccacaacaugcccaacgaccccaaccgcaacgucgacgagaacgccaacgccaacuccgccgucaagaacaacaacaacgaggagcccuccgacaagcacaucaaggaguaccucaacaagauccagaacucccucuccaccgaguggucccccugcuccgucaccugcggcaacggcauccagguccgcaucaagcccggcuccgccaacaagcccaaggacgagcucgacuacgccaacgacaucgagaagaagaucugcaagauggagaagugcuccuccgucuucaacgucgucaacuccuccaucggccucggccccgucaccaacauggagaacaucaccuccggcuuccucggcccccuccucguccuccaggccggcuucuuccuccucacccgcauccucaccaucccccagucccucgacuccugguggaccucccucaacuuccucggcggcucccccgucugccucggccagaacucccagucccccaccuccaaccacucccccaccuccugcccccccaucugccccggcuaccgcuggaugugccuccgccgcuucaucaucuuccucuucauccuccuccucugccucaucuuccuccucguccuccucgacuaccagggcaugcuccccgucugcccccucauccccggcuccaccaccaccaacaccggccccugcaagaccugcaccacccccgcccagggcaacuccauguuccccuccugcugcugcaccaagcccaccgacggcaacugcaccugcauccccauccccuccuccugggccuucgccaaguaccucugggagugggccuccguccgcuucuccuggcucucccuccucguccccuucguccagugguucgucggccucucccccaccgucuggcucuccgccaucuggaugaugugguacuggggccccucccucuacuccaucgucucccccuucaucccccuccuccccaucuucuucugccucugggucuacaucugaggacuagucccuguucccagagcccacuuuuuuuucuuuuuuugaaauaaaauagccugucuuucagaucucaaaggcucuuuucagagccaccaaaaaaaaaaaaaaaaaaaaaaaaaaaaaaaaaaaaaaaaaaaaaaaaaaaaaaaaaaaaaaaaagaauu

SEQ ID NO: 6871 - RNA, 797 nt, Artificial Sequence
  mRNA Design a-3 (hSL-A64-N5) comprising derived and/or modified sequence from Pf(3D7)__XP_001351122.1__HsALB_Pf-CSP(19-152) (opt2)
aggagagggcgcuuggcuugcaaggacccugagcugcggcauugaagcacacccaacccaacucgacugaagucagccucacugaaccggaucugagaaucuucucucucugggcuugccagggcucuccgaaccuagcuagcauccucuucaauuccaacuagaaagcuuaccaugaagugggucaccuucaucucccuccucuuccucuucuccuccgccuacucccucuuccaggaguaccagugcuacggcuccuccuccaacacccgcguccucaacgagcucaacuacgacaacgccggcaccaaccucuacaacgagcucgagaugaacuacuacggcaagcaggagaacugguacucccucaagaagaacucccgcucccucggcgagaacgacgacggcaacaacgaggacaacgagaagcuccgcaagcccaagcacaagaagcucaagcagcccgccgacggcaaccccgaccccaacgccaaccccaacgucgaccccaacgccaaccccaacgucgaccccaacgccaaccccaacgucgaccccaacgccaaccccaacgccaaccccaacgccaaccccaacgccaaccccaacgccaaccccaacgccaaccccugaggacuagucccuguucccagagcccacuuuuuuuucuuuuuuugaaauaaaauagccugucuuucagaucucaaaggcucuuuucagagccaccaaaaaaaaaaaaaaaaaaaaaaaaaaaaaaaaaaaaaaaaaaaaaaaaaaaaaaaaaaaaaaaaagaauu

SEQ ID NO: 6872 - RNA, 917 nt, Artificial Sequence
  mRNA Design a-3 (hSL-A64-N5) comprising derived and/or modified sequence from Pf(3D7)__XP_001351122.1__HsALB_Pf-CSP(19-192) (opt2)
aggagagggcgcuuggcuugcaaggacccugagcugcggcauugaagcacacccaacccaacucgacugaagucagccucacugaaccggaucugagaaucuucucucucugggcuugccagggcucuccgaaccuagcuagcauccucuucaauuccaacuagaaagcuuaccaugaagugggucaccuucaucucccuccucuuccucuucuccuccgccuacucccucuuccaggaguaccagugcuacggcuccuccuccaacacccgcguccucaacgagcucaacuacgacaacgccggcaccaaccucuacaacgagcucgagaugaacuacuacggcaagcaggagaacugguacucccucaagaagaacucccgcucccucggcgagaacgacgacggcaacaacgaggacaacgagaagcuccgcaagcccaagcacaagaagcucaagcagcccgccgacggcaaccccgaccccaacgccaaccccaacgucgaccccaacgccaaccccaacgucgaccccaacgccaaccccaacgucgaccccaacgccaaccccaacgccaaccccaacgccaaccccaacgccaaccccaacgccaaccccaacgccaaccccaacgccaaccccaacgccaaccccaacgccaaccccaacgccaaccccaacgccaaccccaacgccaaccccaacgccaaccccaacgccaaccccaacgccaaccccaacgccaaccccugaggacuagucccuguucccagagcccacuuuuuuuucuuuuuuugaaauaaaauagccugucuuucagaucucaaaggcucuuuucagagccaccaaaaaaaaaaaaaaaaaaaaaaaaaaaaaaaaaaaaaaaaaaaaaaaaaaaaaaaaaaaaaaaaagaauu

SEQ ID NO: 6873 - RNA, 1157 nt, Artificial Sequence
  mRNA Design a-3 (hSL-A64-N5) comprising derived and/or modified sequence from Pf(3D7)__XP_001351122.1__HsALB_Pf-CSP(19-272) (opt2)
aggagagggcgcuuggcuugcaaggacccugagcugcggcauugaagcacacccaacccaacucgacugaagucagccucacugaaccggaucugagaaucuucucucucugggcuugccagggcucuccgaaccuagcuagcauccucuucaauuccaacuagaaagcuuaccaugaagugggucaccuucaucucccuccucuuccucuucuccuccgccuacucccucuuccaggaguaccagugcuacggcuccuccuccaacacccgcguccucaacgagcucaacuacgacaacgccggcaccaaccucuacaacgagcucgagaugaacuacuacggcaagcaggagaacugguacucccucaagaagaacucccgcucccucggcgagaacgacgacggcaacaacgaggacaacgagaagcuccgcaagcccaagcacaagaagcucaagcagcccgccgacggcaaccccgaccccaacgccaaccccaacgucgaccccaacgccaaccccaacgucgaccccaacgccaaccccaacgucgaccccaacgccaaccccaacgccaaccccaacgccaaccccaacgccaaccccaacgccaaccccaacgccaaccccaacgccaaccccaacgccaaccccaacgccaaccccaacgccaaccccaacgccaaccccaacgccaaccccaacgccaaccccaacgccaaccccaacgccaaccccaacgccaaccccaacgccaaccccaacgucgaccccaacgccaaccccaacgccaaccccaacgccaaccccaacgccaaccccaacgccaaccccaacgccaaccccaacgccaaccccaacgccaaccccaacgccaaccccaacgccaaccccaacgccaaccccaacgccaaccccaacgccaaccccaacgccaaccccaacgccaaccccaacgccaaccccaacgccaaccccaacgccaaccccugaggacuagucccuguucccagagcccacuuuuuuuucuuuuuuugaaauaaaauagccugucuuucagaucucaaaggcucuuuucagagccaccaaaaaaaaaaaaaaaaaaaaaaaaaaaaaaaaaaaaaaaaaaaaaaaaaaaaaaaaaaaaaaaaagaauu

SEQ ID NO: 6874 - RNA, 1319 nt, Artificial Sequence
  mRNA Design a-3 (hSL-A64-N5) comprising derived and/or modified sequence from Pf(3D7)__XP_001351122.1__HsALB_Pf-CSP(19-272)_L(AAY)_Pf-CSP(310-3 27)_L(AAY)_Pf-CSP(346-375) (opt2)
aggagagggcgcuuggcuugcaaggacccugagcugcggcauugaagcacacccaacccaacucgacugaagucagccucacugaaccggaucugagaaucuucucucucugggcuugccagggcucuccgaaccuagcuagcauccucuucaauuccaacuagaaagcuuaccaugaagugggucaccuucaucucccuccucuuccucuucuccuccgccuacucccucuuccaggaguaccagugcuacggcuccuccuccaacacccgcguccucaacgagcucaacuacgacaacgccggcaccaaccucuacaacgagcucgagaugaacuacuacggcaagcaggagaacugguacucccucaagaagaacucccgcucccucggcgagaacgacgacggcaacaacgaggacaacgagaagcuccgcaagcccaagcacaagaagcucaagcagcccgccgacggcaaccccgaccccaacgccaaccccaacgucgaccccaacgccaaccccaacgucgaccccaacgccaaccccaacgucgaccccaacgccaaccccaacgccaaccccaacgccaaccccaacgccaaccccaacgccaaccccaacgccaaccccaacgccaaccccaacgccaaccccaacgccaaccccaacgccaaccccaacgccaaccccaacgccaaccccaacgccaaccccaacgccaaccccaacgccaaccccaacgccaaccccaacgccaaccccaacgucgaccccaacgccaaccccaacgccaaccccaacgccaaccccaacgccaaccccaacgccaaccccaacgccaaccccaacgccaaccccaacgccaaccccaacgccaaccccaacgccaaccccaacgccaaccccaacgccaaccccaacgccaaccccaacgccaaccccaacgccaaccccaacgccaaccccaacgccaaccccaacgccaaccccgccgccuacgagcccuccgacaagcacaucaaggaguaccucaacaagauccagaacucccucgccgccuacaucaagcccggcuccgccaacaagcccaaggacgagcucgacuacgccaacgacaucgagaagaagaucugcaagauggagaagugcuccugaggacuagucccuguucccagagcccacuuuuuuuucuuuuuuugaaauaaaauagccugucuuucagaucucaaaggcucuuuucagagccaccaaaaaaaaaaaaaaaaaaaaaaaaaaaaaaaaaaaaaaaaaaaaaaaaaaaaaaaaaaaaaaaaagaauu

SEQ ID NO: 6875 - RNA, 1280 nt, Artificial Sequence
  mRNA Design a-3 (hSL-A64-N5) comprising derived and/or modified sequence from Pf(3D7)__XP_001351122.1__HsALB_Pf-CSP(19-272)_L(AAY)_Pf-CSP(346-3 65)_L(AAY)_P2 (opt2)
aggagagggcgcuuggcuugcaaggacccugagcugcggcauugaagcacacccaacccaacucgacugaagucagccucacugaaccggaucugagaaucuucucucucugggcuugccagggcucuccgaaccuagcuagcauccucuucaauuccaacuagaaagcuuaccaugaagugggucaccuucaucucccuccucuuccucuucuccuccgccuacucccucuuccaggaguaccagugcuacggcuccuccuccaacacccgcguccucaacgagcucaacuacgacaacgccggcaccaaccucuacaacgagcucgagaugaacuacuacggcaagcaggagaacugguacucccucaagaagaacucccgcucccucggcgagaacgacgacggcaacaacgaggacaacgagaagcuccgcaagcccaagcacaagaagcucaagcagcccgccgacggcaaccccgaccccaacgccaaccccaacgucgaccccaacgccaaccccaacgucgaccccaacgccaaccccaacgucgaccccaacgccaaccccaacgccaaccccaacgccaaccccaacgccaaccccaacgccaaccccaacgccaaccccaacgccaaccccaacgccaaccccaacgccaaccccaacgccaaccccaacgccaaccccaacgccaaccccaacgccaaccccaacgccaaccccaacgccaaccccaacgccaaccccaacgccaaccccaacgucgaccccaacgccaaccccaacgccaaccccaacgccaaccccaacgccaaccccaacgccaaccccaacgccaaccccaacgccaaccccaacgccaaccccaacgccaaccccaacgccaaccccaacgccaaccccaacgccaaccccaacgccaaccccaacgccaaccccaacgccaaccccaacgccaaccccaacgccaaccccaacgccaaccccgccgccuacaucaagcccggcuccgccaacaagcccaaggacgagcucgacuacgccaacgacaucgaggccgccuaccaguacaucaaggccaacuccaaguucaucggcaucaccgagcucugaggacuagucccuguucccagagcccacuuuuuuuucuuuuuuugaaauaaaauagccugucuuucagaucucaaaggcucuuuucagagccaccaaaaaaaaaaaaaaaaaaaaaaaaaaaaaaaaaaaaaaaaaaaaaaaaaaaaaaaaaaaaaaaaagaauu

SEQ ID NO: 6876 - RNA, 1274 nt, Artificial Sequence
  mRNA Design a-3 (hSL-A64-N5) comprising derived and/or modified sequence from Pf(3D7)__XP_001351122.1__HsALB_Pf-CSP(19-272)_L(AAY)_Pf-CSP(346-3 65)_L(AAY)_PADRE (opt2)
aggagagggcgcuuggcuugcaaggacccugagcugcggcauugaagcacacccaacccaacucgacugaagucagccucacugaaccggaucugagaaucuucucucucugggcuugccagggcucuccgaaccuagcuagcauccucuucaauuccaacuagaaagcuuaccaugaagugggucaccuucaucucccuccucuuccucuucuccuccgccuacucccucuuccaggaguaccagugcuacggcuccuccuccaacacccgcguccucaacgagcucaacuacgacaacgccggcaccaaccucuacaacgagcucgagaugaacuacuacggcaagcaggagaacugguacucccucaagaagaacucccgcucccucggcgagaacgacgacggcaacaacgaggacaacgagaagcuccgcaagcccaagcacaagaagcucaagcagcccgccgacggcaaccccgaccccaacgccaaccccaacgucgaccccaacgccaaccccaacgucgaccccaacgccaaccccaacgucgaccccaacgccaaccccaacgccaaccccaacgccaaccccaacgccaaccccaacgccaaccccaacgccaaccccaacgccaaccccaacgccaaccccaacgccaaccccaacgccaaccccaacgccaaccccaacgccaaccccaacgccaaccccaacgccaaccccaacgccaaccccaacgccaaccccaacgccaaccccaacgucgaccccaacgccaaccccaacgccaaccccaacgccaaccccaacgccaaccccaacgccaaccccaacgccaaccccaacgccaaccccaacgccaaccccaacgccaaccccaacgccaaccccaacgccaaccccaacgccaaccccaacgccaaccccaacgccaaccccaacgccaaccccaacgccaaccccaacgccaaccccaacgccaaccccgccgccuacaucaagcccggcuccgccaacaagcccaaggacgagcucgacuacgccaacgacaucgaggccgccuacgccaaguucgucgccgccuggacccucaaggccgccgccugaggacuagucccuguucccagagcccacuuuuuuuucuuuuuuugaaauaaaauagccugucuuucagaucucaaaggcucuuuucagagccaccaaaaaaaaaaaaaaaaaaaaaaaaaaaaaaaaaaaaaaaaaaaaaaaaaaaaaaaaaaaaaaaaagaauu

SEQ ID NO: 6877 - RNA, 1331 nt, Artificial Sequence
  mRNA Design a-3 (hSL-A64-N5) comprising derived and/or modified sequence from Pf(3D7)__XP_001351122.1__HsALB_Pf-CSP(19-272)_L(G4S)_Pf-CSP(310-3 27)_L(G4S)_Pf-CSP(346-375) (opt2)
aggagagggcgcuuggcuugcaaggacccugagcugcggcauugaagcacacccaacccaacucgacugaagucagccucacugaaccggaucugagaaucuucucucucugggcuugccagggcucuccgaaccuagcuagcauccucuucaauuccaacuagaaagcuuaccaugaagugggucaccuucaucucccuccucuuccucuucuccuccgccuacucccucuuccaggaguaccagugcuacggcuccuccuccaacacccgcguccucaacgagcucaacuacgacaacgccggcaccaaccucuacaacgagcucgagaugaacuacuacggcaagcaggagaacugguacucccucaagaagaacucccgcucccucggcgagaacgacgacggcaacaacgaggacaacgagaagcuccgcaagcccaagcacaagaagcucaagcagcccgccgacggcaaccccgaccccaacgccaaccccaacgucgaccccaacgccaaccccaacgucgaccccaacgccaaccccaacgucgaccccaacgccaaccccaacgccaaccccaacgccaaccccaacgccaaccccaacgccaaccccaacgccaaccccaacgccaaccccaacgccaaccccaacgccaaccccaacgccaaccccaacgccaaccccaacgccaaccccaacgccaaccccaacgccaaccccaacgccaaccccaacgccaaccccaacgccaaccccaacgucgaccccaacgccaaccccaacgccaaccccaacgccaaccccaacgccaaccccaacgccaaccccaacgccaaccccaacgccaaccccaacgccaaccccaacgccaaccccaacgccaaccccaacgccaaccccaacgccaaccccaacgccaaccccaacgccaaccccaacgccaaccccaacgccaaccccaacgccaaccccaacgccaaccccggcggcggcggcuccgagcccuccgacaagcacaucaaggaguaccucaacaagauccagaacucccucggcggcggcggcuccaucaagcccggcuccgccaacaagcccaaggacgagcucgacuacgccaacgacaucgagaagaagaucugcaagauggagaagugcuccugaggacuagucccuguucccagagcccacuuuuuuuucuuuuuuugaaauaaaauagccugucuuucagaucucaaaggcucuuuucagagccaccaaaaaaaaaaaaaaaaaaaaaaaaaaaaaaaaaaaaaaaaaaaaaaaaaaaaaaaaaaaaaaaaagaauu

SEQ ID NO: 6878 - RNA, 1316 nt, Artificial Sequence
  mRNA Design a-3 (hSL-A64-N5) comprising derived and/or modified sequence from Pf(3D7)__XP_001351122.1__HsALB_Pf-CSP(19-272)_L(G4S)_Pf-CSP(310-3 27)_Pf-CSP(346-375) (opt2)
aggagagggcgcuuggcuugcaaggacccugagcugcggcauugaagcacacccaacccaacucgacugaagucagccucacugaaccggaucugagaaucuucucucucugggcuugccagggcucuccgaaccuagcuagcauccucuucaauuccaacuagaaagcuuaccaugaagugggucaccuucaucucccuccucuuccucuucuccuccgccuacucccucuuccaggaguaccagugcuacggcuccuccuccaacacccgcguccucaacgagcucaacuacgacaacgccggcaccaaccucuacaacgagcucgagaugaacuacuacggcaagcaggagaacugguacucccucaagaagaacucccgcucccucggcgagaacgacgacggcaacaacgaggacaacgagaagcuccgcaagcccaagcacaagaagcucaagcagcccgccgacggcaaccccgaccccaacgccaaccccaacgucgaccccaacgccaaccccaacgucgaccccaacgccaaccccaacgucgaccccaacgccaaccccaacgccaaccccaacgccaaccccaacgccaaccccaacgccaaccccaacgccaaccccaacgccaaccccaacgccaaccccaacgccaaccccaacgccaaccccaacgccaaccccaacgccaaccccaacgccaaccccaacgccaaccccaacgccaaccccaacgccaaccccaacgccaaccccaacgucgaccccaacgccaaccccaacgccaaccccaacgccaaccccaacgccaaccccaacgccaaccccaacgccaaccccaacgccaaccccaacgccaaccccaacgccaaccccaacgccaaccccaacgccaaccccaacgccaaccccaacgccaaccccaacgccaaccccaacgccaaccccaacgccaaccccaacgccaaccccaacgccaaccccggcggcggcggcuccgagcccuccgacaagcacaucaaggaguaccucaacaagauccagaacucccucaucaagcccggcuccgccaacaagcccaaggacgagcucgacuacgccaacgacaucgagaagaagaucugcaagauggagaagugcuccugaggacuagucccuguucccagagcccacuuuuuuuucuuuuuuugaaauaaaauagccugucuuucagaucucaaaggcucuuuucagagccaccaaaaaaaaaaaaaaaaaaaaaaaaaaaaaaaaaaaaaaaaaaaaaaaaaaaaaaaaaaaaaaaaagaauu

SEQ ID NO: 6879 - RNA, 1316 nt, Artificial Sequence
  mRNA Design a-3 (hSL-A64-N5) comprising derived and/or modified sequence from Pf(3D7)__XP_001351122.1__HsALB_Pf-CSP(19-325) (opt2)
aggagagggcgcuuggcuugcaaggacccugagcugcggcauugaagcacacccaacccaacucgacugaagucagccucacugaaccggaucugagaaucuucucucucugggcuugccagggcucuccgaaccuagcuagcauccucuucaauuccaacuagaaagcuuaccaugaagugggucaccuucaucucccuccucuuccucuucuccuccgccuacucccucuuccaggaguaccagugcuacggcuccuccuccaacacccgcguccucaacgagcucaacuacgacaacgccggcaccaaccucuacaacgagcucgagaugaacuacuacggcaagcaggagaacugguacucccucaagaagaacucccgcucccucggcgagaacgacgacggcaacaacgaggacaacgagaagcuccgcaagcccaagcacaagaagcucaagcagcccgccgacggcaaccccgaccccaacgccaaccccaacgucgaccccaacgccaaccccaacgucgaccccaacgccaaccccaacgucgaccccaacgccaaccccaacgccaaccccaacgccaaccccaacgccaaccccaacgccaaccccaacgccaaccccaacgccaaccccaacgccaaccccaacgccaaccccaacgccaaccccaacgccaaccccaacgccaaccccaacgccaaccccaacgccaaccccaacgccaaccccaacgccaaccccaacgccaaccccaacgucgaccccaacgccaaccccaacgccaaccccaacgccaaccccaacgccaaccccaacgccaaccccaacgccaaccccaacgccaaccccaacgccaaccccaacgccaaccccaacgccaaccccaacgccaaccccaacgccaaccccaacgccaaccccaacgccaaccccaacgccaaccccaacgccaaccccaacgccaaccccaacgccaaccccaacaagaacaaccagggcaacggccagggccacaacaugcccaacgaccccaaccgcaacgucgacgagaacgccaacgccaacuccgccgucaagaacaacaacaacgaggagcccuccgacaagcacaucaaggaguaccucaacaagauccagaacugaggacuagucccuguucccagagcccacuuuuuuuucuuuuuuugaaauaaaauagccugucuuucagaucucaaaggcucuuuucagagccaccaaaaaaaaaaaaaaaaaaaaaaaaaaaaaaaaaaaaaaaaaaaaaaaaaaaaaaaaaaaaaaaaagaauu

SEQ ID NO: 6880 - RNA, 1493 nt, Artificial Sequence
  mRNA Design a-3 (hSL-A64-N5) comprising derived and/or modified sequence from Pf(3D7)__XP_001351122.1__HsALB_Pf-CSP(19-384) (opt2)
aggagagggcgcuuggcuugcaaggacccugagcugcggcauugaagcacacccaacccaacucgacugaagucagccucacugaaccggaucugagaaucuucucucucugggcuugccagggcucuccgaaccuagcuagcauccucuucaauuccaacuagaaagcuuaccaugaagugggucaccuucaucucccuccucuuccucuucuccuccgccuacucccucuuccaggaguaccagugcuacggcuccuccuccaacacccgcguccucaacgagcucaacuacgacaacgccggcaccaaccucuacaacgagcucgagaugaacuacuacggcaagcaggagaacugguacucccucaagaagaacucccgcucccucggcgagaacgacgacggcaacaacgaggacaacgagaagcuccgcaagcccaagcacaagaagcucaagcagcccgccgacggcaaccccgaccccaacgccaaccccaacgucgaccccaacgccaaccccaacgucgaccccaacgccaaccccaacgucgaccccaacgccaaccccaacgccaaccccaacgccaaccccaacgccaaccccaacgccaaccccaacgccaaccccaacgccaaccccaacgccaaccccaacgccaaccccaacgccaaccccaacgccaaccccaacgccaaccccaacgccaaccccaacgccaaccccaacgccaaccccaacgccaaccccaacgccaaccccaacgucgaccccaacgccaaccccaacgccaaccccaacgccaaccccaacgccaaccccaacgccaaccccaacgccaaccccaacgccaaccccaacgccaaccccaacgccaaccccaacgccaaccccaacgccaaccccaacgccaaccccaacgccaaccccaacgccaaccccaacgccaaccccaacgccaaccccaacgccaaccccaacgccaaccccaacaagaacaaccagggcaacggccagggccacaacaugcccaacgaccccaaccgcaacgucgacgagaacgccaacgccaacuccgccgucaagaacaacaacaacgaggagcccuccgacaagcacaucaaggaguaccucaacaagauccagaacucccucuccaccgaguggucccccugcuccgucaccugcggcaacggcauccagguccgcaucaagcccggcuccgccaacaagcccaaggacgagcucgacuacgccaacgacaucgagaagaagaucugcaagauggagaagugcuccuccgucuucaacgucgucaacuccuccugaggacuagucccuguucccagagcccacuuuuuuuucuuuuuuugaaauaaaauagccugucuuucagaucucaaaggcucuuuucagagccaccaaaaaaaaaaaaaaaaaaaaaaaaaaaaaaaaaaaaaaaaaaaaaaaaaaaaaaaaaaaaaaaaagaauu

SEQ ID NO: 6881 - RNA, 1631 nt, Artificial Sequence
  mRNA Design a-3 (hSL-A64-N5) comprising derived and/or modified sequence from Pf(3D7)__XP_001351122.1__HsALB_Pf-CSP(19-384)_TM domain HA (opt2)
aggagagggcgcuuggcuugcaaggacccugagcugcggcauugaagcacacccaacccaacucgacugaagucagccucacugaaccggaucugagaaucuucucucucugggcuugccagggcucuccgaaccuagcuagcauccucuucaauuccaacuagaaagcuuaccaugaagugggucaccuucaucucccuccucuuccucuucuccuccgccuacucccucuuccaggaguaccagugcuacggcuccuccuccaacacccgcguccucaacgagcucaacuacgacaacgccggcaccaaccucuacaacgagcucgagaugaacuacuacggcaagcaggagaacugguacucccucaagaagaacucccgcucccucggcgagaacgacgacggcaacaacgaggacaacgagaagcuccgcaagcccaagcacaagaagcucaagcagcccgccgacggcaaccccgaccccaacgccaaccccaacgucgaccccaacgccaaccccaacgucgaccccaacgccaaccccaacgucgaccccaacgccaaccccaacgccaaccccaacgccaaccccaacgccaaccccaacgccaaccccaacgccaaccccaacgccaaccccaacgccaaccccaacgccaaccccaacgccaaccccaacgccaaccccaacgccaaccccaacgccaaccccaacgccaaccccaacgccaaccccaacgccaaccccaacgccaaccccaacgucgaccccaacgccaaccccaacgccaaccccaacgccaaccccaacgccaaccccaacgccaaccccaacgccaaccccaacgccaaccccaacgccaaccccaacgccaaccccaacgccaaccccaacgccaaccccaacgccaaccccaacgccaaccccaacgccaaccccaacgccaaccccaacgccaaccccaacgccaaccccaacgccaaccccaacaagaacaaccagggcaacggccagggccacaacaugcccaacgaccccaaccgcaacgucgacgagaacgccaacgccaacuccgccgucaagaacaacaacaacgaggagcccuccgacaagcacaucaaggaguaccucaacaagauccagaacucccucuccaccgaguggucccccugcuccgucaccugcggcaacggcauccagguccgcaucaagcccggcuccgccaacaagcccaaggacgagcucgacuacgccaacgacaucgagaagaagaucugcaagauggagaagugcuccuccgucuucaacgucgucaacuccuccaagcucgaguccacccgcaucuaccagauccucgccaucuacuccaccgucgccuccucccucguccucgucgucucccucggcgccaucuccuucuggaugugcuccaacggcucccuccagugccgcaucugcaucugaggacuagucccuguucccagagcccacuuuuuuuucuuuuuuugaaauaaaauagccugucuuucagaucucaaaggcucuuuucagagccaccaaaaaaaaaaaaaaaaaaaaaaaaaaaaaaaaaaaaaaaaaaaaaaaaaaaaaaaaaaaaaaaaagaauu

SEQ ID NO: 6882 - RNA, 1343 nt, Artificial Sequence
  mRNA Design a-3 (hSL-A64-N5) comprising derived and/or modified sequence from Pf(3D7)__XP_001351122.1__HsALB_Pf-CSP(82-397) (opt2)
aggagagggcgcuuggcuugcaaggacccugagcugcggcauugaagcacacccaacccaacucgacugaagucagccucacugaaccggaucugagaaucuucucucucugggcuugccagggcucuccgaaccuagcuagcauccucuucaauuccaacuagaaagcuuaccaugaagugggucaccuucaucucccuccucuuccucuucuccuccgccuacuccgacaacgagaagcuccgcaagcccaagcacaagaagcucaagcagcccgccgacggcaaccccgaccccaacgccaaccccaacgucgaccccaacgccaaccccaacgucgaccccaacgccaaccccaacgucgaccccaacgccaaccccaacgccaaccccaacgccaaccccaacgccaaccccaacgccaaccccaacgccaaccccaacgccaaccccaacgccaaccccaacgccaaccccaacgccaaccccaacgccaaccccaacgccaaccccaacgccaaccccaacgccaaccccaacgccaaccccaacgccaaccccaacgccaaccccaacgucgaccccaacgccaaccccaacgccaaccccaacgccaaccccaacgccaaccccaacgccaaccccaacgccaaccccaacgccaaccccaacgccaaccccaacgccaaccccaacgccaaccccaacgccaaccccaacgccaaccccaacgccaaccccaacgccaaccccaacgccaaccccaacgccaaccccaacgccaaccccaacgccaaccccaacaagaacaaccagggcaacggccagggccacaacaugcccaacgaccccaaccgcaacgucgacgagaacgccaacgccaacuccgccgucaagaacaacaacaacgaggagcccuccgacaagcacaucaaggaguaccucaacaagauccagaacucccucuccaccgaguggucccccugcuccgucaccugcggcaacggcauccagguccgcaucaagcccggcuccgccaacaagcccaaggacgagcucgacuacgccaacgacaucgagaagaagaucugcaagauggagaagugcuccuccgucuucaacgucgucaacuccuccaucggccucaucaugguccucuccuuccucuuccucaacugaggacuagucccuguucccagagcccacuuuuuuuucuuuuuuugaaauaaaauagccugucuuucagaucucaaaggcucuuuucagagccaccaaaaaaaaaaaaaaaaaaaaaaaaaaaaaaaaaaaaaaaaaaaaaaaaaaaaaaaaaaaaaaaaagaauu

SEQ ID NO: 6883 - RNA, 695 nt, Artificial Sequence
  mRNA Design a-3 (hSL-A64-N5) comprising derived and/or modified sequence from Pf(3D7)__XP_001351122.1__HsALB_Pf-CSP(93-192) (opt2)
aggagagggcgcuuggcuugcaaggacccugagcugcggcauugaagcacacccaacccaacucgacugaagucagccucacugaaccggaucugagaaucuucucucucugggcuugccagggcucuccgaaccuagcuagcauccucuucaauuccaacuagaaagcuuaccaugaagugggucaccuucaucucccuccucuuccucuucuccuccgccuacuccaagcucaagcagcccgccgacggcaaccccgaccccaacgccaaccccaacgucgaccccaacgccaaccccaacgucgaccccaacgccaaccccaacgucgaccccaacgccaaccccaacgccaaccccaacgccaaccccaacgccaaccccaacgccaaccccaacgccaaccccaacgccaaccccaacgccaaccccaacgccaaccccaacgccaaccccaacgccaaccccaacgccaaccccaacgccaaccccaacgccaaccccaacgccaaccccaacgccaaccccugaggacuagucccuguucccagagcccacuuuuuuuucuuuuuuugaaauaaaauagccugucuuucagaucucaaaggcucuuuucagagccaccaaaaaaaaaaaaaaaaaaaaaaaaaaaaaaaaaaaaaaaaaaaaaaaaaaaaaaaaaaaaaaaaagaauu

SEQ ID NO: 6884 - RNA, 935 nt, Artificial Sequence
  mRNA Design a-3 (hSL-A64-N5) comprising derived and/or modified sequence from Pf(3D7)__XP_001351122.1__HsALB_Pf-CSP(93-272) (opt2)
aggagagggcgcuuggcuugcaaggacccugagcugcggcauugaagcacacccaacccaacucgacugaagucagccucacugaaccggaucugagaaucuucucucucugggcuugccagggcucuccgaaccuagcuagcauccucuucaauuccaacuagaaagcuuaccaugaagugggucaccuucaucucccuccucuuccucuucuccuccgccuacuccaagcucaagcagcccgccgacggcaaccccgaccccaacgccaaccccaacgucgaccccaacgccaaccccaacgucgaccccaacgccaaccccaacgucgaccccaacgccaaccccaacgccaaccccaacgccaaccccaacgccaaccccaacgccaaccccaacgccaaccccaacgccaaccccaacgccaaccccaacgccaaccccaacgccaaccccaacgccaaccccaacgccaaccccaacgccaaccccaacgccaaccccaacgccaaccccaacgccaaccccaacgccaaccccaacgucgaccccaacgccaaccccaacgccaaccccaacgccaaccccaacgccaaccccaacgccaaccccaacgccaaccccaacgccaaccccaacgccaaccccaacgccaaccccaacgccaaccccaacgccaaccccaacgccaaccccaacgccaaccccaacgccaaccccaacgccaaccccaacgccaaccccaacgccaaccccaacgccaaccccugaggacuagucccuguucccagagcccacuuuuuuuucuuuuuuugaaauaaaauagccugucuuucagaucucaaaggcucuuuucagagccaccaaaaaaaaaaaaaaaaaaaaaaaaaaaaaaaaaaaaaaaaaaaaaaaaaaaaaaaaaaaaaaaaagaauu

SEQ ID NO: 6885 - RNA, 1310 nt, Artificial Sequence
  mRNA Design a-3 (hSL-A64-N5) comprising derived and/or modified sequence from Pf(3D7)__XP_001351122.1__HsALB_Pf-CSP(93-397) (opt2)
aggagagggcgcuuggcuugcaaggacccugagcugcggcauugaagcacacccaacccaacucgacugaagucagccucacugaaccggaucugagaaucuucucucucugggcuugccagggcucuccgaaccuagcuagcauccucuucaauuccaacuagaaagcuuaccaugaagugggucaccuucaucucccuccucuuccucuucuccuccgccuacuccaagcucaagcagcccgccgacggcaaccccgaccccaacgccaaccccaacgucgaccccaacgccaaccccaacgucgaccccaacgccaaccccaacgucgaccccaacgccaaccccaacgccaaccccaacgccaaccccaacgccaaccccaacgccaaccccaacgccaaccccaacgccaaccccaacgccaaccccaacgccaaccccaacgccaaccccaacgccaaccccaacgccaaccccaacgccaaccccaacgccaaccccaacgccaaccccaacgccaaccccaacgccaaccccaacgucgaccccaacgccaaccccaacgccaaccccaacgccaaccccaacgccaaccccaacgccaaccccaacgccaaccccaacgccaaccccaacgccaaccccaacgccaaccccaacgccaaccccaacgccaaccccaacgccaaccccaacgccaaccccaacgccaaccccaacgccaaccccaacgccaaccccaacgccaaccccaacgccaaccccaacaagaacaaccagggcaacggccagggccacaacaugcccaacgaccccaaccgcaacgucgacgagaacgccaacgccaacuccgccgucaagaacaacaacaacgaggagcccuccgacaagcacaucaaggaguaccucaacaagauccagaacucccucuccaccgaguggucccccugcuccgucaccugcggcaacggcauccagguccgcaucaagcccggcuccgccaacaagcccaaggacgagcucgacuacgccaacgacaucgagaagaagaucugcaagauggagaagugcuccuccgucuucaacgucgucaacuccuccaucggccucaucaugguccucuccuuccucuuccucaacugaggacuagucccuguucccagagcccacuuuuuuuucuuuuuuugaaauaaaauagccugucuuucagaucucaaaggcucuuuucagagccaccaaaaaaaaaaaaaaaaaaaaaaaaaaaaaaaaaaaaaaaaaaaaaaaaaaaaaaaaaaaaaaaaagaauu

SEQ ID NO: 6886 - RNA, 680 nt, Artificial Sequence
  mRNA Design a-3 (hSL-A64-N5) comprising derived and/or modified sequence from Pf(3D7)__XP_001351122.1__HsALB_Pf-CSP(98-192) (opt2)
aggagagggcgcuuggcuugcaaggacccugagcugcggcauugaagcacacccaacccaacucgacugaagucagccucacugaaccggaucugagaaucuucucucucugggcuugccagggcucuccgaaccuagcuagcauccucuucaauuccaacuagaaagcuuaccaugaagugggucaccuucaucucccuccucuuccucuucuccuccgccuacuccgccgacggcaaccccgaccccaacgccaaccccaacgucgaccccaacgccaaccccaacgucgaccccaacgccaaccccaacgucgaccccaacgccaaccccaacgccaaccccaacgccaaccccaacgccaaccccaacgccaaccccaacgccaaccccaacgccaaccccaacgccaaccccaacgccaaccccaacgccaaccccaacgccaaccccaacgccaaccccaacgccaaccccaacgccaaccccaacgccaaccccaacgccaaccccugaggacuagucccuguucccagagcccacuuuuuuuucuuuuuuugaaauaaaauagccugucuuucagaucucaaaggcucuuuucagagccaccaaaaaaaaaaaaaaaaaaaaaaaaaaaaaaaaaaaaaaaaaaaaaaaaaaaaaaaaaaaaaaaaagaauu

SEQ ID NO: 6887 - RNA, 920 nt, Artificial Sequence
  mRNA Design a-3 (hSL-A64-N5) comprising derived and/or modified sequence from Pf(3D7)__XP_001351122.1__HsALB_Pf-CSP(98-272) (opt2)
aggagagggcgcuuggcuugcaaggacccugagcugcggcauugaagcacacccaacccaacucgacugaagucagccucacugaaccggaucugagaaucuucucucucugggcuugccagggcucuccgaaccuagcuagcauccucuucaauuccaacuagaaagcuuaccaugaagugggucaccuucaucucccuccucuuccucuucuccuccgccuacuccgccgacggcaaccccgaccccaacgccaaccccaacgucgaccccaacgccaaccccaacgucgaccccaacgccaaccccaacgucgaccccaacgccaaccccaacgccaaccccaacgccaaccccaacgccaaccccaacgccaaccccaacgccaaccccaacgccaaccccaacgccaaccccaacgccaaccccaacgccaaccccaacgccaaccccaacgccaaccccaacgccaaccccaacgccaaccccaacgccaaccccaacgccaaccccaacgccaaccccaacgucgaccccaacgccaaccccaacgccaaccccaacgccaaccccaacgccaaccccaacgccaaccccaacgccaaccccaacgccaaccccaacgccaaccccaacgccaaccccaacgccaaccccaacgccaaccccaacgccaaccccaacgccaaccccaacgccaaccccaacgccaaccccaacgccaaccccaacgccaaccccaacgccaaccccugaggacuagucccuguucccagagcccacuuuuuuuucuuuuuuugaaauaaaauagccugucuuucagaucucaaaggcucuuuucagagccaccaaaaaaaaaaaaaaaaaaaaaaaaaaaaaaaaaaaaaaaaaaaaaaaaaaaaaaaaaaaaaaaaagaauu

SEQ ID NO: 6888 - RNA, 1226 nt, Artificial Sequence
  mRNA Design a-3 (hSL-A64-N5) comprising derived and/or modified sequence from Pf(3D7)__XP_001351122.1__HsALB_Pf-CSP(98-374) (opt2)
aggagagggcgcuuggcuugcaaggacccugagcugcggcauugaagcacacccaacccaacucgacugaagucagccucacugaaccggaucugagaaucuucucucucugggcuugccagggcucuccgaaccuagcuagcauccucuucaauuccaacuagaaagcuuaccaugaagugggucaccuucaucucccuccucuuccucuucuccuccgccuacuccgccgacggcaaccccgaccccaacgccaaccccaacgucgaccccaacgccaaccccaacgucgaccccaacgccaaccccaacgucgaccccaacgccaaccccaacgccaaccccaacgccaaccccaacgccaaccccaacgccaaccccaacgccaaccccaacgccaaccccaacgccaaccccaacgccaaccccaacgccaaccccaacgccaaccccaacgccaaccccaacgccaaccccaacgccaaccccaacgccaaccccaacgccaaccccaacgccaaccccaacgucgaccccaacgccaaccccaacgccaaccccaacgccaaccccaacgccaaccccaacgccaaccccaacgccaaccccaacgccaaccccaacgccaaccccaacgccaaccccaacgccaaccccaacgccaaccccaacgccaaccccaacgccaaccccaacgccaaccccaacgccaaccccaacgccaaccccaacgccaaccccaacgccaaccccaacaagaacaaccagggcaacggccagggccacaacaugcccaacgaccccaaccgcaacgucgacgagaacgccaacgccaacuccgccgucaagaacaacaacaacgaggagcccuccgacaagcacaucaaggaguaccucaacaagauccagaacucccucuccaccgaguggucccccugcuccgucaccugcggcaacggcauccagguccgcaucaagcccggcuccgccaacaagcccaaggacgagcucgacuacgccaacgacaucgagaagaagaucugcaagauggagaagugcugaggacuagucccuguucccagagcccacuuuuuuuucuuuuuuugaaauaaaauagccugucuuucagaucucaaaggcucuuuucagagccaccaaaaaaaaaaaaaaaaaaaaaaaaaaaaaaaaaaaaaaaaaaaaaaaaaaaaaaaaaaaaaaaaagaauu

SEQ ID NO: 6889 - RNA, 1295 nt, Artificial Sequence
  mRNA Design a-3 (hSL-A64-N5) comprising derived and/or modified sequence from Pf(3D7)__XP_001351122.1__HsALB_Pf-CSP(98-397) (opt2)
aggagagggcgcuuggcuugcaaggacccugagcugcggcauugaagcacacccaacccaacucgacugaagucagccucacugaaccggaucugagaaucuucucucucugggcuugccagggcucuccgaaccuagcuagcauccucuucaauuccaacuagaaagcuuaccaugaagugggucaccuucaucucccuccucuuccucuucuccuccgccuacuccgccgacggcaaccccgaccccaacgccaaccccaacgucgaccccaacgccaaccccaacgucgaccccaacgccaaccccaacgucgaccccaacgccaaccccaacgccaaccccaacgccaaccccaacgccaaccccaacgccaaccccaacgccaaccccaacgccaaccccaacgccaaccccaacgccaaccccaacgccaaccccaacgccaaccccaacgccaaccccaacgccaaccccaacgccaaccccaacgccaaccccaacgccaaccccaacgccaaccccaacgucgaccccaacgccaaccccaacgccaaccccaacgccaaccccaacgccaaccccaacgccaaccccaacgccaaccccaacgccaaccccaacgccaaccccaacgccaaccccaacgccaaccccaacgccaaccccaacgccaaccccaacgccaaccccaacgccaaccccaacgccaaccccaacgccaaccccaacgccaaccccaacgccaaccccaacaagaacaaccagggcaacggccagggccacaacaugcccaacgaccccaaccgcaacgucgacgagaacgccaacgccaacuccgccgucaagaacaacaacaacgaggagcccuccgacaagcacaucaaggaguaccucaacaagauccagaacucccucuccaccgaguggucccccugcuccgucaccugcggcaacggcauccagguccgcaucaagcccggcuccgccaacaagcccaaggacgagcucgacuacgccaacgacaucgagaagaagaucugcaagauggagaagugcuccuccgucuucaacgucgucaacuccuccaucggccucaucaugguccucuccuuccucuuccucaacugaggacuagucccuguucccagagcccacuuuuuuuucuuuuuuugaaauaaaauagccugucuuucagaucucaaaggcucuuuucagagccaccaaaaaaaaaaaaaaaaaaaaaaaaaaaaaaaaaaaaaaaaaaaaaaaaaaaaaaaaaaaaaaaaagaauu

SEQ ID NO: 6890 - RNA, 1622 nt, Artificial Sequence
  mRNA Design a-3 (hSL-A64-N5) comprising derived and/or modified sequence from Pf(3D7)__XP_001351122.1__HsALB_Pf-CSP(199-377)_L(PVTN)_HBsAg (opt2)
aggagagggcgcuuggcuugcaaggacccugagcugcggcauugaagcacacccaacccaacucgacugaagucagccucacugaaccggaucugagaaucuucucucucugggcuugccagggcucuccgaaccuagcuagcauccucuucaauuccaacuagaaagcuuaccaugaagugggucaccuucaucucccuccucuuccucuucuccuccgccuacuccgaccccaacgccaaccccaacgccaaccccaacgccaaccccaacgccaaccccaacgccaaccccaacgccaaccccaacgccaaccccaacgccaaccccaacgccaaccccaacgccaaccccaacgccaaccccaacgccaaccccaacgccaaccccaacgccaaccccaacgccaaccccaacgccaaccccaacgccaaccccaacgccaaccccaacaagaacaaccagggcaacggccagggccacaacaugcccaacgaccccaaccgcaacgucgacgagaacgccaacgccaacuccgccgucaagaacaacaacaacgaggagcccuccgacaagcacaucaaggaguaccucaacaagauccagaacucccucuccaccgaguggucccccugcuccgucaccugcggcaacggcauccagguccgcaucaagcccggcuccgccaacaagcccaaggacgagcucgacuacgccaacgacaucgagaagaagaucugcaagauggagaagugcuccuccguccccgucaccaacauggagaacaucaccuccggcuuccucggcccccuccucguccuccaggccggcuucuuccuccucacccgcauccucaccaucccccagucccucgacuccugguggaccucccucaacuuccucggcggcucccccgucugccucggccagaacucccagucccccaccuccaaccacucccccaccuccugcccccccaucugccccggcuaccgcuggaugugccuccgccgcuucaucaucuuccucuucauccuccuccucugccucaucuuccuccucguccuccucgacuaccagggcaugcuccccgucugcccccucauccccggcuccaccaccaccaacaccggccccugcaagaccugcaccacccccgcccagggcaacuccauguuccccuccugcugcugcaccaagcccaccgacggcaacugcaccugcauccccauccccuccuccugggccuucgccaaguaccucugggagugggccuccguccgcuucuccuggcucucccuccucguccccuucguccagugguucgucggccucucccccaccgucuggcucuccgccaucuggaugaugugguacuggggccccucccucuacuccaucgucucccccuucaucccccuccuccccaucuucuucugccucugggucuacaucugaggacuagucccuguucccagagcccacuuuuuuuucuuuuuuugaaauaaaauagccugucuuucagaucucaaaggcucuuuucagagccaccaaaaaaaaaaaaaaaaaaaaaaaaaaaaaaaaaaaaaaaaaaaaaaaaaaaaaaaaaaaaaaaaagaauu

SEQ ID NO: 6891 - RNA, 1532 nt, Artificial Sequence
  mRNA Design a-3 (hSL-A64-N5) comprising derived and/or modified sequence from Pf(3D7)__XP_001351122.1__Pf-CSP (opt3)
aggagagggcgcuuggcuugcaaggacccugagcugcggcauugaagcacacccaacccaacucgacugaagucagccucacugaaccggaucugagaaucuucucucucugggcuugccagggcucuccgaaccuagcuagcauccucuucaauuccaacuagaaagcuuaccaugaugagaaagcuggccauccucagcguguccucuuuccuuuuugucgaggcucuguuccaggaauaccaaugcuauggcucaaguagcaacaccaggguuuugaaugaguuaaacuacgacaaugcagggacaaaccuguauaaugaacuagagaugaacuacuauggaaaacaggaaaauugguacucccucaagaaaaacucucggucgcugggugagaaugaugacggcaacaaugaggauaacgaaaaacuucgcaagcccaagcacaagaaacugaagcagccugccgacgggaauccagauccgaacgcgaaucccaacguggacccuaacgcuaauccaaacguagaucccaaugccaacccuaauguggacccaaacgcaaaucccaacgccaauccuaacgcuaauccaaacgcaaauccgaacgccaaucccaacgcuaacccuaaugccaacccaaaugcgaaccccaaugcaaacccuaaugccaacccaaaugcuaaccccaaugccaacccgaaugcaaacccuaaugcuaaccccaacgccaauccaaacgcgaauccuaacgccaaucccaacgucgauccaaaugcaaaccccaaugcuaacccuaaugccaacccaaaugcuaacccgaaugccaaccccaacgcaaauccuaacgccaauccaaacgcuaaucccaacgcgaauccuaacgcaaauccaaacgccaaucccaacgcuaauccgaacgccaauccuaacgcaaauccaaacgccaaccccaaugcuaacccuaaugccaaccccaaugcaaacccaaauaaaaacaaucagggaaacggccaaggucauaauaugccuaacgaccccaaucgaaacguggaugagaaugcgaacgcuaacucagccguuaagaauaacaauaacgaggaaccaagcgacaaacacauuaaggaguauuugaauaagauacagaacagucucuccacugaauggucuccguguagcgugacgugcgggaauggaauccagguccguauuaaaccuggcuccgcaaacaagcccaaagaugagcuggacuacgccaaugacaucgaaaagaaaauuuguaagauggagaaaugcucaaguguguuuaacguaguuaauagcucuaucggccugauaauggugcucuccuucuuauuucugaacugaggacuagucccuguucccagagcccacuuuuuuuucuuuuuuugaaauaaaauagccugucuuucagaucucaaaggcucuuuucagagccaccaaaaaaaaaaaaaaaaaaaaaaaaaaaaaaaaaaaaaaaaaaaaaaaaaaaaaaaaaaaaaaaaagaauu

SEQ ID NO: 6892 - RNA, 1463 nt, Artificial Sequence
  mRNA Design a-3 (hSL-A64-N5) comprising derived and/or modified sequence from Pf(3D7)__XP_001351122.1__Pf-CSP(1-374) (opt3)
aggagagggcgcuuggcuugcaaggacccugagcugcggcauugaagcacacccaacccaacucgacugaagucagccucacugaaccggaucugagaaucuucucucucugggcuugccagggcucuccgaaccuagcuagcauccucuucaauuccaacuagaaagcuuaccaugaugagaaagcuggccauccucagcguguccucuuuccuuuuugucgaggcucuguuccaggaauaccaaugcuauggcucaaguagcaacaccaggguuuugaaugaguuaaacuacgacaaugcagggacaaaccuguauaaugaacuagagaugaacuacuauggaaaacaggaaaauugguacucccucaagaaaaacucucggucgcugggugagaaugaugacggcaacaaugaggauaacgaaaaacuucgcaagcccaagcacaagaaacugaagcagccugccgacgggaauccagauccgaacgcgaaucccaacguggacccuaacgcuaauccaaacguagaucccaaugccaacccuaauguggacccaaacgcaaaucccaacgccaauccuaacgcuaauccaaacgcaaauccgaacgccaaucccaacgcuaacccuaaugccaacccaaaugcgaaccccaaugcaaacccuaaugccaacccaaaugcuaaccccaaugccaacccgaaugcaaacccuaaugcuaaccccaacgccaauccaaacgcgaauccuaacgccaaucccaacgucgauccaaaugcaaaccccaaugcuaacccuaaugccaacccaaaugcuaacccgaaugccaaccccaacgcaaauccuaacgccaauccaaacgcuaaucccaacgcgaauccuaacgcaaauccaaacgccaaucccaacgcuaauccgaacgccaauccuaacgcaaauccaaacgccaaccccaaugcuaacccuaaugccaaccccaaugcaaacccaaauaaaaacaaucagggaaacggccaaggucauaauaugccuaacgaccccaaucgaaacguggaugagaaugcgaacgcuaacucagccguuaagaauaacaauaacgaggaaccaagcgacaaacacauuaaggaguauuugaauaagauacagaacagucucuccacugaauggucuccguguagcgugacgugcgggaauggaauccagguccguauuaaaccuggcuccgcaaacaagcccaaagaugagcuggacuacgccaaugacaucgaaaagaaaauuuguaagauggagaaaugcugaggacuagucccuguucccagagcccacuuuuuuuucuuuuuuugaaauaaaauagccugucuuucagaucucaaaggcucuuuucagagccaccaaaaaaaaaaaaaaaaaaaaaaaaaaaaaaaaaaaaaaaaaaaaaaaaaaaaaaaaaaaaaaaaagaauu

SEQ ID NO: 6893 - RNA, 1316 nt, Artificial Sequence
  mRNA Design a-3 (hSL-A64-N5) comprising derived and/or modified sequence from Pf(3D7)__XP_001351122.1__Pf-CSP(1-325) (opt3)
aggagagggcgcuuggcuugcaaggacccugagcugcggcauugaagcacacccaacccaacucgacugaagucagccucacugaaccggaucugagaaucuucucucucugggcuugccagggcucuccgaaccuagcuagcauccucuucaauuccaacuagaaagcuuaccaugaugagaaagcuggccauccucagcguguccucuuuccuuuuugucgaggcucuguuccaggaauaccaaugcuauggcucaaguagcaacaccaggguuuugaaugaguuaaacuacgacaaugcagggacaaaccuguauaaugaacuagagaugaacuacuauggaaaacaggaaaauugguacucccucaagaaaaacucucggucgcugggugagaaugaugacggcaacaaugaggauaacgaaaaacuucgcaagcccaagcacaagaaacugaagcagccugccgacgggaauccagauccgaacgcgaaucccaacguggacccuaacgcuaauccaaacguagaucccaaugccaacccuaauguggacccaaacgcaaaucccaacgccaauccuaacgcuaauccaaacgcaaauccgaacgccaaucccaacgcuaacccuaaugccaacccaaaugcgaaccccaaugcaaacccuaaugccaacccaaaugcuaaccccaaugccaacccgaaugcaaacccuaaugcuaaccccaacgccaauccaaacgcgaauccuaacgccaaucccaacgucgauccaaaugcaaaccccaaugcuaacccuaaugccaacccaaaugcuaacccgaaugccaaccccaacgcaaauccuaacgccaauccaaacgcuaaucccaacgcgaauccuaacgcaaauccaaacgccaaucccaacgcuaauccgaacgccaauccuaacgcaaauccaaacgccaaccccaaugcuaacccuaaugccaaccccaaugcaaacccaaauaaaaacaaucagggaaacggccaaggucauaauaugccuaacgaccccaaucgaaacguggaugagaaugcgaacgcuaacucagccguuaagaauaacaauaacgaggaaccaagcgacaaacacauuaaggaguauuugaauaagauacagaacugaggacuagucccuguucccagagcccacuuuuuuuucuuuuuuugaaauaaaauagccugucuuucagaucucaaaggcucuuuucagagccaccaaaaaaaaaaaaaaaaaaaaaaaaaaaaaaaaaaaaaaaaaaaaaaaaaaaaaaaaaaaaaaaaagaauu

SEQ ID NO: 6894 - RNA, 1532 nt, Artificial Sequence
  mRNA Design a-3 (hSL-A64-N5) comprising derived and/or modified sequence from Pf(3D7)__XP_001351122.1__HsALB_Pf-CSP(19-397) (opt3)
aggagagggcgcuuggcuugcaaggacccugagcugcggcauugaagcacacccaacccaacucgacugaagucagccucacugaaccggaucugagaaucuucucucucugggcuugccagggcucuccgaaccuagcuagcauccucuucaauuccaacuagaaagcuuaccaugaagugggugaccuucaucagccugcucuuucuuuucuccucugccuacucacuguuucaggaguaucaaugcuacggcaguagcuccaacacaagagucuugaaugaauuaaacuaugacaaugcugggacuaaccuguacaaugagcuagaaaugaacuauuacggaaaacaggagaauugguauucucucaagaaaaacucgaggucacugggugaaaaugaugacggcaacaaugaggauaacgagaaacuucggaagcccaagcacaagaaacugaagcagccugcagacgggaauccagauccgaacgccaaucccaacguugacccuaacgcgaauccaaacguggaucccaaugcuaacccuaauguagacccaaacgccaaucccaacgcaaauccuaacgccaauccaaacgcuaauccgaacgcaaaucccaacgccaacccuaaugcuaacccaaaugccaaccccaaugcgaacccuaaugcaaacccaaaugccaaccccaaugcuaacccgaaugccaacccuaaugcaaaccccaacgcuaauccaaacgccaauccuaacgcgaaucccaacguggauccaaaugccaaccccaaugcaaacccuaaugcuaacccaaaugccaacccgaaugcuaaccccaacgccaauccuaacgcaaauccaaacgccaaucccaacgcuaauccuaacgcgaauccaaacgcaaaucccaacgccaauccgaacgcuaauccuaacgccaauccaaacgcaaaccccaaugccaacccuaaugcuaaccccaaugccaacccaaauaaaaacaaucagggaaacggccaaggucauaauaugccuaacgaccccaaucgcaacgucgaugaaaaugcaaacgcgaacagcgcugugaagaauaacaauaacgaggaaccaagugacaaacacauuaaggaguacuugaauaagauacagaacucccucucuacggaguggagcccguguuccguuaccugcgggaauggaauccaggugcgaauuaaaccuggcucagccaacaagcccaaagaugaacuggacuacgcaaaugacaucgagaagaaaauuuguaagauggaaaaaugcaguagcgucuucaacgugguaaauucuuccaucggccugauaaugguucucucauuuuuauuccugaacugaggacuagucccuguucccagagcccacuuuuuuuucuuuuuuugaaauaaaauagccugucuuucagaucucaaaggcucuuuucagagccaccaaaaaaaaaaaaaaaaaaaaaaaaaaaaaaaaaaaaaaaaaaaaaaaaaaaaaaaaaaaaaaaaagaauu

SEQ ID NO: 6895 - RNA, 1550 nt, Artificial Sequence
  mRNA Design a-3 (hSL-A64-N5) comprising derived and/or modified sequence from Pf(3D7)__XP_001351122.1__HsIns-iso1_Pf-CSP(19-397) (opt3)
aggagagggcgcuuggcuugcaaggacccugagcugcggcauugaagcacacccaacccaacucgacugaagucagccucacugaaccggaucugagaaucuucucucucugggcuugccagggcucuccgaaccuagcuagcauccucuucaauuccaacuagaaagcuuaccauggcccuguggaugagacuccuuccccuguuggcuuuacuggcacuauggggcccugacccagccgcggcucucuuccaggaguaccaaugcuaugggagcuccucuaacaccagggugcugaaugaacuuaacuacgauaaugccggaacaaaccuguauaaugaguuggaaaugaacuacuaugguaagcaggagaauugguacucacucaaaaagaacagucggagccugggcgaaaaugacgaugggaacaaugaggacaacgagaaacugcgcaagccgaaacacaagaagcucaaacagcccgcagauggaaauccugacccaaacgccaaucccaacgucgauccuaacgcuaauccaaacguugaccccaaugcaaacccuaauguggauccaaacgccaauccgaacgcuaaucccaacgccaauccuaacgcgaauccaaacgcaaaucccaacgccaacccuaaugcuaacccaaaugccaaccccaaugcaaacccgaaugcuaacccuaaugccaaccccaaugcgaacccaaaugccaacccuaaugcaaaccccaacgcuaauccaaacgccaaucccaacgcuaauccuaacguagacccaaaugccaacccgaaugcaaaccccaaugccaacccuaaugcuaacccaaaugcgaaccccaacgcaaauccuaacgccaauccaaacgcuaaucccaacgccaauccgaacgcaaauccuaacgccaauccaaacgcuaaucccaacgccaauccuaacgcaaaucccaacgcgaacccaaaugcuaacccuaaugccaaccccaaugcaaacccaaauaagaacaaucagggcaacggucaagggcauaauaugccgaacgauccuaaucgaaacguggacgaaaaugccaacgcuaacuccgccgucaaaaauaacaauaacgaggaacccucugauaagcacaucaaagaguauuuaaauaagauucagaacucgcugucaacugaguggagcccauguagugugacgugcggaaauggcauacagguucguaucaagcccggcuccgcaaacaaaccuaaggacgaacuugacuacgcuaaugauauugagaaaaagaucuguaaaauggaaaagugcucuagcguguuuaacgucguaaauuccucaauuggguugaucauggugcugaguuuccuauuucucaacugaggacuagucccuguucccagagcccacuuuuuuuucuuuuuuugaaauaaaauagccugucuuucagaucucaaaggcucuuuucagagccaccaaaaaaaaaaaaaaaaaaaaaaaaaaaaaaaaaaaaaaaaaaaaaaaaaaaaaaaaaaaaaaaaagaauu

SEQ ID NO: 6896 - RNA, 1529 nt, Artificial Sequence
  mRNA Design a-3 (hSL-A64-N5) comprising derived and/or modified sequence from Pf(3D7)__XP_001351122.1__HsSPARC_Pf-CSP(19-397) (opt3)
aggagagggcgcuuggcuugcaaggacccugagcugcggcauugaagcacacccaacccaacucgacugaagucagccucacugaaccggaucugagaaucuucucucucugggcuugccagggcucuccgaaccuagcuagcauccucuucaauuccaacuagaaagcuuaccaugagagccuggaucuucuuucugcucugccuugcuggcagggcacuggccuuguuccaggaguaccaauguuaugggagcuccucuaacacccggguguuaaaugaacugaacuacgacaaugcgggaacaaaccuauauaaugagcucgaaaugaacuacuaugguaagcaggagaauugguacucacugaaaaagaacagucgcagccuuggcgaaaaugaugacgggaacaaugaggauaacgagaaacugcgaaagcccaaacacaagaaguugaaacagccugcugacggaaauccagauccgaacgccaaucccaacgucgacccuaacgcaaauccaaacguugaucccaaugccaacccuaauguggacccaaacgcuaaucccaacgcaaauccuaacgccaauccaaacgcuaauccgaacgccaaucccaacgcgaacccuaaugcaaacccaaaugccaaccccaaugcuaacccuaaugccaacccaaaugcaaaccccaaugcuaacccgaaugccaacccuaaugcgaaccccaacgccaauccaaacgcaaauccuaacgcuaaucccaacguagauccaaaugccaaccccaaugcuaacccuaaugccaacccaaaugcaaacccgaaugccaaccccaacgcuaauccuaacgcgaauccaaacgcaaaucccaacgccaauccuaacgcuaauccaaacgccaaucccaacgcaaauccgaacgccaauccuaacgcuaauccaaacgccaaccccaaugcaaacccuaaugcgaaccccaaugcuaacccaaauaagaacaaucagggcaacggucaagggcauaauaugccuaacgaccccaaucguaacguggaugaaaaugccaacgcaaacuccgccgucaaaaauaacaauaacgaggaaccaucugacaagcacauuaaagaguaucucaauaagauacagaacucgcugucaacugaguggagcccgugcagugugacguguggaaauggcauccagguuagaauuaagccuggcuccgcuaacaaacccaaggaugaacuggacuacgccaaugacaucgagaaaaagauuugcaaaauggaaaaguguucuagcguguuuaacgucguaaauuccucaaucgggcucauaaugguguuaaguuuccuguuucuuaacugaggacuagucccuguucccagagcccacuuuuuuuucuuuuuuugaaauaaaauagccugucuuucagaucucaaaggcucuuuucagagccaccaaaaaaaaaaaaaaaaaaaaaaaaaaaaaaaaaaaaaaaaaaaaaaaaaaaaaaaaaaaaaaaaagaauu

SEQ ID NO: 6897 - RNA, 1532 nt, Artificial Sequence
  mRNA Design a-3 (hSL-A64-N5) comprising derived and/or modified sequence from Pf(3D7)__XP_001351122.1__IgE_Pf-CSP(19-397) (opt3)
aggagagggcgcuuggcuugcaaggacccugagcugcggcauugaagcacacccaacccaacucgacugaagucagccucacugaaccggaucugagaaucuucucucucugggcuugccagggcucuccgaaccuagcuagcauccucuucaauuccaacuagaaagcuuaccauggacuggaccuggauccuguuccucguggccgcugcaacaagaguccacagccuuuuucaggaguaccaaugcuauggcuccucuucaaacacuaggguucugaaugaauugaacuacgauaaugccgggacgaacuuauauaaugagcuggaaaugaacuacuauggaaagcaggagaauugguacagucuaaagaagaacagccggucccucggugaaaaugacgauggcaacaaugaggacaacgagaaacugcgcaagcccaaacauaagaaacuuaaacagccugcggaugggaauccagacccgaacgcuaaucccaacguggauccuaacgccaauccaaacguagaccccaaugcaaacccuaauguggauccaaacgccaaucccaacgcuaauccuaacgcaaauccaaacgccaauccgaacgcuaaucccaacgccaacccuaaugcgaacccaaaugcaaaccccaaugccaacccuaaugcuaacccaaaugccaaccccaaugcaaacccgaaugcuaacccuaaugccaaccccaacgcgaauccaaacgccaauccuaacgcaaaucccaacgucgacccaaaugcuaaccccaaugccaacccuaaugcuaacccaaaugccaacccgaaugcaaaccccaacgccaauccuaacgcuaauccaaacgcgaaucccaacgcaaauccuaacgccaauccaaacgcuaaucccaacgccaauccgaacgcaaauccuaacgccaauccaaacgcuaaccccaaugccaacccuaaugcaaaccccaaugcgaacccaaauaagaacaaucagggaaacggccaaggucacaauaugccuaacgaucccaaucgaaacguggacgaaaaugcuaacgccaacucugcaguuaaaaauaacaauaacgaggaaccaucggauaagcauauuaaagaguaucugaauaagauacagaacucauugagcaccgaguggaguccguguuccgugacaugcgggaauggaauccagguccguauuaagccuggcucugccaacaaacccaaggacgaacucgacuacgcuaaugauaucgagaaaaagauuuguaaaauggaaaagugcagcuccguguucaacguaguuaauucaaguaucggccugauaauggugcugagcuuucucuucuuaaacugaggacuagucccuguucccagagcccacuuuuuuuucuuuuuuugaaauaaaauagccugucuuucagaucucaaaggcucuuuucagagccaccaaaaaaaaaaaaaaaaaaaaaaaaaaaaaaaaaaaaaaaaaaaaaaaaaaaaaaaaaaaaaaaaagaauu

SEQ ID NO: 6898 - RNA, 1697 nt, Artificial Sequence
  mRNA Design a-3 (hSL-A64-N5) comprising derived and/or modified sequence from Pf(3D7)__XP_001351122.1__Pf-CSP_L(G4SG4)_TM domain HA (opt3)
aggagagggcgcuuggcuugcaaggacccugagcugcggcauugaagcacacccaacccaacucgacugaagucagccucacugaaccggaucugagaaucuucucucucugggcuugccagggcucuccgaaccuagcuagcauccucuucaauuccaacuagaaagcuuaccaugaugagaaagcuggccauccucagcguguccucuuuccuuuuugucgaggcucuguuccaggaauaccaaugcuauggcucaaguagcaacaccaggguuuugaaugaguuaaacuacgacaaugcagggacaaaccuguauaaugaacuagagaugaacuacuauggaaagcaggaaaauugguacucccucaagaaaaacucucggucgcugggugagaaugaugacggcaacaaugaggauaacgaaaaacuucgcaagcccaagcacaagaaacugaagcagccugccgacgggaauccagauccgaacgcgaaucccaacguggacccuaacgcuaauccaaacguagaucccaaugccaacccuaauguggacccaaacgcaaaucccaacgccaauccuaacgcuaauccaaacgcaaauccgaacgccaaucccaacgcuaacccuaaugccaacccaaaugcgaaccccaaugcaaacccuaaugccaacccaaaugcuaaccccaaugccaacccgaaugcaaacccuaaugcuaaccccaacgccaauccaaacgcgaauccuaacgccaaucccaacgucgauccaaaugcaaaccccaaugcuaacccuaaugccaacccaaaugcuaacccgaaugccaaccccaacgcaaauccuaacgccaauccaaacgcuaaucccaacgcgaauccuaacgcaaauccaaacgccaaucccaacgcuaauccgaacgccaauccuaacgcaaauccaaacgccaaccccaaugcuaacccuaaugccaaccccaaugcaaacccaaauaaaaacaaucagggaaacggccaaggucauaauaugccuaacgaccccaaucgaaacguggaugagaaugcgaacgcuaacucagccguuaagaauaacaauaacgaggaaccaagcgacaaacacauuaaggaguauuugaauaagauacagaacagucucuccacugaauggucuccguguagcgugacgugcgggaauggaauccagguccguauuaaaccuggcuccgcaaacaagcccaaagaugagcuggacuacgccaaugacaucgaaaagaaaauuuguaagauggagaaaugcucaaguguguuuaacguaguuaauagcucuaucggccugauaauggugcucuccuucuuauuucugaacgggggagguggcucagggggaggcgguaaacuugaaagcaccagaaucuaccagauuuuggcuaucuauaguacagucgccucuucccuggugcuaguggucagccucggggcaauuucguucuggauguguucuaauggaucccugcaaugcaggaucuguauaugaggacuagucccuguucccagagcccacuuuuuuuucuuuuuuugaaauaaaauagccugucuuucagaucucaaaggcucuuuucagagccaccaaaaaaaaaaaaaaaaaaaaaaaaaaaaaaaaaaaaaaaaaaaaaaaaaaaaaaaaaaaaaaaaagaauu

SEQ ID NO: 6899 - RNA, 1571 nt, Artificial Sequence
  mRNA Design a-3 (hSL-A64-N5) comprising derived and/or modified sequence from Pf(3D7)__XP_001351122.1__Pf-CSP(199-377)_L(PVTN)_HBsAg (opt3)
aggagagggcgcuuggcuugcaaggacccugagcugcggcauugaagcacacccaacccaacucgacugaagucagccucacugaaccggaucugagaaucuucucucucugggcuugccagggcucuccgaaccuagcuagcauccucuucaauuccaacuagaaagcuuaccauggaccccaacgccaauccuaacgcuaauccaaacgcaaauccgaacgccaaucccaacgcgaauccuaacgcuaauccaaacgccaaucccaacgcaaauccuaacgccaacccaaaugcuaaccccaaugcaaacccuaaugccaacccaaaugcuaacccgaaugccaaccccaaugcgaacccuaaugcaaacccaaaugccaaccccaacgcuaauccuaacaagaauaaccagggcaaugggcaaggacacaacaugccaaaugaucccaacagaaauguggacgagaacgccaaugcaaacagcgcugucaaaaauaacaauaacgaggaaccguccgauaagcauaucaaagaauaccugaacaagauucaaaauucucucucaaccgaguggaguccuugcagcguuacaugugguaacggcauacaggugaggaucaaacccggguccgccaauaagccaaaggacgaacuugauuaugcgaacgacauugagaaaaagaucugcaaaauggagaaguguucuucgguaccugugacuaauauggaaaacauuacgucaggauuccugggccccuuguuaguccugcaggccggguuuuuccuacucacccggauccugacaauaccacagagccuugauaguugguggacuucccugaauuuucucgguggaucucccgugugcuugggccagaacagccaguccccuaccucaaaucacaguccaacaagcuguccgcccaucugcccuggcuaccgcuggaugugucugcgacguuucauuaucuuucuguucauucucuuacugugccuuaucuuuuugcugguucuacucgacuaucaggggaugcugccaguguguccccuuauaccuggaucuaccacuacaaacaccgguccaugcaaaacguguacuacccccgcacaaggcaauuccauguucccgucaugcugcuguacaaagccuacugaugggaacugcaccuguauuccaauccccagcaguugggcuuuugccaaguaccugugggagugggcuucugucagauucuccugguugagccuccuggugccuuuuguacagugguucguuggauuaucgcccacaguguggcugucugccauuuggaugaugugguauuggggcccaucccucuacucaaucgucaguccuuuuaucccccuucugccaauuuucuucugcuuguggguguauauaugaggacuagucccuguucccagagcccacuuuuuuuucuuuuuuugaaauaaaauagccugucuuucagaucucaaaggcucuuuucagagccaccaaaaaaaaaaaaaaaaaaaaaaaaaaaaaaaaaaaaaaaaaaaaaaaaaaaaaaaaaaaaaaaaagaauu

SEQ ID NO: 6900 - RNA, 1613 nt, Artificial Sequence
  mRNA Design a-3 (hSL-A64-N5) comprising derived and/or modified sequence from Pf(3D7)__XP_001351122.1__Pf-CSP(199-387)_L(PVTN)_HBsAg (opt3)
aggagagggcgcuuggcuugcaaggacccugagcugcggcauugaagcacacccaacccaacucgacugaagucagccucacugaaccggaucugagaaucuucucucucugggcuugccagggcucuccgaaccuagcuagcauccucuucaauuccaacuagaaagcuuaccaugauggcccccgacccuaacgcuaauccaaacgcaaauccgaacgccaaucccaacgcgaauccuaacgcuaauccaaacgccaaucccaacgcaaauccuaacgccaauccaaacgcuaaccccaaugcaaacccuaaugccaacccaaaugcuaacccgaaugccaaccccaaugcgaacccuaaugcaaacccaaaugccaaccccaaugcuaacccuaacgccaauccaaacaagaauaaccagggcaaugggcaaggacacaacaugcccaaugauccgaacagaaauguggacgagaacgcaaaugcuaacagcgccgucaaaaauaacaauaacgaggaaccuuccgauaagcauaucaaagaauaccugaacaagauucaaaauucucucucaaccgaguggagucccugcagcguuacaugugguaacggcauacaggugaggaucaaaccaggguccgcgaauaagccuaaggacgaacuugauuaugccaacgacauugagaaaaagaucugcaaaauggagaaguguucuucgguauucaauguggucaacucaagcauuggacugggccccgugacuaauauggaaaacaucacgaguggguuuuuggguccauuacugguucuacaggcaggauucuuucuccugacccggauacuuacaaucccccagucccuggauucuugguggacuagcuugaauuuccucggcggcuccccugugugccuggggcagaacucacagaguccaaccagcaaucacucuccgacauccugucccccuauuugcccaggauaccgcuggaugugucugcgacguuuuaucauuuuccucuuuaucuuacugcuuugcuugauauuccugcuaguccuccuggacuaucaggguaugcuucccguguguccucugauuccaggcucaaccacuacaaacaccgggcccugcaaaacguguacuaccccggcucaaggaaauagcauguuuccuaguugcugcuguacaaagccaacugauggcaacugcaccuguauccccauuccuucuuccugggccuucgcuaaguacuugugggagugggccagcguaagauuuucguggcucucucuguuaguucccuucgugcagugguuugucggucuguccccaacaguguggcucucagcaaucuggaugaugugguauugggggccuagucuuuacagcaucgugucccccuucauuccacuguugccgauauucuuuugccuaugggucuauaucugaggacuagucccuguucccagagcccacuuuuuuuucuuuuuuugaaauaaaauagccugucuuucagaucucaaaggcucuuuucagagccaccaaaaaaaaaaaaaaaaaaaaaaaaaaaaaaaaaaaaaaaaaaaaaaaaaaaaaaaaaaaaaaaaagaauu

SEQ ID NO: 6901 - RNA, 797 nt, Artificial Sequence
  mRNA Design a-3 (hSL-A64-N5) comprising derived and/or modified sequence from Pf(3D7)__XP_001351122.1__HsALB_Pf-CSP(19-152) (opt3)
aggagagggcgcuuggcuugcaaggacccugagcugcggcauugaagcacacccaacccaacucgacugaagucagccucacugaaccggaucugagaaucuucucucucugggcuugccagggcucuccgaaccuagcuagcauccucuucaauuccaacuagaaagcuuaccaugaagugggugaccuucaucagccugcucuuucuuuucuccucugccuacucacuguuucaggaguaucaaugcuacggcaguagcuccaacacaagagucuugaaugaauuaaacuaugacaaugcugggacuaaccuguacaaugagcuagaaaugaacuauuacggaaaacaggagaauugguauucucucaagaaaaacucgaggucacugggugaaaaugaugacggcaacaaugaggauaacgagaaacuucggaagcccaagcacaagaaacugaagcagccugcagacgggaauccagauccgaacgccaaucccaacguugacccuaacgcgaauccaaacguggaucccaaugcuaacccuaauguagacccaaacgccaaucccaacgcaaauccuaacgccaauccaaacgcuaauccgaacgcaaaucccaacgccaacccuugaggacuagucccuguucccagagcccacuuuuuuuucuuuuuuugaaauaaaauagccugucuuucagaucucaaaggcucuuuucagagccaccaaaaaaaaaaaaaaaaaaaaaaaaaaaaaaaaaaaaaaaaaaaaaaaaaaaaaaaaaaaaaaaaagaauu

SEQ ID NO: 6902 - RNA, 917 nt, Artificial Sequence
  mRNA Design a-3 (hSL-A64-N5) comprising derived and/or modified sequence from Pf(3D7)__XP_001351122.1__HsALB_Pf-CSP(19-192) (opt3)
aggagagggcgcuuggcuugcaaggacccugagcugcggcauugaagcacacccaacccaacucgacugaagucagccucacugaaccggaucugagaaucuucucucucugggcuugccagggcucuccgaaccuagcuagcauccucuucaauuccaacuagaaagcuuaccaugaagugggugaccuucaucagccugcucuuucuuuucuccucugccuacucacuguuucaggaguaucaaugcuacggcaguagcuccaacacaagagucuugaaugaauuaaacuaugacaaugcugggacuaaccuguacaaugagcuagaaaugaacuauuacggaaaacaggagaauugguauucucucaagaaaaacucgaggucacugggugaaaaugaugacggcaacaaugaggauaacgagaaacuucggaagcccaagcacaagaaacugaagcagccugcagacgggaauccagauccgaacgccaaucccaacguugacccuaacgcgaauccaaacguggaucccaaugcuaacccuaauguagacccaaacgccaaucccaacgcaaauccuaacgccaauccaaacgcuaauccgaacgcaaaucccaacgccaacccuaaugcuaacccaaaugccaaccccaaugcgaacccuaaugcaaacccaaaugccaaccccaaugcuaacccgaaugccaacccuaaugcaaaccccaacgcuaauccaaacgccaauccuugaggacuagucccuguucccagagcccacuuuuuuuucuuuuuuugaaauaaaauagccugucuuucagaucucaaaggcucuuuucagagccaccaaaaaaaaaaaaaaaaaaaaaaaaaaaaaaaaaaaaaaaaaaaaaaaaaaaaaaaaaaaaaaaaagaauu

SEQ ID NO: 6903 - RNA, 1157 nt, Artificial Sequence
  mRNA Design a-3 (hSL-A64-N5) comprising derived and/or modified sequence from Pf(3D7)__XP_001351122.1__HsALB_Pf-CSP(19-272) (opt3)
aggagagggcgcuuggcuugcaaggacccugagcugcggcauugaagcacacccaacccaacucgacugaagucagccucacugaaccggaucugagaaucuucucucucugggcuugccagggcucuccgaaccuagcuagcauccucuucaauuccaacuagaaagcuuaccaugaagugggugaccuucaucagccugcucuuucuuuucuccucugccuacucacuguuucaggaguaucaaugcuacggcaguagcuccaacacaagagucuugaaugaauuaaacuaugacaaugcugggacuaaccuguacaaugagcuagaaaugaacuauuacggaaaacaggagaauugguauucucucaagaaaaacucgaggucacugggugaaaaugaugacggcaacaaugaggauaacgagaaacuucggaagcccaagcacaagaaacugaagcagccugcagacgggaauccagauccgaacgccaaucccaacguugacccuaacgcgaauccaaacguggaucccaaugcuaacccuaauguagacccaaacgccaaucccaacgcaaauccuaacgccaauccaaacgcuaauccgaacgcaaaucccaacgccaacccuaaugcuaacccaaaugccaaccccaaugcgaacccuaaugcaaacccaaaugccaaccccaaugcuaacccgaaugccaacccuaaugcaaaccccaacgcuaauccaaacgccaauccuaacgcgaaucccaacguggauccaaaugccaaccccaaugcaaacccuaaugcuaacccaaaugccaacccgaaugcuaaccccaacgccaauccuaacgcaaauccaaacgccaaucccaacgcuaauccuaacgcgaauccaaacgcaaaucccaacgccaauccgaacgcuaauccuaacgccaauccaaacgcaaaccccaaugccaacccuaaugcuaaccccaaugccaacccaugaggacuagucccuguucccagagcccacuuuuuuuucuuuuuuugaaauaaaauagccugucuuucagaucucaaaggcucuuuucagagccaccaaaaaaaaaaaaaaaaaaaaaaaaaaaaaaaaaaaaaaaaaaaaaaaaaaaaaaaaaaaaaaaaagaauu

SEQ ID NO: 6904 - RNA, 1319 nt, Artificial Sequence
  mRNA Design a-3 (hSL-A64-N5) comprising derived and/or modified sequence from Pf(3D7)__XP_001351122.1__HsALB_Pf-CSP(19-272)_L(AAY)_Pf-CSP(310-3 27)_L(AAY)_Pf-CSP(346-375) (opt3)
aggagagggcgcuuggcuugcaaggacccugagcugcggcauugaagcacacccaacccaacucgacugaagucagccucacugaaccggaucugagaaucuucucucucugggcuugccagggcucuccgaaccuagcuagcauccucuucaauuccaacuagaaagcuuaccaugaagugggugaccuucaucagccugcucuuucuuuucuccucugccuacucacuguuucaggaguaucaaugcuacggcaguagcuccaacacaagagucuugaaugaauuaaacuaugacaaugcugggacuaaccuguacaaugagcuagaaaugaacuauuacggaaaacaggagaauugguauucucucaagaaaaacucgaggucacugggugaaaaugaugacggcaacaaugaggauaacgagaaacuucggaagcccaagcacaagaaacugaagcagccugcagacgggaauccagauccgaacgccaaucccaacguugacccuaacgcgaauccaaacguggaucccaaugcuaacccuaauguagacccaaacgccaaucccaacgcaaauccuaacgccaauccaaacgcuaauccgaacgcaaaucccaacgccaacccuaaugcuaacccaaaugccaaccccaaugcgaacccuaaugcaaacccaaaugccaaccccaaugcuaacccgaaugccaacccuaaugcaaaccccaacgcuaauccaaacgccaauccuaacgcgaaucccaacguggauccaaaugccaaccccaaugcaaacccuaaugcuaacccaaaugccaacccgaaugcuaaccccaacgccaauccuaacgcaaauccaaacgccaaucccaacgcuaauccuaacgcgaauccaaacgcaaaucccaacgccaauccgaacgcuaauccuaacgccaauccaaacgcaaaccccaaugccaacccuaaugcuaaccccaaugccaacccagcagcguacgaaccuagcgacaaacauauuaaggaguacuugaauaaaauacagaacagucucgcugccuauaucaagcccggauccgcaaauaagccaaaagaugaacuggacuacgccaacgauauugagaagaaaaucuguaagauggagaaaugcucuugaggacuagucccuguucccagagcccacuuuuuuuucuuuuuuugaaauaaaauagccugucuuucagaucucaaaggcucuuuucagagccaccaaaaaaaaaaaaaaaaaaaaaaaaaaaaaaaaaaaaaaaaaaaaaaaaaaaaaaaaaaaaaaaaagaauu

SEQ ID NO: 6905 - RNA, 1280 nt, Artificial Sequence
  mRNA Design a-3 (hSL-A64-N5) comprising derived and/or modified sequence from Pf(3D7)__XP_001351122.1__HsALB_Pf-CSP(19-272)_L(AAY)_Pf-CSP(346-3 65)_L(AAY)_P2 (opt3)
aggagagggcgcuuggcuugcaaggacccugagcugcggcauugaagcacacccaacccaacucgacugaagucagccucacugaaccggaucugagaaucuucucucucugggcuugccagggcucuccgaaccuagcuagcauccucuucaauuccaacuagaaagcuuaccaugaagugggugaccuucaucagccugcucuuucuuuucuccucugccuacucacuguuucaggaguaucaaugcuacggcaguagcuccaacacaagagucuugaaugaauuaaacuaugacaaugcugggacuaaccuguacaaugagcuagaaaugaacuauuacggaaaacaggagaauugguauucucucaagaaaaacucgaggucacugggugaaaaugaugacggcaacaaugaggauaacgagaaacuucggaagcccaagcacaagaaacugaagcagccugcagacgggaauccagauccgaacgccaaucccaacguugacccuaacgcgaauccaaacguggaucccaaugcuaacccuaauguagacccaaacgccaaucccaacgcaaauccuaacgccaauccaaacgcuaauccgaacgcaaaucccaacgccaacccuaaugcuaacccaaaugccaaccccaaugcgaacccuaaugcaaacccaaaugccaaccccaaugcuaacccgaaugccaacccuaaugcaaaccccaacgcuaauccaaacgccaauccuaacgcgaaucccaacguggauccaaaugccaaccccaaugcaaacccuaaugcuaacccaaaugccaacccgaaugcuaaccccaacgccaauccuaacgcaaauccaaacgccaaucccaacgcuaauccuaacgcgaauccaaacgcaaaucccaacgccaauccgaacgcuaauccuaacgccaauccaaacgcaaaccccaaugccaacccuaaugcuaaccccaaugccaacccagcagcguacauuaaaccuggaagcgcuaauaagcccaaagacgaauuggauuacgccaacgacauagaggcagccuaucaguacaucaaggcuaauaguaaguucauuggcaucacggaacucugaggacuagucccuguucccagagcccacuuuuuuuucuuuuuuugaaauaaaauagccugucuuucagaucucaaaggcucuuuucagagccaccaaaaaaaaaaaaaaaaaaaaaaaaaaaaaaaaaaaaaaaaaaaaaaaaaaaaaaaaaaaaaaaaagaauu

SEQ ID NO: 6906 - RNA, 1274 nt, Artificial Sequence
  mRNA Design a-3 (hSL-A64-N5) comprising derived and/or modified sequence from Pf(3D7)__XP_001351122.1__HsALB_Pf-CSP(19-272)_L(AAY)_Pf-CSP(346-3 65)_L(AAY)_PADRE (opt3)
aggagagggcgcuuggcuugcaaggacccugagcugcggcauugaagcacacccaacccaacucgacugaagucagccucacugaaccggaucugagaaucuucucucucugggcuugccagggcucuccgaaccuagcuagcauccucuucaauuccaacuagaaagcuuaccaugaagugggugaccuucaucagccugcucuuucuuuucuccucugccuacucacuguuucaggaguaucaaugcuacggcaguagcuccaacacaagagucuugaaugaauuaaacuaugacaaugcugggacuaaccuguacaaugagcuagaaaugaacuauuacggaaaacaggagaauugguauucucucaagaaaaacucgaggucacugggugaaaaugaugacggcaacaaugaggauaacgagaaacuucggaagcccaagcacaagaaacugaagcagccugcagacgggaauccagauccgaacgccaaucccaacguugacccuaacgcgaauccaaacguggaucccaaugcuaacccuaauguagacccaaacgccaaucccaacgcaaauccuaacgccaauccaaacgcuaauccgaacgcaaaucccaacgccaacccuaaugcuaacccaaaugccaaccccaaugcgaacccuaaugcaaacccaaaugccaaccccaaugcuaacccgaaugccaacccuaaugcaaaccccaacgcuaauccaaacgccaauccuaacgcgaaucccaacguggauccaaaugccaaccccaaugcaaacccuaaugcuaacccaaaugccaacccgaaugcuaaccccaacgccaauccuaacgcaaauccaaacgccaaucccaacgcuaauccuaacgcgaauccaaacgcaaaucccaacgccaauccgaacgcuaauccuaacgccaauccaaacgcaaaccccaaugccaacccuaaugcuaaccccaaugccaacccagcagcguacauuaaaccuggaagcgcuaauaagcccaaagacgaauuggauuacgccaacgacauagaggcagccuaugcuaaguucgucgccgcauggacgcucaaggcugccgcgugaggacuagucccuguucccagagcccacuuuuuuuucuuuuuuugaaauaaaauagccugucuuucagaucucaaaggcucuuuucagagccaccaaaaaaaaaaaaaaaaaaaaaaaaaaaaaaaaaaaaaaaaaaaaaaaaaaaaaaaaaaaaaaaaagaauu

SEQ ID NO: 6907 - RNA, 1331 nt, Artificial Sequence
  mRNA Design a-3 (hSL-A64-N5) comprising derived and/or modified sequence from Pf(3D7)__XP_001351122.1__HsALB_Pf-CSP(19-272)_L(G4S)_Pf-CSP(310-3 27)_L(G4S)_Pf-CSP(346-375) (opt3)
aggagagggcgcuuggcuugcaaggacccugagcugcggcauugaagcacacccaacccaacucgacugaagucagccucacugaaccggaucugagaaucuucucucucugggcuugccagggcucuccgaaccuagcuagcauccucuucaauuccaacuagaaagcuuaccaugaagugggugaccuucaucagccugcucuuucuuuucuccucugccuacucacuguuucaggaguaucaaugcuacggcaguagcuccaacacaagagucuugaaugaauuaaacuaugacaaugcugggacuaaccuguacaaugagcuagaaaugaacuauuacggaaaacaggagaauugguauucucucaagaaaaacucgaggucacugggugaaaaugaugacggcaacaaugaggauaacgagaaacuucggaagcccaagcacaagaaacugaagcagccugcagacgggaauccagauccgaacgccaaucccaacguugacccuaacgcgaauccaaacguggaucccaaugcuaacccuaauguagacccaaacgccaaucccaacgcaaauccuaacgccaauccaaacgcuaauccgaacgcaaaucccaacgccaacccuaaugcuaacccaaaugccaaccccaaugcgaacccuaaugcaaacccaaaugccaaccccaaugcuaacccgaaugccaacccuaaugcaaaccccaacgcuaauccaaacgccaauccuaacgcgaaucccaacguggauccaaaugccaaccccaaugcaaacccuaaugcuaacccaaaugccaacccgaaugcuaaccccaacgccaauccuaacgcaaauccaaacgccaaucccaacgcuaauccuaacgcgaauccaaacgcaaaucccaacgccaauccgaacgcuaauccuaacgccaauccaaacgcaaaccccaaugccaacccuaaugcuaaccccaaugccaacccaggaggcggugggagcgaaccuagugacaaacauauuaaggaguacuugaauaaaauacagaacucccucggaggcggcgggucuaucaagcccggaagcgcaaauaagccaaaagaugaacuggacuacgcgaacgauauugagaagaaaaucuguaagauggagaaaugcuccugaggacuagucccuguucccagagcccacuuuuuuuucuuuuuuugaaauaaaauagccugucuuucagaucucaaaggcucuuuucagagccaccaaaaaaaaaaaaaaaaaaaaaaaaaaaaaaaaaaaaaaaaaaaaaaaaaaaaaaaaaaaaaaaaagaauu

SEQ ID NO: 6908 - RNA, 1316 nt, Artificial Sequence
  mRNA Design a-3 (hSL-A64-N5) comprising derived and/or modified sequence from Pf(3D7)__XP_001351122.1__HsALB_Pf-CSP(19-272)_L(G4S)_Pf-CSP(310-3 27)_Pf-CSP(346-375) (opt3)
aggagagggcgcuuggcuugcaaggacccugagcugcggcauugaagcacacccaacccaacucgacugaagucagccucacugaaccggaucugagaaucuucucucucugggcuugccagggcucuccgaaccuagcuagcauccucuucaauuccaacuagaaagcuuaccaugaagugggugaccuucaucagccugcucuuucuuuucuccucugccuacucacuguuucaggaguaucaaugcuacggcaguagcuccaacacaagagucuugaaugaauuaaacuaugacaaugcugggacuaaccuguacaaugagcuagaaaugaacuauuacggaaaacaggagaauugguauucucucaagaaaaacucgaggucacugggugaaaaugaugacggcaacaaugaggauaacgagaaacuucggaagcccaagcacaagaaacugaagcagccugcagacgggaauccagauccgaacgccaaucccaacguugacccuaacgcgaauccaaacguggaucccaaugcuaacccuaauguagacccaaacgccaaucccaacgcaaauccuaacgccaauccaaacgcuaauccgaacgcaaaucccaacgccaacccuaaugcuaacccaaaugccaaccccaaugcgaacccuaaugcaaacccaaaugccaaccccaaugcuaacccgaaugccaacccuaaugcaaaccccaacgcuaauccaaacgccaauccuaacgcgaaucccaacguggauccaaaugccaaccccaaugcaaacccuaaugcuaacccaaaugccaacccgaaugcuaaccccaacgccaauccuaacgcaaauccaaacgccaaucccaacgcuaauccuaacgcgaauccaaacgcaaaucccaacgccaauccgaacgcuaauccuaacgccaauccaaacgcaaaccccaaugccaacccuaaugcuaaccccaaugccaacccaggaggcggugggagcgaaccuagugacaaacauauuaaggaguacuugaauaaaauacagaacucccucaucaagcccggaucugcaaauaagccaaaagaugaacuggacuacgcgaacgauauugagaagaaaaucuguaagauggagaaaugcagcugaggacuagucccuguucccagagcccacuuuuuuuucuuuuuuugaaauaaaauagccugucuuucagaucucaaaggcucuuuucagagccaccaaaaaaaaaaaaaaaaaaaaaaaaaaaaaaaaaaaaaaaaaaaaaaaaaaaaaaaaaaaaaaaaagaauu

SEQ ID NO: 6909 - RNA, 1316 nt, Artificial Sequence
  mRNA Design a-3 (hSL-A64-N5) comprising derived and/or modified sequence from Pf(3D7)__XP_001351122.1__HsALB_Pf-CSP(19-325) (opt3)
aggagagggcgcuuggcuugcaaggacccugagcugcggcauugaagcacacccaacccaacucgacugaagucagccucacugaaccggaucugagaaucuucucucucugggcuugccagggcucuccgaaccuagcuagcauccucuucaauuccaacuagaaagcuuaccaugaagugggugaccuucaucagccugcucuuucuuuucuccucugccuacucacuguuucaggaguaucaaugcuacggcaguagcuccaacacaagagucuugaaugaauuaaacuaugacaaugcugggacuaaccuguacaaugagcuagaaaugaacuauuacggaaaacaggagaauugguauucucucaagaaaaacucgaggucacugggugaaaaugaugacggcaacaaugaggauaacgagaaacuucggaagcccaagcacaagaaacugaagcagccugcagacgggaauccagauccgaacgccaaucccaacguugacccuaacgcgaauccaaacguggaucccaaugcuaacccuaauguagacccaaacgccaaucccaacgcaaauccuaacgccaauccaaacgcuaauccgaacgcaaaucccaacgccaacccuaaugcuaacccaaaugccaaccccaaugcgaacccuaaugcaaacccaaaugccaaccccaaugcuaacccgaaugccaacccuaaugcaaaccccaacgcuaauccaaacgccaauccuaacgcgaaucccaacguggauccaaaugccaaccccaaugcaaacccuaaugcuaacccaaaugccaacccgaaugcuaaccccaacgccaauccuaacgcaaauccaaacgccaaucccaacgcuaauccuaacgcgaauccaaacgcaaaucccaacgccaauccgaacgcuaauccuaacgccaauccaaacgcaaaccccaaugccaacccuaaugcuaaccccaaugccaacccaaauaaaaacaaucagggaaacggccaaggucauaauaugccuaacgaccccaaucgcaacgucgaugaaaaugcaaacgcgaacagcgcugugaagaauaacaauaacgaggaaccaagugacaaacacauuaaggaguacuugaauaagauacagaacugaggacuagucccuguucccagagcccacuuuuuuuucuuuuuuugaaauaaaauagccugucuuucagaucucaaaggcucuuuucagagccaccaaaaaaaaaaaaaaaaaaaaaaaaaaaaaaaaaaaaaaaaaaaaaaaaaaaaaaaaaaaaaaaaagaauu

SEQ ID NO: 6910 - RNA, 1493 nt, Artificial Sequence
  mRNA Design a-3 (hSL-A64-N5) comprising derived and/or modified sequence from Pf(3D7)__XP_001351122.1__HsALB_Pf-CSP(19-384) (opt3)
aggagagggcgcuuggcuugcaaggacccugagcugcggcauugaagcacacccaacccaacucgacugaagucagccucacugaaccggaucugagaaucuucucucucugggcuugccagggcucuccgaaccuagcuagcauccucuucaauuccaacuagaaagcuuaccaugaagugggugaccuucaucagccugcucuuucuuuucuccucugccuacucacuguuucaggaguaucaaugcuacggcaguagcuccaacacaagagucuugaaugaauuaaacuaugacaaugcugggacuaaccuguacaaugagcuagaaaugaacuauuacggaaaacaggagaauugguauucucucaagaaaaacucgaggucacugggugaaaaugaugacggcaacaaugaggauaacgagaaacuucggaagcccaagcacaagaaacugaagcagccugcagacgggaauccagauccgaacgccaaucccaacguugacccuaacgcgaauccaaacguggaucccaaugcuaacccuaauguagacccaaacgccaaucccaacgcaaauccuaacgccaauccaaacgcuaauccgaacgcaaaucccaacgccaacccuaaugcuaacccaaaugccaaccccaaugcgaacccuaaugcaaacccaaaugccaaccccaaugcuaacccgaaugccaacccuaaugcaaaccccaacgcuaauccaaacgccaauccuaacgcgaaucccaacguggauccaaaugccaaccccaaugcaaacccuaaugcuaacccaaaugccaacccgaaugcuaaccccaacgccaauccuaacgcaaauccaaacgccaaucccaacgcuaauccuaacgcgaauccaaacgcaaaucccaacgccaauccgaacgcuaauccuaacgccaauccaaacgcaaaccccaaugccaacccuaaugcuaaccccaaugccaacccaaauaaaaacaaucagggaaacggccaaggucauaauaugccuaacgaccccaaucgcaacgucgaugaaaaugcaaacgcgaacagcgcugugaagaauaacaauaacgaggaaccaagugacaaacacauuaaggaguacuugaauaagauacagaacucccucucuacggaguggagcccguguuccguuaccugcgggaauggaauccaggugcgaauuaaaccuggcucagccaacaagcccaaagaugaacuggacuacgcaaaugacaucgagaagaaaauuuguaagauggaaaaaugcaguagcgucuucaacgugguaaauucuuccugaggacuagucccuguucccagagcccacuuuuuuuucuuuuuuugaaauaaaauagccugucuuucagaucucaaaggcucuuuucagagccaccaaaaaaaaaaaaaaaaaaaaaaaaaaaaaaaaaaaaaaaaaaaaaaaaaaaaaaaaaaaaaaaaagaauu

SEQ ID NO: 6911 - RNA, 1631 nt, Artificial Sequence
  mRNA Design a-3 (hSL-A64-N5) comprising derived and/or modified sequence from Pf(3D7)__XP_001351122.1__HsALB_Pf-CSP(19-384)_TM domain HA (opt3)
aggagagggcgcuuggcuugcaaggacccugagcugcggcauugaagcacacccaacccaacucgacugaagucagccucacugaaccggaucugagaaucuucucucucugggcuugccagggcucuccgaaccuagcuagcauccucuucaauuccaacuagaaagcuuaccaugaagugggugaccuucaucagccugcucuuucuuuucuccucugccuacucacuguuucaggaguaucaaugcuacggcaguagcuccaacacaagagucuugaaugaauuaaacuaugacaaugcugggacuaaccuguacaaugagcuagaaaugaacuauuacggaaaacaggagaauugguauucucucaagaaaaacucgaggucacugggugaaaaugaugacggcaacaaugaggauaacgagaaacuucggaagcccaagcacaagaaacugaagcagccugcagacgggaauccagauccgaacgccaaucccaacguugacccuaacgcgaauccaaacguggaucccaaugcuaacccuaauguagacccaaacgccaaucccaacgcaaauccuaacgccaauccaaacgcuaauccgaacgcaaaucccaacgccaacccuaaugcuaacccaaaugccaaccccaaugcgaacccuaaugcaaacccaaaugccaaccccaaugcuaacccgaaugccaacccuaaugcaaaccccaacgcuaauccaaacgccaauccuaacgcgaaucccaacguggauccaaaugccaaccccaaugcaaacccuaaugcuaacccaaaugccaacccgaaugcuaaccccaacgccaauccuaacgcaaauccaaacgccaaucccaacgcuaauccuaacgcgaauccaaacgcaaaucccaacgccaauccgaacgcuaauccuaacgccaauccaaacgcaaaccccaaugccaacccuaaugcuaaccccaaugccaacccaaauaaaaacaaucagggaaacggccaaggucauaauaugccuaacgaccccaaucgcaacgucgaugaaaaugcaaacgcgaacagcgcugugaagaauaacaauaacgaggaaccaagugacaaacacauuaaggaguacuugaauaagauacagaacucccucucuacggaguggagcccguguuccguuaccugcgggaauggaauccaggugcgaauuaaaccuggcucagccaacaagcccaaagaugaacuggacuacgcaaaugacaucgagaagaaaauuuguaagauggaaaaaugcaguagcgucuucaacgugguaaauucuuccaagcuggagucaacacguaucuaucagauacucgccaucuacagcacuguugcuaguucuuuagugcuggucgugucccuuggcgccauuagcuuuuggauguguucgaacgggucuuugcaaugcagaaucuguauuugaggacuagucccuguucccagagcccacuuuuuuuucuuuuuuugaaauaaaauagccugucuuucagaucucaaaggcucuuuucagagccaccaaaaaaaaaaaaaaaaaaaaaaaaaaaaaaaaaaaaaaaaaaaaaaaaaaaaaaaaaaaaaaaaagaauu

SEQ ID NO: 6912 - RNA, 1343 nt, Artificial Sequence
  mRNA Design a-3 (hSL-A64-N5) comprising derived and/or modified sequence from Pf(3D7)__XP_001351122.1__HsALB_Pf-CSP(82-397) (opt3)
aggagagggcgcuuggcuugcaaggacccugagcugcggcauugaagcacacccaacccaacucgacugaagucagccucacugaaccggaucugagaaucuucucucucugggcuugccagggcucuccgaaccuagcuagcauccucuucaauuccaacuagaaagcuuaccaugaagugggugaccuucaucagccugcucuuucuuuucuccucugccuacucagacaacgagaaacugagaaagcccaaacacaagaaauugaagcagccugcugauggcaauccagacccgaacgcaaaucccaacgucgauccuaaugccaacccaaauguugaccccaacgcgaauccuaacguggauccaaaugcuaaccccaaugccaacccuaaugcaaacccaaacgccaauccgaacgcuaaucccaacgcaaauccuaacgccaauccaaacgcuaaucccaacgccaauccuaacgcgaauccaaacgcaaaucccaacgccaacccgaaugcuaacccuaaugccaaccccaaugcaaacccaaaugcuaacccuaaugccaaccccaauguagacccaaacgcgaaucccaacgccaauccuaacgcaaacccaaaugcuaacccgaaugccaaccccaaugcuaacccuaaugccaacccaaaugcaaaccccaaugccaacccuaaugcuaacccaaaugcgaaccccaacgcaaauccgaacgccaauccuaacgcuaauccaaacgccaaucccaacgcaaauccuaacgccaaucccaacgcuaauccaaacaagaauaaccaggggaauggacagggucauaacaugccuaacgaucccaauaggaacguggacgaaaaugccaacgcaaauagugcggucaaaaacaauaacaaugaggaaccaagcgauaagcacauuaaagaguauuuaaacaagauacaaaauucccugucuacagaauggucgccgugcucagugacuuguggcaacgggauccagguucggauuaaaccuggaagcgcuaauaagcccaaggacgagcuagauuacgccaacgacaucgagaaaaagauuugcaaaauggaaaaguguaguuccguguuuaaugucgugaacucuagcaucggccucauaaugguacuguccuuccuuuuucugaacugaggacuagucccuguucccagagcccacuuuuuuuucuuuuuuugaaauaaaauagccugucuuucagaucucaaaggcucuuuucagagccaccaaaaaaaaaaaaaaaaaaaaaaaaaaaaaaaaaaaaaaaaaaaaaaaaaaaaaaaaaaaaaaaaagaauu

SEQ ID NO: 6913 - RNA, 695 nt, Artificial Sequence
  mRNA Design a-3 (hSL-A64-N5) comprising derived and/or modified sequence from Pf(3D7)__XP_001351122.1__HsALB_Pf-CSP(93-192) (opt3)
aggagagggcgcuuggcuugcaaggacccugagcugcggcauugaagcacacccaacccaacucgacugaagucagccucacugaaccggaucugagaaucuucucucucugggcuugccagggcucuccgaaccuagcuagcauccucuucaauuccaacuagaaagcuuaccaugaagugggugaccuucaucagccugcucuuucuuuucuccucugccuacucaaaacugaagcagcccgcugacggcaacccugauccaaaugcaaacccgaaugucgaccccaacgccaauccuaacguugauccaaaugcgaaccccaauguggacccuaacgcuaauccaaacgccaaucccaacgcaaauccuaacgccaacccaaaugcuaacccgaaugcaaaccccaaugccaacccuaaugcuaacccaaaugccaaccccaaugcgaacccuaaugcaaacccaaaugccaaccccaacgcuaauccgaacgccaauccuaacgcaaaucccaacgcuaauccaugaggacuagucccuguucccagagcccacuuuuuuuucuuuuuuugaaauaaaauagccugucuuucagaucucaaaggcucuuuucagagccaccaaaaaaaaaaaaaaaaaaaaaaaaaaaaaaaaaaaaaaaaaaaaaaaaaaaaaaaaaaaaaaaaagaauu

SEQ ID NO: 6914 - RNA, 935 nt, Artificial Sequence
  mRNA Design a-3 (hSL-A64-N5) comprising derived and/or modified sequence from Pf(3D7)__XP_001351122.1__HsALB_Pf-CSP(93-272) (opt3)
aggagagggcgcuuggcuugcaaggacccugagcugcggcauugaagcacacccaacccaacucgacugaagucagccucacugaaccggaucugagaaucuucucucucugggcuugccagggcucuccgaaccuagcuagcauccucuucaauuccaacuagaaagcuuaccaugaagugggugaccuucaucagccugcucuuucuuuucuccucugccuacucaaaacugaagcagcccgcugacggcaacccugauccaaaugcaaacccgaaugucgaccccaacgccaauccuaacguugauccaaaugcgaaccccaauguggacccuaacgcuaauccaaacgccaaucccaacgcaaauccuaacgccaacccaaaugcuaacccgaaugcaaaccccaaugccaacccuaaugcuaacccaaaugccaaccccaaugcgaacccuaaugcaaacccaaaugccaaccccaacgcuaauccgaacgccaauccuaacgcaaaucccaacgcuaauccaaacgccaauccuaacguagaucccaaugcgaacccaaaugccaaccccaaugcaaacccuaacgcuaauccaaacgccaauccgaacgcuaaucccaacgccaauccuaacgcaaauccaaacgccaaucccaacgcuaauccuaacgcgaauccaaacgcaaaccccaaugccaacccgaaugcuaacccuaaugccaacccaaaugcaaaccccaaugccaacccuaaugcuaaccccugaggacuagucccuguucccagagcccacuuuuuuuucuuuuuuugaaauaaaauagccugucuuucagaucucaaaggcucuuuucagagccaccaaaaaaaaaaaaaaaaaaaaaaaaaaaaaaaaaaaaaaaaaaaaaaaaaaaaaaaaaaaaaaaaagaauu

SEQ ID NO: 6915 - RNA, 1310 nt, Artificial Sequence
  mRNA Design a-3 (hSL-A64-N5) comprising derived and/or modified sequence from Pf(3D7)__XP_001351122.1__HsALB_Pf-CSP(93-397) (opt3)
aggagagggcgcuuggcuugcaaggacccugagcugcggcauugaagcacacccaacccaacucgacugaagucagccucacugaaccggaucugagaaucuucucucucugggcuugccagggcucuccgaaccuagcuagcauccucuucaauuccaacuagaaagcuuaccaugaagugggugaccuucaucagccugcucuuucuuuucuccucugccuacucaaaacugaagcagcccgcugacggcaacccugauccaaaugcaaacccgaaugucgaccccaacgccaauccuaacguugauccaaaugcgaaccccaauguggacccuaacgcuaauccaaacgccaaucccaacgcaaauccuaacgccaacccaaaugcuaacccgaaugcaaaccccaaugccaacccuaaugcuaacccaaaugccaaccccaaugcgaacccuaaugcaaacccaaaugccaaccccaacgcuaauccgaacgccaauccuaacgcaaaucccaacgcuaauccaaacgccaauccuaacguagaucccaaugcgaacccaaaugccaaccccaaugcaaacccuaacgcuaauccaaacgccaauccgaacgcuaaucccaacgccaauccuaacgcaaauccaaacgccaaucccaacgcuaauccuaacgcgaauccaaacgcaaaccccaaugccaacccgaaugcuaacccuaaugccaacccaaaugcaaaccccaaugccaacccuaaugcuaaccccaauaaaaacaaucaagggaacggacagggucacaauaugccaaacgacccuaacagaaauguggaugagaacgccaaugcaaacagugcggucaagaauaacaauaacgaggaacccagcgacaaacauauuaaggaauauuugaauaagauacagaacuccuuaucuacagaguggucgccaugcucagugacuuguggcaaugggauccagguuaggauuaaaccgggaagcgcuaacaagccuaaagaugaacuggacuacgccaaugauaucgagaagaaaauuugcaagauggagaaguguaguuccguguuuaacgucguaaauucuagcaucggccuaauaauggugcucuccuuccuguuucuuaacugaggacuagucccuguucccagagcccacuuuuuuuucuuuuuuugaaauaaaauagccugucuuucagaucucaaaggcucuuuucagagccaccaaaaaaaaaaaaaaaaaaaaaaaaaaaaaaaaaaaaaaaaaaaaaaaaaaaaaaaaaaaaaaaaagaauu

SEQ ID NO: 6916 - RNA, 680 nt, Artificial Sequence
  mRNA Design a-3 (hSL-A64-N5) comprising derived and/or modified sequence from Pf(3D7)__XP_001351122.1__HsALB_Pf-CSP(98-192) (opt3)
aggagagggcgcuuggcuugcaaggacccugagcugcggcauugaagcacacccaacccaacucgacugaagucagccucacugaaccggaucugagaaucuucucucucugggcuugccagggcucuccgaaccuagcuagcauccucuucaauuccaacuagaaagcuuaccaugaagugggugaccuucaucagccugcucuuucuuuucuccucugccuacucagcugacggcaaccccgauccuaaugcaaacccaaaugucgacccgaacgccaaucccaacguugauccuaaugcgaacccaaauguggaccccaacgcuaauccuaacgccaauccaaacgcaaaucccaacgccaacccuaaugcuaacccaaaugcaaacccgaaugccaaccccaaugcuaacccuaaugccaacccaaaugcgaaccccaaugcaaacccuaaugccaacccaaacgcuaaucccaacgccaauccgaacgcaaauccuaacgcuaaucccugaggacuagucccuguucccagagcccacuuuuuuuucuuuuuuugaaauaaaauagccugucuuucagaucucaaaggcucuuuucagagccaccaaaaaaaaaaaaaaaaaaaaaaaaaaaaaaaaaaaaaaaaaaaaaaaaaaaaaaaaaaaaaaaaagaauu

SEQ ID NO: 6917 - RNA, 920 nt, Artificial Sequence
  mRNA Design a-3 (hSL-A64-N5) comprising derived and/or modified sequence from Pf(3D7)__XP_001351122.1__HsALB_Pf-CSP(98-272) (opt3)
aggagagggcgcuuggcuugcaaggacccugagcugcggcauugaagcacacccaacccaacucgacugaagucagccucacugaaccggaucugagaaucuucucucucugggcuugccagggcucuccgaaccuagcuagcauccucuucaauuccaacuagaaagcuuaccaugaagugggugaccuucaucagccugcucuuucuuuucuccucugccuacucagcugacggcaaccccgauccuaaugcaaacccaaaugucgacccgaacgccaaucccaacguugauccuaaugcgaacccaaauguggaccccaacgcuaauccuaacgccaauccaaacgcaaaucccaacgccaacccuaaugcuaacccaaaugcaaacccgaaugccaaccccaaugcuaacccuaaugccaacccaaaugcgaaccccaaugcaaacccuaaugccaacccaaacgcuaaucccaacgccaauccgaacgcaaauccuaacgcuaaucccaacgccaauccaaacguagauccuaaugcgaaccccaaugccaacccaaaugcaaaccccaacgcuaauccuaacgccaauccaaacgcuaauccgaacgccaaucccaacgcaaauccuaacgccaauccaaacgcuaaucccaacgcgaauccuaacgcaaacccaaaugccaaccccaaugcuaacccgaaugccaacccuaaugcaaacccaaaugccaaccccaaugcuaacccuugaggacuagucccuguucccagagcccacuuuuuuuucuuuuuuugaaauaaaauagccugucuuucagaucucaaaggcucuuuucagagccaccaaaaaaaaaaaaaaaaaaaaaaaaaaaaaaaaaaaaaaaaaaaaaaaaaaaaaaaaaaaaaaaaagaauu

SEQ ID NO: 6918 - RNA, 1226 nt, Artificial Sequence
  mRNA Design a-3 (hSL-A64-N5) comprising derived and/or modified sequence from Pf(3D7)__XP_001351122.1__HsALB_Pf-CSP(98-374) (opt3)
aggagagggcgcuuggcuugcaaggacccugagcugcggcauugaagcacacccaacccaacucgacugaagucagccucacugaaccggaucugagaaucuucucucucugggcuugccagggcucuccgaaccuagcuagcauccucuucaauuccaacuagaaagcuuaccaugaagugggugaccuucaucagccugcucuuucuuuucuccucugccuacucagcugacggcaaccccgauccuaaugcaaacccaaaugucgacccgaacgccaaucccaacguugauccuaaugcgaacccaaauguggaccccaacgcuaauccuaacgccaauccaaacgcaaaucccaacgccaacccuaaugcuaacccaaaugcaaacccgaaugccaaccccaaugcuaacccuaaugccaacccaaaugcgaaccccaaugcaaacccuaaugccaacccaaacgcuaaucccaacgccaauccgaacgcaaauccuaacgcuaaucccaacgccaauccaaacguagauccuaaugcgaaccccaaugccaacccaaaugcaaaccccaacgcuaauccuaacgccaauccaaacgcuaauccgaacgccaaucccaacgcaaauccuaacgccaauccaaacgcuaaucccaacgcgaauccuaacgcaaacccaaaugccaaccccaaugcuaacccgaaugccaacccuaaugcaaacccaaaugccaaccccaaugcuaacccuaauaaaaacaaucaggggaacggacaaggucacaauaugcccaacgacccaaacagaaauguggaugagaacgccaaugcaaacagugcggucaagaauaacaauaacgaggaaccuagcgacaaacauauuaaggaauaucugaauaaaauacagaacuccuugucuacagaguggucgcccugcucagugacuuguggcaaugggauccagguuaggauuaagccaggaagcgcuaacaagccgaaagaugaauuagacuacgccaaugauaucgagaagaaaauuugcaagauggagaaauguugaggacuagucccuguucccagagcccacuuuuuuuucuuuuuuugaaauaaaauagccugucuuucagaucucaaaggcucuuuucagagccaccaaaaaaaaaaaaaaaaaaaaaaaaaaaaaaaaaaaaaaaaaaaaaaaaaaaaaaaaaaaaaaaaagaauu

SEQ ID NO: 6919 - RNA, 1295 nt, Artificial Sequence
  mRNA Design a-3 (hSL-A64-N5) comprising derived and/or modified sequence from Pf(3D7)__XP_001351122.1__HsALB_Pf-CSP(98-397) (opt3)
aggagagggcgcuuggcuugcaaggacccugagcugcggcauugaagcacacccaacccaacucgacugaagucagccucacugaaccggaucugagaaucuucucucucugggcuugccagggcucuccgaaccuagcuagcauccucuucaauuccaacuagaaagcuuaccaugaagugggugaccuucaucagccugcucuuucuuuucuccucugccuacucagcugacggcaaccccgauccuaaugcaaacccaaaugucgacccgaacgccaaucccaacguugauccuaaugcgaacccaaauguggaccccaacgcuaauccuaacgccaauccaaacgcaaaucccaacgccaacccuaaugcuaacccaaaugcaaacccgaaugccaaccccaaugcuaacccuaaugccaacccaaaugcgaaccccaaugcaaacccuaaugccaacccaaacgcuaaucccaacgccaauccgaacgcaaauccuaacgcuaaucccaacgccaauccaaacguagauccuaaugcgaaccccaaugccaacccaaaugcaaaccccaacgcuaauccuaacgccaauccaaacgcuaauccgaacgccaaucccaacgcaaauccuaacgccaauccaaacgcuaaucccaacgcgaauccuaacgcaaacccaaaugccaaccccaaugcuaacccgaaugccaacccuaaugcaaacccaaaugccaaccccaaugcuaacccuaauaaaaacaaucaggggaacggacaaggucacaauaugcccaacgacccaaacagaaauguggaugagaacgccaaugcaaacagugcggucaagaauaacaauaacgaggaaccuagcgacaaacauauuaaggaauaucugaauaaaauacagaacuccuugucuacagaguggucgcccugcucagugacuuguggcaaugggauccagguuaggauuaagccaggaagcgcuaacaagccgaaagaugaauuagacuacgccaaugauaucgagaagaaaauuugcaagauggagaaauguaguuccguguuuaacgucguaaauucuagcaucggccugauaauggugcuauccuuccucuuucugaacugaggacuagucccuguucccagagcccacuuuuuuuucuuuuuuugaaauaaaauagccugucuuucagaucucaaaggcucuuuucagagccaccaaaaaaaaaaaaaaaaaaaaaaaaaaaaaaaaaaaaaaaaaaaaaaaaaaaaaaaaaaaaaaaaagaauu

SEQ ID NO: 6920 - RNA, 1622 nt, Artificial Sequence
  mRNA Design a-3 (hSL-A64-N5) comprising derived and/or modified sequence from Pf(3D7)__XP_001351122.1__HsALB_Pf-CSP(199-377)_L(PVTN)_HBsAg (opt3)
aggagagggcgcuuggcuugcaaggacccugagcugcggcauugaagcacacccaacccaacucgacugaagucagccucacugaaccggaucugagaaucuucucucucugggcuugccagggcucuccgaaccuagcuagcauccucuucaauuccaacuagaaagcuuaccaugaagugggugaccuucaucagccugcucuuucuuuucuccucugccuacucagaccccaacgcuaauccuaacgcaaauccaaacgccaauccgaacgcgaaucccaacgcuaauccuaacgccaauccaaacgcaaaucccaacgccaauccuaacgcuaacccaaaugcaaaccccaaugccaacccuaaugcuaacccaaaugccaacccgaaugcgaaccccaaugcaaacccuaaugccaacccaaaugcuaaccccaacgccaauccuaacaaaaauaaccagggcaaugggcaaggacacaacaugccaaaugaucccaacagaaaugucgacgagaacgcaaaugcuaacagugccguuaagaauaacaauaacgaggaaccgagcgauaaacauauuaaggaauaucugaacaaaauacaaaauuccuugucuacagaguggucgccuugcucagugacuugugguaacggcauccagguaaggauuaagcccgggagcgcgaauaagccaaaagacgaauuagauuacgccaacgacaucgagaagaaaauuugcaagauggagaaauguaguuccgugccugucacgaauauggaaaacaucaccucuggauuucugggcccccuacucgugcugcaggcagguuucuuucuucugacacggauauugacuaucccacagagccucgauuccugguggaccucacugaauuuccucgggggaagucccguuugccugggccagaacagccagucuccuacauccaaucacucaccaaccagcuguccgcccauuugcccuggcuaucgcuggauguguuuacgacguuuuaucauuuuccuguuuauccuuuugcugugccuaauauuccuccuggugcuucuggacuaccaggggauguugccagucuguccccucauuccuggaaguacuacaaccaacacggguccaugcaagacuuguaccacacccgcucaaggcaauucuauguuuccguccugcugcuguacuaagccuaccgaugggaacugcacauguaucccaauucccagcucgugggccuucgcuaaauaucugugggagugggccucugugagauuuuccugguuaucacugcucguaccuuucguucagugguucgugggacuuagucccaccgucuggcugagcgcaaucuggaugaugugguacuggggcccauccuuguauucuaucgugagcccuuuuauuccccuacugccaauauucuuuugccucuggguguacaucugaggacuagucccuguucccagagcccacuuuuuuuucuuuuuuugaaauaaaauagccugucuuucagaucucaaaggcucuuuucagagccaccaaaaaaaaaaaaaaaaaaaaaaaaaaaaaaaaaaaaaaaaaaaaaaaaaaaaaaaaaaaaaaaaagaauu

SEQ ID NO: 6921 - RNA, 1532 nt, Artificial Sequence
  mRNA Design a-3 (hSL-A64-N5) comprising derived and/or modified sequence from Pf(3D7)__XP_001351122.1__Pf-CSP (opt4)
aggagagggcgcuuggcuugcaaggacccugagcugcggcauugaagcacacccaacccaacucgacugaagucagccucacugaaccggaucugagaaucuucucucucugggcuugccagggcucuccgaaccuagcuagcauccucuucaauuccaacuagaaagcuuaccaugaugagaaagcuggccauccugagcgugagcagcuuccuguucguggaggcccuguuccaggaguaccagugcuacggcagcagcagcaacaccagagugcugaacgagcugaacuacgacaacgccggcaccaaccuguacaacgagcuggagaugaacuacuacggcaagcaggagaacugguacagccugaagaagaacagcagaagccugggcgagaacgacgacggcaacaacgaggacaacgagaagcugagaaagcccaagcacaagaagcugaagcagcccgccgacggcaaccccgaccccaacgccaaccccaacguggaccccaacgccaaccccaacguggaccccaacgccaaccccaacguggaccccaacgccaaccccaacgccaaccccaacgccaaccccaacgccaaccccaacgccaaccccaacgccaaccccaacgccaaccccaacgccaaccccaacgccaaccccaacgccaaccccaacgccaaccccaacgccaaccccaacgccaaccccaacgccaaccccaacgccaaccccaacgccaaccccaacgccaaccccaacguggaccccaacgccaaccccaacgccaaccccaacgccaaccccaacgccaaccccaacgccaaccccaacgccaaccccaacgccaaccccaacgccaaccccaacgccaaccccaacgccaaccccaacgccaaccccaacgccaaccccaacgccaaccccaacgccaaccccaacgccaaccccaacgccaaccccaacgccaaccccaacgccaaccccaacaagaacaaccagggcaacggccagggccacaacaugcccaacgaccccaacagaaacguggacgagaacgccaacgccaacagcgccgugaagaacaacaacaacgaggagcccagcgacaagcacaucaaggaguaccugaacaagauccagaacagccugagcaccgaguggagccccugcagcgugaccugcggcaacggcauccaggugagaaucaagcccggcagcgccaacaagcccaaggacgagcuggacuacgccaacgacaucgagaagaagaucugcaagauggagaagugcagcagcguguucaacguggugaacagcagcaucggccugaucauggugcugagcuuccuguuccugaacugaggacuagucccuguucccagagcccacuuuuuuuucuuuuuuugaaauaaaauagccugucuuucagaucucaaaggcucuuuucagagccaccaaaaaaaaaaaaaaaaaaaaaaaaaaaaaaaaaaaaaaaaaaaaaaaaaaaaaaaaaaaaaaaaagaauu

SEQ ID NO: 6922 - RNA, 1463 nt, Artificial Sequence
  mRNA Design a-3 (hSL-A64-N5) comprising derived and/or modified sequence from Pf(3D7)__XP_001351122.1__Pf-CSP(1-374) (opt4)
aggagagggcgcuuggcuugcaaggacccugagcugcggcauugaagcacacccaacccaacucgacugaagucagccucacugaaccggaucugagaaucuucucucucugggcuugccagggcucuccgaaccuagcuagcauccucuucaauuccaacuagaaagcuuaccaugaugagaaagcuggccauccugagcgugagcagcuuccuguucguggaggcccuguuccaggaguaccagugcuacggcagcagcagcaacaccagagugcugaacgagcugaacuacgacaacgccggcaccaaccuguacaacgagcuggagaugaacuacuacggcaagcaggagaacugguacagccugaagaagaacagcagaagccugggcgagaacgacgacggcaacaacgaggacaacgagaagcugagaaagcccaagcacaagaagcugaagcagcccgccgacggcaaccccgaccccaacgccaaccccaacguggaccccaacgccaaccccaacguggaccccaacgccaaccccaacguggaccccaacgccaaccccaacgccaaccccaacgccaaccccaacgccaaccccaacgccaaccccaacgccaaccccaacgccaaccccaacgccaaccccaacgccaaccccaacgccaaccccaacgccaaccccaacgccaaccccaacgccaaccccaacgccaaccccaacgccaaccccaacgccaaccccaacgccaaccccaacguggaccccaacgccaaccccaacgccaaccccaacgccaaccccaacgccaaccccaacgccaaccccaacgccaaccccaacgccaaccccaacgccaaccccaacgccaaccccaacgccaaccccaacgccaaccccaacgccaaccccaacgccaaccccaacgccaaccccaacgccaaccccaacgccaaccccaacgccaaccccaacgccaaccccaacaagaacaaccagggcaacggccagggccacaacaugcccaacgaccccaacagaaacguggacgagaacgccaacgccaacagcgccgugaagaacaacaacaacgaggagcccagcgacaagcacaucaaggaguaccugaacaagauccagaacagccugagcaccgaguggagccccugcagcgugaccugcggcaacggcauccaggugagaaucaagcccggcagcgccaacaagcccaaggacgagcuggacuacgccaacgacaucgagaagaagaucugcaagauggagaagugcugaggacuagucccuguucccagagcccacuuuuuuuucuuuuuuugaaauaaaauagccugucuuucagaucucaaaggcucuuuucagagccaccaaaaaaaaaaaaaaaaaaaaaaaaaaaaaaaaaaaaaaaaaaaaaaaaaaaaaaaaaaaaaaaaagaauu

SEQ ID NO: 6923 - RNA, 1316 nt, Artificial Sequence
  mRNA Design a-3 (hSL-A64-N5) comprising derived and/or modified sequence from Pf(3D7)__XP_001351122.1__Pf-CSP(1-325) (opt4)
aggagagggcgcuuggcuugcaaggacccugagcugcggcauugaagcacacccaacccaacucgacugaagucagccucacugaaccggaucugagaaucuucucucucugggcuugccagggcucuccgaaccuagcuagcauccucuucaauuccaacuagaaagcuuaccaugaugagaaagcuggccauccugagcgugagcagcuuccuguucguggaggcccuguuccaggaguaccagugcuacggcagcagcagcaacaccagagugcugaacgagcugaacuacgacaacgccggcaccaaccuguacaacgagcuggagaugaacuacuacggcaagcaggagaacugguacagccugaagaagaacagcagaagccugggcgagaacgacgacggcaacaacgaggacaacgagaagcugagaaagcccaagcacaagaagcugaagcagcccgccgacggcaaccccgaccccaacgccaaccccaacguggaccccaacgccaaccccaacguggaccccaacgccaaccccaacguggaccccaacgccaaccccaacgccaaccccaacgccaaccccaacgccaaccccaacgccaaccccaacgccaaccccaacgccaaccccaacgccaaccccaacgccaaccccaacgccaaccccaacgccaaccccaacgccaaccccaacgccaaccccaacgccaaccccaacgccaaccccaacgccaaccccaacgccaaccccaacguggaccccaacgccaaccccaacgccaaccccaacgccaaccccaacgccaaccccaacgccaaccccaacgccaaccccaacgccaaccccaacgccaaccccaacgccaaccccaacgccaaccccaacgccaaccccaacgccaaccccaacgccaaccccaacgccaaccccaacgccaaccccaacgccaaccccaacgccaaccccaacgccaaccccaacaagaacaaccagggcaacggccagggccacaacaugcccaacgaccccaacagaaacguggacgagaacgccaacgccaacagcgccgugaagaacaacaacaacgaggagcccagcgacaagcacaucaaggaguaccugaacaagauccagaacugaggacuagucccuguucccagagcccacuuuuuuuucuuuuuuugaaauaaaauagccugucuuucagaucucaaaggcucuuuucagagccaccaaaaaaaaaaaaaaaaaaaaaaaaaaaaaaaaaaaaaaaaaaaaaaaaaaaaaaaaaaaaaaaaagaauu

SEQ ID NO: 6924 - RNA, 1532 nt, Artificial Sequence
  mRNA Design a-3 (hSL-A64-N5) comprising derived and/or modified sequence from Pf(3D7)__XP_001351122.1__HsALB_Pf-CSP(19-397) (opt4)
aggagagggcgcuuggcuugcaaggacccugagcugcggcauugaagcacacccaacccaacucgacugaagucagccucacugaaccggaucugagaaucuucucucucugggcuugccagggcucuccgaaccuagcuagcauccucuucaauuccaacuagaaagcuuaccaugaagugggugaccuucaucagccugcuguuccuguucagcagcgccuacagccuguuccaggaguaccagugcuacggcagcagcagcaacaccagagugcugaacgagcugaacuacgacaacgccggcaccaaccuguacaacgagcuggagaugaacuacuacggcaagcaggagaacugguacagccugaagaagaacagcagaagccugggcgagaacgacgacggcaacaacgaggacaacgagaagcugagaaagcccaagcacaagaagcugaagcagcccgccgacggcaaccccgaccccaacgccaaccccaacguggaccccaacgccaaccccaacguggaccccaacgccaaccccaacguggaccccaacgccaaccccaacgccaaccccaacgccaaccccaacgccaaccccaacgccaaccccaacgccaaccccaacgccaaccccaacgccaaccccaacgccaaccccaacgccaaccccaacgccaaccccaacgccaaccccaacgccaaccccaacgccaaccccaacgccaaccccaacgccaaccccaacgccaaccccaacguggaccccaacgccaaccccaacgccaaccccaacgccaaccccaacgccaaccccaacgccaaccccaacgccaaccccaacgccaaccccaacgccaaccccaacgccaaccccaacgccaaccccaacgccaaccccaacgccaaccccaacgccaaccccaacgccaaccccaacgccaaccccaacgccaaccccaacgccaaccccaacgccaaccccaacaagaacaaccagggcaacggccagggccacaacaugcccaacgaccccaacagaaacguggacgagaacgccaacgccaacagcgccgugaagaacaacaacaacgaggagcccagcgacaagcacaucaaggaguaccugaacaagauccagaacagccugagcaccgaguggagccccugcagcgugaccugcggcaacggcauccaggugagaaucaagcccggcagcgccaacaagcccaaggacgagcuggacuacgccaacgacaucgagaagaagaucugcaagauggagaagugcagcagcguguucaacguggugaacagcagcaucggccugaucauggugcugagcuuccuguuccugaacugaggacuagucccuguucccagagcccacuuuuuuuucuuuuuuugaaauaaaauagccugucuuucagaucucaaaggcucuuuucagagccaccaaaaaaaaaaaaaaaaaaaaaaaaaaaaaaaaaaaaaaaaaaaaaaaaaaaaaaaaaaaaaaaaagaauu

SEQ ID NO: 6925 - RNA, 1550 nt, Artificial Sequence
  mRNA Design a-3 (hSL-A64-N5) comprising derived and/or modified sequence from Pf(3D7)__XP_001351122.1__HsIns-iso1_Pf-CSP(19-397) (opt4)
aggagagggcgcuuggcuugcaaggacccugagcugcggcauugaagcacacccaacccaacucgacugaagucagccucacugaaccggaucugagaaucuucucucucugggcuugccagggcucuccgaaccuagcuagcauccucuucaauuccaacuagaaagcuuaccauggcccuguggaugagacugcugccccugcuggcccugcuggcccuguggggccccgaccccgccgccgcccuguuccaggaguaccagugcuacggcagcagcagcaacaccagagugcugaacgagcugaacuacgacaacgccggcaccaaccuguacaacgagcuggagaugaacuacuacggcaagcaggagaacugguacagccugaagaagaacagcagaagccugggcgagaacgacgacggcaacaacgaggacaacgagaagcugagaaagcccaagcacaagaagcugaagcagcccgccgacggcaaccccgaccccaacgccaaccccaacguggaccccaacgccaaccccaacguggaccccaacgccaaccccaacguggaccccaacgccaaccccaacgccaaccccaacgccaaccccaacgccaaccccaacgccaaccccaacgccaaccccaacgccaaccccaacgccaaccccaacgccaaccccaacgccaaccccaacgccaaccccaacgccaaccccaacgccaaccccaacgccaaccccaacgccaaccccaacgccaaccccaacgccaaccccaacguggaccccaacgccaaccccaacgccaaccccaacgccaaccccaacgccaaccccaacgccaaccccaacgccaaccccaacgccaaccccaacgccaaccccaacgccaaccccaacgccaaccccaacgccaaccccaacgccaaccccaacgccaaccccaacgccaaccccaacgccaaccccaacgccaaccccaacgccaaccccaacgccaaccccaacaagaacaaccagggcaacggccagggccacaacaugcccaacgaccccaacagaaacguggacgagaacgccaacgccaacagcgccgugaagaacaacaacaacgaggagcccagcgacaagcacaucaaggaguaccugaacaagauccagaacagccugagcaccgaguggagccccugcagcgugaccugcggcaacggcauccaggugagaaucaagcccggcagcgccaacaagcccaaggacgagcuggacuacgccaacgacaucgagaagaagaucugcaagauggagaagugcagcagcguguucaacguggugaacagcagcaucggccugaucauggugcugagcuuccuguuccugaacugaggacuagucccuguucccagagcccacuuuuuuuucuuuuuuugaaauaaaauagccugucuuucagaucucaaaggcucuuuucagagccaccaaaaaaaaaaaaaaaaaaaaaaaaaaaaaaaaaaaaaaaaaaaaaaaaaaaaaaaaaaaaaaaaagaauu

SEQ ID NO: 6926 - RNA, 1529 nt, Artificial Sequence
  mRNA Design a-3 (hSL-A64-N5) comprising derived and/or modified sequence from Pf(3D7)__XP_001351122.1__HsSPARC_Pf-CSP(19-397) (opt4)
aggagagggcgcuuggcuugcaaggacccugagcugcggcauugaagcacacccaacccaacucgacugaagucagccucacugaaccggaucugagaaucuucucucucugggcuugccagggcucuccgaaccuagcuagcauccucuucaauuccaacuagaaagcuuaccaugagagccuggaucuucuuccugcugugccuggccggcagagcccuggcccuguuccaggaguaccagugcuacggcagcagcagcaacaccagagugcugaacgagcugaacuacgacaacgccggcaccaaccuguacaacgagcuggagaugaacuacuacggcaagcaggagaacugguacagccugaagaagaacagcagaagccugggcgagaacgacgacggcaacaacgaggacaacgagaagcugagaaagcccaagcacaagaagcugaagcagcccgccgacggcaaccccgaccccaacgccaaccccaacguggaccccaacgccaaccccaacguggaccccaacgccaaccccaacguggaccccaacgccaaccccaacgccaaccccaacgccaaccccaacgccaaccccaacgccaaccccaacgccaaccccaacgccaaccccaacgccaaccccaacgccaaccccaacgccaaccccaacgccaaccccaacgccaaccccaacgccaaccccaacgccaaccccaacgccaaccccaacgccaaccccaacgccaaccccaacguggaccccaacgccaaccccaacgccaaccccaacgccaaccccaacgccaaccccaacgccaaccccaacgccaaccccaacgccaaccccaacgccaaccccaacgccaaccccaacgccaaccccaacgccaaccccaacgccaaccccaacgccaaccccaacgccaaccccaacgccaaccccaacgccaaccccaacgccaaccccaacgccaaccccaacaagaacaaccagggcaacggccagggccacaacaugcccaacgaccccaacagaaacguggacgagaacgccaacgccaacagcgccgugaagaacaacaacaacgaggagcccagcgacaagcacaucaaggaguaccugaacaagauccagaacagccugagcaccgaguggagccccugcagcgugaccugcggcaacggcauccaggugagaaucaagcccggcagcgccaacaagcccaaggacgagcuggacuacgccaacgacaucgagaagaagaucugcaagauggagaagugcagcagcguguucaacguggugaacagcagcaucggccugaucauggugcugagcuuccuguuccugaacugaggacuagucccuguucccagagcccacuuuuuuuucuuuuuuugaaauaaaauagccugucuuucagaucucaaaggcucuuuucagagccaccaaaaaaaaaaaaaaaaaaaaaaaaaaaaaaaaaaaaaaaaaaaaaaaaaaaaaaaaaaaaaaaaagaauu

SEQ ID NO: 6927 - RNA, 1532 nt, Artificial Sequence
  mRNA Design a-3 (hSL-A64-N5) comprising derived and/or modified sequence from Pf(3D7)__XP_001351122.1__IgE_Pf-CSP(19-397) (opt4)
aggagagggcgcuuggcuugcaaggacccugagcugcggcauugaagcacacccaacccaacucgacugaagucagccucacugaaccggaucugagaaucuucucucucugggcuugccagggcucuccgaaccuagcuagcauccucuucaauuccaacuagaaagcuuaccauggacuggaccuggauccuguuccugguggccgccgccaccagagugcacagccuguuccaggaguaccagugcuacggcagcagcagcaacaccagagugcugaacgagcugaacuacgacaacgccggcaccaaccuguacaacgagcuggagaugaacuacuacggcaagcaggagaacugguacagccugaagaagaacagcagaagccugggcgagaacgacgacggcaacaacgaggacaacgagaagcugagaaagcccaagcacaagaagcugaagcagcccgccgacggcaaccccgaccccaacgccaaccccaacguggaccccaacgccaaccccaacguggaccccaacgccaaccccaacguggaccccaacgccaaccccaacgccaaccccaacgccaaccccaacgccaaccccaacgccaaccccaacgccaaccccaacgccaaccccaacgccaaccccaacgccaaccccaacgccaaccccaacgccaaccccaacgccaaccccaacgccaaccccaacgccaaccccaacgccaaccccaacgccaaccccaacgccaaccccaacguggaccccaacgccaaccccaacgccaaccccaacgccaaccccaacgccaaccccaacgccaaccccaacgccaaccccaacgccaaccccaacgccaaccccaacgccaaccccaacgccaaccccaacgccaaccccaacgccaaccccaacgccaaccccaacgccaaccccaacgccaaccccaacgccaaccccaacgccaaccccaacgccaaccccaacaagaacaaccagggcaacggccagggccacaacaugcccaacgaccccaacagaaacguggacgagaacgccaacgccaacagcgccgugaagaacaacaacaacgaggagcccagcgacaagcacaucaaggaguaccugaacaagauccagaacagccugagcaccgaguggagccccugcagcgugaccugcggcaacggcauccaggugagaaucaagcccggcagcgccaacaagcccaaggacgagcuggacuacgccaacgacaucgagaagaagaucugcaagauggagaagugcagcagcguguucaacguggugaacagcagcaucggccugaucauggugcugagcuuccuguuccugaacugaggacuagucccuguucccagagcccacuuuuuuuucuuuuuuugaaauaaaauagccugucuuucagaucucaaaggcucuuuucagagccaccaaaaaaaaaaaaaaaaaaaaaaaaaaaaaaaaaaaaaaaaaaaaaaaaaaaaaaaaaaaaaaaaagaauu

SEQ ID NO: 6928 - RNA, 1697 nt, Artificial Sequence
  mRNA Design a-3 (hSL-A64-N5) comprising derived and/or modified sequence from Pf(3D7)__XP_001351122.1__Pf-CSP_L(G4SG4)_TM domain HA (opt4)
aggagagggcgcuuggcuugcaaggacccugagcugcggcauugaagcacacccaacccaacucgacugaagucagccucacugaaccggaucugagaaucuucucucucugggcuugccagggcucuccgaaccuagcuagcauccucuucaauuccaacuagaaagcuuaccaugaugagaaagcuggccauccugagcgugagcagcuuccuguucguggaggcccuguuccaggaguaccagugcuacggcagcagcagcaacaccagagugcugaacgagcugaacuacgacaacgccggcaccaaccuguacaacgagcuggagaugaacuacuacggcaagcaggagaacugguacagccugaagaagaacagcagaagccugggcgagaacgacgacggcaacaacgaggacaacgagaagcugagaaagcccaagcacaagaagcugaagcagcccgccgacggcaaccccgaccccaacgccaaccccaacguggaccccaacgccaaccccaacguggaccccaacgccaaccccaacguggaccccaacgccaaccccaacgccaaccccaacgccaaccccaacgccaaccccaacgccaaccccaacgccaaccccaacgccaaccccaacgccaaccccaacgccaaccccaacgccaaccccaacgccaaccccaacgccaaccccaacgccaaccccaacgccaaccccaacgccaaccccaacgccaaccccaacgccaaccccaacguggaccccaacgccaaccccaacgccaaccccaacgccaaccccaacgccaaccccaacgccaaccccaacgccaaccccaacgccaaccccaacgccaaccccaacgccaaccccaacgccaaccccaacgccaaccccaacgccaaccccaacgccaaccccaacgccaaccccaacgccaaccccaacgccaaccccaacgccaaccccaacgccaaccccaacaagaacaaccagggcaacggccagggccacaacaugcccaacgaccccaacagaaacguggacgagaacgccaacgccaacagcgccgugaagaacaacaacaacgaggagcccagcgacaagcacaucaaggaguaccugaacaagauccagaacagccugagcaccgaguggagccccugcagcgugaccugcggcaacggcauccaggugagaaucaagcccggcagcgccaacaagcccaaggacgagcuggacuacgccaacgacaucgagaagaagaucugcaagauggagaagugcagcagcguguucaacguggugaacagcagcaucggccugaucauggugcugagcuuccuguuccugaacggcggcggcggcagcggcggcggcggcaagcuggagagcaccagaaucuaccagauccuggccaucuacagcaccguggccagcagccuggugcugguggugagccugggcgccaucagcuucuggaugugcagcaacggcagccugcagugcagaaucugcaucugaggacuagucccuguucccagagcccacuuuuuuuucuuuuuuugaaauaaaauagccugucuuucagaucucaaaggcucuuuucagagccaccaaaaaaaaaaaaaaaaaaaaaaaaaaaaaaaaaaaaaaaaaaaaaaaaaaaaaaaaaaaaaaaaagaauu

SEQ ID NO: 6929 - RNA, 1571 nt, Artificial Sequence
  mRNA Design a-3 (hSL-A64-N5) comprising derived and/or modified sequence from Pf(3D7)__XP_001351122.1__Pf-CSP(199-377)_L(PVTN)_HBsAg (opt4)
aggagagggcgcuuggcuugcaaggacccugagcugcggcauugaagcacacccaacccaacucgacugaagucagccucacugaaccggaucugagaaucuucucucucugggcuugccagggcucuccgaaccuagcuagcauccucuucaauuccaacuagaaagcuuaccauggaccccaacgccaaccccaacgccaaccccaacgccaaccccaacgccaaccccaacgccaaccccaacgccaaccccaacgccaaccccaacgccaaccccaacgccaaccccaacgccaaccccaacgccaaccccaacgccaaccccaacgccaaccccaacgccaaccccaacgccaaccccaacgccaaccccaacgccaaccccaacgccaaccccaacaagaacaaccagggcaacggccagggccacaacaugcccaacgaccccaacagaaacguggacgagaacgccaacgccaacagcgccgugaagaacaacaacaacgaggagcccagcgacaagcacaucaaggaguaccugaacaagauccagaacagccugagcaccgaguggagccccugcagcgugaccugcggcaacggcauccaggugagaaucaagcccggcagcgccaacaagcccaaggacgagcuggacuacgccaacgacaucgagaagaagaucugcaagauggagaagugcagcagcgugcccgugaccaacauggagaacaucaccagcggcuuccugggcccccugcuggugcugcaggccggcuucuuccugcugaccagaauccugaccaucccccagagccuggacagcugguggaccagccugaacuuccugggcggcagccccgugugccugggccagaacagccagagccccaccagcaaccacagccccaccagcugcccccccaucugccccggcuacagauggaugugccugagaagauucaucaucuuccuguucauccugcugcugugccugaucuuccugcuggugcugcuggacuaccagggcaugcugcccgugugcccccugauccccggcagcaccaccaccaacaccggccccugcaagaccugcaccacccccgcccagggcaacagcauguuccccagcugcugcugcaccaagcccaccgacggcaacugcaccugcauccccauccccagcagcugggccuucgccaaguaccugugggagugggccagcgugagauucagcuggcugagccugcuggugcccuucgugcagugguucgugggccugagccccaccguguggcugagcgccaucuggaugaugugguacuggggccccagccuguacagcaucgugagccccuucaucccccugcugcccaucuucuucugccuguggguguacaucugaggacuagucccuguucccagagcccacuuuuuuuucuuuuuuugaaauaaaauagccugucuuucagaucucaaaggcucuuuucagagccaccaaaaaaaaaaaaaaaaaaaaaaaaaaaaaaaaaaaaaaaaaaaaaaaaaaaaaaaaaaaaaaaaagaauu

SEQ ID NO: 6930 - RNA, 1613 nt, Artificial Sequence
  mRNA Design a-3 (hSL-A64-N5) comprising derived and/or modified sequence from Pf(3D7)__XP_001351122.1__Pf-CSP(199-387)_L(PVTN)_HBsAg (opt4)
aggagagggcgcuuggcuugcaaggacccugagcugcggcauugaagcacacccaacccaacucgacugaagucagccucacugaaccggaucugagaaucuucucucucugggcuugccagggcucuccgaaccuagcuagcauccucuucaauuccaacuagaaagcuuaccaugauggcccccgaccccaacgccaaccccaacgccaaccccaacgccaaccccaacgccaaccccaacgccaaccccaacgccaaccccaacgccaaccccaacgccaaccccaacgccaaccccaacgccaaccccaacgccaaccccaacgccaaccccaacgccaaccccaacgccaaccccaacgccaaccccaacgccaaccccaacgccaaccccaacgccaaccccaacaagaacaaccagggcaacggccagggccacaacaugcccaacgaccccaacagaaacguggacgagaacgccaacgccaacagcgccgugaagaacaacaacaacgaggagcccagcgacaagcacaucaaggaguaccugaacaagauccagaacagccugagcaccgaguggagccccugcagcgugaccugcggcaacggcauccaggugagaaucaagcccggcagcgccaacaagcccaaggacgagcuggacuacgccaacgacaucgagaagaagaucugcaagauggagaagugcagcagcguguucaacguggugaacagcagcaucggccugggccccgugaccaacauggagaacaucaccagcggcuuccugggcccccugcuggugcugcaggccggcuucuuccugcugaccagaauccugaccaucccccagagccuggacagcugguggaccagccugaacuuccugggcggcagccccgugugccugggccagaacagccagagccccaccagcaaccacagccccaccagcugcccccccaucugccccggcuacagauggaugugccugagaagauucaucaucuuccuguucauccugcugcugugccugaucuuccugcuggugcugcuggacuaccagggcaugcugcccgugugcccccugauccccggcagcaccaccaccaacaccggccccugcaagaccugcaccacccccgcccagggcaacagcauguuccccagcugcugcugcaccaagcccaccgacggcaacugcaccugcauccccauccccagcagcugggccuucgccaaguaccugugggagugggccagcgugagauucagcuggcugagccugcuggugcccuucgugcagugguucgugggccugagccccaccguguggcugagcgccaucuggaugaugugguacuggggccccagccuguacagcaucgugagccccuucaucccccugcugcccaucuucuucugccuguggguguacaucugaggacuagucccuguucccagagcccacuuuuuuuucuuuuuuugaaauaaaauagccugucuuucagaucucaaaggcucuuuucagagccaccaaaaaaaaaaaaaaaaaaaaaaaaaaaaaaaaaaaaaaaaaaaaaaaaaaaaaaaaaaaaaaaaagaauu

SEQ ID NO: 6931 - RNA, 797 nt, Artificial Sequence
  mRNA Design a-3 (hSL-A64-N5) comprising derived and/or modified sequence from Pf(3D7)__XP_001351122.1__HsALB_Pf-CSP(19-152) (opt4)
aggagagggcgcuuggcuugcaaggacccugagcugcggcauugaagcacacccaacccaacucgacugaagucagccucacugaaccggaucugagaaucuucucucucugggcuugccagggcucuccgaaccuagcuagcauccucuucaauuccaacuagaaagcuuaccaugaagugggugaccuucaucagccugcuguuccuguucagcagcgccuacagccuguuccaggaguaccagugcuacggcagcagcagcaacaccagagugcugaacgagcugaacuacgacaacgccggcaccaaccuguacaacgagcuggagaugaacuacuacggcaagcaggagaacugguacagccugaagaagaacagcagaagccugggcgagaacgacgacggcaacaacgaggacaacgagaagcugagaaagcccaagcacaagaagcugaagcagcccgccgacggcaaccccgaccccaacgccaaccccaacguggaccccaacgccaaccccaacguggaccccaacgccaaccccaacguggaccccaacgccaaccccaacgccaaccccaacgccaaccccaacgccaaccccaacgccaaccccaacgccaaccccugaggacuagucccuguucccagagcccacuuuuuuuucuuuuuuugaaauaaaauagccugucuuucagaucucaaaggcucuuuucagagccaccaaaaaaaaaaaaaaaaaaaaaaaaaaaaaaaaaaaaaaaaaaaaaaaaaaaaaaaaaaaaaaaaagaauu

SEQ ID NO: 6932 - RNA, 917 nt, Artificial Sequence
  mRNA Design a-3 (hSL-A64-N5) comprising derived and/or modified sequence from Pf(3D7)__XP_001351122.1__HsALB_Pf-CSP(19-192) (opt4)
aggagagggcgcuuggcuugcaaggacccugagcugcggcauugaagcacacccaacccaacucgacugaagucagccucacugaaccggaucugagaaucuucucucucugggcuugccagggcucuccgaaccuagcuagcauccucuucaauuccaacuagaaagcuuaccaugaagugggugaccuucaucagccugcuguuccuguucagcagcgccuacagccuguuccaggaguaccagugcuacggcagcagcagcaacaccagagugcugaacgagcugaacuacgacaacgccggcaccaaccuguacaacgagcuggagaugaacuacuacggcaagcaggagaacugguacagccugaagaagaacagcagaagccugggcgagaacgacgacggcaacaacgaggacaacgagaagcugagaaagcccaagcacaagaagcugaagcagcccgccgacggcaaccccgaccccaacgccaaccccaacguggaccccaacgccaaccccaacguggaccccaacgccaaccccaacguggaccccaacgccaaccccaacgccaaccccaacgccaaccccaacgccaaccccaacgccaaccccaacgccaaccccaacgccaaccccaacgccaaccccaacgccaaccccaacgccaaccccaacgccaaccccaacgccaaccccaacgccaaccccaacgccaaccccaacgccaaccccaacgccaaccccugaggacuagucccuguucccagagcccacuuuuuuuucuuuuuuugaaauaaaauagccugucuuucagaucucaaaggcucuuuucagagccaccaaaaaaaaaaaaaaaaaaaaaaaaaaaaaaaaaaaaaaaaaaaaaaaaaaaaaaaaaaaaaaaaagaauu

SEQ ID NO: 6933 - RNA, 1157 nt, Artificial Sequence
  mRNA Design a-3 (hSL-A64-N5) comprising derived and/or modified sequence from Pf(3D7)__XP_001351122.1__HsALB_Pf-CSP(19-272) (opt4)
aggagagggcgcuuggcuugcaaggacccugagcugcggcauugaagcacacccaacccaacucgacugaagucagccucacugaaccggaucugagaaucuucucucucugggcuugccagggcucuccgaaccuagcuagcauccucuucaauuccaacuagaaagcuuaccaugaagugggugaccuucaucagccugcuguuccuguucagcagcgccuacagccuguuccaggaguaccagugcuacggcagcagcagcaacaccagagugcugaacgagcugaacuacgacaacgccggcaccaaccuguacaacgagcuggagaugaacuacuacggcaagcaggagaacugguacagccugaagaagaacagcagaagccugggcgagaacgacgacggcaacaacgaggacaacgagaagcugagaaagcccaagcacaagaagcugaagcagcccgccgacggcaaccccgaccccaacgccaaccccaacguggaccccaacgccaaccccaacguggaccccaacgccaaccccaacguggaccccaacgccaaccccaacgccaaccccaacgccaaccccaacgccaaccccaacgccaaccccaacgccaaccccaacgccaaccccaacgccaaccccaacgccaaccccaacgccaaccccaacgccaaccccaacgccaaccccaacgccaaccccaacgccaaccccaacgccaaccccaacgccaaccccaacgccaaccccaacguggaccccaacgccaaccccaacgccaaccccaacgccaaccccaacgccaaccccaacgccaaccccaacgccaaccccaacgccaaccccaacgccaaccccaacgccaaccccaacgccaaccccaacgccaaccccaacgccaaccccaacgccaaccccaacgccaaccccaacgccaaccccaacgccaaccccaacgccaaccccaacgccaaccccugaggacuagucccuguucccagagcccacuuuuuuuucuuuuuuugaaauaaaauagccugucuuucagaucucaaaggcucuuuucagagccaccaaaaaaaaaaaaaaaaaaaaaaaaaaaaaaaaaaaaaaaaaaaaaaaaaaaaaaaaaaaaaaaaagaauu

SEQ ID NO: 6934 - RNA, 1319 nt, Artificial Sequence
  mRNA Design a-3 (hSL-A64-N5) comprising derived and/or modified sequence from Pf(3D7)__XP_001351122.1__HsALB_Pf-CSP(19-272)_L(AAY)_Pf-CSP(310-3 27)_L(AAY)_Pf-CSP(346-375) (opt4)
aggagagggcgcuuggcuugcaaggacccugagcugcggcauugaagcacacccaacccaacucgacugaagucagccucacugaaccggaucugagaaucuucucucucugggcuugccagggcucuccgaaccuagcuagcauccucuucaauuccaacuagaaagcuuaccaugaagugggugaccuucaucagccugcuguuccuguucagcagcgccuacagccuguuccaggaguaccagugcuacggcagcagcagcaacaccagagugcugaacgagcugaacuacgacaacgccggcaccaaccuguacaacgagcuggagaugaacuacuacggcaagcaggagaacugguacagccugaagaagaacagcagaagccugggcgagaacgacgacggcaacaacgaggacaacgagaagcugagaaagcccaagcacaagaagcugaagcagcccgccgacggcaaccccgaccccaacgccaaccccaacguggaccccaacgccaaccccaacguggaccccaacgccaaccccaacguggaccccaacgccaaccccaacgccaaccccaacgccaaccccaacgccaaccccaacgccaaccccaacgccaaccccaacgccaaccccaacgccaaccccaacgccaaccccaacgccaaccccaacgccaaccccaacgccaaccccaacgccaaccccaacgccaaccccaacgccaaccccaacgccaaccccaacgccaaccccaacguggaccccaacgccaaccccaacgccaaccccaacgccaaccccaacgccaaccccaacgccaaccccaacgccaaccccaacgccaaccccaacgccaaccccaacgccaaccccaacgccaaccccaacgccaaccccaacgccaaccccaacgccaaccccaacgccaaccccaacgccaaccccaacgccaaccccaacgccaaccccaacgccaaccccgccgccuacgagcccagcgacaagcacaucaaggaguaccugaacaagauccagaacagccuggccgccuacaucaagcccggcagcgccaacaagcccaaggacgagcuggacuacgccaacgacaucgagaagaagaucugcaagauggagaagugcagcugaggacuagucccuguucccagagcccacuuuuuuuucuuuuuuugaaauaaaauagccugucuuucagaucucaaaggcucuuuucagagccaccaaaaaaaaaaaaaaaaaaaaaaaaaaaaaaaaaaaaaaaaaaaaaaaaaaaaaaaaaaaaaaaaagaauu

SEQ ID NO: 6935 - RNA, 1280 nt, Artificial Sequence
  mRNA Design a-3 (hSL-A64-N5) comprising derived and/or modified sequence from Pf(3D7)__XP_001351122.1__HsALB_Pf-CSP(19-272)_L(AAY)_Pf-CSP(346-3 65)_L(AAY)_P2 (opt4)
aggagagggcgcuuggcuugcaaggacccugagcugcggcauugaagcacacccaacccaacucgacugaagucagccucacugaaccggaucugagaaucuucucucucugggcuugccagggcucuccgaaccuagcuagcauccucuucaauuccaacuagaaagcuuaccaugaagugggugaccuucaucagccugcuguuccuguucagcagcgccuacagccuguuccaggaguaccagugcuacggcagcagcagcaacaccagagugcugaacgagcugaacuacgacaacgccggcaccaaccuguacaacgagcuggagaugaacuacuacggcaagcaggagaacugguacagccugaagaagaacagcagaagccugggcgagaacgacgacggcaacaacgaggacaacgagaagcugagaaagcccaagcacaagaagcugaagcagcccgccgacggcaaccccgaccccaacgccaaccccaacguggaccccaacgccaaccccaacguggaccccaacgccaaccccaacguggaccccaacgccaaccccaacgccaaccccaacgccaaccccaacgccaaccccaacgccaaccccaacgccaaccccaacgccaaccccaacgccaaccccaacgccaaccccaacgccaaccccaacgccaaccccaacgccaaccccaacgccaaccccaacgccaaccccaacgccaaccccaacgccaaccccaacgccaaccccaacguggaccccaacgccaaccccaacgccaaccccaacgccaaccccaacgccaaccccaacgccaaccccaacgccaaccccaacgccaaccccaacgccaaccccaacgccaaccccaacgccaaccccaacgccaaccccaacgccaaccccaacgccaaccccaacgccaaccccaacgccaaccccaacgccaaccccaacgccaaccccaacgccaaccccgccgccuacaucaagcccggcagcgccaacaagcccaaggacgagcuggacuacgccaacgacaucgaggccgccuaccaguacaucaaggccaacagcaaguucaucggcaucaccgagcugugaggacuagucccuguucccagagcccacuuuuuuuucuuuuuuugaaauaaaauagccugucuuucagaucucaaaggcucuuuucagagccaccaaaaaaaaaaaaaaaaaaaaaaaaaaaaaaaaaaaaaaaaaaaaaaaaaaaaaaaaaaaaaaaaagaauu

SEQ ID NO: 6936 - RNA, 1274 nt, Artificial Sequence
  mRNA Design a-3 (hSL-A64-N5) comprising derived and/or modified sequence from Pf(3D7)__XP_001351122.1__HsALB_Pf-CSP(19-272)_L(AAY)_Pf-CSP(346-3 65)_L(AAY)_PADRE (opt4)
aggagagggcgcuuggcuugcaaggacccugagcugcggcauugaagcacacccaacccaacucgacugaagucagccucacugaaccggaucugagaaucuucucucucugggcuugccagggcucuccgaaccuagcuagcauccucuucaauuccaacuagaaagcuuaccaugaagugggugaccuucaucagccugcuguuccuguucagcagcgccuacagccuguuccaggaguaccagugcuacggcagcagcagcaacaccagagugcugaacgagcugaacuacgacaacgccggcaccaaccuguacaacgagcuggagaugaacuacuacggcaagcaggagaacugguacagccugaagaagaacagcagaagccugggcgagaacgacgacggcaacaacgaggacaacgagaagcugagaaagcccaagcacaagaagcugaagcagcccgccgacggcaaccccgaccccaacgccaaccccaacguggaccccaacgccaaccccaacguggaccccaacgccaaccccaacguggaccccaacgccaaccccaacgccaaccccaacgccaaccccaacgccaaccccaacgccaaccccaacgccaaccccaacgccaaccccaacgccaaccccaacgccaaccccaacgccaaccccaacgccaaccccaacgccaaccccaacgccaaccccaacgccaaccccaacgccaaccccaacgccaaccccaacgccaaccccaacguggaccccaacgccaaccccaacgccaaccccaacgccaaccccaacgccaaccccaacgccaaccccaacgccaaccccaacgccaaccccaacgccaaccccaacgccaaccccaacgccaaccccaacgccaaccccaacgccaaccccaacgccaaccccaacgccaaccccaacgccaaccccaacgccaaccccaacgccaaccccaacgccaaccccgccgccuacaucaagcccggcagcgccaacaagcccaaggacgagcuggacuacgccaacgacaucgaggccgccuacgccaaguucguggccgccuggacccugaaggccgccgccugaggacuagucccuguucccagagcccacuuuuuuuucuuuuuuugaaauaaaauagccugucuuucagaucucaaaggcucuuuucagagccaccaaaaaaaaaaaaaaaaaaaaaaaaaaaaaaaaaaaaaaaaaaaaaaaaaaaaaaaaaaaaaaaaagaauu

SEQ ID NO: 6937 - RNA, 1331 nt, Artificial Sequence
  mRNA Design a-3 (hSL-A64-N5) comprising derived and/or modified sequence from Pf(3D7)__XP_001351122.1__HsALB_Pf-CSP(19-272)_L(G4S)_Pf-CSP(310-3 27)_L(G4S)_Pf-CSP(346-375) (opt4)
aggagagggcgcuuggcuugcaaggacccugagcugcggcauugaagcacacccaacccaacucgacugaagucagccucacugaaccggaucugagaaucuucucucucugggcuugccagggcucuccgaaccuagcuagcauccucuucaauuccaacuagaaagcuuaccaugaagugggugaccuucaucagccugcuguuccuguucagcagcgccuacagccuguuccaggaguaccagugcuacggcagcagcagcaacaccagagugcugaacgagcugaacuacgacaacgccggcaccaaccuguacaacgagcuggagaugaacuacuacggcaagcaggagaacugguacagccugaagaagaacagcagaagccugggcgagaacgacgacggcaacaacgaggacaacgagaagcugagaaagcccaagcacaagaagcugaagcagcccgccgacggcaaccccgaccccaacgccaaccccaacguggaccccaacgccaaccccaacguggaccccaacgccaaccccaacguggaccccaacgccaaccccaacgccaaccccaacgccaaccccaacgccaaccccaacgccaaccccaacgccaaccccaacgccaaccccaacgccaaccccaacgccaaccccaacgccaaccccaacgccaaccccaacgccaaccccaacgccaaccccaacgccaaccccaacgccaaccccaacgccaaccccaacgccaaccccaacguggaccccaacgccaaccccaacgccaaccccaacgccaaccccaacgccaaccccaacgccaaccccaacgccaaccccaacgccaaccccaacgccaaccccaacgccaaccccaacgccaaccccaacgccaaccccaacgccaaccccaacgccaaccccaacgccaaccccaacgccaaccccaacgccaaccccaacgccaaccccaacgccaaccccggcggcggcggcagcgagcccagcgacaagcacaucaaggaguaccugaacaagauccagaacagccugggcggcggcggcagcaucaagcccggcagcgccaacaagcccaaggacgagcuggacuacgccaacgacaucgagaagaagaucugcaagauggagaagugcagcugaggacuagucccuguucccagagcccacuuuuuuuucuuuuuuugaaauaaaauagccugucuuucagaucucaaaggcucuuuucagagccaccaaaaaaaaaaaaaaaaaaaaaaaaaaaaaaaaaaaaaaaaaaaaaaaaaaaaaaaaaaaaaaaaagaauu

SEQ ID NO: 6938 - RNA, 1316 nt, Artificial Sequence
  mRNA Design a-3 (hSL-A64-N5) comprising derived and/or modified sequence from Pf(3D7)__XP_001351122.1__HsALB_Pf-CSP(19-272)_L(G4S)_Pf-CSP(310-3 27)_Pf-CSP(346-375) (opt4)
aggagagggcgcuuggcuugcaaggacccugagcugcggcauugaagcacacccaacccaacucgacugaagucagccucacugaaccggaucugagaaucuucucucucugggcuugccagggcucuccgaaccuagcuagcauccucuucaauuccaacuagaaagcuuaccaugaagugggugaccuucaucagccugcuguuccuguucagcagcgccuacagccuguuccaggaguaccagugcuacggcagcagcagcaacaccagagugcugaacgagcugaacuacgacaacgccggcaccaaccuguacaacgagcuggagaugaacuacuacggcaagcaggagaacugguacagccugaagaagaacagcagaagccugggcgagaacgacgacggcaacaacgaggacaacgagaagcugagaaagcccaagcacaagaagcugaagcagcccgccgacggcaaccccgaccccaacgccaaccccaacguggaccccaacgccaaccccaacguggaccccaacgccaaccccaacguggaccccaacgccaaccccaacgccaaccccaacgccaaccccaacgccaaccccaacgccaaccccaacgccaaccccaacgccaaccccaacgccaaccccaacgccaaccccaacgccaaccccaacgccaaccccaacgccaaccccaacgccaaccccaacgccaaccccaacgccaaccccaacgccaaccccaacgccaaccccaacguggaccccaacgccaaccccaacgccaaccccaacgccaaccccaacgccaaccccaacgccaaccccaacgccaaccccaacgccaaccccaacgccaaccccaacgccaaccccaacgccaaccccaacgccaaccccaacgccaaccccaacgccaaccccaacgccaaccccaacgccaaccccaacgccaaccccaacgccaaccccaacgccaaccccggcggcggcggcagcgagcccagcgacaagcacaucaaggaguaccugaacaagauccagaacagccugaucaagcccggcagcgccaacaagcccaaggacgagcuggacuacgccaacgacaucgagaagaagaucugcaagauggagaagugcagcugaggacuagucccuguucccagagcccacuuuuuuuucuuuuuuugaaauaaaauagccugucuuucagaucucaaaggcucuuuucagagccaccaaaaaaaaaaaaaaaaaaaaaaaaaaaaaaaaaaaaaaaaaaaaaaaaaaaaaaaaaaaaaaaaagaauu

SEQ ID NO: 6939 - RNA, 1316 nt, Artificial Sequence
  mRNA Design a-3 (hSL-A64-N5) comprising derived and/or modified sequence from Pf(3D7)__XP_001351122.1__HsALB_Pf-CSP(19-325) (opt4)
aggagagggcgcuuggcuugcaaggacccugagcugcggcauugaagcacacccaacccaacucgacugaagucagccucacugaaccggaucugagaaucuucucucucugggcuugccagggcucuccgaaccuagcuagcauccucuucaauuccaacuagaaagcuuaccaugaagugggugaccuucaucagccugcuguuccuguucagcagcgccuacagccuguuccaggaguaccagugcuacggcagcagcagcaacaccagagugcugaacgagcugaacuacgacaacgccggcaccaaccuguacaacgagcuggagaugaacuacuacggcaagcaggagaacugguacagccugaagaagaacagcagaagccugggcgagaacgacgacggcaacaacgaggacaacgagaagcugagaaagcccaagcacaagaagcugaagcagcccgccgacggcaaccccgaccccaacgccaaccccaacguggaccccaacgccaaccccaacguggaccccaacgccaaccccaacguggaccccaacgccaaccccaacgccaaccccaacgccaaccccaacgccaaccccaacgccaaccccaacgccaaccccaacgccaaccccaacgccaaccccaacgccaaccccaacgccaaccccaacgccaaccccaacgccaaccccaacgccaaccccaacgccaaccccaacgccaaccccaacgccaaccccaacgccaaccccaacguggaccccaacgccaaccccaacgccaaccccaacgccaaccccaacgccaaccccaacgccaaccccaacgccaaccccaacgccaaccccaacgccaaccccaacgccaaccccaacgccaaccccaacgccaaccccaacgccaaccccaacgccaaccccaacgccaaccccaacgccaaccccaacgccaaccccaacgccaaccccaacgccaaccccaacaagaacaaccagggcaacggccagggccacaacaugcccaacgaccccaacagaaacguggacgagaacgccaacgccaacagcgccgugaagaacaacaacaacgaggagcccagcgacaagcacaucaaggaguaccugaacaagauccagaacugaggacuagucccuguucccagagcccacuuuuuuuucuuuuuuugaaauaaaauagccugucuuucagaucucaaaggcucuuuucagagccaccaaaaaaaaaaaaaaaaaaaaaaaaaaaaaaaaaaaaaaaaaaaaaaaaaaaaaaaaaaaaaaaaagaauu

SEQ ID NO: 6940 - RNA, 1493 nt, Artificial Sequence
  mRNA Design a-3 (hSL-A64-N5) comprising derived and/or modified sequence from Pf(3D7)__XP_001351122.1__HsALB_Pf-CSP(19-384) (opt4)
aggagagggcgcuuggcuugcaaggacccugagcugcggcauugaagcacacccaacccaacucgacugaagucagccucacugaaccggaucugagaaucuucucucucugggcuugccagggcucuccgaaccuagcuagcauccucuucaauuccaacuagaaagcuuaccaugaagugggugaccuucaucagccugcuguuccuguucagcagcgccuacagccuguuccaggaguaccagugcuacggcagcagcagcaacaccagagugcugaacgagcugaacuacgacaacgccggcaccaaccuguacaacgagcuggagaugaacuacuacggcaagcaggagaacugguacagccugaagaagaacagcagaagccugggcgagaacgacgacggcaacaacgaggacaacgagaagcugagaaagcccaagcacaagaagcugaagcagcccgccgacggcaaccccgaccccaacgccaaccccaacguggaccccaacgccaaccccaacguggaccccaacgccaaccccaacguggaccccaacgccaaccccaacgccaaccccaacgccaaccccaacgccaaccccaacgccaaccccaacgccaaccccaacgccaaccccaacgccaaccccaacgccaaccccaacgccaaccccaacgccaaccccaacgccaaccccaacgccaaccccaacgccaaccccaacgccaaccccaacgccaaccccaacgccaaccccaacguggaccccaacgccaaccccaacgccaaccccaacgccaaccccaacgccaaccccaacgccaaccccaacgccaaccccaacgccaaccccaacgccaaccccaacgccaaccccaacgccaaccccaacgccaaccccaacgccaaccccaacgccaaccccaacgccaaccccaacgccaaccccaacgccaaccccaacgccaaccccaacgccaaccccaacaagaacaaccagggcaacggccagggccacaacaugcccaacgaccccaacagaaacguggacgagaacgccaacgccaacagcgccgugaagaacaacaacaacgaggagcccagcgacaagcacaucaaggaguaccugaacaagauccagaacagccugagcaccgaguggagccccugcagcgugaccugcggcaacggcauccaggugagaaucaagcccggcagcgccaacaagcccaaggacgagcuggacuacgccaacgacaucgagaagaagaucugcaagauggagaagugcagcagcguguucaacguggugaacagcagcugaggacuagucccuguucccagagcccacuuuuuuuucuuuuuuugaaauaaaauagccugucuuucagaucucaaaggcucuuuucagagccaccaaaaaaaaaaaaaaaaaaaaaaaaaaaaaaaaaaaaaaaaaaaaaaaaaaaaaaaaaaaaaaaaagaauu

SEQ ID NO: 6941 - RNA, 1631 nt, Artificial Sequence
  mRNA Design a-3 (hSL-A64-N5) comprising derived and/or modified sequence from Pf(3D7)__XP_001351122.1__HsALB_Pf-CSP(19-384)_TM domain HA (opt4)
aggagagggcgcuuggcuugcaaggacccugagcugcggcauugaagcacacccaacccaacucgacugaagucagccucacugaaccggaucugagaaucuucucucucugggcuugccagggcucuccgaaccuagcuagcauccucuucaauuccaacuagaaagcuuaccaugaagugggugaccuucaucagccugcuguuccuguucagcagcgccuacagccuguuccaggaguaccagugcuacggcagcagcagcaacaccagagugcugaacgagcugaacuacgacaacgccggcaccaaccuguacaacgagcuggagaugaacuacuacggcaagcaggagaacugguacagccugaagaagaacagcagaagccugggcgagaacgacgacggcaacaacgaggacaacgagaagcugagaaagcccaagcacaagaagcugaagcagcccgccgacggcaaccccgaccccaacgccaaccccaacguggaccccaacgccaaccccaacguggaccccaacgccaaccccaacguggaccccaacgccaaccccaacgccaaccccaacgccaaccccaacgccaaccccaacgccaaccccaacgccaaccccaacgccaaccccaacgccaaccccaacgccaaccccaacgccaaccccaacgccaaccccaacgccaaccccaacgccaaccccaacgccaaccccaacgccaaccccaacgccaaccccaacgccaaccccaacguggaccccaacgccaaccccaacgccaaccccaacgccaaccccaacgccaaccccaacgccaaccccaacgccaaccccaacgccaaccccaacgccaaccccaacgccaaccccaacgccaaccccaacgccaaccccaacgccaaccccaacgccaaccccaacgccaaccccaacgccaaccccaacgccaaccccaacgccaaccccaacgccaaccccaacaagaacaaccagggcaacggccagggccacaacaugcccaacgaccccaacagaaacguggacgagaacgccaacgccaacagcgccgugaagaacaacaacaacgaggagcccagcgacaagcacaucaaggaguaccugaacaagauccagaacagccugagcaccgaguggagccccugcagcgugaccugcggcaacggcauccaggugagaaucaagcccggcagcgccaacaagcccaaggacgagcuggacuacgccaacgacaucgagaagaagaucugcaagauggagaagugcagcagcguguucaacguggugaacagcagcaagcuggagagcaccagaaucuaccagauccuggccaucuacagcaccguggccagcagccuggugcugguggugagccugggcgccaucagcuucuggaugugcagcaacggcagccugcagugcagaaucugcaucugaggacuagucccuguucccagagcccacuuuuuuuucuuuuuuugaaauaaaauagccugucuuucagaucucaaaggcucuuuucagagccaccaaaaaaaaaaaaaaaaaaaaaaaaaaaaaaaaaaaaaaaaaaaaaaaaaaaaaaaaaaaaaaaaagaauu

SEQ ID NO: 6942 - RNA, 1343 nt, Artificial Sequence
  mRNA Design a-3 (hSL-A64-N5) comprising derived and/or modified sequence from Pf(3D7)__XP_001351122.1__HsALB_Pf-CSP(82-397) (opt4)
aggagagggcgcuuggcuugcaaggacccugagcugcggcauugaagcacacccaacccaacucgacugaagucagccucacugaaccggaucugagaaucuucucucucugggcuugccagggcucuccgaaccuagcuagcauccucuucaauuccaacuagaaagcuuaccaugaagugggugaccuucaucagccugcuguuccuguucagcagcgccuacagcgacaacgagaagcugagaaagcccaagcacaagaagcugaagcagcccgccgacggcaaccccgaccccaacgccaaccccaacguggaccccaacgccaaccccaacguggaccccaacgccaaccccaacguggaccccaacgccaaccccaacgccaaccccaacgccaaccccaacgccaaccccaacgccaaccccaacgccaaccccaacgccaaccccaacgccaaccccaacgccaaccccaacgccaaccccaacgccaaccccaacgccaaccccaacgccaaccccaacgccaaccccaacgccaaccccaacgccaaccccaacgccaaccccaacguggaccccaacgccaaccccaacgccaaccccaacgccaaccccaacgccaaccccaacgccaaccccaacgccaaccccaacgccaaccccaacgccaaccccaacgccaaccccaacgccaaccccaacgccaaccccaacgccaaccccaacgccaaccccaacgccaaccccaacgccaaccccaacgccaaccccaacgccaaccccaacgccaaccccaacaagaacaaccagggcaacggccagggccacaacaugcccaacgaccccaacagaaacguggacgagaacgccaacgccaacagcgccgugaagaacaacaacaacgaggagcccagcgacaagcacaucaaggaguaccugaacaagauccagaacagccugagcaccgaguggagccccugcagcgugaccugcggcaacggcauccaggugagaaucaagcccggcagcgccaacaagcccaaggacgagcuggacuacgccaacgacaucgagaagaagaucugcaagauggagaagugcagcagcguguucaacguggugaacagcagcaucggccugaucauggugcugagcuuccuguuccugaacugaggacuagucccuguucccagagcccacuuuuuuuucuuuuuuugaaauaaaauagccugucuuucagaucucaaaggcucuuuucagagccaccaaaaaaaaaaaaaaaaaaaaaaaaaaaaaaaaaaaaaaaaaaaaaaaaaaaaaaaaaaaaaaaaagaauu

SEQ ID NO: 6943 - RNA, 695 nt, Artificial Sequence
  mRNA Design a-3 (hSL-A64-N5) comprising derived and/or modified sequence from Pf(3D7)__XP_001351122.1__HsALB_Pf-CSP(93-192) (opt4)
aggagagggcgcuuggcuugcaaggacccugagcugcggcauugaagcacacccaacccaacucgacugaagucagccucacugaaccggaucugagaaucuucucucucugggcuugccagggcucuccgaaccuagcuagcauccucuucaauuccaacuagaaagcuuaccaugaagugggugaccuucaucagccugcuguuccuguucagcagcgccuacagcaagcugaagcagcccgccgacggcaaccccgaccccaacgccaaccccaacguggaccccaacgccaaccccaacguggaccccaacgccaaccccaacguggaccccaacgccaaccccaacgccaaccccaacgccaaccccaacgccaaccccaacgccaaccccaacgccaaccccaacgccaaccccaacgccaaccccaacgccaaccccaacgccaaccccaacgccaaccccaacgccaaccccaacgccaaccccaacgccaaccccaacgccaaccccaacgccaaccccugaggacuagucccuguucccagagcccacuuuuuuuucuuuuuuugaaauaaaauagccugucuuucagaucucaaaggcucuuuucagagccaccaaaaaaaaaaaaaaaaaaaaaaaaaaaaaaaaaaaaaaaaaaaaaaaaaaaaaaaaaaaaaaaaagaauu

SEQ ID NO: 6944 - RNA, 935 nt, Artificial Sequence
  mRNA Design a-3 (hSL-A64-N5) comprising derived and/or modified sequence from Pf(3D7)__XP_001351122.1__HsALB_Pf-CSP(93-272) (opt4)
aggagagggcgcuuggcuugcaaggacccugagcugcggcauugaagcacacccaacccaacucgacugaagucagccucacugaaccggaucugagaaucuucucucucugggcuugccagggcucuccgaaccuagcuagcauccucuucaauuccaacuagaaagcuuaccaugaagugggugaccuucaucagccugcuguuccuguucagcagcgccuacagcaagcugaagcagcccgccgacggcaaccccgaccccaacgccaaccccaacguggaccccaacgccaaccccaacguggaccccaacgccaaccccaacguggaccccaacgccaaccccaacgccaaccccaacgccaaccccaacgccaaccccaacgccaaccccaacgccaaccccaacgccaaccccaacgccaaccccaacgccaaccccaacgccaaccccaacgccaaccccaacgccaaccccaacgccaaccccaacgccaaccccaacgccaaccccaacgccaaccccaacgccaaccccaacguggaccccaacgccaaccccaacgccaaccccaacgccaaccccaacgccaaccccaacgccaaccccaacgccaaccccaacgccaaccccaacgccaaccccaacgccaaccccaacgccaaccccaacgccaaccccaacgccaaccccaacgccaaccccaacgccaaccccaacgccaaccccaacgccaaccccaacgccaaccccaacgccaaccccugaggacuagucccuguucccagagcccacuuuuuuuucuuuuuuugaaauaaaauagccugucuuucagaucucaaaggcucuuuucagagccaccaaaaaaaaaaaaaaaaaaaaaaaaaaaaaaaaaaaaaaaaaaaaaaaaaaaaaaaaaaaaaaaaagaauu

SEQ ID NO: 6945 - RNA, 1310 nt, Artificial Sequence
  mRNA Design a-3 (hSL-A64-N5) comprising derived and/or modified sequence from Pf(3D7)__XP_001351122.1__HsALB_Pf-CSP(93-397) (opt4)
aggagagggcgcuuggcuugcaaggacccugagcugcggcauugaagcacacccaacccaacucgacugaagucagccucacugaaccggaucugagaaucuucucucucugggcuugccagggcucuccgaaccuagcuagcauccucuucaauuccaacuagaaagcuuaccaugaagugggugaccuucaucagccugcuguuccuguucagcagcgccuacagcaagcugaagcagcccgccgacggcaaccccgaccccaacgccaaccccaacguggaccccaacgccaaccccaacguggaccccaacgccaaccccaacguggaccccaacgccaaccccaacgccaaccccaacgccaaccccaacgccaaccccaacgccaaccccaacgccaaccccaacgccaaccccaacgccaaccccaacgccaaccccaacgccaaccccaacgccaaccccaacgccaaccccaacgccaaccccaacgccaaccccaacgccaaccccaacgccaaccccaacgccaaccccaacguggaccccaacgccaaccccaacgccaaccccaacgccaaccccaacgccaaccccaacgccaaccccaacgccaaccccaacgccaaccccaacgccaaccccaacgccaaccccaacgccaaccccaacgccaaccccaacgccaaccccaacgccaaccccaacgccaaccccaacgccaaccccaacgccaaccccaacgccaaccccaacgccaaccccaacaagaacaaccagggcaacggccagggccacaacaugcccaacgaccccaacagaaacguggacgagaacgccaacgccaacagcgccgugaagaacaacaacaacgaggagcccagcgacaagcacaucaaggaguaccugaacaagauccagaacagccugagcaccgaguggagccccugcagcgugaccugcggcaacggcauccaggugagaaucaagcccggcagcgccaacaagcccaaggacgagcuggacuacgccaacgacaucgagaagaagaucugcaagauggagaagugcagcagcguguucaacguggugaacagcagcaucggccugaucauggugcugagcuuccuguuccugaacugaggacuagucccuguucccagagcccacuuuuuuuucuuuuuuugaaauaaaauagccugucuuucagaucucaaaggcucuuuucagagccaccaaaaaaaaaaaaaaaaaaaaaaaaaaaaaaaaaaaaaaaaaaaaaaaaaaaaaaaaaaaaaaaaagaauu

SEQ ID NO: 6946 - RNA, 680 nt, Artificial Sequence
  mRNA Design a-3 (hSL-A64-N5) comprising derived and/or modified sequence from Pf(3D7)__XP_001351122.1__HsALB_Pf-CSP(98-192) (opt4)
aggagagggcgcuuggcuugcaaggacccugagcugcggcauugaagcacacccaacccaacucgacugaagucagccucacugaaccggaucugagaaucuucucucucugggcuugccagggcucuccgaaccuagcuagcauccucuucaauuccaacuagaaagcuuaccaugaagugggugaccuucaucagccugcuguuccuguucagcagcgccuacagcgccgacggcaaccccgaccccaacgccaaccccaacguggaccccaacgccaaccccaacguggaccccaacgccaaccccaacguggaccccaacgccaaccccaacgccaaccccaacgccaaccccaacgccaaccccaacgccaaccccaacgccaaccccaacgccaaccccaacgccaaccccaacgccaaccccaacgccaaccccaacgccaaccccaacgccaaccccaacgccaaccccaacgccaaccccaacgccaaccccaacgccaaccccugaggacuagucccuguucccagagcccacuuuuuuuucuuuuuuugaaauaaaauagccugucuuucagaucucaaaggcucuuuucagagccaccaaaaaaaaaaaaaaaaaaaaaaaaaaaaaaaaaaaaaaaaaaaaaaaaaaaaaaaaaaaaaaaaagaauu

SEQ ID NO: 6947 - RNA, 920 nt, Artificial Sequence
  mRNA Design a-3 (hSL-A64-N5) comprising derived and/or modified sequence from Pf(3D7)__XP_001351122.1__HsALB_Pf-CSP(98-272) (opt4)
aggagagggcgcuuggcuugcaaggacccugagcugcggcauugaagcacacccaacccaacucgacugaagucagccucacugaaccggaucugagaaucuucucucucugggcuugccagggcucuccgaaccuagcuagcauccucuucaauuccaacuagaaagcuuaccaugaagugggugaccuucaucagccugcuguuccuguucagcagcgccuacagcgccgacggcaaccccgaccccaacgccaaccccaacguggaccccaacgccaaccccaacguggaccccaacgccaaccccaacguggaccccaacgccaaccccaacgccaaccccaacgccaaccccaacgccaaccccaacgccaaccccaacgccaaccccaacgccaaccccaacgccaaccccaacgccaaccccaacgccaaccccaacgccaaccccaacgccaaccccaacgccaaccccaacgccaaccccaacgccaaccccaacgccaaccccaacgccaaccccaacguggaccccaacgccaaccccaacgccaaccccaacgccaaccccaacgccaaccccaacgccaaccccaacgccaaccccaacgccaaccccaacgccaaccccaacgccaaccccaacgccaaccccaacgccaaccccaacgccaaccccaacgccaaccccaacgccaaccccaacgccaaccccaacgccaaccccaacgccaaccccaacgccaaccccugaggacuagucccuguucccagagcccacuuuuuuuucuuuuuuugaaauaaaauagccugucuuucagaucucaaaggcucuuuucagagccaccaaaaaaaaaaaaaaaaaaaaaaaaaaaaaaaaaaaaaaaaaaaaaaaaaaaaaaaaaaaaaaaaagaauu

SEQ ID NO: 6948 - RNA, 1226 nt, Artificial Sequence
  mRNA Design a-3 (hSL-A64-N5) comprising derived and/or modified sequence from Pf(3D7)__XP_001351122.1__HsALB_Pf-CSP(98-374) (opt4)
aggagagggcgcuuggcuugcaaggacccugagcugcggcauugaagcacacccaacccaacucgacugaagucagccucacugaaccggaucugagaaucuucucucucugggcuugccagggcucuccgaaccuagcuagcauccucuucaauuccaacuagaaagcuuaccaugaagugggugaccuucaucagccugcuguuccuguucagcagcgccuacagcgccgacggcaaccccgaccccaacgccaaccccaacguggaccccaacgccaaccccaacguggaccccaacgccaaccccaacguggaccccaacgccaaccccaacgccaaccccaacgccaaccccaacgccaaccccaacgccaaccccaacgccaaccccaacgccaaccccaacgccaaccccaacgccaaccccaacgccaaccccaacgccaaccccaacgccaaccccaacgccaaccccaacgccaaccccaacgccaaccccaacgccaaccccaacgccaaccccaacguggaccccaacgccaaccccaacgccaaccccaacgccaaccccaacgccaaccccaacgccaaccccaacgccaaccccaacgccaaccccaacgccaaccccaacgccaaccccaacgccaaccccaacgccaaccccaacgccaaccccaacgccaaccccaacgccaaccccaacgccaaccccaacgccaaccccaacgccaaccccaacgccaaccccaacaagaacaaccagggcaacggccagggccacaacaugcccaacgaccccaacagaaacguggacgagaacgccaacgccaacagcgccgugaagaacaacaacaacgaggagcccagcgacaagcacaucaaggaguaccugaacaagauccagaacagccugagcaccgaguggagccccugcagcgugaccugcggcaacggcauccaggugagaaucaagcccggcagcgccaacaagcccaaggacgagcuggacuacgccaacgacaucgagaagaagaucugcaagauggagaagugcugaggacuagucccuguucccagagcccacuuuuuuuucuuuuuuugaaauaaaauagccugucuuucagaucucaaaggcucuuuucagagccaccaaaaaaaaaaaaaaaaaaaaaaaaaaaaaaaaaaaaaaaaaaaaaaaaaaaaaaaaaaaaaaaaagaauu

SEQ ID NO: 6949 - RNA, 1295 nt, Artificial Sequence
  mRNA Design a-3 (hSL-A64-N5) comprising derived and/or modified sequence from Pf(3D7)__XP_001351122.1__HsALB_Pf-CSP(98-397) (opt4)
aggagagggcgcuuggcuugcaaggacccugagcugcggcauugaagcacacccaacccaacucgacugaagucagccucacugaaccggaucugagaaucuucucucucugggcuugccagggcucuccgaaccuagcuagcauccucuucaauuccaacuagaaagcuuaccaugaagugggugaccuucaucagccugcuguuccuguucagcagcgccuacagcgccgacggcaaccccgaccccaacgccaaccccaacguggaccccaacgccaaccccaacguggaccccaacgccaaccccaacguggaccccaacgccaaccccaacgccaaccccaacgccaaccccaacgccaaccccaacgccaaccccaacgccaaccccaacgccaaccccaacgccaaccccaacgccaaccccaacgccaaccccaacgccaaccccaacgccaaccccaacgccaaccccaacgccaaccccaacgccaaccccaacgccaaccccaacgccaaccccaacguggaccccaacgccaaccccaacgccaaccccaacgccaaccccaacgccaaccccaacgccaaccccaacgccaaccccaacgccaaccccaacgccaaccccaacgccaaccccaacgccaaccccaacgccaaccccaacgccaaccccaacgccaaccccaacgccaaccccaacgccaaccccaacgccaaccccaacgccaaccccaacgccaaccccaacaagaacaaccagggcaacggccagggccacaacaugcccaacgaccccaacagaaacguggacgagaacgccaacgccaacagcgccgugaagaacaacaacaacgaggagcccagcgacaagcacaucaaggaguaccugaacaagauccagaacagccugagcaccgaguggagccccugcagcgugaccugcggcaacggcauccaggugagaaucaagcccggcagcgccaacaagcccaaggacgagcuggacuacgccaacgacaucgagaagaagaucugcaagauggagaagugcagcagcguguucaacguggugaacagcagcaucggccugaucauggugcugagcuuccuguuccugaacugaggacuagucccuguucccagagcccacuuuuuuuucuuuuuuugaaauaaaauagccugucuuucagaucucaaaggcucuuuucagagccaccaaaaaaaaaaaaaaaaaaaaaaaaaaaaaaaaaaaaaaaaaaaaaaaaaaaaaaaaaaaaaaaaagaauu

SEQ ID NO: 6950 - RNA, 1622 nt, Artificial Sequence
  mRNA Design a-3 (hSL-A64-N5) comprising derived and/or modified sequence from Pf(3D7)__XP_001351122.1__HsALB_Pf-CSP(199-377)_L(PVTN)_HBsAg (opt4)
aggagagggcgcuuggcuugcaaggacccugagcugcggcauugaagcacacccaacccaacucgacugaagucagccucacugaaccggaucugagaaucuucucucucugggcuugccagggcucuccgaaccuagcuagcauccucuucaauuccaacuagaaagcuuaccaugaagugggugaccuucaucagccugcuguuccuguucagcagcgccuacagcgaccccaacgccaaccccaacgccaaccccaacgccaaccccaacgccaaccccaacgccaaccccaacgccaaccccaacgccaaccccaacgccaaccccaacgccaaccccaacgccaaccccaacgccaaccccaacgccaaccccaacgccaaccccaacgccaaccccaacgccaaccccaacgccaaccccaacgccaaccccaacgccaaccccaacaagaacaaccagggcaacggccagggccacaacaugcccaacgaccccaacagaaacguggacgagaacgccaacgccaacagcgccgugaagaacaacaacaacgaggagcccagcgacaagcacaucaaggaguaccugaacaagauccagaacagccugagcaccgaguggagccccugcagcgugaccugcggcaacggcauccaggugagaaucaagcccggcagcgccaacaagcccaaggacgagcuggacuacgccaacgacaucgagaagaagaucugcaagauggagaagugcagcagcgugcccgugaccaacauggagaacaucaccagcggcuuccugggcccccugcuggugcugcaggccggcuucuuccugcugaccagaauccugaccaucccccagagccuggacagcugguggaccagccugaacuuccugggcggcagccccgugugccugggccagaacagccagagccccaccagcaaccacagccccaccagcugcccccccaucugccccggcuacagauggaugugccugagaagauucaucaucuuccuguucauccugcugcugugccugaucuuccugcuggugcugcuggacuaccagggcaugcugcccgugugcccccugauccccggcagcaccaccaccaacaccggccccugcaagaccugcaccacccccgcccagggcaacagcauguuccccagcugcugcugcaccaagcccaccgacggcaacugcaccugcauccccauccccagcagcugggccuucgccaaguaccugugggagugggccagcgugagauucagcuggcugagccugcuggugcccuucgugcagugguucgugggccugagccccaccguguggcugagcgccaucuggaugaugugguacuggggccccagccuguacagcaucgugagccccuucaucccccugcugcccaucuucuucugccuguggguguacaucugaggacuagucccuguucccagagcccacuuuuuuuucuuuuuuugaaauaaaauagccugucuuucagaucucaaaggcucuuuucagagccaccaaaaaaaaaaaaaaaaaaaaaaaaaaaaaaaaaaaaaaaaaaaaaaaaaaaaaaaaaaaaaaaaagaauu

SEQ ID NO: 6951 - RNA, 1532 nt, Artificial Sequence
  mRNA Design a-3 (hSL-A64-N5) comprising derived and/or modified sequence from Pf(3D7)__XP_001351122.1__Pf-CSP (opt5)
aggagagggcgcuuggcuugcaaggacccugagcugcggcauugaagcacacccaacccaacucgacugaagucagccucacugaaccggaucugagaaucuucucucucugggcuugccagggcucuccgaaccuagcuagcauccucuucaauuccaacuagaaagcuuaccaugaugagaaagcuggccauccucagcguguccucuuuccuguuugucgaggcucuuuuccaggaauaccaaugcuauggcagcuccucuaacacccggguucugaaugagcucaacuacgacaaugccgggacaaaccuguauaaugaacuugagaugaacuacuauggaaaacaggaaaauugguacagccugaagaaaaacucccgcucucucggcgagaaugaugacgggaacaaugaggauaacgaaaagcugagaaaacccaagcacaagaaacugaagcagccugcggacggaaauccggaucccaacgcuaauccuaacguggaccccaacgccaauccuaacguggaucccaaugccaacccuaaugucgacccgaacgcuaaucccaacgccaauccuaacgcuaaucccaacgccaauccuaacgcgaaucccaacgccaacccgaaugcuaacccuaaugccaaccccaaugcuaacccuaaugccaaccccaaugcgaaccccaaugccaacccuaaugcuaacccgaaugccaaccccaacgcuaauccuaacgccaaucccaacgccaauccuaacguggaucccaaugcuaacccgaaugcgaacccuaaugccaaccccaaugcuaacccuaaugccaaccccaacgccaauccuaacgcuaaucccaacgccaauccgaacgcgaauccuaacgcuaaucccaacgccaaucccaacgccaauccuaacgcuaauccgaacgccaaucccaacgcuaacccuaaugccaaccccaaugcgaacccuaaugccaaccccaauaaaaacaaucagggcaacgggcaaggacauaauaugccuaacgaccccaaucggaacguugaugagaaugcuaacgccaacagcgcugugaagaauaacaauaacgaggaaccguccgacaaacacauuaaggaguaucucaauaagauccagaacagccugucuacggaaugguccccuuguagcgugaccugcggcaauggcauucagguccgcaucaaacccgggucugccaacaagccuaaagaugagcuugacuacgcgaaugacauugaaaagaaaaucuguaagauggagaaaugcuccagcguuuuuaacguggucaauucuuccaucggacugauuauggugcucagcuuccuguuucuuaacugaggacuagucccuguucccagagcccacuuuuuuuucuuuuuuugaaauaaaauagccugucuuucagaucucaaaggcucuuuucagagccaccaaaaaaaaaaaaaaaaaaaaaaaaaaaaaaaaaaaaaaaaaaaaaaaaaaaaaaaaaaaaaaaaagaauu

SEQ ID NO: 6952 - RNA, 1463 nt, Artificial Sequence
  mRNA Design a-3 (hSL-A64-N5) comprising derived and/or modified sequence from Pf(3D7)__XP_001351122.1__Pf-CSP(1-374) (opt5)
aggagagggcgcuuggcuugcaaggacccugagcugcggcauugaagcacacccaacccaacucgacugaagucagccucacugaaccggaucugagaaucuucucucucugggcuugccagggcucuccgaaccuagcuagcauccucuucaauuccaacuagaaagcuuaccaugaugagaaagcuggccauccucagcguguccucuuuccuguuugucgaggcucuuuuccaggaauaccaaugcuauggcagcuccucuaacacccggguucugaaugagcucaacuacgacaaugccgggacaaaccuguauaaugaacuugagaugaacuacuauggaaaacaggaaaauugguacagccugaagaaaaacucccgcucucucggcgagaaugaugacgggaacaaugaggauaacgaaaagcugagaaaacccaagcacaagaaacugaagcagccugcggacggaaauccggaucccaacgcuaauccuaacguggaccccaacgccaauccuaacguggaucccaaugccaacccuaaugucgacccgaacgcuaaucccaacgccaauccuaacgcuaaucccaacgccaauccuaacgcgaaucccaacgccaacccgaaugcuaacccuaaugccaaccccaaugcuaacccuaaugccaaccccaaugcgaaccccaaugccaacccuaaugcuaacccgaaugccaaccccaacgcuaauccuaacgccaaucccaacgccaauccuaacguggaucccaaugcuaacccgaaugcgaacccuaaugccaaccccaaugcuaacccuaaugccaaccccaacgccaauccuaacgcuaaucccaacgccaauccgaacgcgaauccuaacgcuaaucccaacgccaaucccaacgccaauccuaacgcuaauccgaacgccaaucccaacgcuaacccuaaugccaaccccaaugcgaacccuaaugccaaccccaauaaaaacaaucagggcaacgggcaaggacauaauaugccuaacgaccccaaucggaacguugaugagaaugcuaacgccaacagcgcugugaagaauaacaauaacgaggaaccguccgacaaacacauuaaggaguaucucaauaagauccagaacagccugucuacggaaugguccccuuguagcgugaccugcggcaauggcauucagguccgcaucaaacccgggucugccaacaagccuaaagaugagcuugacuacgcgaaugacauugaaaagaaaaucuguaagauggagaaaugcugaggacuagucccuguucccagagcccacuuuuuuuucuuuuuuugaaauaaaauagccugucuuucagaucucaaaggcucuuuucagagccaccaaaaaaaaaaaaaaaaaaaaaaaaaaaaaaaaaaaaaaaaaaaaaaaaaaaaaaaaaaaaaaaaagaauu

SEQ ID NO: 6953 - RNA, 1316 nt, Artificial Sequence
  mRNA Design a-3 (hSL-A64-N5) comprising derived and/or modified sequence from Pf(3D7)__XP_001351122.1__Pf-CSP(1-325) (opt5)
aggagagggcgcuuggcuugcaaggacccugagcugcggcauugaagcacacccaacccaacucgacugaagucagccucacugaaccggaucugagaaucuucucucucugggcuugccagggcucuccgaaccuagcuagcauccucuucaauuccaacuagaaagcuuaccaugaugagaaagcuggccauccucagcguguccucuuuccuguuugucgaggcucuuuuccaggaauaccaaugcuauggcagcuccucuaacacccggguucugaaugagcucaacuacgacaaugccgggacaaaccuguauaaugaacuugagaugaacuacuauggaaaacaggaaaauugguacagccugaagaaaaacucccgcucucucggcgagaaugaugacgggaacaaugaggauaacgaaaagcugagaaaacccaagcacaagaaacugaagcagccugcggacggaaauccggaucccaacgcuaauccuaacguggaccccaacgccaauccuaacguggaucccaaugccaacccuaaugucgacccgaacgcuaaucccaacgccaauccuaacgcuaaucccaacgccaauccuaacgcgaaucccaacgccaacccgaaugcuaacccuaaugccaaccccaaugcuaacccuaaugccaaccccaaugcgaaccccaaugccaacccuaaugcuaacccgaaugccaaccccaacgcuaauccuaacgccaaucccaacgccaauccuaacguggaucccaaugcuaacccgaaugcgaacccuaaugccaaccccaaugcuaacccuaaugccaaccccaacgccaauccuaacgcuaaucccaacgccaauccgaacgcgaauccuaacgcuaaucccaacgccaaucccaacgccaauccuaacgcuaauccgaacgccaaucccaacgcuaacccuaaugccaaccccaaugcgaacccuaaugccaaccccaauaaaaacaaucagggcaacgggcaaggacauaauaugccuaacgaccccaaucggaacguugaugagaaugcuaacgccaacagcgcugugaagaauaacaauaacgaggaaccguccgacaaacacauuaaggaguaucucaauaagauccagaacugaggacuagucccuguucccagagcccacuuuuuuuucuuuuuuugaaauaaaauagccugucuuucagaucucaaaggcucuuuucagagccaccaaaaaaaaaaaaaaaaaaaaaaaaaaaaaaaaaaaaaaaaaaaaaaaaaaaaaaaaaaaaaaaaagaauu

SEQ ID NO: 6954 - RNA, 1532 nt, Artificial Sequence
  mRNA Design a-3 (hSL-A64-N5) comprising derived and/or modified sequence from Pf(3D7)__XP_001351122.1__HsALB_Pf-CSP(19-397) (opt5)
aggagagggcgcuuggcuugcaaggacccugagcugcggcauugaagcacacccaacccaacucgacugaagucagccucacugaaccggaucugagaaucuucucucucugggcuugccagggcucuccgaaccuagcuagcauccucuucaauuccaacuagaaagcuuaccaugaagugggugaccuucaucagccugcucuuucuguucuccucugccuacagccuuuuucaggaguaucaaugcuacggcuccucuagcaacacaagaguccugaaugaacucaacuaugacaaugcugggacgaaccuguacaaugagcuugaaaugaacuauuacggaaaacaggagaauugguauucccugaagaaaaacucucggagccucggcgaaaaugaugacgggaacaaugaggauaacgagaagcugcgcaaacccaagcacaagaaacugaagcagccugccgacggaaauccggaucccaacgcgaauccuaacguugaccccaacgcuaauccuaacguggaucccaaugccaacccuaauguggacccgaacgccaaucccaacgcuaauccuaacgccaaucccaacgcuaauccuaacgccaaucccaacgcgaacccgaaugccaacccuaaugcuaaccccaaugccaacccuaaugcuaaccccaaugccaaccccaaugcgaacccuaaugccaacccgaaugcuaaccccaacgccaauccuaacgcuaaucccaacgccaauccuaacgucgaucccaaugccaacccgaaugcuaacccuaaugcgaaccccaaugccaacccuaaugcuaaccccaacgccaauccuaacgccaaucccaacgcuaauccgaacgccaauccuaacgcgaaucccaacgcuaaucccaacgccaauccuaacgccaauccgaacgcuaaucccaacgccaacccuaaugcuaaccccaaugccaacccuaaugcgaaccccaauaaaaacaaucagggcaacgggcaaggacauaauaugccuaacgaccccaauagaaacguggaugaaaaugccaacgcuaacuccgccguuaagaauaacaauaacgaggaaccgagcgacaaacacauuaaggaguaccucaauaagauccagaacucucuguccaccgaguggagcccuuguucugugacaugcggcaauggcauucagguccggaucaaacccggguccgcuaacaagccuaaagaugaacuugacuacgccaaugacauugagaagaaaaucuguaagauggaaaaaugcagcucuguguucaacguugucaauuccagcaucggacugauuauggugcucuccuuucuguuccuuaacugaggacuagucccuguucccagagcccacuuuuuuuucuuuuuuugaaauaaaauagccugucuuucagaucucaaaggcucuuuucagagccaccaaaaaaaaaaaaaaaaaaaaaaaaaaaaaaaaaaaaaaaaaaaaaaaaaaaaaaaaaaaaaaaaagaauu

SEQ ID NO: 6955 - RNA, 1550 nt, Artificial Sequence
  mRNA Design a-3 (hSL-A64-N5) comprising derived and/or modified sequence from Pf(3D7)__XP_001351122.1__HsIns-iso1_Pf-CSP(19-397) (opt5)
aggagagggcgcuuggcuugcaaggacccugagcugcggcauugaagcacacccaacccaacucgacugaagucagccucacugaaccggaucugagaaucuucucucucugggcuugccagggcucuccgaaccuagcuagcauccucuucaauuccaacuagaaagcuuaccauggcccuguggaugagacuccugccccuucuggcucuccuggcccuuuggggcccugacccggcggcugcccuguuccaggaguaccaaugcuaugggagcuccucuaacacccgggugcucaaugaacugaacuacgauaaugccggaacaaaccuguauaaugagcucgaaaugaacuacuauggcaagcaggagaauugguacagccugaaaaagaacucccgcucucuuggggaaaaugacgauggaaacaaugaggacaacgagaaacugagaaagcccaaacacaagaagcucaaacagccugcugauggcaaucccgacccuaacgccaaucccaacgucgauccuaacgcuaauccgaacguugaccccaaugccaacccuaauguggaucccaacgcgaauccuaacgccaaucccaacgcuaauccgaacgccaauccuaacgcuaaucccaacgccaacccuaaugcgaaccccaaugccaaccccaaugcuaacccuaaugccaacccgaaugcuaaccccaaugccaacccuaaugccaaccccaaugcuaacccuaacgcgaaucccaacgccaauccgaacgcuaauccuaacguggaccccaaugccaacccuaaugccaaccccaaugcuaacccuaaugccaaccccaaugcgaacccgaacgcuaauccuaacgccaaucccaacgccaaucccaacgcuaauccuaacgccaauccgaacgcuaaucccaacgccaauccuaacgcgaaucccaacgccaauccuaacgcuaaccccaaugccaacccuaaugcuaaccccaaugccaacccgaauaagaacaaucaggggaacggacaaggccauaauaugccuaacgaucccaaucggaacgucgacgaaaaugcgaacgccaacagcgcugugaaaaauaacaauaacgaggaaccuuccgauaagcacaucaaagaguaucugaauaagauucagaacucucuuagcacggaguggucccccuguagcguuaccugcggcaaugggauccaggugcgcauuaagccgggaucugccaacaaaccuaaggacgaacuggacuacgcuaaugauaucgagaaaaagauuuguaaaauggaaaagugcuccagcgucuuuaacgugguuaauucuuccaucggccucaucauggugcugagcuuccuguuucucaacugaggacuagucccuguucccagagcccacuuuuuuuucuuuuuuugaaauaaaauagccugucuuucagaucucaaaggcucuuuucagagccaccaaaaaaaaaaaaaaaaaaaaaaaaaaaaaaaaaaaaaaaaaaaaaaaaaaaaaaaaaaaaaaaaagaauu

SEQ ID NO: 6956 - RNA, 1529 nt, Artificial Sequence
  mRNA Design a-3 (hSL-A64-N5) comprising derived and/or modified sequence from Pf(3D7)__XP_001351122.1__HsSPARC_Pf-CSP(19-397) (opt5)
aggagagggcgcuuggcuugcaaggacccugagcugcggcauugaagcacacccaacccaacucgacugaagucagccucacugaaccggaucugagaaucuucucucucugggcuugccagggcucuccgaaccuagcuagcauccucuucaauuccaacuagaaagcuuaccaugagagccuggaucuucuuucugcucugccuggcuggccgggcccuugcgcuguuccaggaguaccaauguuaugggagcuccucuaacacccgcgugcucaaugaacugaacuacgacaaugcuggaacaaaccuuuauaaugagcuggaaaugaacuacuauggcaagcaggagaauugguacagccucaaaaagaacuccagaucucugggggaaaaugaugacggaaacaaugaggauaacgagaaacugcggaagcccaaacacaagaagcucaaacagccugccgacggcaauccggaucccaacgccaauccuaacgucgaccccaacgcuaauccuaacguugaucccaaugccaacccuaauguggacccgaacgcuaaucccaacgccaauccuaacgcgaaucccaacgccaauccuaacgcuaaucccaacgccaacccgaaugcuaacccuaaugccaaccccaaugcgaacccuaaugccaaccccaaugcuaaccccaaugccaacccuaaugcuaacccgaaugccaaccccaacgccaauccuaacgcuaaucccaacgcgaauccuaacguggaucccaaugccaacccgaaugcuaacccuaaugccaaccccaaugccaacccuaaugcuaaccccaacgccaauccuaacgcgaaucccaacgcuaauccgaacgccaauccuaacgccaaucccaacgcuaaucccaacgccaauccuaacgcuaauccgaacgccaaucccaacgcgaacccuaaugccaaccccaaugcuaacccuaaugccaaccccaauaagaacaaucaggggaacggacaaggccauaauaugccuaacgaccccaaucgcaacgucgaugaaaaugcuaacgccaacagcgcggugaaaaauaacaauaacgaggaaccguccgacaagcacauuaaagaguaucugaauaagauccagaacucucuuagcacggagugguccccuugcagcguuaccuguggcaaugggauucaggugagaaucaagcccggaucugccaacaaaccuaaggaugaacuggacuacgcuaaugacauugagaaaaagaucugcaaaauggaaaaguguuccagcgucuuuaacgugguuaauucuuccaucggccucauuauggugcugagcuuccuuuuucugaacugaggacuagucccuguucccagagcccacuuuuuuuucuuuuuuugaaauaaaauagccugucuuucagaucucaaaggcucuuuucagagccaccaaaaaaaaaaaaaaaaaaaaaaaaaaaaaaaaaaaaaaaaaaaaaaaaaaaaaaaaaaaaaaaaagaauu

SEQ ID NO: 6957 - RNA, 1532 nt, Artificial Sequence
  mRNA Design a-3 (hSL-A64-N5) comprising derived and/or modified sequence from Pf(3D7)__XP_001351122.1__IgE_Pf-CSP(19-397) (opt5)
aggagagggcgcuuggcuugcaaggacccugagcugcggcauugaagcacacccaacccaacucgacugaagucagccucacugaaccggaucugagaaucuucucucucugggcuugccagggcucuccgaaccuagcuagcauccucuucaauuccaacuagaaagcuuaccauggacuggaccuggauccuguuccucguggccgcugccacaagaguccacagccuguuucaggaguaccaaugcuauggcuccucuagcaacacgcggguucuuaaugaacugaacuacgauaaugcggggaccaaccucuauaaugagcuggaaaugaacuacuauggaaagcaggagaauugguacucccuuaaaaagaacucucgcagccugggcgaaaaugacgaugggaacaaugaggacaacgagaaacucagaaagcccaaacauaagaagcugaaacagccugcugauggaaauccggaccccaacgccaauccuaacguggaucccaacgccaauccuaacguggaccccaaugcuaacccuaaugucgauccgaacgccaaucccaacgcuaauccuaacgccaaucccaacgcgaauccuaacgccaaucccaacgcuaacccgaaugccaacccuaaugcuaaccccaaugccaacccuaaugcgaaccccaaugccaaccccaaugcuaacccuaaugccaacccgaaugcuaaccccaacgccaauccuaacgccaaucccaacgcuaauccuaacguggaccccaaugcgaacccgaaugccaacccuaaugcuaaccccaaugccaacccuaaugccaaccccaacgcuaauccuaacgccaaucccaacgcgaauccgaacgcuaauccuaacgccaaucccaacgccaaucccaacgcuaauccuaacgccaauccgaacgcuaaucccaacgccaacccuaaugcgaaccccaaugccaacccuaaugcuaaccccaauaagaacaaucagggcaacgggcaaggacacaauaugccuaacgaucccaaucggaacguugacgaaaaugccaacgcuaacuccgccgugaaaaauaacaauaacgaggaaccgucugauaagcauauuaaagaguaucugaauaagauccagaacagccucuccacagaguggagcccuuguucugugaccugcggcaauggcauucagguccgcaucaagcccggguccgcgaacaaaccuaaggacgaacuggacuacgccaaugauauugagaaaaagaucuguaaaauggaaaagugcagcucuguuuucaacguggucaauuccagcaucggacuuauuauggugcugucuuuucucuuccugaacugaggacuagucccuguucccagagcccacuuuuuuuucuuuuuuugaaauaaaauagccugucuuucagaucucaaaggcucuuuucagagccaccaaaaaaaaaaaaaaaaaaaaaaaaaaaaaaaaaaaaaaaaaaaaaaaaaaaaaaaaaaaaaaaaagaauu

SEQ ID NO: 6958 - RNA, 1697 nt, Artificial Sequence
  mRNA Design a-3 (hSL-A64-N5) comprising derived and/or modified sequence from Pf(3D7)__XP_001351122.1__Pf-CSP_L(G4SG4)_TM domain HA (opt5)
aggagagggcgcuuggcuugcaaggacccugagcugcggcauugaagcacacccaacccaacucgacugaagucagccucacugaaccggaucugagaaucuucucucucugggcuugccagggcucuccgaaccuagcuagcauccucuucaauuccaacuagaaagcuuaccaugaugagaaagcuggccauccucagcguguccucuuuccuguuugucgaggcucuuuuccaggaauaccaaugcuauggcagcuccucuaacacccggguucugaaugagcucaacuacgacaaugccgggacaaaccuguauaaugaacuugagaugaacuacuauggaaaacaggaaaauugguacagccugaagaaaaacucccgcucucucggcgagaaugaugacgggaacaaugaggauaacgaaaagcugagaaaacccaagcacaagaaacugaagcagccugcggacggaaauccggaucccaacgcuaauccuaacguggaccccaacgccaauccuaacguggaucccaaugccaacccuaaugucgacccgaacgcuaaucccaacgccaauccuaacgcuaaucccaacgccaauccuaacgcgaaucccaacgccaacccgaaugcuaacccuaaugccaaccccaaugcuaacccuaaugccaaccccaaugcgaaccccaaugccaacccuaaugcuaacccgaaugccaaccccaacgcuaauccuaacgccaaucccaacgccaauccuaacguggaucccaaugcuaacccgaaugcgaacccuaaugccaaccccaaugcuaacccuaaugccaaccccaacgccaauccuaacgcuaaucccaacgccaauccgaacgcgaauccuaacgcuaaucccaacgccaaucccaacgccaauccuaacgcuaauccgaacgccaaucccaacgcuaacccuaaugccaaccccaaugcgaacccuaaugccaaccccaauaaaaacaaucagggcaacgggcaaggacauaauaugccuaacgaccccaaucggaacguugaugagaaugcuaacgccaacagcgcugugaagaauaacaauaacgaggaaccguccgacaaacacauuaaggaguaucucaauaagauccagaacagccugucuacggaaugguccccuuguagcgugaccugcggcaauggcauucagguccgcaucaaacccgggucugccaacaagccuaaagaugagcuugacuacgcgaaugacauugaaaagaaaaucuguaagauggagaaaugcuccagcguuuuuaacguggucaauucuuccaucggacugauuauggugcucagcuuccuguuucuuaacggcgggggaggcuccgggggaggcggcaagcuggaaucuacaagaaucuaccagauucucgccaucuauagcaccguggcuuccagccugguccugguugugucucucggggccauuuccuucuggauguguagcaauggaucucugcaaugccggaucuguauuugaggacuagucccuguucccagagcccacuuuuuuuucuuuuuuugaaauaaaauagccugucuuucagaucucaaaggcucuuuucagagccaccaaaaaaaaaaaaaaaaaaaaaaaaaaaaaaaaaaaaaaaaaaaaaaaaaaaaaaaaaaaaaaaaagaauu

SEQ ID NO: 6959 - RNA, 1571 nt, Artificial Sequence
  mRNA Design a-3 (hSL-A64-N5) comprising derived and/or modified sequence from Pf(3D7)__XP_001351122.1__Pf-CSP(199-377)_L(PVTN)_HBsAg (opt5)
aggagagggcgcuuggcuugcaaggacccugagcugcggcauugaagcacacccaacccaacucgacugaagucagccucacugaaccggaucugagaaucuucucucucugggcuugccagggcucuccgaaccuagcuagcauccucuucaauuccaacuagaaagcuuaccauggaccccaacgccaauccuaacgcuaauccgaacgccaaucccaacgcgaauccuaacgcuaaucccaacgccaauccuaacgccaaucccaacgcuaauccuaacgccaacccgaaugcuaaccccaaugccaacccuaaugcgaaccccaaugccaacccuaaugcuaaccccaaugccaacccgaaugcuaacccuaaugccaaccccaacgcgaauccuaacaagaauaaccagggcaaugggcaaggacacaacaugcccaaugaucccaacagaaauguggacgagaacgccaaugcuaacagcgccgucaaaaauaacaauaacgaggaaccuuccgauaagcauaucaaagaauaccugaacaagauucaaaauucucucagcaccgagugguccccgugcucuguuacauguggcaacgggauccaggugcggauuaaacccggaagcgcuaauaagccuaaggacgaacuggauuaugccaacgacaucgagaaaaagauuugcaaaauggagaaguguuccucugugcccgucacgaauauggaaaacaucaccagcggcuuccuugggccucugcucgugcugcaggccggauuuuuccuucugacacgcauccucaccauuccccagucccuggauagcugguggacaucucugaauuuucucggcggcuccccgguuugccuggggcagaacagccagucuccuaccuccaaucacagccccacaucuuguccucccaucugcccuggauacagauggaugugucuucggcgcuucauuaucuuucuguucauucuccugcuuugccugaucuuucuccuggugcugcucgacuaucagggcaugcugcccgucuguccgcuuauuccuggguccaccacgaccaacacaggacccugcaaaaccuguacaacccccgcucaaggcaauagcauguucccuuccugcugcuguacgaagccgacagaugggaacugcaccuguauccccaucccuucuagcugggcguuugccaaguaccugugggagugggcuuccgugagauucagcuggcucucucugcuuguucccuuugugcagugguucgucggacuguccccuacaguguggcucagcgccauuuggaugaugugguauuggggccccucucuguacagcaucguguccccuuuuauuccccugcucccgaucuucuucugccugugggucuauauuugaggacuagucccuguucccagagcccacuuuuuuuucuuuuuuugaaauaaaauagccugucuuucagaucucaaaggcucuuuucagagccaccaaaaaaaaaaaaaaaaaaaaaaaaaaaaaaaaaaaaaaaaaaaaaaaaaaaaaaaaaaaaaaaaagaauu

SEQ ID NO: 6960 - RNA, 1613 nt, Artificial Sequence
  mRNA Design a-3 (hSL-A64-N5) comprising derived and/or modified sequence from Pf(3D7)__XP_001351122.1__Pf-CSP(199-387)_L(PVTN)_HBsAg (opt5)
aggagagggcgcuuggcuugcaaggacccugagcugcggcauugaagcacacccaacccaacucgacugaagucagccucacugaaccggaucugagaaucuucucucucugggcuugccagggcucuccgaaccuagcuagcauccucuucaauuccaacuagaaagcuuaccaugauggcccccgacccuaacgcuaauccgaacgccaaucccaacgcgaauccuaacgcuaaucccaacgccaauccuaacgccaaucccaacgcuaauccuaacgccaauccgaacgcuaaccccaaugccaacccuaaugcgaaccccaaugccaacccuaaugcuaaccccaaugccaacccgaaugcuaacccuaaugccaaccccaaugcgaacccuaacgccaaucccaacaagaauaaccagggcaaugggcaaggacacaacaugcccaaugauccuaacagaaauguggacgagaacgcuaaugccaacagcgcugucaaaaauaacaauaacgaggaaccguccgauaagcauaucaaagaauaccugaacaagauucaaaauucucucagcaccgaguggucccccugcucuguuacauguggcaacgggauccaggugcggauuaaaccuggaagcgccaauaagcccaaggacgaacuggauuaugccaacgacaucgagaaaaagauuugcaaaauggagaaguguuccucuguguucaaugucgugaacagcuccaucggccuugggccuguuacgaauauggaaaacaucaccagcggauuucugggcccccuccuggugcuucaggcuggcuucuuucugcucacacgcauucugaccaucccgcagucucuggauuccugguggacaagccucaauuuccuugggggaucuccugucugccugggccagaacucccagagccccaccucuaaucacuccccuacaagcugucccccuauuugccccggguacagauggaugugucugcggcgcuuuaucauuuuccucuuuauccugcuucugugccucauuuuccugcuggugcuccuggacuaucagggaaugcuuccgguuuguccucugauccccggcuccaccacgaccaacacagggcccugcaaaaccuguacaaccccugcgcaaggaaauucuauguuuccgagcugcugcuguacgaagcccacagauggcaacugcaccuguaucccuauucccuccagcugggccuucgcuaaguaccucugggagugggccucugugagauuuuccuggcugagccuucuggucccuuucgugcagugguuugugggccucucucccacagucuggcugagcgccaucuggaugaugugguauugggggccuucccuguacucuauuguuagccccuucaucccgcuccugccuauuuucuuuugccuuuggguguauaucugaggacuagucccuguucccagagcccacuuuuuuuucuuuuuuugaaauaaaauagccugucuuucagaucucaaaggcucuuuucagagccaccaaaaaaaaaaaaaaaaaaaaaaaaaaaaaaaaaaaaaaaaaaaaaaaaaaaaaaaaaaaaaaaaagaauu

SEQ ID NO: 6961 - RNA, 797 nt, Artificial Sequence
  mRNA Design a-3 (hSL-A64-N5) comprising derived and/or modified sequence from Pf(3D7)__XP_001351122.1__HsALB_Pf-CSP(19-152) (opt5)
aggagagggcgcuuggcuugcaaggacccugagcugcggcauugaagcacacccaacccaacucgacugaagucagccucacugaaccggaucugagaaucuucucucucugggcuugccagggcucuccgaaccuagcuagcauccucuucaauuccaacuagaaagcuuaccaugaagugggugaccuucaucagccugcucuuucuguucuccucugccuacagccuuuuucaggaguaucaaugcuacggcuccucuagcaacacaagaguccugaaugaacucaacuaugacaaugcugggacgaaccuguacaaugagcuugaaaugaacuauuacggaaaacaggagaauugguauucccugaagaaaaacucucggagccucggcgaaaaugaugacgggaacaaugaggauaacgagaagcugcgcaaacccaagcacaagaaacugaagcagccugccgacggaaauccggaucccaacgcgaauccuaacguugaccccaacgcuaauccuaacguggaucccaaugccaacccuaauguggacccgaacgccaaucccaacgcuaauccuaacgccaaucccaacgcuaauccuaacgccaaucccaacgcgaacccgugaggacuagucccuguucccagagcccacuuuuuuuucuuuuuuugaaauaaaauagccugucuuucagaucucaaaggcucuuuucagagccaccaaaaaaaaaaaaaaaaaaaaaaaaaaaaaaaaaaaaaaaaaaaaaaaaaaaaaaaaaaaaaaaaagaauu

SEQ ID NO: 6962 - RNA, 917 nt, Artificial Sequence
  mRNA Design a-3 (hSL-A64-N5) comprising derived and/or modified sequence from Pf(3D7)__XP_001351122.1__HsALB_Pf-CSP(19-192) (opt5)
aggagagggcgcuuggcuugcaaggacccugagcugcggcauugaagcacacccaacccaacucgacugaagucagccucacugaaccggaucugagaaucuucucucucugggcuugccagggcucuccgaaccuagcuagcauccucuucaauuccaacuagaaagcuuaccaugaagugggugaccuucaucagccugcucuuucuguucuccucugccuacagccuuuuucaggaguaucaaugcuacggcuccucuagcaacacaagaguccugaaugaacucaacuaugacaaugcugggacgaaccuguacaaugagcuugaaaugaacuauuacggaaaacaggagaauugguauucccugaagaaaaacucucggagccucggcgaaaaugaugacgggaacaaugaggauaacgagaagcugcgcaaacccaagcacaagaaacugaagcagccugccgacggaaauccggaucccaacgcgaauccuaacguugaccccaacgcuaauccuaacguggaucccaaugccaacccuaauguggacccgaacgccaaucccaacgcuaauccuaacgccaaucccaacgcuaauccuaacgccaaucccaacgcgaacccgaaugccaacccuaaugcuaaccccaaugccaacccuaaugcuaaccccaaugccaaccccaaugcgaacccuaaugccaacccgaaugcuaaccccaacgccaauccuaacgcuaaucccugaggacuagucccuguucccagagcccacuuuuuuuucuuuuuuugaaauaaaauagccugucuuucagaucucaaaggcucuuuucagagccaccaaaaaaaaaaaaaaaaaaaaaaaaaaaaaaaaaaaaaaaaaaaaaaaaaaaaaaaaaaaaaaaaagaauu

SEQ ID NO: 6963 - RNA, 1157 nt, Artificial Sequence
  mRNA Design a-3 (hSL-A64-N5) comprising derived and/or modified sequence from Pf(3D7)__XP_001351122.1__HsALB_Pf-CSP(19-272) (opt5)
aggagagggcgcuuggcuugcaaggacccugagcugcggcauugaagcacacccaacccaacucgacugaagucagccucacugaaccggaucugagaaucuucucucucugggcuugccagggcucuccgaaccuagcuagcauccucuucaauuccaacuagaaagcuuaccaugaagugggugaccuucaucagccugcucuuucuguucuccucugccuacagccuuuuucaggaguaucaaugcuacggcuccucuagcaacacaagaguccugaaugaacucaacuaugacaaugcugggacgaaccuguacaaugagcuugaaaugaacuauuacggaaaacaggagaauugguauucccugaagaaaaacucucggagccucggcgaaaaugaugacgggaacaaugaggauaacgagaagcugcgcaaacccaagcacaagaaacugaagcagccugccgacggaaauccggaucccaacgcgaauccuaacguugaccccaacgcuaauccuaacguggaucccaaugccaacccuaauguggacccgaacgccaaucccaacgcuaauccuaacgccaaucccaacgcuaauccuaacgccaaucccaacgcgaacccgaaugccaacccuaaugcuaaccccaaugccaacccuaaugcuaaccccaaugccaaccccaaugcgaacccuaaugccaacccgaaugcuaaccccaacgccaauccuaacgcuaaucccaacgccaauccuaacgucgaucccaaugccaacccgaaugcuaacccuaaugcgaaccccaaugccaacccuaaugcuaaccccaacgccaauccuaacgccaaucccaacgcuaauccgaacgccaauccuaacgcgaaucccaacgcuaaucccaacgccaauccuaacgccaauccgaacgcuaaucccaacgccaacccuaaugcuaaccccaaugccaacccuaaugcgaaccccugaggacuagucccuguucccagagcccacuuuuuuuucuuuuuuugaaauaaaauagccugucuuucagaucucaaaggcucuuuucagagccaccaaaaaaaaaaaaaaaaaaaaaaaaaaaaaaaaaaaaaaaaaaaaaaaaaaaaaaaaaaaaaaaaagaauu

SEQ ID NO: 6964 - RNA, 1319 nt, Artificial Sequence
  mRNA Design a-3 (hSL-A64-N5) comprising derived and/or modified sequence from Pf(3D7)__XP_001351122.1__HsALB_Pf-CSP(19-272)_L(AAY)_Pf-CSP(310-3 27)_L(AAY)_Pf-CSP(346-375) (opt5)
aggagagggcgcuuggcuugcaaggacccugagcugcggcauugaagcacacccaacccaacucgacugaagucagccucacugaaccggaucugagaaucuucucucucugggcuugccagggcucuccgaaccuagcuagcauccucuucaauuccaacuagaaagcuuaccaugaagugggugaccuucaucagccugcucuuucuguucuccucugccuacagccuuuuucaggaguaucaaugcuacggcuccucuagcaacacaagaguccugaaugaacucaacuaugacaaugcugggacgaaccuguacaaugagcuugaaaugaacuauuacggaaaacaggagaauugguauucccugaagaaaaacucucggagccucggcgaaaaugaugacgggaacaaugaggauaacgagaagcugcgcaaacccaagcacaagaaacugaagcagccugccgacggaaauccggaucccaacgcgaauccuaacguugaccccaacgcuaauccuaacguggaucccaaugccaacccuaauguggacccgaacgccaaucccaacgcuaauccuaacgccaaucccaacgcuaauccuaacgccaaucccaacgcgaacccgaaugccaacccuaaugcuaaccccaaugccaacccuaaugcuaaccccaaugccaaccccaaugcgaacccuaaugccaacccgaaugcuaaccccaacgccaauccuaacgcuaaucccaacgccaauccuaacgucgaucccaaugccaacccgaaugcuaacccuaaugcgaaccccaaugccaacccuaaugcuaaccccaacgccaauccuaacgccaaucccaacgcuaauccgaacgccaauccuaacgcgaaucccaacgcuaaucccaacgccaauccuaacgccaauccgaacgcuaaucccaacgccaacccuaaugcuaaccccaaugccaacccuaaugcgaaccccgccgcuuacgaaccuuccgacaaacauauuaaggaguaccucaauaaaauccagaacagccuggccgcuuauauuaagcccggcucugccaauaagccgaaagaugaacuugacuacgcgaacgauaucgagaagaaaauuuguaagauggagaaaugcuccugaggacuagucccuguucccagagcccacuuuuuuuucuuuuuuugaaauaaaauagccugucuuucagaucucaaaggcucuuuucagagccaccaaaaaaaaaaaaaaaaaaaaaaaaaaaaaaaaaaaaaaaaaaaaaaaaaaaaaaaaaaaaaaaaagaauu

SEQ ID NO: 6965 - RNA, 1280 nt, Artificial Sequence
  mRNA Design a-3 (hSL-A64-N5) comprising derived and/or modified sequence from Pf(3D7)__XP_001351122.1__HsALB_Pf-CSP(19-272)_L(AAY)_Pf-CSP(346-3 65)_L(AAY)_P2 (opt5)
aggagagggcgcuuggcuugcaaggacccugagcugcggcauugaagcacacccaacccaacucgacugaagucagccucacugaaccggaucugagaaucuucucucucugggcuugccagggcucuccgaaccuagcuagcauccucuucaauuccaacuagaaagcuuaccaugaagugggugaccuucaucagccugcucuuucuguucuccucugccuacagccuuuuucaggaguaucaaugcuacggcuccucuagcaacacaagaguccugaaugaacucaacuaugacaaugcugggacgaaccuguacaaugagcuugaaaugaacuauuacggaaaacaggagaauugguauucccugaagaaaaacucucggagccucggcgaaaaugaugacgggaacaaugaggauaacgagaagcugcgcaaacccaagcacaagaaacugaagcagccugccgacggaaauccggaucccaacgcgaauccuaacguugaccccaacgcuaauccuaacguggaucccaaugccaacccuaauguggacccgaacgccaaucccaacgcuaauccuaacgccaaucccaacgcuaauccuaacgccaaucccaacgcgaacccgaaugccaacccuaaugcuaaccccaaugccaacccuaaugcuaaccccaaugccaaccccaaugcgaacccuaaugccaacccgaaugcuaaccccaacgccaauccuaacgcuaaucccaacgccaauccuaacgucgaucccaaugccaacccgaaugcuaacccuaaugcgaaccccaaugccaacccuaaugcuaaccccaacgccaauccuaacgccaaucccaacgcuaauccgaacgccaauccuaacgcgaaucccaacgcuaaucccaacgccaauccuaacgccaauccgaacgcuaaucccaacgccaacccuaaugcuaaccccaaugccaacccuaaugcgaaccccgccgcuuacauuaaaccuggcuccgccaauaagcccaaagacgaacucgauuacgcuaacgacaucgaggccgcguaucaguacauuaaggccaauagcaaguucaucgggauuaccgaacugugaggacuagucccuguucccagagcccacuuuuuuuucuuuuuuugaaauaaaauagccugucuuucagaucucaaaggcucuuuucagagccaccaaaaaaaaaaaaaaaaaaaaaaaaaaaaaaaaaaaaaaaaaaaaaaaaaaaaaaaaaaaaaaaaagaauu

SEQ ID NO: 6966 - RNA, 1274 nt, Artificial Sequence
  mRNA Design a-3 (hSL-A64-N5) comprising derived and/or modified sequence from Pf(3D7)__XP_001351122.1__HsALB_Pf-CSP(19-272)_L(AAY)_Pf-CSP(346-3 65)_L(AAY)_PADRE (opt5)
aggagagggcgcuuggcuugcaaggacccugagcugcggcauugaagcacacccaacccaacucgacugaagucagccucacugaaccggaucugagaaucuucucucucugggcuugccagggcucuccgaaccuagcuagcauccucuucaauuccaacuagaaagcuuaccaugaagugggugaccuucaucagccugcucuuucuguucuccucugccuacagccuuuuucaggaguaucaaugcuacggcuccucuagcaacacaagaguccugaaugaacucaacuaugacaaugcugggacgaaccuguacaaugagcuugaaaugaacuauuacggaaaacaggagaauugguauucccugaagaaaaacucucggagccucggcgaaaaugaugacgggaacaaugaggauaacgagaagcugcgcaaacccaagcacaagaaacugaagcagccugccgacggaaauccggaucccaacgcgaauccuaacguugaccccaacgcuaauccuaacguggaucccaaugccaacccuaauguggacccgaacgccaaucccaacgcuaauccuaacgccaaucccaacgcuaauccuaacgccaaucccaacgcgaacccgaaugccaacccuaaugcuaaccccaaugccaacccuaaugcuaaccccaaugccaaccccaaugcgaacccuaaugccaacccgaaugcuaaccccaacgccaauccuaacgcuaaucccaacgccaauccuaacgucgaucccaaugccaacccgaaugcuaacccuaaugcgaaccccaaugccaacccuaaugcuaaccccaacgccaauccuaacgccaaucccaacgcuaauccgaacgccaauccuaacgcgaaucccaacgcuaaucccaacgccaauccuaacgccaauccgaacgcuaaucccaacgccaacccuaaugcuaaccccaaugccaacccuaaugcgaaccccgccgcuuacauuaaaccuggcuccgccaauaagcccaaagacgaacucgauuacgcuaacgacaucgaggccgcguaugccaaguucguggcugccuggacccugaaggcugccgccugaggacuagucccuguucccagagcccacuuuuuuuucuuuuuuugaaauaaaauagccugucuuucagaucucaaaggcucuuuucagagccaccaaaaaaaaaaaaaaaaaaaaaaaaaaaaaaaaaaaaaaaaaaaaaaaaaaaaaaaaaaaaaaaaagaauu

SEQ ID NO: 6967 - RNA, 1331 nt, Artificial Sequence
  mRNA Design a-3 (hSL-A64-N5) comprising derived and/or modified sequence from Pf(3D7)__XP_001351122.1__HsALB_Pf-CSP(19-272)_L(G4S)_Pf-CSP(310-3 27)_L(G4S)_Pf-CSP(346-375) (opt5)
aggagagggcgcuuggcuugcaaggacccugagcugcggcauugaagcacacccaacccaacucgacugaagucagccucacugaaccggaucugagaaucuucucucucugggcuugccagggcucuccgaaccuagcuagcauccucuucaauuccaacuagaaagcuuaccaugaagugggugaccuucaucagccugcucuuucuguucuccucugccuacagccuuuuucaggaguaucaaugcuacggcuccucuagcaacacaagaguccugaaugaacucaacuaugacaaugcugggacgaaccuguacaaugagcuugaaaugaacuauuacggaaaacaggagaauugguauucccugaagaaaaacucucggagccucggcgaaaaugaugacgggaacaaugaggauaacgagaagcugcgcaaacccaagcacaagaaacugaagcagccugccgacggaaauccggaucccaacgcgaauccuaacguugaccccaacgcuaauccuaacguggaucccaaugccaacccuaauguggacccgaacgccaaucccaacgcuaauccuaacgccaaucccaacgcuaauccuaacgccaaucccaacgcgaacccgaaugccaacccuaaugcuaaccccaaugccaacccuaaugcuaaccccaaugccaaccccaaugcgaacccuaaugccaacccgaaugcuaaccccaacgccaauccuaacgcuaaucccaacgccaauccuaacgucgaucccaaugccaacccgaaugcuaacccuaaugcgaaccccaaugccaacccuaaugcuaaccccaacgccaauccuaacgccaaucccaacgcuaauccgaacgccaauccuaacgcgaaucccaacgcuaaucccaacgccaauccuaacgccaauccgaacgcuaaucccaacgccaacccuaaugcuaaccccaaugccaacccuaaugcgaaccccggcgggggaggcuccgaaccuagcgacaaacauauuaaggaguaccucaauaaaauccagaacucucugggcgggggaggcuccauuaagcccgggagcgccaauaagccgaaagaugaacuugacuacgcuaacgauaucgagaagaaaauuuguaagauggagaaaugcucuugaggacuagucccuguucccagagcccacuuuuuuuucuuuuuuugaaauaaaauagccugucuuucagaucucaaaggcucuuuucagagccaccaaaaaaaaaaaaaaaaaaaaaaaaaaaaaaaaaaaaaaaaaaaaaaaaaaaaaaaaaaaaaaaaagaauu

SEQ ID NO: 6968 - RNA, 1316 nt, Artificial Sequence
  mRNA Design a-3 (hSL-A64-N5) comprising derived and/or modified sequence from Pf(3D7)__XP_001351122.1__HsALB_Pf-CSP(19-272)_L(G4S)_Pf-CSP(310-3 27)_Pf-CSP(346-375) (opt5)
aggagagggcgcuuggcuugcaaggacccugagcugcggcauugaagcacacccaacccaacucgacugaagucagccucacugaaccggaucugagaaucuucucucucugggcuugccagggcucuccgaaccuagcuagcauccucuucaauuccaacuagaaagcuuaccaugaagugggugaccuucaucagccugcucuuucuguucuccucugccuacagccuuuuucaggaguaucaaugcuacggcuccucuagcaacacaagaguccugaaugaacucaacuaugacaaugcugggacgaaccuguacaaugagcuugaaaugaacuauuacggaaaacaggagaauugguauucccugaagaaaaacucucggagccucggcgaaaaugaugacgggaacaaugaggauaacgagaagcugcgcaaacccaagcacaagaaacugaagcagccugccgacggaaauccggaucccaacgcgaauccuaacguugaccccaacgcuaauccuaacguggaucccaaugccaacccuaauguggacccgaacgccaaucccaacgcuaauccuaacgccaaucccaacgcuaauccuaacgccaaucccaacgcgaacccgaaugccaacccuaaugcuaaccccaaugccaacccuaaugcuaaccccaaugccaaccccaaugcgaacccuaaugccaacccgaaugcuaaccccaacgccaauccuaacgcuaaucccaacgccaauccuaacgucgaucccaaugccaacccgaaugcuaacccuaaugcgaaccccaaugccaacccuaaugcuaaccccaacgccaauccuaacgccaaucccaacgcuaauccgaacgccaauccuaacgcgaaucccaacgcuaaucccaacgccaauccuaacgccaauccgaacgcuaaucccaacgccaacccuaaugcuaaccccaaugccaacccuaaugcgaaccccggcgggggaggcuccgaaccuagcgacaaacauauuaaggaguaccucaauaaaauccagaacucucugauuaagcccggcuccgccaauaagccgaaagaugaacuugacuacgcuaacgauaucgagaagaaaauuuguaagauggagaaaugcagcugaggacuagucccuguucccagagcccacuuuuuuuucuuuuuuugaaauaaaauagccugucuuucagaucucaaaggcucuuuucagagccaccaaaaaaaaaaaaaaaaaaaaaaaaaaaaaaaaaaaaaaaaaaaaaaaaaaaaaaaaaaaaaaaaagaauu

SEQ ID NO: 6969 - RNA, 1316 nt, Artificial Sequence
  mRNA Design a-3 (hSL-A64-N5) comprising derived and/or modified sequence from Pf(3D7)__XP_001351122.1__HsALB_Pf-CSP(19-325) (opt5)
aggagagggcgcuuggcuugcaaggacccugagcugcggcauugaagcacacccaacccaacucgacugaagucagccucacugaaccggaucugagaaucuucucucucugggcuugccagggcucuccgaaccuagcuagcauccucuucaauuccaacuagaaagcuuaccaugaagugggugaccuucaucagccugcucuuucuguucuccucugccuacagccuuuuucaggaguaucaaugcuacggcuccucuagcaacacaagaguccugaaugaacucaacuaugacaaugcugggacgaaccuguacaaugagcuugaaaugaacuauuacggaaaacaggagaauugguauucccugaagaaaaacucucggagccucggcgaaaaugaugacgggaacaaugaggauaacgagaagcugcgcaaacccaagcacaagaaacugaagcagccugccgacggaaauccggaucccaacgcgaauccuaacguugaccccaacgcuaauccuaacguggaucccaaugccaacccuaauguggacccgaacgccaaucccaacgcuaauccuaacgccaaucccaacgcuaauccuaacgccaaucccaacgcgaacccgaaugccaacccuaaugcuaaccccaaugccaacccuaaugcuaaccccaaugccaaccccaaugcgaacccuaaugccaacccgaaugcuaaccccaacgccaauccuaacgcuaaucccaacgccaauccuaacgucgaucccaaugccaacccgaaugcuaacccuaaugcgaaccccaaugccaacccuaaugcuaaccccaacgccaauccuaacgccaaucccaacgcuaauccgaacgccaauccuaacgcgaaucccaacgcuaaucccaacgccaauccuaacgccaauccgaacgcuaaucccaacgccaacccuaaugcuaaccccaaugccaacccuaaugcgaaccccaauaaaaacaaucagggcaacgggcaaggacauaauaugccuaacgaccccaauagaaacguggaugaaaaugccaacgcuaacuccgccguuaagaauaacaauaacgaggaaccgagcgacaaacacauuaaggaguaccucaauaagauccagaacugaggacuagucccuguucccagagcccacuuuuuuuucuuuuuuugaaauaaaauagccugucuuucagaucucaaaggcucuuuucagagccaccaaaaaaaaaaaaaaaaaaaaaaaaaaaaaaaaaaaaaaaaaaaaaaaaaaaaaaaaaaaaaaaaagaauu

SEQ ID NO: 6970 - RNA, 1493 nt, Artificial Sequence
  mRNA Design a-3 (hSL-A64-N5) comprising derived and/or modified sequence from Pf(3D7)__XP_001351122.1__HsALB_Pf-CSP(19-384) (opt5)
aggagagggcgcuuggcuugcaaggacccugagcugcggcauugaagcacacccaacccaacucgacugaagucagccucacugaaccggaucugagaaucuucucucucugggcuugccagggcucuccgaaccuagcuagcauccucuucaauuccaacuagaaagcuuaccaugaagugggugaccuucaucagccugcucuuucuguucuccucugccuacagccuuuuucaggaguaucaaugcuacggcuccucuagcaacacaagagugcugaaugaacucaacuaugacaaugcugggacgaaccuguacaaugagcuugaaaugaacuauuacggaaaacaggagaauugguauucccugaagaaaaacucucggagccucggcgaaaaugaugacgggaacaaugaggauaacgagaagcugcgcaaacccaagcacaagaaacugaagcagccugccgacggaaauccggaucccaacgcgaauccuaacguugaccccaacgcuaauccuaacguggaucccaaugccaacccuaauguggacccgaacgccaaucccaacgcuaauccuaacgccaaucccaacgcuaauccuaacgccaaucccaacgcgaacccgaaugccaacccuaaugcuaaccccaaugccaacccuaaugcuaaccccaaugccaaccccaaugcgaacccuaaugccaacccgaaugcuaaccccaacgccaauccuaacgcuaaucccaacgccaauccuaacgucgaucccaaugccaacccgaaugcuaacccuaaugcgaaccccaaugccaacccuaaugcuaaccccaacgccaauccuaacgccaaucccaacgcuaauccgaacgccaauccuaacgcgaaucccaacgcuaaucccaacgccaauccuaacgccaauccgaacgcuaaucccaacgccaacccuaaugcuaaccccaaugccaacccuaaugcgaaccccaauaaaaacaaucagggcaacgggcaaggacauaauaugccuaacgaccccaauagaaacguggaugaaaaugccaacgcuaacuccgccguuaagaauaacaauaacgaggaaccgagcgacaaacacauuaaggaguaccucaauaagauccagaacucucuguccaccgaguggagcccuuguucugugacaugcggcaauggcauucagguccggaucaaacccggguccgcuaacaagccuaaagaugaacuugacuacgccaaugacauugagaagaaaaucuguaagauggaaaaaugcagcucuguguucaacguugucaauuccagcugaggacuagucccuguucccagagcccacuuuuuuuucuuuuuuugaaauaaaauagccugucuuucagaucucaaaggcucuuuucagagccaccaaaaaaaaaaaaaaaaaaaaaaaaaaaaaaaaaaaaaaaaaaaaaaaaaaaaaaaaaaaaaaaaagaauu

SEQ ID NO: 6971 - RNA, 1631 nt, Artificial Sequence
  mRNA Design a-3 (hSL-A64-N5) comprising derived and/or modified sequence from Pf(3D7)__XP_001351122.1__HsALB_Pf-CSP(19-384)_TM domain HA (opt5)
aggagagggcgcuuggcuugcaaggacccugagcugcggcauugaagcacacccaacccaacucgacugaagucagccucacugaaccggaucugagaaucuucucucucugggcuugccagggcucuccgaaccuagcuagcauccucuucaauuccaacuagaaagcuuaccaugaagugggugaccuucaucagccugcucuuucuguucuccucugccuacagccuuuuucaggaguaucaaugcuacggcuccucuagcaacacaagaguccugaaugaacucaacuaugacaaugcugggacgaaccuguacaaugagcuugaaaugaacuauuacggaaaacaggagaauugguauucccugaagaaaaacucucggagccucggcgaaaaugaugacgggaacaaugaggauaacgagaagcugcgcaaacccaagcacaagaaacugaagcagccugccgacggaaauccggaucccaacgcgaauccuaacguugaccccaacgcuaauccuaacguggaucccaaugccaacccuaauguggacccgaacgccaaucccaacgcuaauccuaacgccaaucccaacgcuaauccuaacgccaaucccaacgcgaacccgaaugccaacccuaaugcuaaccccaaugccaacccuaaugcuaaccccaaugccaaccccaaugcgaacccuaaugccaacccgaaugcuaaccccaacgccaauccuaacgcuaaucccaacgccaauccuaacgucgaucccaaugccaacccgaaugcuaacccuaaugcgaaccccaaugccaacccuaaugcuaaccccaacgccaauccuaacgccaaucccaacgcuaauccgaacgccaauccuaacgcgaaucccaacgcuaaucccaacgccaauccuaacgccaauccgaacgcuaaucccaacgccaacccuaaugcuaaccccaaugccaacccuaaugcgaaccccaauaaaaacaaucagggcaacgggcaaggacauaauaugccuaacgaccccaauagaaacguggaugaaaaugccaacgcuaacuccgccguuaagaauaacaauaacgaggaaccgagcgacaaacacauuaaggaguaccucaauaagauccagaacucucuguccaccgaguggagcccuuguucugugacaugcggcaauggcauucagguccggaucaaacccggguccgcuaacaagccuaaagaugaacuugacuacgccaaugacauugagaagaaaaucuguaagauggaaaaaugcagcucuguguucaacguugucaauuccagcaagcuggaguccacccgcaucuaucagauucucgcgaucuacucuacaguggccagcucccuggugcuuguggucagccugggagcuauuucuuuuuggauguguuccaacggcagccuccaaugcagaaucuguauuugaggacuagucccuguucccagagcccacuuuuuuuucuuuuuuugaaauaaaauagccugucuuucagaucucaaaggcucuuuucagagccaccaaaaaaaaaaaaaaaaaaaaaaaaaaaaaaaaaaaaaaaaaaaaaaaaaaaaaaaaaaaaaaaaagaauu

SEQ ID NO: 6972 - RNA, 1343 nt, Artificial Sequence
  mRNA Design a-3 (hSL-A64-N5) comprising derived and/or modified sequence from Pf(3D7)__XP_001351122.1__HsALB_Pf-CSP(82-397) (opt5)
aggagagggcgcuuggcuugcaaggacccugagcugcggcauugaagcacacccaacccaacucgacugaagucagccucacugaaccggaucugagaaucuucucucucugggcuugccagggcucuccgaaccuagcuagcauccucuucaauuccaacuagaaagcuuaccaugaagugggugaccuucaucagccugcucuuucuguucuccucugccuacagcgacaacgagaaacuuagaaagcccaaacacaagaaacugaagcagccugcugauggcaauccggaccccaacgccaauccuaacgucgaucccaaugcgaacccuaauguugaccccaacgcuaauccuaacguggauccgaaugccaaccccaaugccaacccuaaugcuaaccccaacgccaauccuaacgcuaaucccaacgccaauccgaacgcgaauccuaacgccaaucccaacgcuaauccuaacgccaaucccaacgcuaaucccaacgccaacccuaaugcgaacccgaaugccaaccccaaugcuaacccuaaugccaaccccaaugcuaacccuaauguggaccccaacgccaauccgaacgccaauccuaacgcuaaccccaaugcgaacccuaaugccaaccccaaugcuaacccuaaugccaaccccaaugccaacccgaaugcuaacccuaaugccaaccccaaugcgaaccccaacgcuaauccuaacgccaauccgaacgccaaucccaacgcuaauccuaacgccaaucccaacgcuaauccuaacgccaaucccaacaagaauaaccaagggaauggacagggccauaacaugccuaacgaucccaaucggaacgucgacgaaaaugcgaacgccaauuccgcugugaaaaacaauaacaaugaggaaccgucugauaagcacauuaaagaguaucucaacaagauccagaauagccuguccacagaauggucuccuugcagcguuacgugugggaacggcauucaggugcgcaucaaacccggauccgccaauaagccuaaggacgagcuugauuacgcuaacgacauugagaaaaagaucugcaaaauggaaaaguguagcucugucuuuaaugugguuaacuccagcaucgggcugauuauggugcucucuuuccuguuucugaacugaggacuagucccuguucccagagcccacuuuuuuuucuuuuuuugaaauaaaauagccugucuuucagaucucaaaggcucuuuucagagccaccaaaaaaaaaaaaaaaaaaaaaaaaaaaaaaaaaaaaaaaaaaaaaaaaaaaaaaaaaaaaaaaaagaauu

SEQ ID NO: 6973 - RNA, 695 nt, Artificial Sequence
  mRNA Design a-3 (hSL-A64-N5) comprising derived and/or modified sequence from Pf(3D7)__XP_001351122.1__HsALB_Pf-CSP(93-192) (opt5)
aggagagggcgcuuggcuugcaaggacccugagcugcggcauugaagcacacccaacccaacucgacugaagucagccucacugaaccggaucugagaaucuucucucucugggcuugccagggcucuccgaaccuagcuagcauccucuucaauuccaacuagaaagcuuaccaugaagugggugaccuucaucagccugcucuuucuguucuccucugccuacagcaaacuuaagcagcccgcugacggcaacccugauccgaaugccaaccccaaugucgacccuaacgcgaaucccaacguugauccuaaugcuaaccccaauguggacccuaacgccaauccgaacgccaaucccaacgcuaauccuaacgccaaccccaaugcuaacccuaaugccaaccccaaugcgaacccgaaugccaacccuaaugcuaaccccaaugccaacccuaaugcuaaccccaaugccaaccccaacgcgaauccuaacgccaauccgaacgcuaaucccaacgccaauccuugaggacuagucccuguucccagagcccacuuuuuuuucuuuuuuugaaauaaaauagccugucuuucagaucucaaaggcucuuuucagagccaccaaaaaaaaaaaaaaaaaaaaaaaaaaaaaaaaaaaaaaaaaaaaaaaaaaaaaaaaaaaaaaaaagaauu

SEQ ID NO: 6974 - RNA, 935 nt, Artificial Sequence
  mRNA Design a-3 (hSL-A64-N5) comprising derived and/or modified sequence from Pf(3D7)__XP_001351122.1__HsALB_Pf-CSP(93-272) (opt5)
aggagagggcgcuuggcuugcaaggacccugagcugcggcauugaagcacacccaacccaacucgacugaagucagccucacugaaccggaucugagaaucuucucucucugggcuugccagggcucuccgaaccuagcuagcauccucuucaauuccaacuagaaagcuuaccaugaagugggugaccuucaucagccugcucuuucuguucuccucugccuacagcaaacuuaagcagcccgcugacggcaacccugauccgaaugccaaccccaaugucgacccuaacgcgaaucccaacguugauccuaaugcuaaccccaauguggacccuaacgccaauccgaacgccaaucccaacgcuaauccuaacgccaaccccaaugcuaacccuaaugccaaccccaaugcgaacccgaaugccaacccuaaugcuaaccccaaugccaacccuaaugcuaaccccaaugccaaccccaacgcgaauccuaacgccaauccgaacgcuaaucccaacgccaauccuaacgcuaaucccaacguggauccuaaugccaaccccaaugccaacccgaaugcuaacccuaacgcgaaucccaacgccaauccuaacgcuaaucccaacgccaauccuaacgccaaucccaacgcuaauccgaacgccaauccuaacgcgaaucccaacgcuaaccccaaugccaacccuaaugccaacccgaaugcuaaccccaaugccaacccuaaugcuaaccccaaugccaacccuugaggacuagucccuguucccagagcccacuuuuuuuucuuuuuuugaaauaaaauagccugucuuucagaucucaaaggcucuuuucagagccaccaaaaaaaaaaaaaaaaaaaaaaaaaaaaaaaaaaaaaaaaaaaaaaaaaaaaaaaaaaaaaaaaagaauu

SEQ ID NO: 6975 - RNA, 1310 nt, Artificial Sequence
  mRNA Design a-3 (hSL-A64-N5) comprising derived and/or modified sequence from Pf(3D7)__XP_001351122.1__HsALB_Pf-CSP(93-397) (opt5)
aggagagggcgcuuggcuugcaaggacccugagcugcggcauugaagcacacccaacccaacucgacugaagucagccucacugaaccggaucugagaaucuucucucucugggcuugccagggcucuccgaaccuagcuagcauccucuucaauuccaacuagaaagcuuaccaugaagugggugaccuucaucagccugcucuuucuguucuccucugccuacagcaaacuuaagcagcccgcugacggcaacccugauccgaaugccaaccccaaugucgacccuaacgcgaaucccaacguugauccuaaugcuaaccccaauguggacccuaacgccaauccgaacgccaaucccaacgcuaauccuaacgccaaccccaaugcuaacccuaaugccaaccccaaugcgaacccgaaugccaacccuaaugcuaaccccaaugccaacccuaaugcuaaccccaaugccaaccccaacgcgaauccuaacgccaauccgaacgcuaaucccaacgccaauccuaacgcuaaucccaacguggauccuaaugccaaccccaaugccaacccgaaugcuaacccuaacgcgaaucccaacgccaauccuaacgcuaaucccaacgccaauccuaacgccaaucccaacgcuaauccgaacgccaauccuaacgcgaaucccaacgcuaaccccaaugccaacccuaaugccaacccgaaugcuaaccccaaugccaacccuaaugcuaaccccaaugccaacccuaauaaaaacaaucaagggaacggacagggccacaauaugcccaacgacccuaacagaaaugucgaugagaacgcgaaugccaacuccgcugugaagaauaacaauaacgaggaacccucugacaaacauauuaaggaauaucugaauaagauccagaacagccucuccacagaguggucuccgugcagcguuacgugugggaauggcauucaggugcggaucaaaccuggauccgccaacaagcccaaagaugaacuggacuacgcuaaugauauugagaagaaaaucugcaagauggagaaguguagcucugucuuuaacgugguuaauuccagcaucgggcuuauuauggugcugucuuuccucuuucugaacugaggacuagucccuguucccagagcccacuuuuuuuucuuuuuuugaaauaaaauagccugucuuucagaucucaaaggcucuuuucagagccaccaaaaaaaaaaaaaaaaaaaaaaaaaaaaaaaaaaaaaaaaaaaaaaaaaaaaaaaaaaaaaaaaagaauu

SEQ ID NO: 6976 - RNA, 680 nt, Artificial Sequence
  mRNA Design a-3 (hSL-A64-N5) comprising derived and/or modified sequence from Pf(3D7)__XP_001351122.1__HsALB_Pf-CSP(98-192) (opt5)
aggagagggcgcuuggcuugcaaggacccugagcugcggcauugaagcacacccaacccaacucgacugaagucagccucacugaaccggaucugagaaucuucucucucugggcuugccagggcucuccgaaccuagcuagcauccucuucaauuccaacuagaaagcuuaccaugaagugggugaccuucaucagccugcucuuucuguucuccucugccuacagcgcugacggcaaccccgauccuaaugccaacccgaaugucgaccccaacgcgaauccuaacguugaucccaaugcuaacccuaauguggaccccaacgccaauccuaacgccaauccgaacgcuaaucccaacgccaacccuaaugcuaaccccaaugccaacccuaaugcgaaccccaaugccaacccgaaugcuaacccuaaugccaaccccaaugcuaacccuaaugccaaccccaacgcgaaucccaacgccaauccuaacgcuaauccgaacgccaaucccugaggacuagucccuguucccagagcccacuuuuuuuucuuuuuuugaaauaaaauagccugucuuucagaucucaaaggcucuuuucagagccaccaaaaaaaaaaaaaaaaaaaaaaaaaaaaaaaaaaaaaaaaaaaaaaaaaaaaaaaaaaaaaaaaagaauu

SEQ ID NO: 6977 - RNA, 920 nt, Artificial Sequence
  mRNA Design a-3 (hSL-A64-N5) comprising derived and/or modified sequence from Pf(3D7)__XP_001351122.1__HsALB_Pf-CSP(98-272) (opt5)
aggagagggcgcuuggcuugcaaggacccugagcugcggcauugaagcacacccaacccaacucgacugaagucagccucacugaaccggaucugagaaucuucucucucugggcuugccagggcucuccgaaccuagcuagcauccucuucaauuccaacuagaaagcuuaccaugaagugggugaccuucaucagccugcucuuucuguucuccucugccuacagcgcugacggcaaccccgauccuaaugccaacccgaaugucgaccccaacgcgaauccuaacguugaucccaaugcuaacccuaauguggaccccaacgccaauccuaacgccaauccgaacgcuaaucccaacgccaacccuaaugcuaaccccaaugccaacccuaaugcgaaccccaaugccaacccgaaugcuaacccuaaugccaaccccaaugcuaacccuaaugccaaccccaacgcgaaucccaacgccaauccuaacgcuaauccgaacgccaaucccaacgcuaauccuaacguggaucccaaugccaacccuaaugccaaccccaaugcuaacccgaacgcgaauccuaacgccaaucccaacgcuaauccuaacgccaaucccaacgccaauccuaacgcuaaucccaacgccaauccgaacgcgaauccuaacgcuaaccccaaugccaaccccaaugccaacccuaaugcuaacccgaaugccaaccccaaugcuaacccuaaugccaaccccugaggacuagucccuguucccagagcccacuuuuuuuucuuuuuuugaaauaaaauagccugucuuucagaucucaaaggcucuuuucagagccaccaaaaaaaaaaaaaaaaaaaaaaaaaaaaaaaaaaaaaaaaaaaaaaaaaaaaaaaaaaaaaaaaagaauu

SEQ ID NO: 6978 - RNA, 1226 nt, Artificial Sequence
  mRNA Design a-3 (hSL-A64-N5) comprising derived and/or modified sequence from Pf(3D7)__XP_001351122.1__HsALB_Pf-CSP(98-374) (opt5)
aggagagggcgcuuggcuugcaaggacccugagcugcggcauugaagcacacccaacccaacucgacugaagucagccucacugaaccggaucugagaaucuucucucucugggcuugccagggcucuccgaaccuagcuagcauccucuucaauuccaacuagaaagcuuaccaugaagugggugaccuucaucagccugcucuuucuguucuccucugccuacagcgcugacggcaaccccgauccuaaugccaacccgaaugucgaccccaacgcgaauccuaacguugaucccaaugcuaacccuaauguggaccccaacgccaauccuaacgccaauccgaacgcuaaucccaacgccaacccuaaugcuaaccccaaugccaacccuaaugcgaaccccaaugccaacccgaaugcuaacccuaaugccaaccccaaugcuaacccuaaugccaaccccaacgcgaaucccaacgccaauccuaacgcuaauccgaacgccaaucccaacgcuaauccuaacguggaucccaaugccaacccuaaugccaaccccaaugcuaacccgaacgcgaauccuaacgccaaucccaacgcuaauccuaacgccaaucccaacgccaauccuaacgcuaaucccaacgccaauccgaacgcgaauccuaacgcuaaccccaaugccaaccccaaugccaacccuaaugcuaacccgaaugccaaccccaaugcuaacccuaaugccaaccccaauaaaaacaaucaggggaacggacaaggccacaauaugccuaacgaccccaacagaaaugucgaugagaacgcgaaugccaacuccgcugugaagaauaacaauaacgaggaaccuucugacaaacauauuaaggaauaucuuaauaaaauccagaacagccuguccacagaguggucucccugcagcguuacgugugggaauggcauucaggugcggaucaagccgggauccgccaacaagccuaaagaugaacucgacuacgcuaaugauauugagaagaaaaucugcaagauggagaaauguugaggacuagucccuguucccagagcccacuuuuuuuucuuuuuuugaaauaaaauagccugucuuucagaucucaaaggcucuuuucagagccaccaaaaaaaaaaaaaaaaaaaaaaaaaaaaaaaaaaaaaaaaaaaaaaaaaaaaaaaaaaaaaaaaagaauu

SEQ ID NO: 6979 - RNA, 1295 nt, Artificial Sequence
  mRNA Design a-3 (hSL-A64-N5) comprising derived and/or modified sequence from Pf(3D7)__XP_001351122.1__HsALB_Pf-CSP(98-397) (opt5)
aggagagggcgcuuggcuugcaaggacccugagcugcggcauugaagcacacccaacccaacucgacugaagucagccucacugaaccggaucugagaaucuucucucucugggcuugccagggcucuccgaaccuagcuagcauccucuucaauuccaacuagaaagcuuaccaugaagugggugaccuucaucagccugcucuuucuguucuccucugccuacagcgcugacggcaaccccgauccuaaugccaacccgaaugucgaccccaacgcgaauccuaacguugaucccaaugcuaacccuaauguggaccccaacgccaauccuaacgccaauccgaacgcuaaucccaacgccaacccuaaugcuaaccccaaugccaacccuaaugcgaaccccaaugccaacccgaaugcuaacccuaaugccaaccccaaugcuaacccuaaugccaaccccaacgcgaaucccaacgccaauccuaacgcuaauccgaacgccaaucccaacgcuaauccuaacguggaucccaaugccaacccuaaugccaaccccaaugcuaacccgaacgcgaauccuaacgccaaucccaacgcuaauccuaacgccaaucccaacgccaauccuaacgcuaaucccaacgccaauccgaacgcgaauccuaacgcuaaccccaaugccaaccccaaugccaacccuaaugcuaacccgaaugccaaccccaaugcuaacccuaaugccaaccccaauaaaaacaaucaggggaacggacaaggccacaauaugccuaacgaccccaacagaaaugucgaugagaacgcgaaugccaacuccgcugugaagaauaacaauaacgaggaaccuucugacaaacauauuaaggaauaucuuaauaaaauccagaacagccuguccacagaguggucucccugcagcguuacgugugggaauggcauucaggugcggaucaagccgggauccgccaacaagccuaaagaugaacucgacuacgcuaaugauauugagaagaaaaucugcaagauggagaaauguagcucugucuuuaacgugguuaauuccagcaucgggcugauuauggugcuuucuuuccuguuucucaacugaggacuagucccuguucccagagcccacuuuuuuuucuuuuuuugaaauaaaauagccugucuuucagaucucaaaggcucuuuucagagccaccaaaaaaaaaaaaaaaaaaaaaaaaaaaaaaaaaaaaaaaaaaaaaaaaaaaaaaaaaaaaaaaaagaauu

SEQ ID NO: 6980 - RNA, 1622 nt, Artificial Sequence
  mRNA Design a-3 (hSL-A64-N5) comprising derived and/or modified sequence from Pf(3D7)__XP_001351122.1__HsALB_Pf-CSP(199-377)_L(PVTN)_HBsAg (opt5)
aggagagggcgcuuggcuugcaaggacccugagcugcggcauugaagcacacccaacccaacucgacugaagucagccucacugaaccggaucugagaaucuucucucucugggcuugccagggcucuccgaaccuagcuagcauccucuucaauuccaacuagaaagcuuaccaugaagugggugaccuucaucagccugcucuuucuguucuccucugccuacagcgaccccaacgcuaauccuaacgccaauccgaacgcgaaucccaacgcuaauccuaacgccaaucccaacgccaauccuaacgcuaaucccaacgccaauccuaacgcuaacccgaaugccaaccccaaugcgaacccuaaugccaaccccaaugcuaacccuaaugccaaccccaaugcuaacccgaaugccaacccuaaugcgaaccccaacgccaauccuaacaaaaauaaccagggcaaugggcaaggacacaacaugcccaaugaucccaacagaaaugucgacgagaacgcuaaugccaacuccgcuguuaagaauaacaauaacgaggaaccuucugauaaacauauuaaggaauaucuuaacaaaauccagaauagccuguccacagaguggucuccgugcagcgugacguguggcaacgggauucaggugcggaucaagcccggauccgccaauaagccuaaagacgaacucgauuacgccaacgacauugagaagaaaaucugcaagauggagaaauguagcucuguccccgugaccaauauggaaaacaucacauccggcuuucuggggccucuucugguucuccaggcuggauucuuucugcugacccgcauucucacaaucccccaaagccuggauucuugguggaccucccuuaauuuccugggcggcagcccggugugccucgggcagaacucucaguccccuacaagcaaucacucccccaccucuuguccucccauuugcccuggauauagauggaugugucugcggcgcuuuaucauuuuccuuuuuauccugcuccugugccugauuuuccuccugguccuucuggacuaccagggcaugcuccccguguguccgcugaucccugggagcacgaccacaaacaccggacccugcaagacauguaccacgcccgcgcaaggcaauuccauguuuccuagcugcugcuguacaaagccgaccgaugggaacugcacauguauccccauuccuucuuccugggccuucgcuaaauaucuuugggagugggccagcguuagauuuucuuggcugagccuccuggugcccuucguccagugguucgugggacuguccccuaccguguggcucucugccaucuggaugaugugguacuggggccccagccuguauuccauugucagcccuuuuaucccccuucugccgauuuucuuuugccucuggguuuacaucugaggacuagucccuguucccagagcccacuuuuuuuucuuuuuuugaaauaaaauagccugucuuucagaucucaaaggcucuuuucagagccaccaaaaaaaaaaaaaaaaaaaaaaaaaaaaaaaaaaaaaaaaaaaaaaaaaaaaaaaaaaaaaaaaagaauu

SEQ ID NO: 6981 - RNA, 1532 nt, Artificial Sequence
  mRNA Design a-3 (hSL-A64-N5) comprising derived and/or modified sequence from Pf(3D7)__XP_001351122.1__Pf-CSP (opt6)
aggagagggcgcuuggcuugcaaggacccugagcugcggcauugaagcacacccaacccaacucgacugaagucagccucacugaaccggaucugagaaucuucucucucugggcuugccagggcucuccgaaccuagcuagcauccucuucaauuccaacuagaaagcuuaccaugaugagaaaacuugcaauacuaagcguaucuucauuccuauucguagaagcacuauuccaagaauaucaaugcuauggaucaagcuccaacacaagaguacuuaacgaacuaaauuacgacaaugcaggaacaaaccuauacaaugaacuugaaaugaauuacuacggcaaacaagaaaacugguacucccuaaaaaaaaacucaaggucauuaggagaaaacgacgacggaaacaacgaagacaacgaaaaacuacgaaaacccaaacacaaaaaauuaaaacaaccagcagacggaaaccccgacccaaacgcaaacccaaacgucgacccaaacgcaaacccgaacguagacccaaacgcgaacccaaacguagacccaaacgcaaacccaaacgcaaacccaaacgcaaacccaaacgcaaacccaaaugcaaacccaaacgcaaacccaaacgccaauccaaacgccaacccaaacgcaaacccaaacgcaaacccaaacgcaaacccaaacgcaaaccccaacgcaaacccaaacgcuaacccaaacgcaaacccuaaugcaaacccuaacgcaaacccaaacgucgacccgaacgcaaacccaaaugcaaacccaaacgcaaacccaaacgcaaaccccaacgccaacccaaaugcaaacccaaaugcaaauccaaacgcaaacccaaacgcaaacccuaacgcaaacccaaacgcaaaccccaacgcaaacccaaacgcaaacccaaacgccaacccaaacgcaaaccccaaugcaaacccaaacgcaaacccaaacgcaaacccaaacaaaaacaaucaaggcaacggacaaggacacaacaugcccaacgacccaaaccgaaacgucgacgaaaacgccaacgcaaacagcgcaguaaaaaacaacaacaacgaagaacccucagacaaacacauaaaagaauacuuaaacaaaauacaaaacucacuaucuacagaauggucacccuguagcguaaccugcggcaacggaauacaaguaagaauaaaaccaggcucagcaaacaaaccaaaagaugaacuagacuacgccaaugauauagaaaaaaaaauauguaaaauggaaaaauguagcucagucuucaacguagucaacucaucaauaggacuaauaaugguacucuccuuccucuuccuaaauuaaggacuagucccuguucccagagcccacuuuuuuuucuuuuuuugaaauaaaauagccugucuuucagaucucaaaggcucuuuucagagccaccaaaaaaaaaaaaaaaaaaaaaaaaaaaaaaaaaaaaaaaaaaaaaaaaaaaaaaaaaaaaaaaaagaauu

SEQ ID NO: 6982 - RNA, 1463 nt, Artificial Sequence
  mRNA Design a-3 (hSL-A64-N5) comprising derived and/or modified sequence from Pf(3D7)__XP_001351122.1__Pf-CSP(1-374) (opt6)
aggagagggcgcuuggcuugcaaggacccugagcugcggcauugaagcacacccaacccaacucgacugaagucagccucacugaaccggaucugagaaucuucucucucugggcuugccagggcucuccgaaccuagcuagcauccucuucaauuccaacuagaaagcuuaccaugaugagaaaacuagcaauauuaagcguaagcucauuccuauucguugaagcauuauuccaagaauaccaaugcuacggcucaagcucaaacacaagaguauuaaacgaauuaaacuacgacaaugcaggaaccaaccucuacaacgaacuagaaaugaauuauuacggcaaacaagaaaacugguacucacucaaaaaaaacucacgaucccuaggagaaaacgaugacggaaacaaugaagauaacgaaaaauuaagaaaaccaaaacacaaaaaauuaaaacaaccugcagacggaaacccagacccaaacgcaaauccaaauguagacccaaacgcaaaccccaacguagacccaaaugcaaacccaaacguagacccaaacgcaaacccaaaugcaaacccaaacgcaaacccaaacgcaaacccaaacgcaaaccccaacgcaaacccaaacgcaaacccaaacgccaaccccaacgcaaacccaaacgcaaacccgaaugcaaacccaaacgcaaacccaaacgcaaacccaaacgcaaacccaaacgcaaacccaaacgcaaacccaaaugcaaacccaaacguggauccaaacgcaaauccaaacgcaaacccaaacgcaaacccaaacgcaaaccccaacgcaaauccaaacgcaaaccccaaugcaaauccaaacgcaaacccaaacgccaacccaaacgcaaacccgaacgccaauccaaacgcaaacccaaacgcaaacccaaacgcaaacccaaacgccaacccaaacgcaaacccaaacgcaaacccaaacgcaaaccccaacaaaaacaaccaaggaaacggacaaggacacaacaugccaaacgauccaaacagaaacgucgacgaaaacgccaacgcuaacagcgcaguaaaaaacaauaacaacgaagaaccaucagacaaacauauaaaagaauacuuaaacaaaauccaaaacucacuaucaacagaauggucccccuguuccguaacaugcggaaacggaauacaaguacgaaucaaaccaggaucagccaacaaaccgaaagacgaacuagacuaugccaacgauauagaaaaaaaaauaugcaaaauggaaaaaugcugaggacuagucccuguucccagagcccacuuuuuuuucuuuuuuugaaauaaaauagccugucuuucagaucucaaaggcucuuuucagagccaccaaaaaaaaaaaaaaaaaaaaaaaaaaaaaaaaaaaaaaaaaaaaaaaaaaaaaaaaaaaaaaaaagaauu

SEQ ID NO: 6983 - RNA, 1316 nt, Artificial Sequence
  mRNA Design a-3 (hSL-A64-N5) comprising derived and/or modified sequence from Pf(3D7)__XP_001351122.1__Pf-CSP(1-325) (opt6)
aggagagggcgcuuggcuugcaaggacccugagcugcggcauugaagcacacccaacccaacucgacugaagucagccucacugaaccggaucugagaaucuucucucucugggcuugccagggcucuccgaaccuagcuagcauccucuucaauuccaacuagaaagcuuaccaugaugcgaaaauuagcaauacuaagcguaagcucauucuuauucguagaagcacucuuccaagaauaccaaugcuacggaucaagcucaaacacaagaguccuaaacgaauuaaacuaugacaacgcaggaacaaaccuauacaacgaacuagaaaugaacuacuacggaaaacaagaaaacugguacucacucaaaaaaaacagcagaagucuaggagaaaacgacgacggaaacaacgaagacaacgaaaaacuacgaaaaccaaaacacaaaaaacuaaaacaaccagcagacgggaacccagacccaaacgcaaacccaaacguagauccaaacgcaaacccaaauguagacccuaacgcaaacccaaauguagacccaaacgcaaacccuaacgcaaacccaaaugcaaacccaaacgcaaauccaaacgcaaacccaaacgcaaacccaaacgcgaacccaaacgcaaacccaaacgcaaacccaaaugcaaaccccaacgcaaauccaaaugcaaacccaaaugcaaauccaaacgcaaacccaaacgcaaacccaaaugcaaauccaaacgcaaauccaaacguggauccaaacgcaaacccaaacgcaaacccaaacgcaaacccaaacgcaaacccaaacgcaaacccaaacgcaaauccaaacgccaauccaaacgcaaauccaaaugcaaacccaaacgcaaacccaaacgcaaacccaaacgcaaacccaaacgcaaacccaaacgcaaacccaaacgcaaacccaaacgcaaacccaaacgcaaacccaaacgcaaacccaaacaaaaacaaccaaggaaacggacaaggacacaacaugccaaacgacccaaacagaaacguagacgaaaacgccaacgcaaauagcgcagucaaaaacaacaauaacgaagaaccaucggacaaacacauaaaagaauacuuaaacaaaauacaaaacugaggacuagucccuguucccagagcccacuuuuuuuucuuuuuuugaaauaaaauagccugucuuucagaucucaaaggcucuuuucagagccaccaaaaaaaaaaaaaaaaaaaaaaaaaaaaaaaaaaaaaaaaaaaaaaaaaaaaaaaaaaaaaaaaagaauu

SEQ ID NO: 6984 - RNA, 1532 nt, Artificial Sequence
  mRNA Design a-3 (hSL-A64-N5) comprising derived and/or modified sequence from Pf(3D7)__XP_001351122.1__HsALB_Pf-CSP(19-397) (opt6)
aggagagggcgcuuggcuugcaaggacccugagcugcggcauugaagcacacccaacccaacucgacugaagucagccucacugaaccggaucugagaaucuucucucucugggcuugccagggcucuccgaaccuagcuagcauccucuucaauuccaacuagaaagcuuaccaugaaaugggucacauuuauuucacuacuauucuuauucucaagcgcauacucacuauuucaagaauaccaaugcuacggcucauccucaaauacacgaguacuaaaugaacucaacuacgacaacgcaggaaccaaucucuacaacgaauuagaaaugaacuacuacggcaaacaagaaaacugguauucacuaaaaaaaaacaguagaucacuaggagaaaaugacgacggaaacaaugaagacaacgaaaaacuaagaaaaccaaaacacaaaaaauuaaaacaaccagcagacggaaacccagacccaaacgcaaacccuaacguagaucccaaugccaacccaaauguagacccaaacgcaaaccccaacgucgauccaaacgcaaacccaaacgcaaacccaaacgcaaacccaaacgcaaacccaaacgcaaacccaaaugcaaaccccaacgcaaacccaaacgcuaacccaaacgcaaacccaaacgcaaacccaaacgcaaacccaaacgcaaacccaaacgccaacccaaacgccaacccaaacgcaaauccaaacgcaaacccaaaugccaauccaaacguugacccaaacgcaaacccaaacgcaaaccccaacgcaaacccaaacgcaaauccaaacgcgaaccccaacgcaaacccaaacgcaaacccaaaugcaaacccaaacgcuaacccaaaugcaaacccaaacgccaacccaaacgccaacccaaacgcaaaccccaacgcaaacccaaacgcaaacccaaacgccaauccaaacgcaaacccaaaugcaaacccaaacaaaaacaaccaaggaaacggacaaggacacaacaugccaaacgaccccaacagaaacguagaugaaaaugcaaaugcuaacucagccguaaaaaacaauaacaacgaagaaccaucagacaaacacauaaaagaauaccuaaauaaaauacaaaauuccuuaucaacagaaugguccccaugcucaguaacuugcgguaacggcauacaaguaagaauaaaaccaggaucagcaaacaaaccaaaagacgaauuagacuaugcaaacgacauagaaaaaaaaauauguaaaauggaaaaaugcagcucaguauucaacguaguaaauuccucaaucggacucaucaugguauuaucauuccuauuuuuaaauuaaggacuagucccuguucccagagcccacuuuuuuuucuuuuuuugaaauaaaauagccugucuuucagaucucaaaggcucuuuucagagccaccaaaaaaaaaaaaaaaaaaaaaaaaaaaaaaaaaaaaaaaaaaaaaaaaaaaaaaaaaaaaaaaaagaauu

SEQ ID NO: 6985 - RNA, 1550 nt, Artificial Sequence
  mRNA Design a-3 (hSL-A64-N5) comprising derived and/or modified sequence from Pf(3D7)__XP_001351122.1__HsIns-iso1_Pf-CSP(19-397) (opt6)
aggagagggcgcuuggcuugcaaggacccugagcugcggcauugaagcacacccaacccaacucgacugaagucagccucacugaaccggaucugagaaucuucucucucugggcuugccagggcucuccgaaccuagcuagcauccucuucaauuccaacuagaaagcuuaccauggcacuauggaugagacuacuaccacuacuagcacuccuagccuuauggggacccgauccagccgcagcacucuuccaagaauaccaaugcuauggaucauccuccaacacaagaguccuaaacgaauuaaauuacgacaacgcuggaacaaaccuauacaaugaacuagaaaugaauuauuacggaaaacaagaaaauugguacucacuaaaaaaaaacucuagaagccuaggagaaaacgacgacggaaacaacgaagauaacgaaaaacuaagaaaaccaaaacacaaaaaauuaaaacaacccgcagacggcaacccagacccaaaugcaaauccaaacguagacccaaacgcaaauccaaacguagacccaaacgcaaacccaaauguagacccaaacgcaaauccaaacgcaaacccaaaugcaaacccaaaugcaaacccaaacgcaaauccaaacgcaaaucccaacgccaacccaaacgcaaacccaaacgcaaauccaaacgcaaacccaaacgcaaacccaaacgcaaacccaaacgcaaacccaaaugcaaacccaaaugccaauccaaacgccaacccaaacgcaaacccaaacguagacccaaacgcaaacccaaacgccaacccaaacgcaaaccccaaugcaaacccaaacgcaaacccaaacgcaaaccccaacgcaaauccaaacgcaaacccaaacgcaaauccaaacgcaaauccaaacgccaacccaaacgcaaacccaaacgcaaauccaaacgcaaaccccaacgcaaacccaaacgccaacccaaaugcaaacccaaacgcaaaucccaauaaaaacaaccaaggaaacggacaaggacacaacaugccaaacgauccaaacagaaacguagacgaaaacgcaaacgcaaacucagcagucaaaaacaauaacaacgaagaaccaucagacaaacacauaaaagaauaccuaaacaaaauacaaaacucacuauccacagaauggucaccaugcucaguaaccugcggaaacggaauacaaguaagaauaaaaccaggaucagccaacaaaccaaaagacgaacuagacuaugcuaaugacauagaaaaaaaaauaugcaaaauggaaaaaugcuccucaguauucaacgucguaaacucuucaauaggacuaauaaugguacuauccuucuuauuucuaaacuaaggacuagucccuguucccagagcccacuuuuuuuucuuuuuuugaaauaaaauagccugucuuucagaucucaaaggcucuuuucagagccaccaaaaaaaaaaaaaaaaaaaaaaaaaaaaaaaaaaaaaaaaaaaaaaaaaaaaaaaaaaaaaaaaagaauu

SEQ ID NO: 6986 - RNA, 1529 nt, Artificial Sequence
  mRNA Design a-3 (hSL-A64-N5) comprising derived and/or modified sequence from Pf(3D7)__XP_001351122.1__HsSPARC_Pf-CSP(19-397) (opt6)
aggagagggcgcuuggcuugcaaggacccugagcugcggcauugaagcacacccaacccaacucgacugaagucagccucacugaaccggaucugagaaucuucucucucugggcuugccagggcucuccgaaccuagcuagcauccucuucaauuccaacuagaaagcuuaccaugcgcgcauggauauucuuccuccuaugucuagcaggucgagcacuugcacucuuccaagaauaccaauguuacggauccucaagcaacacacgaguacuaaacgaacuaaacuacgauaacgcaggaaccaacuuauacaacgaacuagaaaugaacuacuacggcaaacaagaaaacugguacucacucaaaaaaaacagcagaagccuaggagaaaaugacgacggaaacaacgaagauaacgaaaaauuacgaaaacccaaacacaaaaaauuaaaacaacccgcagauggaaauccagacccgaacgcaaacccaaacguagacccaaacgcaaacccaaacguugacccaaacgcaaacccaaacguagacccaaacgcaaacccuaacgccaacccaaacgcaaacccaaacgcaaacccaaaugcgaacccaaaugcaaacccaaacgccaacccaaaugcaaaccccaacgcaaauccaaacgcaaacccaaaugcaaacccaaacgcaaacccaaacgcaaacccaaacgcaaacccaaacgccaaccccaaugcaaacccaaacgcaaacccaaacgucgacccaaacgcaaacccaaacgcaaacccaaacgcaaauccaaacgcaaauccaaacgcaaacccuaacgcaaacccaaacgcaaacccaaaugcaaauccaaacgcaaacccaaacgcaaacccaaacgcaaauccaaacgcaaacccaaacgcaaacccaaacgcaaacccuaaugcaaacccaaaugcaaauccaaacgcaaacccaaaugcaaaccccaacaaaaacaaccaaggaaacggacaaggacacaauaugccaaacgacccaaacagaaacguagacgaaaacgcaaacgccaacagcgcaguaaaaaacaacaacaacgaagaaccaucagacaaacacauaaaagaauaccuaaacaaaauacaaaacucacuaucaacagaauggucucccugcuccguaacaugcggaaacggcauacaaguacgaauaaaaccuggaucagccaacaaaccaaaagacgaacuagacuaugcaaaugacauagaaaaaaaaauaugcaaaauggaaaaaugcaguucagucuucaacguagucaacagcucaauaggccuaauaaugguacucucauuccuauucuuaaacuaaggacuagucccuguucccagagcccacuuuuuuuucuuuuuuugaaauaaaauagccugucuuucagaucucaaaggcucuuuucagagccaccaaaaaaaaaaaaaaaaaaaaaaaaaaaaaaaaaaaaaaaaaaaaaaaaaaaaaaaaaaaaaaaaagaauu

SEQ ID NO: 6987 - RNA, 1532 nt, Artificial Sequence
  mRNA Design a-3 (hSL-A64-N5) comprising derived and/or modified sequence from Pf(3D7)__XP_001351122.1__IgE_Pf-CSP(19-397) (opt6)
aggagagggcgcuuggcuugcaaggacccugagcugcggcauugaagcacacccaacccaacucgacugaagucagccucacugaaccggaucugagaaucuucucucucugggcuugccagggcucuccgaaccuagcuagcauccucuucaauuccaacuagaaagcuuaccauggauuggacauggauucucuuccucguagcagcagccacaagaguacacucuuuauuucaagaauaccaaugcuacggaucaagcucaaacacacgcguacuaaacgaacuaaacuacgacaacgcaggaacaaacuuauacaacgaacuagaaaugaacuauuauggcaaacaagaaaacugguacucacuaaaaaaaaacuccagaagcuuaggagaaaacgacgacggaaacaacgaagacaacgaaaaacuacgcaaaccuaaacacaaaaaacuaaaacaaccugcagacggaaacccagacccaaacgcgaacccaaacguagauccaaacgcaaacccaaacguagaucccaacgcaaacccgaacguagacccuaacgcaaauccaaacgcaaaccccaacgcaaacccgaacgcaaacccaaacgcaaacccaaacgcaaacccaaacgcaaacccaaacgcaaacccaaacgccaacccaaacgcaaauccaaacgcuaacccaaaugcaaacccuaacgcaaacccaaacgccaacccaaacgcaaacccaaacgcaaacccaaacgcaaaucccaauguagacccaaacgcaaacccaaacgcaaacccaaacgcuaacccaaaugcaaacccaaacgcaaacccaaacgcaaacccaaacgcuaaccccaacgcaaacccgaacgcaaacccaaaugcaaacccaaacgcaaacccaaaugcaaacccaaacgcaaacccaaacgcaaaccccaaugccaacccaaacgcaaauccaaaugccaauccaaacgcaaacccaaacaaaaacaaccaaggaaauggacaaggacauaacaugccaaacgaccccaaccgaaauguagacgaaaacgccaacgcaaauagugcagucaaaaacaauaacaaugaagaacccucagauaaacauauaaaagaauacuuaaacaaaauacaaaacucacuaucaaccgaguggucuccuugcucaguaacauguggaaacggaauacaaguacgaauaaaaccaggaucagcaaacaaaccgaaagacgaacuagacuacgccaacgacauagaaaagaaaauauguaaaauggagaaauguaguucaguauucaacgugguaaacagcucaauaggccuaauaaugguacucucuuuccuauuccuaaacuaaggacuagucccuguucccagagcccacuuuuuuuucuuuuuuugaaauaaaauagccugucuuucagaucucaaaggcucuuuucagagccaccaaaaaaaaaaaaaaaaaaaaaaaaaaaaaaaaaaaaaaaaaaaaaaaaaaaaaaaaaaaaaaaaagaauu

SEQ ID NO: 6988 - RNA, 1697 nt, Artificial Sequence
  mRNA Design a-3 (hSL-A64-N5) comprising derived and/or modified sequence from Pf(3D7)__XP_001351122.1__Pf-CSP_L(G4SG4)_TM domain HA (opt6)
aggagagggcgcuuggcuugcaaggacccugagcugcggcauugaagcacacccaacccaacucgacugaagucagccucacugaaccggaucugagaaucuucucucucugggcuugccagggcucuccgaaccuagcuagcauccucuucaauuccaacuagaaagcuuaccaugaugcguaaacuagcaauacuaucugucaguucauucuuauucguagaagcacuauuccaagaauaccaauguuacggaucuucaucaaacacaagaguacucaacgaauuaaacuacgauaacgcuggaaccaauuuauacaacgaacuagaaaugaacuacuauggaaaacaagaaaacugguauucacuaaaaaaaaacagcagaaguuuaggagaaaaugacgacggaaacaaugaagacaaugaaaaauuacgaaaaccaaaacacaaaaaauuaaaacaacccgccgacggaaauccagacccaaacgcaaacccaaauguagacccaaacgcaaacccaaauguagaucccaacgcaaacccaaacguagaucccaaugcaaacccaaacgcaaacccaaaugcaaaccccaacgcaaacccaaaugcaaacccuaacgcaaacccgaacgcaaacccaaacgcaaaucccaaugcaaaccccaacgcaaauccaaaugcaaacccuaacgcaaauccgaacgcaaauccaaacgcaaacccaaacgcaaacccaaacgcaaacccaaacgcaaacccaaacgucgacccaaacgccaauccaaacgcaaaccccaaugcaaacccaaaugcaaacccaaacgcaaacccaaaugccaacccaaacgcaaacccaaacgcaaacccaaacgcaaacccaaacgcaaacccaaaugcaaacccaaaugcaaacccaaacgccaacccaaacgcaaacccaaacgcaaacccaaacgccaacccaaacgcaaacccuaacgcaaauccaaacaaaaacaaccaagggaacggacaaggacacaacaugccaaacgacccaaacagaaacguagacgaaaacgccaacgcaaacucagcugucaaaaacaauaacaacgaagaacccuccgauaaacacauaaaagaauaccuaaacaaaauccaaaacucccuuucuacagaauggucacccugcucaguaacaugcggcaacggcauacaaguuagaaucaaaccaggaucagcaaauaaaccaaaagacgaauuagacuaugccaacgacauagaaaaaaaaauauguaaaauggaaaaaugcucaucaguuuucaacguaguaaacagcucaaucggauuaauaaugguacuaucauucuuauuuuuaaacggaggaggaggcuccggcggagguggaaaacuagaaucaacuagaauauaccaaauauuagcaauauacucaacaguagcaucaucacucguauuaguaguaucgcuaggagcaauaaguuucuggaugugcucuaacggaagccuacaaugccgaauaugcauauaaggacuagucccuguucccagagcccacuuuuuuuucuuuuuuugaaauaaaauagccugucuuucagaucucaaaggcucuuuucagagccaccaaaaaaaaaaaaaaaaaaaaaaaaaaaaaaaaaaaaaaaaaaaaaaaaaaaaaaaaaaaaaaaaagaauu

SEQ ID NO: 6989 - RNA, 1571 nt, Artificial Sequence
  mRNA Design a-3 (hSL-A64-N5) comprising derived and/or modified sequence from Pf(3D7)__XP_001351122.1__Pf-CSP(199-377)_L(PVTN)_HBsAg (opt6)
aggagagggcgcuuggcuugcaaggacccugagcugcggcauugaagcacacccaacccaacucgacugaagucagccucacugaaccggaucugagaaucuucucucucugggcuugccagggcucuccgaaccuagcuagcauccucuucaauuccaacuagaaagcuuaccauggacccaaacgccaaccccaacgcaaacccaaaugcaaacccaaacgcuaaccccaacgcaaacccaaacgcuaacccuaacgcaaauccaaacgcaaaucccaacgcaaauccaaacgcaaacccaaacgcaaacccaaaugccaacccaaacgcaaacccuaacgcaaaucccaacgcaaauccaaaugcaaaccccaaugcaaacccaaacgcaaauccaaacaaaaauaaucaaggaaauggacaaggacauaacaugccaaacgacccuaaccgaaacgucgacgaaaaugcaaacgcaaacuccgcaguaaaaaacaacaacaacgaagaaccuuccgacaaacacauaaaagaauaccuaaacaaaauacaaaacucucuauccacugaauggucaccaugcucaguaaccugcggaaauggcauacaaguaagaauaaaaccaggaucugcaaauaaaccuaaagacgaacuagauuacgcaaaugacauagaaaaaaaaauaugcaaaauggaaaaaugcucaucagucccaguaacaaacauggaaaacaucacaucaggauucuuaggaccacuacucguauuacaagcaggauucuuucuuuuaacaagaauauuaacaauaccacaaucccuagacucaugguggacaucauuaaacuuccuagguggaucaccagucugccucggacaaaacucacaaucaccaacaucaaaccacucaccaacauccugcccaccaauuuguccaggauacagauggaugugccuacgaagauucauaauauucuuauuuauauuacuacuaugucucauauuuuuacucguacuauuagacuaucagggcauguuacccguauguccacuaauaccaggcucaaccaccacaaacacagguccaugcaaaaccugcaccacaccagcacaaggaaacuccauguuucccucauguugcugcaccaaacccaccgauggaaacugcaccugcauaccaaucccaucuucaugggcauucgcaaaauaucuaugggaaugggcauccguaagauuuucauggcuaucacuauuaguaccauucguacaaugguucguaggauuaucaccaacaguaugguuaucagcaauauggaugaugugguacuggggaccaucacuauacucaauaguauccccuuucauaccauuacucccaauauuuuucugccuuuggguauacauauaaggacuagucccuguucccagagcccacuuuuuuuucuuuuuuugaaauaaaauagccugucuuucagaucucaaaggcucuuuucagagccaccaaaaaaaaaaaaaaaaaaaaaaaaaaaaaaaaaaaaaaaaaaaaaaaaaaaaaaaaaaaaaaaaagaauu

SEQ ID NO: 6990 - RNA, 1613 nt, Artificial Sequence
  mRNA Design a-3 (hSL-A64-N5) comprising derived and/or modified sequence from Pf(3D7)__XP_001351122.1__Pf-CSP(199-387)_L(PVTN)_HBsAg (opt6)
aggagagggcgcuuggcuugcaaggacccugagcugcggcauugaagcacacccaacccaacucgacugaagucagccucacugaaccggaucugagaaucuucucucucugggcuugccagggcucuccgaaccuagcuagcauccucuucaauuccaacuagaaagcuuaccaugauggcaccagauccaaacgcaaacccaaacgcaaacccaaacgcaaauccaaaugcaaacccaaacgcaaaucccaaugcaaacccuaacgcaaacccaaacgccaacccaaaugccaacccaaacgcaaacccaaacgcaaauccaaacgcaaacccaaacgcuaacccaaaugcaaaccccaacgcaaauccaaacgcaaacccaaacgcaaauccaaacgcuaacccaaacaaaaauaaccaaggaaacggacaaggacacaauaugccaaaugacccaaauagaaacguagacgaaaacgcaaacgcaaauucagcagucaaaaacaauaacaacgaagaaccauccgauaaacacauaaaagaauacuuaaacaaaauccaaaacucacuaucaacugaauggucaccuuguucaguaacauguggcaacggaauacaaguaagaauaaaaccagguucagccaacaaaccuaaagacgaacuagacuacgcaaacgacauagaaaaaaaaaucugcaaaauggaaaaaugcucaucaguauuuaauguaguaaacucaucaauaggacuaggcccuguaacaaacauggaaaacauaaccucaggauucuuaggcccacuacuaguacuccaagcaggauucuuucuucuaacaagaauauuaaccauuccucaaucauuagacucaugguggacaucccuuaacuuucuaggaggaagccccguaugcuuaggacaaaacagccaauccccaacauccaaccacuccccaacaucaugccccccaauaugcccaggauacagauggaugugccuaagaagauucaucauauuccuauuuauucucuuacucugcuuaauauucuuacucguauuacucgacuaccaaggaauguuaccaguaugcccacuaauaccaggauccacaacaacaaacacgggaccaugcaaaacaugcacaacaccugcccaaggaaauuccauguucccaucaugcugcugcacaaaaccaaccgacggcaacugcacaugcauaccaauaccaucaagcugggccuucgcaaaauaccuaugggaaugggcaucagugagauucucauggcucucauuacuagucccauucguacaaugguuuguaggauuaucaccaacaguuuggcucagcgcaauauggaugaugugguacuggggccccucuuuauauucaauaguauccccauuuauaccacuacucccaauauucuucuguuuauggguauacauauaaggacuagucccuguucccagagcccacuuuuuuuucuuuuuuugaaauaaaauagccugucuuucagaucucaaaggcucuuuucagagccaccaaaaaaaaaaaaaaaaaaaaaaaaaaaaaaaaaaaaaaaaaaaaaaaaaaaaaaaaaaaaaaaaagaauu

SEQ ID NO: 6991 - RNA, 797 nt, Artificial Sequence
  mRNA Design a-3 (hSL-A64-N5) comprising derived and/or modified sequence from Pf(3D7)__XP_001351122.1__HsALB_Pf-CSP(19-152) (opt6)
aggagagggcgcuuggcuugcaaggacccugagcugcggcauugaagcacacccaacccaacucgacugaagucagccucacugaaccggaucugagaaucuucucucucugggcuugccagggcucuccgaaccuagcuagcauccucuucaauuccaacuagaaagcuuaccaugaaauggguaacauucauaucacuacuauuccuauucuccagcgcauacucacuauuccaagaauaccaaugcuacggaucaagcucaaacacacgaguacuaaacgaacuaaacuacgacaacgcaggaaccaaccuauacaacgaacuagaaaugaacuacuacggaaaacaagaaaacugguacucacuaaaaaaaaacagcagaucacuaggagaaaacgacgacggaaacaacgaagacaacgaaaaacuaagaaaaccaaaacacaaaaaacuaaaacaacccgcagacggaaacccagacccaaacgcaaacccaaacguagacccaaaugcaaacccaaacguagacccaaacgcaaacccaaacguagacccaaacgcaaacccaaacgcaaacccaaacgcaaacccaaacgcaaacccaaacgcaaacccaaacgcaaacccauaaggacuagucccuguucccagagcccacuuuuuuuucuuuuuuugaaauaaaauagccugucuuucagaucucaaaggcucuuuucagagccaccaaaaaaaaaaaaaaaaaaaaaaaaaaaaaaaaaaaaaaaaaaaaaaaaaaaaaaaaaaaaaaaaagaauu

SEQ ID NO: 6992 - RNA, 917 nt, Artificial Sequence
  mRNA Design a-3 (hSL-A64-N5) comprising derived and/or modified sequence from Pf(3D7)__XP_001351122.1__HsALB_Pf-CSP(19-192) (opt6)
aggagagggcgcuuggcuugcaaggacccugagcugcggcauugaagcacacccaacccaacucgacugaagucagccucacugaaccggaucugagaaucuucucucucugggcuugccagggcucuccgaaccuagcuagcauccucuucaauuccaacuagaaagcuuaccaugaaauggguaacauucaucucacuacuauucuuauucucaucagcauacucacuauuccaagaauaccaaugcuacggaucaucaucaaacacacgaguacucaacgaacuaaacuacgacaacgcaggaacaaaccuauacaacgaacuagaaaugaacuacuacggaaaacaagaaaacugguauucacuaaaaaaaaacucaagaucacuaggagaaaacgacgacggaaacaacgaagacaacgaaaaacuaagaaaaccaaaacacaaaaaacuaaaacaaccagcagacggaaacccagacccaaacgcaaacccaaacguagacccaaacgccaacccaaacguagacccaaacgcaaacccaaacguagacccaaacgcaaacccaaacgcaaacccaaacgcaaacccaaacgcaaacccaaacgcaaacccaaacgcaaacccaaacgcaaacccaaacgcaaacccaaacgcaaacccaaacgcaaacccaaacgcaaacccaaacgcaaauccaaacgcaaacccaaacgcaaacccaaacgcaaacccaaacgcaaaccccuaaggacuagucccuguucccagagcccacuuuuuuuucuuuuuuugaaauaaaauagccugucuuucagaucucaaaggcucuuuucagagccaccaaaaaaaaaaaaaaaaaaaaaaaaaaaaaaaaaaaaaaaaaaaaaaaaaaaaaaaaaaaaaaaaagaauu

SEQ ID NO: 6993 - RNA, 1157 nt, Artificial Sequence
  mRNA Design a-3 (hSL-A64-N5) comprising derived and/or modified sequence from Pf(3D7)__XP_001351122.1__HsALB_Pf-CSP(19-272) (opt6)
aggagagggcgcuuggcuugcaaggacccugagcugcggcauugaagcacacccaacccaacucgacugaagucagccucacugaaccggaucugagaaucuucucucucugggcuugccagggcucuccgaaccuagcuagcauccucuucaauuccaacuagaaagcuuaccaugaaauggguaacauucauaucacuacuauuccuauucucaagcgcauauucacuauuccaagaauaccaaugcuacggaucaagcucaaacacaagaguacuuaacgaacuaaacuacgacaacgcaggaacaaaccuauacaacgaacuugaaaugaacuacuacggaaaacaagaaaacugguacucacuaaaaaaaaauagcagaagcuuaggagaaaacgacgacggaaacaacgaagacaacgaaaaauuaagaaaaccuaaacacaaaaaacuaaaacaacccgcagacggaaacccagacccuaacgccaacccaaauguagacccaaacgcaaacccaaacguagacccaaacgcaaaccccaacguagacccaaacgcaaacccaaacgcaaacccaaacgcaaacccaaacgcaaaccccaacgcaaacccaaacgcaaacccaaacgcaaacccaaacgcaaacccaaacgcaaacccaaacgcaaacccaaacgcaaacccaaacgcaaacccaaacgcgaacccaaacgcaaacccaaacgcaaacccaaacgcaaacccaaacgcaaacccaaacguagacccaaaugcaaaccccaacgcaaacccaaacgcaaacccaaaugcaaaccccaacgcaaacccaaacgcaaacccaaacgcaaacccaaacgcaaacccaaaugcaaacccaaacgcaaacccaaacgccaacccaaacgcaaacccaaacgcaaacccaaacgcaaacccaaacgcaaacccgaacgcaaacccaaacgcaaacccaaacgcaaacccauaaggacuagucccuguucccagagcccacuuuuuuuucuuuuuuugaaauaaaauagccugucuuucagaucucaaaggcucuuuucagagccaccaaaaaaaaaaaaaaaaaaaaaaaaaaaaaaaaaaaaaaaaaaaaaaaaaaaaaaaaaaaaaaaaagaauu

SEQ ID NO: 6994 - RNA, 1319 nt, Artificial Sequence
  mRNA Design a-3 (hSL-A64-N5) comprising derived and/or modified sequence from Pf(3D7)__XP_001351122.1__HsALB_Pf-CSP(19-272)_L(AAY)_Pf-CSP(310-3 27)_L(AAY)_Pf-CSP(346-375) (opt6)
aggagagggcgcuuggcuugcaaggacccugagcugcggcauugaagcacacccaacccaacucgacugaagucagccucacugaaccggaucugagaaucuucucucucugggcuugccagggcucuccgaaccuagcuagcauccucuucaauuccaacuagaaagcuuaccaugaaauggguaacauuuauaucacuccuauuccuuuuuucgucagcauacucacuauuccaagaauaucaaugcuacggaucaagcuccaacacaagaguacuaaacgaacuaaacuacgacaacgcaggaacaaaccuauacaacgaacuagaaaugaacuacuacggaaaacaagaaaacugguacucacuaaaaaaaaacagccgaagcuuaggagaaaaugacgacggaaacaacgaagacaacgaaaaauuacgcaaacccaaacacaaaaaacugaaacaaccagcagacggaaacccagacccaaacgcaaacccaaacguagacccaaacgcaaacccaaacguagacccaaacgcaaacccaaacguagacccaaacgcaaacccaaacgcgaacccaaacgccaacccaaacgcaaacccaaacgcaaacccaaacgcaaacccaaacgcaaacccaaacgcaaacccaaacgccaacccgaacgcaaacccaaacgcaaacccaaacgcaaauccaaacgcaaacccaaacgcaaacccaaacgccaacccaaacgcaaacccaaacgcaaacccaaauguggacccaaacgcaaacccaaacgcaaacccaaacgcaaacccaaaugcaaacccaaacgcaaacccaaacgcaaacccaaacgcaaacccaaacgcaaacccaaaugcaaacccaaacgcaaauccaaacgcaaacccaaacgcaaacccaaacgcaaacccaaacgcaaacccuaacgcaaacccaaacgcaaacccaaacgccaaccccaaugcaaacccagcagcauacgaaccaucagacaaacacauaaaagaauaccuaaacaaaauacaaaacucacucgcagcauauauaaagccaggaagcgccaacaaaccaaaagacgaacuagauuacgcaaacgacauagaaaaaaaaaucuguaaaauggaaaaaugcucauaaggacuagucccuguucccagagcccacuuuuuuuucuuuuuuugaaauaaaauagccugucuuucagaucucaaaggcucuuuucagagccaccaaaaaaaaaaaaaaaaaaaaaaaaaaaaaaaaaaaaaaaaaaaaaaaaaaaaaaaaaaaaaaaaagaauu

SEQ ID NO: 6995 - RNA, 1280 nt, Artificial Sequence
  mRNA Design a-3 (hSL-A64-N5) comprising derived and/or modified sequence from Pf(3D7)__XP_001351122.1__HsALB_Pf-CSP(19-272)_L(AAY)_Pf-CSP(346-3 65)_L(AAY)_P2 (opt6)
aggagagggcgcuuggcuugcaaggacccugagcugcggcauugaagcacacccaacccaacucgacugaagucagccucacugaaccggaucugagaaucuucucucucugggcuugccagggcucuccgaaccuagcuagcauccucuucaauuccaacuagaaagcuuaccaugaaauggguaacauucauaucacuauuauuccuuuucucaucagcuuacucacuauuccaagaauaccaaugcuacggaucauccucaaacacaagaguacuaaacgaacuaaacuacgacaacgccggaaccaaccuauacaacgaacucgaaaugaacuacuacggaaaacaagaaaacugguacucacuaaaaaaaaacagccgaucccuaggagaaaacgacgacggaaauaacgaagacaaugaaaaauuaagaaaaccaaaacacaaaaaacuaaaacaaccagcagacggaaacccagacccaaacgcaaacccaaacguagauccaaacgcaaacccaaacguagacccaaacgcaaacccaaacguagacccaaacgcuaacccaaacgcaaacccaaacgcaaacccaaacgcaaacccaaacgcaaacccaaacgcaaacccgaacgcaaaccccaacgcaaacccaaacgcaaacccaaacgcaaaccccaacgcaaacccaaacgcaaacccgaacgcaaacccaaacgcaaacccaaacgcaaacccaaacgcaaacccaaacgcaaacccaaacguagacccaaacgccaacccaaacgcaaacccaaacgcaaacccaaacgcaaacccaaacgcaaacccaaacgcaaacccaaacgcaaacccaaacgcaaacccaaacgcaaacccaaacgcaaaccccaacgcaaacccaaaugcaaacccaaacgcaaacccaaaugcaaaccccaacgcaaacccaaaugccaauccaaacgcaaacccaaacgcaaacccagccgcauacauaaaaccaggauccgcaaacaaaccaaaagacgaacuagacuacgcaaacgacauagaagcagcauaccaauauauaaaagccaacuccaaauucauagguauaacagaacucuaaggacuagucccuguucccagagcccacuuuuuuuucuuuuuuugaaauaaaauagccugucuuucagaucucaaaggcucuuuucagagccaccaaaaaaaaaaaaaaaaaaaaaaaaaaaaaaaaaaaaaaaaaaaaaaaaaaaaaaaaaaaaaaaaagaauu

SEQ ID NO: 6996 - RNA, 1274 nt, Artificial Sequence
  mRNA Design a-3 (hSL-A64-N5) comprising derived and/or modified sequence from Pf(3D7)__XP_001351122.1__HsALB_Pf-CSP(19-272)_L(AAY)_Pf-CSP(346-3 65)_L(AAY)_PADRE (opt6)
aggagagggcgcuuggcuugcaaggacccugagcugcggcauugaagcacacccaacccaacucgacugaagucagccucacugaaccggaucugagaaucuucucucucugggcuugccagggcucuccgaaccuagcuagcauccucuucaauuccaacuagaaagcuuaccaugaaauggguaaccuucauaucacuacuauucuuauucucaucagcauacucacucuuccaagaauaccaaugcuacggcucaagcucaaacacaagaguacuaaacgaauuaaacuaugacaacgccggaacaaaccuauacaaugaauuagaaaugaacuacuacggcaaacaagaaaacugguacucacucaaaaaaaacuccagaaguuuaggagaaaaugacgacggaaacaaugaagacaaugaaaaauuacgaaaaccaaaacacaaaaaacuaaaacaacccgccgacggaaaccccgacccgaacgcaaacccaaacguagacccaaacgcaaacccaaacguagacccaaaugcaaacccaaacguagacccaaacgcaaacccaaacgcaaacccaaacgcaaauccaaacgcaaacccaaaugcaaacccaaaugcaaauccaaacgcaaaccccaacgcaaacccaaacgcaaacccaaaugcaaauccaaacgccaacccaaaugcaaacccaaacgcaaauccaaacgcaaacccaaacgcaaauccaaacgcaaacccaaaugcaaacccaaacguagauccaaacgcaaacccaaacgccaacccaaacgcaaacccgaacgcaaacccaaacgcaaacccaaacgccaacccaaacgccaacccaaacgccaacccaaacgcaaacccaaacgcaaacccaaacgcaaacccaaacgcaaacccaaaugcaaacccuaacgcaaacccaaacgcaaacccaaacgcaaacccaaacgccaacccaaacgcaaauccagcagcauacauaaaaccaggaucagcaaacaaaccaaaagaugaacuagacuacgcaaaugacaucgaagcagccuacgcuaaauucguagcagccuggacacuaaaagcagcagccuaaggacuagucccuguucccagagcccacuuuuuuuucuuuuuuugaaauaaaauagccugucuuucagaucucaaaggcucuuuucagagccaccaaaaaaaaaaaaaaaaaaaaaaaaaaaaaaaaaaaaaaaaaaaaaaaaaaaaaaaaaaaaaaaaagaauu

SEQ ID NO: 6997 - RNA, 1331 nt, Artificial Sequence
  mRNA Design a-3 (hSL-A64-N5) comprising derived and/or modified sequence from Pf(3D7)__XP_001351122.1__HsALB_Pf-CSP(19-272)_L(G4S)_Pf-CSP(310-3 27)_L(G4S)_Pf-CSP(346-375) (opt6)
aggagagggcgcuuggcuugcaaggacccugagcugcggcauugaagcacacccaacccaacucgacugaagucagccucacugaaccggaucugagaaucuucucucucugggcuugccagggcucuccgaaccuagcuagcauccucuucaauuccaacuagaaagcuuaccaugaaauggguaaccuucaucucacuacuauuccuauucucaagcgcauacucacucuuucaagaauaccaaugcuacggcucaagcucaaacacacgaguacuaaacgaacuaaacuacgacaacgcaggaacaaaccuauauaacgaacucgaaaugaacuacuacggcaaacaagaaaauugguacucacuaaaaaaaaacagcagaagcuuaggagaaaacgacgacggaaacaacgaagauaacgaaaaacuaagaaaaccaaaacacaaaaaacuaaaacaacccgcagacggaaacccagacccaaacgcaaauccaaauguagacccgaacgcaaacccaaacguagacccaaaugcgaacccaaacgucgacccaaacgcaaacccaaaugcaaacccaaaugcgaacccaaacgcaaacccaaacgcaaauccaaacgcaaauccaaaugcaaacccaaacgcgaauccaaacgcaaacccaaacgcaaacccaaacgcaaacccaaacgcaaacccaaacgcaaacccaaacgcaaacccgaacgcuaacccaaacgcaaacccaaacgcaaacccaaacguagauccaaacgcgaacccaaacgcaaacccaaaugcaaacccaaacgcaaacccaaacgcaaacccaaacgcaaacccaaacgcaaacccaaacgcaaacccaaacgcgaacccaaacgcaaauccaaaugcaaacccaaacgcaaacccaaacgcaaacccaaacgcaaacccaaaugcaaacccaaacgcaaacccaaaugcaaacccaaacgcaaacccaggaggaggaggaucagaacccucagacaaacacauaaaagaauaccuaaacaaaauacaaaacucacuaggaggaggaggaucgaucaaaccaggaagcgcaaacaaaccaaaagacgaacucgacuacgcaaacgauauagaaaaaaaaauaugcaaaauggaaaaaugcucguaaggacuagucccuguucccagagcccacuuuuuuuucuuuuuuugaaauaaaauagccugucuuucagaucucaaaggcucuuuucagagccaccaaaaaaaaaaaaaaaaaaaaaaaaaaaaaaaaaaaaaaaaaaaaaaaaaaaaaaaaaaaaaaaaagaauu

SEQ ID NO: 6998 - RNA, 1316 nt, Artificial Sequence
  mRNA Design a-3 (hSL-A64-N5) comprising derived and/or modified sequence from Pf(3D7)__XP_001351122.1__HsALB_Pf-CSP(19-272)_L(G4S)_Pf-CSP(310-3 27)_Pf-CSP(346-375) (opt6)
aggagagggcgcuuggcuugcaaggacccugagcugcggcauugaagcacacccaacccaacucgacugaagucagccucacugaaccggaucugagaaucuucucucucugggcuugccagggcucuccgaaccuagcuagcauccucuucaauuccaacuagaaagcuuaccaugaaauggguaacauucauaucacuccuauuccuauucuccucagcauacucccucuuccaagaauaccaaugcuacggcucaagcucaaacacacgaguacuaaacgaacuaaauuacgacaacgccggaacaaaccuauauaaugaacuagaaaugaauuacuacggaaaacaagaaaacugguacucacuuaaaaaaaacucaagaucauuaggagaaaacgacgacggcaacaacgaagacaacgaaaaacuaagaaaaccaaaacacaaaaaacuaaaacaacccgcagacggaaauccagauccaaacgcaaacccaaacguagacccaaacgcaaacccaaacguagacccaaacgcaaacccaaacgucgacccaaacgccaacccaaacgcaaacccaaacgcaaacccaaacgcaaacccaaacgccaacccaaacgcaaacccaaacgcaaacccaaacgcaaacccaaacgcaaacccaaacgcaaacccaaacgcaaacccgaacgcaaacccaaacgcaaauccuaacgcaaacccaaacgcaaacccaaacgcaaauccgaacgcaaacccaaacguagacccaaacgcaaacccaaacgcaaacccaaacgcaaacccaaacgcaaacccaaacgcaaacccuaacgcaaacccaaaugcaaacccaaacgcgaacccaaaugcaaacccaaaugcaaacccaaacgcaaacccaaacgcaaacccaaacgcaaauccaaacgcaaauccaaacgcaaacccaaacgcaaacccaaacgcaaacccaaacgccaacccaggaggagguggaagcgaaccauccgacaaacacauaaaagaauaccuaaacaaaauacaaaacucacuaauaaaacccggcucagcaaacaaaccaaaagacgaacuagacuacgccaacgacauagaaaaaaaaauauguaaaauggaaaaaugcucauaaggacuagucccuguucccagagcccacuuuuuuuucuuuuuuugaaauaaaauagccugucuuucagaucucaaaggcucuuuucagagccaccaaaaaaaaaaaaaaaaaaaaaaaaaaaaaaaaaaaaaaaaaaaaaaaaaaaaaaaaaaaaaaaaagaauu

SEQ ID NO: 6999 - RNA, 1316 nt, Artificial Sequence
  mRNA Design a-3 (hSL-A64-N5) comprising derived and/or modified sequence from Pf(3D7)__XP_001351122.1__HsALB_Pf-CSP(19-325) (opt6)
aggagagggcgcuuggcuugcaaggacccugagcugcggcauugaagcacacccaacccaacucgacugaagucagccucacugaaccggaucugagaaucuucucucucugggcuugccagggcucuccgaaccuagcuagcauccucuucaauuccaacuagaaagcuuaccaugaaauggguaacauucauaucacuccuauuccuauucucaagcgcauacucauuauuccaagaauaccaaugcuacggaucaucaucuaacacaagaguacucaacgaacuaaacuacgacaacgcaggaacuaaucucuacaacgaacuagaaaugaacuacuacggaaaacaagaaaacugguauucacuaaaaaaaaacagccgaucauuaggagaaaacgacgacggcaacaacgaagacaacgaaaaacuacgaaaaccaaaacacaaaaaauuaaaacagccagccgacggaaacccagacccaaacgcaaacccaaacguagacccaaacgcaaacccaaacguagacccaaacgcaaacccaaacguagacccaaacgcaaacccaaacgcaaacccaaacgcaaauccaaacgcaaacccaaacgccaacccaaacgcaaacccaaacgcaaaccccaacgcaaacccaaacgcaaacccaaacgcaaacccaaaugccaacccaaacgcaaacccaaacgcaaacccaaacgcaaacccaaacgcaaacccaaaugcaaacccaaacgcaaacccaaacguagacccaaacgcaaacccaaaugcaaacccaaacgcaaaccccaacgcaaacccaaacgcaaacccaaacgcaaacccaaacgcaaacccaaacgccaacccaaacgcaaacccaaacgcaaacccaaacgcaaacccaaacgcaaacccaaacgcaaauccaaacgcaaacccaaacgcaaacccaaacgcaaacccaaacgcaaacccaaacgcaaacccaaauaaaaacaaucaaggaaacggacaaggacacaacaugccaaacgauccaaaucgcaacguagacgaaaacgcaaacgcaaacagcgcagucaaaaacaacaacaacgaagaaccaucagacaaacacauaaaagaauaccuaaauaaaauacaaaacuagggacuagucccuguucccagagcccacuuuuuuuucuuuuuuugaaauaaaauagccugucuuucagaucucaaaggcucuuuucagagccaccaaaaaaaaaaaaaaaaaaaaaaaaaaaaaaaaaaaaaaaaaaaaaaaaaaaaaaaaaaaaaaaaagaauu

SEQ ID NO: 7000 - RNA, 1493 nt, Artificial Sequence
  mRNA Design a-3 (hSL-A64-N5) comprising derived and/or modified sequence from Pf(3D7)__XP_001351122.1__HsALB_Pf-CSP(19-384) (opt6)
aggagagggcgcuuggcuugcaaggacccugagcugcggcauugaagcacacccaacccaacucgacugaagucagccucacugaaccggaucugagaaucuucucucucugggcuugccagggcucuccgaaccuagcuagcauccucuucaauuccaacuagaaagcuuaccaugaaauggguaaccuuuauaucacucuuauuccuauuuucaucagcauacucacucuuccaagaauaucaaugcuacggaucaucaucaaacacaagaguccucaaugaauuaaacuaugacaaugcaggaaccaaccuauacaacgaauuagaaaugaacuacuacggcaaacaagaaaacugguacucacucaaaaaaaacucaagauccuuaggagaaaaugaugacggaaacaacgaagacaacgaaaaacuccgaaaaccaaaacacaaaaaacuaaaacaacccgccgacggaaacccagaccccaacgcaaacccaaauguagaccccaacgcaaacccaaacguagacccaaacgcaaacccaaacguagacccaaacgcaaauccaaacgccaacccaaacgcaaacccaaacgccaacccaaacgcaaacccaaacgcaaacccaaacgcaaacccaaacgcaaacccaaaugcaaacccaaaugcaaacccaaacgcaaacccaaacgcaaacccaaacgcaaacccaaacgcaaacccaaaugcaaacccaaacgcaaacccaaacgcaaacccaaacguagacccaaaugcaaacccaaacgcaaacccaaacgcaaauccaaaugcaaauccaaacgcaaauccaaacgcaaacccaaacgcaaacccaaacgcaaacccaaacgcaaauccaaaugcaaacccaaacgcaaacccaaacgcaaacccaaacgcuaacccaaacgccaauccaaacgcaaacccaaacgcaaacccuaaugcaaacccaaacgccaacccaaauaaaaauaaccaaggaaacggacaaggacacaacaugccaaacgacccaaacagaaacgucgaugaaaacgcaaacgcaaauuccgcagucaaaaacaacaacaacgaagaaccaucagacaaacacauaaaagaauaccucaacaaaauacaaaacucccuaucaacagaauggucacccugcuccguuacaugcgguaacggcauacaaguaagaauaaaaccaggaucagcuaacaaacccaaagacgaacuagacuacgccaacgacauagaaaaaaaaauaugcaaaauggaaaaaugcuccucaguauucaacguaguaaacucaucauaaggacuagucccuguucccagagcccacuuuuuuuucuuuuuuugaaauaaaauagccugucuuucagaucucaaaggcucuuuucagagccaccaaaaaaaaaaaaaaaaaaaaaaaaaaaaaaaaaaaaaaaaaaaaaaaaaaaaaaaaaaaaaaaaagaauu

SEQ ID NO: 7001 - RNA, 1631 nt, Artificial Sequence
  mRNA Design a-3 (hSL-A64-N5) comprising derived and/or modified sequence from Pf(3D7)__XP_001351122.1__HsALB_Pf-CSP(19-384)_TM domain HA (opt6)
aggagagggcgcuuggcuugcaaggacccugagcugcggcauugaagcacacccaacccaacucgacugaagucagccucacugaaccggaucugagaaucuucucucucugggcuugccagggcucuccgaaccuagcuagcauccucuucaauuccaacuagaaagcuuaccaugaaauggguaacauuuauaucacuacuuuuccuauucucaucagcauacucacucuuccaagaauaucaaugcuauggauccucaucaaacacaagaguacucaacgaauuaaacuacgauaaugccggaacaaaccuauauaacgaacuagaaaugaacuacuacggaaaacaagaaaauugguacucauuaaaaaaaaacuccagaucccuuggagaaaacgacgauggaaacaacgaagauaacgaaaaauuaagaaaaccaaaacacaaaaaauugaaacaaccagcagacgguaacccagacccaaacgccaacccaaacguagacccaaacgcgaauccaaacgucgacccaaacgcaaaucccaacguagacccaaaugcaaauccaaaugccaauccaaacgcaaacccaaacgcaaacccaaaugcaaacccaaacgccaacccaaacgcaaauccaaacgcaaacccaaacgcaaacccaaacgccaacccaaacgccaaccccaaugcaaacccaaaugcaaacccaaacgcaaacccaaacgcaaauccaaacgcaaacccaaacgccaacccaaacguagacccaaacgcaaauccaaacgcaaacccaaacgccaauccaaacgcaaacccaaacgccaacccaaaugcaaaucccaacgcaaacccaaacgcaaauccaaaugcaaaccccaacgcaaauccaaacgcaaacccaaacgcaaauccaaacgcaaauccaaaugcaaacccaaacgcaaacccuaaugcaaacccaaacgcaaacccaaacgccaacccaaacaaaaacaaccaaggaaacggacaaggucacaauaugccaaaugacccaaaccgaaacguagacgaaaacgcaaaugccaauagcgcaguaaaaaacaauaacaacgaagaaccuucagauaaacacauaaaagaauaccuaaacaaaauacaaaacucccuaucaacagaauggucaccuuguucagucacauguggaaacggaauacaaguaagaauaaaaccaggaucagcaaacaaaccaaaagacgaacuagauuacgcaaacgauauagaaaaaaaaauauguaaaauggaaaaaugcuccucagucuucaacguagucaacaguuccaaacuagaaucaaccagaaucuaccaaauacuagcaauauauuccacaguagcaagcucacucguauuaguagucucccuaggagcaauaucauucuggaugugcucaaacggaagcuuacaaugccgaauauguauauaaggacuagucccuguucccagagcccacuuuuuuuucuuuuuuugaaauaaaauagccugucuuucagaucucaaaggcucuuuucagagccaccaaaaaaaaaaaaaaaaaaaaaaaaaaaaaaaaaaaaaaaaaaaaaaaaaaaaaaaaaaaaaaaaagaauu

SEQ ID NO: 7002 - RNA, 1343 nt, Artificial Sequence
  mRNA Design a-3 (hSL-A64-N5) comprising derived and/or modified sequence from Pf(3D7)__XP_001351122.1__HsALB_Pf-CSP(82-397) (opt6)
aggagagggcgcuuggcuugcaaggacccugagcugcggcauugaagcacacccaacccaacucgacugaagucagccucacugaaccggaucugagaaucuucucucucugggcuugccagggcucuccgaaccuagcuagcauccucuucaauuccaacuagaaagcuuaccaugaaauggguaacauucauaucacuacuauuccucuucaguucagccuauagcgauaacgaaaaacuaagaaaaccaaaacacaaaaaacucaaacaaccagcagacggaaacccagacccaaacgcaaacccaaacguagacccaaacgcaaacccaaacguagacccaaacgcaaauccaaacguagacccaaaugcaaaccccaacgcaaacccaaacgcaaacccaaacgcaaacccaaacgcaaacccaaaugcgaacccaaaugcaaauccaaacgcaaacccaaacgcaaacccaaacgcaaacccaaacgcuaacccaaacgcaaacccaaacgcaaacccaaaugcaaacccaaacgcaaacccaaacgcaaaccccaacgcaaacccaaacguagacccaaacgcaaacccaaacgcaaacccaaacgcaaacccaaacgccaacccaaaugccaacccaaacgcaaacccaaaugcaaaccccaacgcaaacccaaacgccaacccaaacgcaaacccaaacgcaaacccaaacgcaaaccccaaugcaaacccaaacgcaaacccaaaugcaaauccaaacgcaaacccaaacgcaaacccaaacgcaaacccaaacaaaaacaaccaaggaaacggacaaggacacaacaugccaaacgacccaaaucgaaacgucgaugaaaacgccaacgcaaacucagcaguaaaaaacaacaacaacgaagaaccaucugacaaacacauaaaagaauaccuaaacaaaauacaaaacucauuauccaccgaauggucaccauguucaguaacaugcggcaacggaauacaagucagaauaaaaccaggcucagcaaauaaaccaaaagacgaacuagacuacgcaaacgacauagaaaaaaaaauaugcaaaauggaaaaauguucaucagucuucaacguaguaaacucaucaauaggacucauaaugguacuaucauuccuauucuuaaacuaaggacuagucccuguucccagagcccacuuuuuuuucuuuuuuugaaauaaaauagccugucuuucagaucucaaaggcucuuuucagagccaccaaaaaaaaaaaaaaaaaaaaaaaaaaaaaaaaaaaaaaaaaaaaaaaaaaaaaaaaaaaaaaaaagaauu

SEQ ID NO: 7003 - RNA, 695 nt, Artificial Sequence
  mRNA Design a-3 (hSL-A64-N5) comprising derived and/or modified sequence from Pf(3D7)__XP_001351122.1__HsALB_Pf-CSP(93-192) (opt6)
aggagagggcgcuuggcuugcaaggacccugagcugcggcauugaagcacacccaacccaacucgacugaagucagccucacugaaccggaucugagaaucuucucucucugggcuugccagggcucuccgaaccuagcuagcauccucuucaauuccaacuagaaagcuuaccaugaaauggguaacauucaucucacuacuauuccuauucucaagcgcauacucaaaacuaaaacaaccagcagacggaaacccagacccaaacgcaaacccaaacguagacccaaacgcaaacccaaacguagacccaaacgcaaacccaaacguagacccaaacgcaaacccaaacgcaaacccaaacgcaaacccaaacgcaaacccaaacgcaaacccaaacgcaaacccaaacgcaaacccaaacgcaaacccaaacgcaaacccaaacgcaaacccaaacgcaaacccaaacgcaaacccaaacgcaaacccaaacgcaaacccaaacgcaaacccaaacgcaaacccauaaggacuagucccuguucccagagcccacuuuuuuuucuuuuuuugaaauaaaauagccugucuuucagaucucaaaggcucuuuucagagccaccaaaaaaaaaaaaaaaaaaaaaaaaaaaaaaaaaaaaaaaaaaaaaaaaaaaaaaaaaaaaaaaaagaauu

SEQ ID NO: 7004 - RNA, 935 nt, Artificial Sequence
  mRNA Design a-3 (hSL-A64-N5) comprising derived and/or modified sequence from Pf(3D7)__XP_001351122.1__HsALB_Pf-CSP(93-272) (opt6)
aggagagggcgcuuggcuugcaaggacccugagcugcggcauugaagcacacccaacccaacucgacugaagucagccucacugaaccggaucugagaaucuucucucucugggcuugccagggcucuccgaaccuagcuagcauccucuucaauuccaacuagaaagcuuaccaugaaaugggucacauucauaucacuccuauuccuauucucaagcgcauacucaaaacuaaaacaaccagcagacggaaacccagacccaaacgcaaacccaaacguagacccaaacgcaaacccaaacguagacccaaacgcaaacccaaacguagacccaaacgcaaacccaaacgcaaacccaaacgccaacccaaacgcaaacccaaacgcaaacccaaacgcaaacccaaacgcaaacccaaacgcaaacccaaacgcaaacccaaacgcaaacccaaacgcaaacccaaacgcaaacccaaacgcaaauccaaacgcaaacccaaacgccaacccaaacgcaaacccaaacgcaaacccaaacguagacccaaacgcaaacccaaacgcaaacccaaacgcaaacccaaacgcaaacccaaacgcaaacccaaacgcaaacccaaacgcaaacccaaacgcaaacccaaacgcaaauccaaacgcaaacccaaacgcaaacccaaacgcaaacccaaacgcaaacccaaacgcaaacccaaacgcaaacccaaacgcaaacccaaacgcaaacccaaacgcaaacccauaaggacuagucccuguucccagagcccacuuuuuuuucuuuuuuugaaauaaaauagccugucuuucagaucucaaaggcucuuuucagagccaccaaaaaaaaaaaaaaaaaaaaaaaaaaaaaaaaaaaaaaaaaaaaaaaaaaaaaaaaaaaaaaaaagaauu

SEQ ID NO: 7005 - RNA, 1310 nt, Artificial Sequence
  mRNA Design a-3 (hSL-A64-N5) comprising derived and/or modified sequence from Pf(3D7)__XP_001351122.1__HsALB_Pf-CSP(93-397) (opt6)
aggagagggcgcuuggcuugcaaggacccugagcugcggcauugaagcacacccaacccaacucgacugaagucagccucacugaaccggaucugagaaucuucucucucugggcuugccagggcucuccgaaccuagcuagcauccucuucaauuccaacuagaaagcuuaccaugaaauggguaacauucauaucacuccuauuccuauucucaucagcauacucaaaacuaaaacaacccgcagacggaaacccagacccaaacgccaacccaaacguagacccaaacgcaaacccgaacguagacccaaacgcaaaccccaacguagacccaaacgcaaacccaaaugcaaacccaaacgcaaacccaaacgcaaacccaaacgcaaacccaaacgcaaacccaaacgcaaacccaaacgcaaacccaaacgcaaacccaaacgcgaaucccaacgcaaauccaaacgcaaacccaaacgcaaauccaaacgcaaacccgaacgcaaacccaaacgcaaacccaaacgcaaacccaaacguagauccaaacgcaaauccaaacgcaaacccaaacgcaaauccaaacgcaaacccaaacgcaaacccaaacgcaaaccccaacgcaaacccaaacgcaaacccaaacgcaaacccaaacgcaaauccaaacgccaacccaaacgcaaacccaaacgcaaacccaaacgcgaacccaaacgcgaacccaaacgcaaacccaaacgcaaacccaaacgcaaacccaaacaaaaacaaccaagggaacggacaaggacacaacaugccaaacgauccaaacagaaacguagacgaaaacgcaaacgcaaacucagcaguaaaaaacaacaacaacgaagaaccaucagacaaacacauaaaagaauaccuaaacaaaauacaaaacucacucucaacagaauggucaccaugcaguguaacaugcggaaauggaauacaaguacguauaaaaccaggaucagcaaacaaaccaaaagacgaauuagacuacgccaacgauauagaaaaaaaaauaugcaaaauggaaaaaugcagcucagucuucaacguagucaacagcucaauaggacuaauaaugguccucucauucuuauuucuaaacugaggacuagucccuguucccagagcccacuuuuuuuucuuuuuuugaaauaaaauagccugucuuucagaucucaaaggcucuuuucagagccaccaaaaaaaaaaaaaaaaaaaaaaaaaaaaaaaaaaaaaaaaaaaaaaaaaaaaaaaaaaaaaaaaagaauu

SEQ ID NO: 7006 - RNA, 680 nt, Artificial Sequence
  mRNA Design a-3 (hSL-A64-N5) comprising derived and/or modified sequence from Pf(3D7)__XP_001351122.1__HsALB_Pf-CSP(98-192) (opt6)
aggagagggcgcuuggcuugcaaggacccugagcugcggcauugaagcacacccaacccaacucgacugaagucagccucacugaaccggaucugagaaucuucucucucugggcuugccagggcucuccgaaccuagcuagcauccucuucaauuccaacuagaaagcuuaccaugaaauggguaacauucauaagccuacuauuccuauucagcucagcauacagcgcagacggaaacccagacccaaacgcaaacccaaacguagacccaaacgcaaacccaaacguagacccaaacgcaaacccaaacguagacccaaacgcaaacccaaacgcaaacccaaacgcaaacccaaacgcaaacccaaacgcaaacccaaacgcaaacccaaacgcaaacccaaacgcaaacccaaacgcaaacccaaacgcaaacccaaacgcaaacccaaacgcaaacccaaacgcaaacccaaacgcaaacccaaacgcaaacccaaacgcaaacccauaaggacuagucccuguucccagagcccacuuuuuuuucuuuuuuugaaauaaaauagccugucuuucagaucucaaaggcucuuuucagagccaccaaaaaaaaaaaaaaaaaaaaaaaaaaaaaaaaaaaaaaaaaaaaaaaaaaaaaaaaaaaaaaaaagaauu

SEQ ID NO: 7007 - RNA, 920 nt, Artificial Sequence
  mRNA Design a-3 (hSL-A64-N5) comprising derived and/or modified sequence from Pf(3D7)__XP_001351122.1__HsALB_Pf-CSP(98-272) (opt6)
aggagagggcgcuuggcuugcaaggacccugagcugcggcauugaagcacacccaacccaacucgacugaagucagccucacugaaccggaucugagaaucuucucucucugggcuugccagggcucuccgaaccuagcuagcauccucuucaauuccaacuagaaagcuuaccaugaaauggguaacauucauaucacuacuauuccuauucagcucagccuacagcgcagacggaaacccagacccaaacgcaaacccaaacguagacccaaacgcaaacccaaacgucgacccaaacgcaaacccaaacguagacccaaacgcaaacccaaacgcaaacccaaacgcaaacccaaacgcaaacccaaacgcaaacccaaacgcaaacccaaacgcaaacccaaacgcaaacccaaacgcaaacccaaacgcaaacccaaacgcaaacccaaacgcaaacccaaacgcaaacccaaacgcaaacccaaacgcaaacccaaacgcaaacccaaacgcaaacccaaacguagacccaaaugcaaacccaaacgcaaacccaaacgcaaacccaaacgcaaacccaaacgcaaacccaaacgcaaacccaaacgcaaacccaaacgcaaacccaaacgcaaacccaaacgcaaacccaaacgcaaacccaaacgcgaacccaaacgcaaacccaaacgcaaacccaaacgcaaacccaaacgcaaacccaaaugcaaacccaaacgcaaacccauaaggacuagucccuguucccagagcccacuuuuuuuucuuuuuuugaaauaaaauagccugucuuucagaucucaaaggcucuuuucagagccaccaaaaaaaaaaaaaaaaaaaaaaaaaaaaaaaaaaaaaaaaaaaaaaaaaaaaaaaaaaaaaaaaagaauu

SEQ ID NO: 7008 - RNA, 1226 nt, Artificial Sequence
  mRNA Design a-3 (hSL-A64-N5) comprising derived and/or modified sequence from Pf(3D7)__XP_001351122.1__HsALB_Pf-CSP(98-374) (opt6)
aggagagggcgcuuggcuugcaaggacccugagcugcggcauugaagcacacccaacccaacucgacugaagucagccucacugaaccggaucugagaaucuucucucucugggcuugccagggcucuccgaaccuagcuagcauccucuucaauuccaacuagaaagcuuaccaugaaaugggucacauucauaucccuacuauuccuauucucaucagcauauucagcagauggaaacccagacccaaacgccaacccaaacguagacccaaacgcaaacccaaacguagacccaaacgcaaacccaaacguagacccaaacgcaaacccaaacgcaaacccaaacgcaaacccaaacgcaaacccaaacgcaaacccaaacgcaaacccaaacgcaaacccaaacgcaaacccaaacgcaaacccaaacgcaaacccaaacgcaaacccaaaugcaaauccaaacgcaaauccaaacgcaaacccaaacgccaacccaaacgcaaauccaaacgcaaacccaaacguagacccgaacgcaaacccgaacgcaaacccaaacgcaaacccaaaugcaaacccaaacgcaaacccaaacgccaacccaaacgcaaacccaaacgcaaacccaaaugcaaacccaaacgcaaacccaaacgccaacccaaacgcaaacccaaacgcaaacccaaacgcaaacccaaacgcaaacccaaaugcaaacccaaacgcaaacccaaacgcaaacccaaacaaaaacaaccaaggaaauggacaaggccacaacaugccaaacgacccaaacagaaacguagacgaaaacgcaaacgcaaacuccgcagucaaaaacaacaacaacgaagaaccauccgacaaacacauaaaagaauaccucaauaaaauacaaaacucacuaucaacagaaugguccccaugcucaguaacaugcggaaacggaauacaaguaagaauaaaaccaggauccgcaaacaaaccaaaagacgaacuagacuacgcaaacgauauagaaaaaaaaauaugcaaaauggaaaaaugcuaaggacuagucccuguucccagagcccacuuuuuuuucuuuuuuugaaauaaaauagccugucuuucagaucucaaaggcucuuuucagagccaccaaaaaaaaaaaaaaaaaaaaaaaaaaaaaaaaaaaaaaaaaaaaaaaaaaaaaaaaaaaaaaaaagaauu

SEQ ID NO: 7009 - RNA, 1295 nt, Artificial Sequence
  mRNA Design a-3 (hSL-A64-N5) comprising derived and/or modified sequence from Pf(3D7)__XP_001351122.1__HsALB_Pf-CSP(98-397) (opt6)
aggagagggcgcuuggcuugcaaggacccugagcugcggcauugaagcacacccaacccaacucgacugaagucagccucacugaaccggaucugagaaucuucucucucugggcuugccagggcucuccgaaccuagcuagcauccucuucaauuccaacuagaaagcuuaccaugaaauggguaaccuucauaucauuacuauuccuuuucagcucggcauacucagcagacggcaacccagacccaaacgcaaacccaaacgucgacccaaaugcgaacccaaacguagacccaaacgcaaacccaaacguagauccaaacgcaaacccaaacgcaaacccaaacgcaaacccaaacgcaaacccaaacgccaacccaaaugcaaacccaaacgcaaaccccaacgcaaacccaaacgcaaacccaaacgcaaacccaaacgcaaaucccaacgcaaauccaaacgcaaacccaaaugcaaacccaaacgccaacccaaacgcaaacccaaacgcaaaccccaaugucgacccaaacgcaaacccaaacgcaaacccaaacgcaaacccaaacgcaaauccaaacgcaaaccccaacgcaaacccaaacgcaaacccaaacgcaaacccaaacgcaaacccaaacgcaaacccaaacgcaaacccaaacgcaaacccaaacgcaaacccaaacgcaaacccaaacgcaaauccaaacgcaaacccaaacgcaaacccaaacgcaaacccaaacaaaaacaaccaaggaaauggacaaggacacaacaugccaaaugaccccaacagaaacgucgacgaaaacgccaacgcaaacagcgcaguaaaaaacaacaacaaugaagaaccaucagacaaacacauaaaagaauaccuaaacaaaauucaaaacucacuaucaaccgaaugguccccaugcucaguaacaugcggaaacgguauacaaguacgaauaaaaccaggaucagcaaacaaaccaaaagacgaacuagacuacgcaaacgacauagaaaaaaaaauaugcaaaauggaaaaaugcucaucaguuuuuaacguagucaauagcucaaucggacucauaaugguacuaucauuucucuuccuaaauuaaggacuagucccuguucccagagcccacuuuuuuuucuuuuuuugaaauaaaauagccugucuuucagaucucaaaggcucuuuucagagccaccaaaaaaaaaaaaaaaaaaaaaaaaaaaaaaaaaaaaaaaaaaaaaaaaaaaaaaaaaaaaaaaaagaauu

SEQ ID NO: 7010 - RNA, 1622 nt, Artificial Sequence
  mRNA Design a-3 (hSL-A64-N5) comprising derived and/or modified sequence from Pf(3D7)__XP_001351122.1__HsALB_Pf-CSP(199-377)_L(PVTN)_HBsAg (opt6)
aggagagggcgcuuggcuugcaaggacccugagcugcggcauugaagcacacccaacccaacucgacugaagucagccucacugaaccggaucugagaaucuucucucucugggcuugccagggcucuccgaaccuagcuagcauccucuucaauuccaacuagaaagcuuaccaugaaauggguaacauuuauauccuuacuauuucucuucuccucagcuuacucugacccaaacgcaaaucccaacgcaaacccaaaugcaaacccaaacgcaaauccaaacgcaaacccaaaugcuaaucccaacgcaaacccaaacgcaaaccccaaugccaacccaaacgcuaacccaaacgcaaacccaaacgccaacccaaaugcaaacccaaacgcaaacccaaacgcaaauccaaaugcaaacccaaacgcaaauccaaacgcaaacccaaacaaaaacaaccaaggaaacggacaaggccauaauaugccuaaugaccccaacagaaacguagacgaaaaugcuaacgccaacucagcaguaaaaaacaacaauaacgaagaaccaucagauaaacacauaaaagaauacuuaaacaaaauacaaaauucauuaucaacagaauggucaccaugcucagucaccugcggaaacgguauacaaguacgcauaaaaccaggcucagcaaauaaaccaaaagacgaacuagauuacgcuaacgacauagaaaaaaaaauaugcaaaauggaaaaaugcucaucaguaccaguaacaaauauggaaaacauaacaucaggauuccuaggcccacucuuaguacuacaagcaggauuuuuucuucuaacaagaaucuuaacuauaccccaaucacucgacucaugguggaccucacuaaauuuccucggaggaucuccaguaugccucggacaaaauucacaaucaccaacauccaaucacucacccaccuccugcccaccaaucugcccaggauacagauggaugugcuuacgaagauucauaauauuccuauucauacuacuucuaugcuuaauauuccuucucguccuacucgacuaucaaggaaugcucccuguaugcccacucauaccaggauccacaacaacuaacacaggacccuguaaaacaugcacaacacccgcccaaggaaauucaauguuccccucuugcugcugcacaaaaccaacagacggaaauugcacaugcauuccaauuccaucaucuugggcauuugcaaaauacuuaugggaaugggcaucaguccgauucucgugguuaucuuuacuaguaccauucguucaaugguuuguaggacuuucaccuacaguaugguuaucugcaauauggaugaugugguacuggggaccaucauuauacucaaucguaucaccauuuauaccacuacuacccauauuuuucugccuauggguauacauauaaggacuagucccuguucccagagcccacuuuuuuuucuuuuuuugaaauaaaauagccugucuuucagaucucaaaggcucuuuucagagccaccaaaaaaaaaaaaaaaaaaaaaaaaaaaaaaaaaaaaaaaaaaaaaaaaaaaaaaaaaaaaaaaaagaauu

SEQ ID NO: 7011 - RNA, 1532 nt, Artificial Sequence
  mRNA Design a-3 (hSL-A64-N5) comprising derived and/or modified sequence from Pf(3D7)__XP_001351122.1__Pf-CSP (opt11)
aggagagggcgcuuggcuugcaaggacccugagcugcggcauugaagcacacccaacccaacucgacugaagucagccucacugaaccggaucugagaaucuucucucucugggcuugccagggcucuccgaaccuagcuagcauccucuucaauuccaacuagaaagcuuaccaugaugcgaaagcuugcgauccucagcgucuccucauuccuauucguagaagcacuauuccaagaauaccaaugcuacggcucauccucaaacacacgcguacucaacgaacucaacuacgacaacgcaggaacaaaccucuacaacgaacuagagaugaacuacuacggcaaacaagaaaacugguacucucucaaaaaaaacucacgaagccucggcgagaacgacgacggaaacaacgaagacaacgaaaaacuccgcaaaccaaaacacaaaaaacucaaacaacccgccgacggaaacccagacccaaacgcaaacccaaacguagacccaaacgccaaccccaacguagaccccaacgccaacccuaacgucgaccccaaugcaaaccccaacgcgaacccaaacgcaaaccccaacgcaaaccccaacgcaaacccaaacgccaaccccaacgcaaacccaaacgcaaacccuaacgccaacccaaacgccaacccaaacgccaacccaaacgcaaacccgaacgccaaccccaacgccaacccaaacgcaaacccaaacgcaaaccccaacgccaaccccaacguagaccccaacgcaaaccccaacgcaaacccaaacgccaaccccaacgccaaccccaacgccaaccccaacgccaaccccaaugccaacccaaacgcgaaccccaacgcaaacccgaacgcaaacccaaacgcgaacccaaacgcgaacccaaacgccaaccccaacgccaaccccaacgcaaacccaaacgcgaacccaaacgcaaaccccaacgccaacccaaacaaaaacaaccaaggaaacggacaaggccacaacaugccaaacgaccccaaccgcaacguagacgaaaacgccaacgccaacuccgcugucaagaacaacaacaacgaagaaccauccgacaaacacauaaaagaauaccuaaacaaaauccaaaacucccucucaaccgaauggucccccugcuccgucacaugcggaaacggcauccaaguccgaaucaaaccaggcuccgccaacaaacccaaagacgaacuggacuacgccaacgacaucgaaaaaaaaaucugcaaaauggaaaaaugcucauccgucuucaacguggucaacuccuccaucggacuaauaaugguccucuccuuccuauuccuaaacuaaggacuagucccuguucccagagcccacuuuuuuuucuuuuuuugaaauaaaauagccugucuuucagaucucaaaggcucuuuucagagccaccaaaaaaaaaaaaaaaaaaaaaaaaaaaaaaaaaaaaaaaaaaaaaaaaaaaaaaaaaaaaaaaaagaauu

SEQ ID NO: 7012 - RNA, 1463 nt, Artificial Sequence
  mRNA Design a-3 (hSL-A64-N5) comprising derived and/or modified sequence from Pf(3D7)__XP_001351122.1__Pf-CSP(1-374) (opt11)
aggagagggcgcuuggcuugcaaggacccugagcugcggcauugaagcacacccaacccaacucgacugaagucagccucacugaaccggaucugagaaucuucucucucugggcuugccagggcucuccgaaccuagcuagcauccucuucaauuccaacuagaaagcuuaccaugaugcgcaaacucgcaauccucuccgucucaucguuccuauucguagaagcacucuuccaagaauaccaaugcuacggcucaagcuccaacacaagaguacucaacgaacucaacuacgacaaugccggaacaaaccuauacaacgagcuagaaaugaacuacuacggcaaacaagaaaacugguacucgcuaaaaaaaaacagcagaagccuaggugaaaacgacgacggaaacaacgaagacaacgaaaaacugcgcaaaccaaaacacaaaaaacuaaaacaacccgcagacggcaacccagacccaaacgcaaacccaaacguagaccccaacgccaacccaaacguagacccaaacgccaacccaaacguagacccaaacgcaaacccgaacgcaaacccaaacgcaaacccaaacgcaaacccaaacgcaaacccaaacgccaaccccaacgcaaauccaaacgcaaaccccaacgcaaaccccaacgccaacccaaacgcaaaccccaacgcgaacccaaacgccaaccccaacgccaacccaaacgcaaacccaaacgcaaacccaaacgccaaccccaacgucgacccaaacgccaacccaaacgcaaaccccaacgccaaccccaacgcaaacccaaacgccaacccgaacgcaaacccgaacgcaaacccaaacgcaaaccccaacgcaaaccccaacgcaaacccaaacgcaaaccccaacgccaaccccaacgccaaccccaacgcaaacccaaacgcaaacccgaacgcaaaccccaacgcaaaccccaacgccaaucccaacaaaaacaaccaaggcaacggacaaggacacaacaugccaaacgaccccaaccgcaacgucgacgaaaacgccaacgccaacuccgcggucaaaaacaacaacaacgaagagcccucagacaaacacauaaaagaauaccuaaacaaaauccaaaacucccucucgacagaauggucccccugcagcgucaccugcggaaacggcauacaaguacgaauaaaacccggcucagccaacaaaccaaaagacgaacuagacuacgccaacgacauagaaaaaaaaauaugcaaaauggaaaaaugcugaggacuagucccuguucccagagcccacuuuuuuuucuuuuuuugaaauaaaauagccugucuuucagaucucaaaggcucuuuucagagccaccaaaaaaaaaaaaaaaaaaaaaaaaaaaaaaaaaaaaaaaaaaaaaaaaaaaaaaaaaaaaaaaaagaauu

SEQ ID NO: 7013 - RNA, 1316 nt, Artificial Sequence
  mRNA Design a-3 (hSL-A64-N5) comprising derived and/or modified sequence from Pf(3D7)__XP_001351122.1__Pf-CSP(1-325) (opt11)
aggagagggcgcuuggcuugcaaggacccugagcugcggcauugaagcacacccaacccaacucgacugaagucagccucacugaaccggaucugagaaucuucucucucugggcuugccagggcucuccgaaccuagcuagcauccucuucaauuccaacuagaaagcuuaccaugaugcgcaaacucgcaauccuaucaguaagcucauuccuguucguagaagcacuauuccaagaauaccaaugcuacggcucauccucaaacacaagaguacuaaacgaacuaaacuacgacaacgccggaaccaaccuauacaacgaacucgaaaugaacuacuacggcaaacaagaaaacugguacucacuaaagaaaaacagcagaagccucggcgaaaacgacgacggcaacaacgaagacaacgagaaacugagaaaaccaaaacacaagaaacuaaaacaacccgcggacgggaacccagacccaaaugcaaacccaaacgucgacccaaacgcaaacccaaacguagacccaaacgcaaaccccaacguagaccccaacgcaaacccaaacgcaaacccaaacgcaaacccaaacgcaaacccaaacgcaaaccccaacgcaaacccaaacgcaaacccaaacgcaaaccccaacgccaacccaaacgccaaccccaacgcaaacccaaacgcaaacccaaacgcaaaccccaacgccaacccgaacgcaaacccaaacgcaaacccaaacgcaaaccccaacguagacccaaacgcaaacccaaacgccaaccccaacgcaaacccaaacgcaaacccgaacgcaaaccccaacgcaaaccccaacgcaaacccaaacgcaaaccccaacgcaaauccaaacgcaaacccaaacgcaaacccaaacgccaacccaaacgcaaaucccaacgcaaacccaaacgcaaaccccaacgcaaacccaaacgcaaacccaaacgcaaacccaaacaaaaacaaccaaggaaacggccaaggacacaacaugccaaacgacccaaaccgaaacguagacgaaaacgccaacgccaacagcgcagucaaaaacaacaauaaugaagaacccuccgacaaacacauaaaagaauaccuaaacaaaauccaaaacugaggacuagucccuguucccagagcccacuuuuuuuucuuuuuuugaaauaaaauagccugucuuucagaucucaaaggcucuuuucagagccaccaaaaaaaaaaaaaaaaaaaaaaaaaaaaaaaaaaaaaaaaaaaaaaaaaaaaaaaaaaaaaaaaagaauu

SEQ ID NO: 7014 - RNA, 1532 nt, Artificial Sequence
  mRNA Design a-3 (hSL-A64-N5) comprising derived and/or modified sequence from Pf(3D7)__XP_001351122.1__HsALB_Pf-CSP(19-397) (opt11)
aggagagggcgcuuggcuugcaaggacccugagcugcggcauugaagcacacccaacccaacucgacugaagucagccucacugaaccggaucugagaaucuucucucucugggcuugccagggcucuccgaaccuagcuagcauccucuucaauuccaacuagaaagcuuaccaugaaaugggucaccuucauaucccuccuauuccucuucucaucagccuacucccucuuccaggaauaccaaugcuacggaucguccucaaacacuagaguacucaaugaauuaaacuacgacaacgccggcaccaaccucuacaacgaacucgaaaugaacuacuacggaaaacaagaaaacugguacucacucaaaaaaaacucucgaucccucggcgaaaacgacgacggcaacaacgaagacaacgagaaacuacgcaaaccaaaacacaaaaaauuaaaacaacccgccgacggcaaccccgaccccaacgccaaccccaacguagaccccaacgcgaaccccaacgucgacccaaacgccaaccccaacguggaccccaacgccaacccaaacgccaaccccaacgccaacccaaacgcaaaccccaacgccaacccaaacgccaaccccaacgcaaacccaaacgcgaacccaaacgcaaacccaaacgccaacccaaacgcaaacccaaacgcgaacccaaacgccaacccaaacgccaaccccaacgcaaacccaaacgccaacccaaacgccaacccaaacguagacccaaacgcgaaccccaacgcuaacccaaacgcaaacccaaacgccaacccaaacgccaacccuaacgcaaacccaaacgccaaccccaacgccaaccccaacgccaaccccaacgcaaacccaaacgccaacccaaacgccaaccccaacgccaacccaaacgcaaacccaaacgcaaacccaaacgcaaaccccaacgccaacccaaacgccaacccaaacaaaaauaaccaaggcaaugggcaaggccacaacaugccaaacgaccccaaccgcaaugucgacgaaaacgccaacgccaacucugcaguaaaaaacaauaacaacgaagaacccucagacaaacacaucaaagaauaccucaacaagauccaaaauucccucuccacagaauggucccccugcagcguaaccugcggcaacggcauccaaguccgcaucaaacccggcuccgccaacaaaccgaaagacgaacuagacuacgccaacgacauagaaaaaaaaaucugcaaaauggaaaaaugcagcuccgucuucaacgucgucaacagcuccaucggccucaucaugguccucuccuuccuguuccucaacuaaggacuagucccuguucccagagcccacuuuuuuuucuuuuuuugaaauaaaauagccugucuuucagaucucaaaggcucuuuucagagccaccaaaaaaaaaaaaaaaaaaaaaaaaaaaaaaaaaaaaaaaaaaaaaaaaaaaaaaaaaaaaaaaaagaauu

SEQ ID NO: 7015 - RNA, 1550 nt, Artificial Sequence
  mRNA Design a-3 (hSL-A64-N5) comprising derived and/or modified sequence from Pf(3D7)__XP_001351122.1__HsIns-iso1_Pf-CSP(19-397) (opt11)
aggagagggcgcuuggcuugcaaggacccugagcugcggcauugaagcacacccaacccaacucgacugaagucagccucacugaaccggaucugagaaucuucucucucugggcuugccagggcucuccgaaccuagcuagcauccucuucaauuccaacuagaaagcuuaccauggcacucuggaugagacuccucccccuccucgcacuccucgcccuauggggcccagacccagcggcagcccucuuccaagaauaccaaugcuacggcucauccuccaacacccgaguccucaaugaacuaaacuacgacaacgccggcaccaaccuauacaacgaacuagaaaugaacuacuacggcaaacaagaaaacugguacucccucaaaaaaaauucacgcucccuaggugagaacgacgacggaaacaacgaagacaacgaaaaacuccgaaaacccaaacacaaaaaacuaaaacaaccagcagacggcaaccccgaccccaacgcaaaccccaacguagacccaaacgcgaaccccaacgucgauccaaacgccaacccaaacguugaccccaacgcgaaccccaacgcaaacccaaacgcaaacccuaacgcgaaccccaacgcaaaccccaacgccaaccccaacgccaaccccaacgccaacccaaacgcaaaccccaacgccaaccccaacgcaaacccaaacgcaaacccgaacgcaaaccccaacgccaacccaaacgcaaacccaaacgccaacccaaacgcaaaccccaacguagacccaaacgccaaucccaacgcgaaccccaacgcaaacccaaacgcgaacccaaacgccaacccaaacgcaaacccgaacgccaacccaaacgccaaccccaacgcaaaccccaacgcaaacccaaacgccaacccaaacgcaaacccaaacgcaaaccccaacgccaaccccaacgcaaacccaaaugccaaccccaacgccaaccccaacgcaaacccaaacaaaaacaaccaaggaaacggccaaggccacaacaugccgaacgaccccaaccgaaacgucgacgaaaacgcaaacgccaacucagcggucaaaaacaacaacaacgaagaacccucagacaaacacaucaaagaauaccuaaacaagauccagaacucucucucaacagaauggucccccugcuccguaacaugcggcaacggcauccaaguacgaaucaaaccgggaucagccaauaaacccaaagacgaacucgacuacgccaacgacaucgaaaaaaaaauaugcaaaauggaaaaaugcagcucagucuucaacguagucaacagcuccauaggccucaucaugguacucuccuuccuguuccuaaacuaaggacuagucccuguucccagagcccacuuuuuuuucuuuuuuugaaauaaaauagccugucuuucagaucucaaaggcucuuuucagagccaccaaaaaaaaaaaaaaaaaaaaaaaaaaaaaaaaaaaaaaaaaaaaaaaaaaaaaaaaaaaaaaaaagaauu

SEQ ID NO: 7016 - RNA, 1529 nt, Artificial Sequence
  mRNA Design a-3 (hSL-A64-N5) comprising derived and/or modified sequence from Pf(3D7)__XP_001351122.1__HsSPARC_Pf-CSP(19-397) (opt11)
aggagagggcgcuuggcuugcaaggacccugagcugcggcauugaagcacacccaacccaacucgacugaagucagccucacugaaccggaucugagaaucuucucucucugggcuugccagggcucuccgaaccuagcuagcauccucuucaauuccaacuagaaagcuuaccaugcgcgccuggauauucuuccuccuaugccuagcaggacgcgcccucgcacucuuccaagaauaccaaugcuacggcucauccucaaacacccgcguacuuaacgaacuaaacuacgacaacgccggaaccaaccuauacaacgaacucgaaaugaacuacuacgguaaacaagaaaacugguacucccucaaaaaaaacagccgaagccuaggagaaaacgacgacggaaacaacgaagacaacgaaaaacugcgcaaacccaaacacaaaaaacucaaacaacccgcagacgggaacccagacccaaacgcaaacccaaacguggacccaaacgccaacccuaacguagaccccaacgcaaaccccaacgucgacccuaaugcaaacccaaacgccaaccccaacgcgaacccaaacgcaaaccccaacgcuaacccgaacgccaaccccaacgccaacccgaacgcaaacccaaacgcaaacccaaacgcgaacccaaacgcaaacccaaacgccaaccccaacgcgaacccaaacgccaauccaaacgccaacccaaacgcaaacccaaacgccaaccccaacguagacccaaacgccaacccaaacgcgaacccaaacgcaaaccccaacgcaaacccaaacgcaaacccaaacgccaacccuaacgcaaacccaaacgccaaccccaacgccaacccaaacgcaaacccaaacgccaacccaaacgccaaccccaacgcaaacccgaacgcaaaccccaacgcaaacccaaacgcaaacccaaacgcgaacccgaacgccaacccaaauaagaacaaccaaggaaacggacaaggccacaacaugccaaacgaccccaaccgcaacgucgacgaaaacgcaaaugccaacuccgcagucaaaaacaacaauaacgaagaacccucggacaaacacaucaaagaauaccucaacaagauccaaaacucacucuccaccgaauggucacccugcagcguaacuugcggcaacggcauccaaguccgcauaaaaccaggcuccgcaaacaaacccaaagacgaacucgacuaugccaacgacaucgaaaaaaaaauaugcaaaauggaaaaaugcagcucagucuucaacguagucaacagcucuaucggacuaauaaugguacucuccuuccuauucuuaaacuaaggacuagucccuguucccagagcccacuuuuuuuucuuuuuuugaaauaaaauagccugucuuucagaucucaaaggcucuuuucagagccaccaaaaaaaaaaaaaaaaaaaaaaaaaaaaaaaaaaaaaaaaaaaaaaaaaaaaaaaaaaaaaaaaagaauu

SEQ ID NO: 7017 - RNA, 1532 nt, Artificial Sequence
  mRNA Design a-3 (hSL-A64-N5) comprising derived and/or modified sequence from Pf(3D7)__XP_001351122.1__IgE_Pf-CSP(19-397) (opt11)
aggagagggcgcuuggcuugcaaggacccugagcugcggcauugaagcacacccaacccaacucgacugaagucagccucacugaaccggaucugagaaucuucucucucugggcuugccagggcucuccgaaccuagcuagcauccucuucaauuccaacuagaaagcuuaccauggacuggacauggauccucuuccucgucgccgcggccacacgcguacacucacucuuccaagaauaucaaugcuacggcucaagcucgaacacgcgcguacucaacgaacuaaacuacgacaacgccggcaccaaccuauacaacgaacucgaaaugaacuacuacggcaaacaagaaaacugguacucacuuaagaaaaauucacgaucccucggagaaaacgacgaugggaacaacgaagacaacgaaaaacuacgcaaacccaaacacaagaaacuuaaacaacccgcagacggcaacccagacccaaacgcaaaccccaacguagaccccaacgcaaacccaaacguagacccaaacgccaacccaaacguagacccaaacgcgaacccaaacgccaacccaaacgccaaccccaacgcaaacccaaacgcaaauccaaacgcaaacccaaaugcaaacccgaacgccaauccaaacgcaaaccccaacgcaaacccaaacgcaaaccccaaugccaacccaaacgcaaaccccaacgcaaaccccaacgcaaaccccaacgcaaacccaaacgcgaacccaaacguagaccccaacgccaaccccaacgccaacccaaacgcaaacccaaacgccaacccaaacgccaaccccaacgcaaaccccaacgcaaacccgaacgcaaacccaaacgcaaacccaaacgcaaacccgaacgcaaacccuaacgcgaaccccaacgccaaccccaacgcaaacccaaacgcaaacccaaacgccaacccaaacgcaaacccaaacgcaaacccaaacaaaaacaaccaaggaaacgggcaaggacauaacaugccgaacgaccccaaccgcaacguagacgaaaacgccaacgccaacagcgcagucaaaaacaacaacaacgaagaacccuccgacaaacacaucaaagaauaccuaaacaaaauccagaacucacuauccaccgaauggucccccugcagcgugaccugcggcaacggcauacaaguccgcauaaaaccaggcuccgccaacaaacccaaagacgaacuagacuacgccaacgacauagaaaagaaaauaugcaaaauggaaaaaugcagcucagucuucaauguagucaacuccuccaucggacucauaaugguccuaucauuccucuuccuaaacuaaggacuagucccuguucccagagcccacuuuuuuuucuuuuuuugaaauaaaauagccugucuuucagaucucaaaggcucuuuucagagccaccaaaaaaaaaaaaaaaaaaaaaaaaaaaaaaaaaaaaaaaaaaaaaaaaaaaaaaaaaaaaaaaaagaauu

SEQ ID NO: 7018 - RNA, 1697 nt, Artificial Sequence
  mRNA Design a-3 (hSL-A64-N5) comprising derived and/or modified sequence from Pf(3D7)__XP_001351122.1__Pf-CSP_L(G4SG4)_TM domain HA (opt11)
aggagagggcgcuuggcuugcaaggacccugagcugcggcauugaagcacacccaacccaacucgacugaagucagccucacugaaccggaucugagaaucuucucucucugggcuugccagggcucuccgaaccuagcuagcauccucuucaauuccaacuagaaagcuuaccaugaugcgcaaacucgccauccucagcgucagcucguuccucuucgucgaagcacuauuccaagaauaccaguguuacggcucauccucaaacacacgcgugcucaacgaacuaaacuacgacaacgccggcaccaaccucuacaacgaacuagaaaugaacuauuacggcaagcaagaaaacugguacucacucaaaaaaaacagccgaagccuaggcgagaacgacgacgggaacaacgaagacaacgaaaaacuacgcaaacccaagcacaaaaaacugaaacaaccagccgacggaaauccagaccccaacgcaaacccgaacguagaccccaacgcgaaccccaacguggacccgaacgcaaacccgaacguagacccaaacgcaaacccaaacgcgaacccaaacgcaaacccaaacgcuaacccaaacgcaaaccccaacgccaaccccaacgcgaacccaaacgcaaacccaaacgcaaacccaaacgcaaacccgaacgcaaacccaaacgccaacccaaacgcgaacccaaacgccaacccaaacgcaaacccaaacgcaaacccaaacgcaaacccaaacguagacccgaacgccaacccgaaugcaaacccaaacgcaaacccgaacgcaaacccaaacgcgaacccgaacgccaacccaaacgcaaacccgaacgcaaaccccaacgccaacccaaacgcaaaccccaacgcaaaccccaacgcaaacccgaacgcaaacccaaacgcaaacccaaacgccaaccccaacgccaaccccaacgcaaacccgaacgccaacccaaacaaaaacaaccaaggcaacgggcaaggacacaacaugccaaacgaccccaaccgaaacgucgacgaaaacgccaacgccaacuccgcagucaaaaacaacaacaacgaagaacccucagacaaacacauaaaagaauaccucaacaaaauccaaaacucacucucaaccgaguggucacccugcagugugaccuguggcaacggaauacaaguacgcauaaaacccggaucagccaacaaaccgaaagacgaacuagacuacgccaacgacauagaaaaaaaaauaugcaaaauggagaaaugcagcucugucuucaacgucgucaacagcucaaucggacucauaaugguccucuccuuccuauuccucaacggcggagggggcucaggcggcggaggaaaauuagaauccaccagaaucuaucagauucucgccauauacagcacagucgcaagcucgcuuguccuugucguaucacuaggcgcaaucucauucuggaugugcuccaacggaagccugcaaugccgcauuugcauauaaggacuagucccuguucccagagcccacuuuuuuuucuuuuuuugaaauaaaauagccugucuuucagaucucaaaggcucuuuucagagccaccaaaaaaaaaaaaaaaaaaaaaaaaaaaaaaaaaaaaaaaaaaaaaaaaaaaaaaaaaaaaaaaaagaauu

SEQ ID NO: 7019 - RNA, 1571 nt, Artificial Sequence
  mRNA Design a-3 (hSL-A64-N5) comprising derived and/or modified sequence from Pf(3D7)__XP_001351122.1__Pf-CSP(199-377)_L(PVTN)_HBsAg (opt11)
aggagagggcgcuuggcuugcaaggacccugagcugcggcauugaagcacacccaacccaacucgacugaagucagccucacugaaccggaucugagaaucuucucucucugggcuugccagggcucuccgaaccuagcuagcauccucuucaauuccaacuagaaagcuuaccauggaccccaacgccaaccccaacgccaaccccaacgccaaucccaacgcuaaccccaacgccaaccccaacgcaaaccccaacgccaacccaaacgccaaccccaacgcaaaccccaacgccaaucccaaugccaaccccaacgccaaccccaacgcgaaccccaacgccaaccccaacgcaaacccaaacgccaaccccaacgccaaccccaacgccaaccccaacaaaaacaaccaaggcaacggccaaggccacaacaugcccaacgaccccaaccgcaacguagacgagaacgccaacgccaacagcgcugucaaaaacaacaacaacgaggaacccuccgacaaacacaucaaagaauaccuuaacaaaauccaaaacucucucuccaccgaguggucccccugcucagucacaugcggcaacggcauacaaguucguaucaaacccggcucagcaaacaaacccaaagacgaacucgacuacgcaaacgacauagaaaagaaaaucugcaaaauggaaaaauguucauccguccccgucaccaacauggaaaacaucacuuccggauuccucgguccccuacucguacuccaagccggcuucuuccuccucacccgcauccucaccaucccccaaucacuugacuccugguggaccucccucaacuuccucggcggcucccccgucugccuaggccaaaacagccaaucccccacuagcaaccacucccccacauccugcccacccaucugccccggauaucgauggaugugccuucgccgauucauaaucuuccucuucauccuccuacucugccucaucuuccuccucguccuucuagauuaccaaggcaugcuccccgucugcccccuuauccccggcuccaccaccacaaacaccggccccugcaaaaccugcacaacccccgcccaaggcaauagcauguuccccuccugcugcugcacuaaaccaacagacggcaacuguaccugcaucccaaucccaucaucaugggccuucgccaaauaccucugggaaugggcaucuguacgauucuccuggcucucccuucucguacccuucguccagugguucgucggccucucccccaccguauggcuauccgccaucuggaugaugugguacuggggccccucccuauacuccaucgucuccccauucauaccacuccuacccaucuucuucugccucugggucuacaucugaggacuagucccuguucccagagcccacuuuuuuuucuuuuuuugaaauaaaauagccugucuuucagaucucaaaggcucuuuucagagccaccaaaaaaaaaaaaaaaaaaaaaaaaaaaaaaaaaaaaaaaaaaaaaaaaaaaaaaaaaaaaaaaaagaauu

SEQ ID NO: 7020 - RNA, 1613 nt, Artificial Sequence
  mRNA Design a-3 (hSL-A64-N5) comprising derived and/or modified sequence from Pf(3D7)__XP_001351122.1__Pf-CSP(199-387)_L(PVTN)_HBsAg (opt11)
aggagagggcgcuuggcuugcaaggacccugagcugcggcauugaagcacacccaacccaacucgacugaagucagccucacugaaccggaucugagaaucuucucucucugggcuugccagggcucuccgaaccuagcuagcauccucuucaauuccaacuagaaagcuuaccaugauggcccccgaccccaacgcaaauccaaacgcaaaccccaacgccaacccuaacgcaaaccccaacgccaacccaaacgccaaucccaacgccaacccuaacgccaaccccaacgcaaaccccaacgccaaccccaacgccaacccuaacgcaaaccccaacgccaacccaaacgcaaaccccaacgccaaccccaacgccaaccccaacgcaaacccaaacgcaaaccccaacaaaaacaaccaaggaaacggacaaggccacaacaugccuaacgaccccaaucgcaacgucgacgaaaacgcaaacgccaacuccgccgucaaaaacaacaacaacgaagaacccucugacaaacacaucaaagaauaccucaacaagauccaaaacucccuauccaccgaauggucccccugcuccgucacuugcgguaauggcauccaaguccgcauaaaaccaggauccgcaaacaaacccaaagacgaacuagacuacgccaacgacauagaaaagaaaaucugcaaaauggaaaaaugcuccucagucuucaaugucguaaacuccuccauuggccuaggccccgucaccaacauggaaaacauuaccuccggauuccucgguccucuccucguccuccaagccggauucuuucuccucacacgaauccucacuaucccucaaucccuggacucaugguggaccucccucaacuuccugggcggcucccccgucugccucggccaaaacagccaauccccaaccuccaaucacucccccacaagcugcccucccauaugccccggcuaccgcuggaugugccuccgucgcuucaucauauuccucuucauacuucuccucugccucaucuuccuccuuguccugcuagacuaccaaggcaugcuccccgucugcccacucauccccgguuccaccacaacaaacaccggccccugcaaaacaugcaccacacccgcccaagguaacuccauguuccccuccugcugcugcaccaaaccaaccgacggcaacugcacuugcauucccauccccucauccugggccuucgccaaauaccucugggaaugggcauccguccguuucucauggcuaucucuccuaguaccauucguacaaugguucguuggccucucccccaccguauggcucuccgccauauggaugaugugguacuggggcccuucacuuuacuccaucgucucacccuucaucccacuccuacccaucuucuucugccuuuggguauacaucuaaggacuagucccuguucccagagcccacuuuuuuuucuuuuuuugaaauaaaauagccugucuuucagaucucaaaggcucuuuucagagccaccaaaaaaaaaaaaaaaaaaaaaaaaaaaaaaaaaaaaaaaaaaaaaaaaaaaaaaaaaaaaaaaaagaauu

SEQ ID NO: 7021 - RNA, 797 nt, Artificial Sequence
  mRNA Design a-3 (hSL-A64-N5) comprising derived and/or modified sequence from Pf(3D7)__XP_001351122.1__HsALB_Pf-CSP(19-152) (opt11)
aggagagggcgcuuggcuugcaaggacccugagcugcggcauugaagcacacccaacccaacucgacugaagucagccucacugaaccggaucugagaaucuucucucucugggcuugccagggcucuccgaaccuagcuagcauccucuucaauuccaacuagaaagcuuaccaugaaaugggucaccuucaucucccuccucuuccucuucuccagcgcauacucccucuuccaagaauaccaaugcuacggcuccuccuccaacacccgcguccucaacgaacucaacuacgacaacgccggcaccaaccucuacaacgaacucgaaaugaacuacuacggcaaacaagaaaacugguacucccucaaaaaaaacucccgcucccuaggcgaaaacgacgacggaaacaacgaagacaacgaaaaacuccgcaaacccaaacacaaaaaacucaaacaacccgccgacggaaaccccgaccccaacgccaacccaaacgucgaccccaacgccaaccccaacgucgaccccaacgccaaccccaacgucgaccccaacgccaaccccaacgcaaacccaaacgcaaacccaaacgccaaccccaacgccaaccccaacgccaaccccuaaggacuagucccuguucccagagcccacuuuuuuuucuuuuuuugaaauaaaauagccugucuuucagaucucaaaggcucuuuucagagccaccaaaaaaaaaaaaaaaaaaaaaaaaaaaaaaaaaaaaaaaaaaaaaaaaaaaaaaaaaaaaaaaaagaauu

SEQ ID NO: 7022 - RNA, 917 nt, Artificial Sequence
  mRNA Design a-3 (hSL-A64-N5) comprising derived and/or modified sequence from Pf(3D7)__XP_001351122.1__HsALB_Pf-CSP(19-192) (opt11)
aggagagggcgcuuggcuugcaaggacccugagcugcggcauugaagcacacccaacccaacucgacugaagucagccucacugaaccggaucugagaaucuucucucucugggcuugccagggcucuccgaaccuagcuagcauccucuucaauuccaacuagaaagcuuaccaugaaauggguaaccuucauaucccuccucuuccuauucucgagcgccuacucccucuuccaagaauaccaaugcuacggcucauccuccaacacccgcguccucaacgaacucaacuacgacaacgccggcaccaaccucuacaacgaacuagagaugaacuacuacggcaaacaagaaaacugguacucacucaaaaaaaacucccgaucccuaggagaaaacgacgacggcaacaacgaagacaacgaaaaacuacgaaaacccaaacacaaaaaacucaaacaacccgccgacggcaaccccgaccccaacgccaaccccaacgucgaccccaacgccaacccaaacguagaccccaacgccaaccccaacgucgacccaaacgccaaccccaacgccaaccccaacgccaacccaaacgcaaacccaaacgcaaacccaaacgccaacccaaacgccaaccccaacgccaaccccaacgcaaaccccaacgcaaaccccaacgccaacccaaacgcaaaccccaacgccaacccaaacgccaacccaaacgccaaccccaacgcaaaccccuaaggacuagucccuguucccagagcccacuuuuuuuucuuuuuuugaaauaaaauagccugucuuucagaucucaaaggcucuuuucagagccaccaaaaaaaaaaaaaaaaaaaaaaaaaaaaaaaaaaaaaaaaaaaaaaaaaaaaaaaaaaaaaaaaagaauu

SEQ ID NO: 7023 - RNA, 1157 nt, Artificial Sequence
  mRNA Design a-3 (hSL-A64-N5) comprising derived and/or modified sequence from Pf(3D7)__XP_001351122.1__HsALB_Pf-CSP(19-272) (opt11)
aggagagggcgcuuggcuugcaaggacccugagcugcggcauugaagcacacccaacccaacucgacugaagucagccucacugaaccggaucugagaaucuucucucucugggcuugccagggcucuccgaaccuagcuagcauccucuucaauuccaacuagaaagcuuaccaugaaauggguaaccuucaucucccuccucuuccuauucucaucagcauacucacucuuccaagaauaccaaugcuacggcucgagcucaaacacacgcguacucaacgaacugaacuacgacaacgccggaaccaaccucuacaaugaacucgaaaugaacuacuacggcaaacaagagaacugguacucacucaaaaaaaacagcagaagccucggagaaaacgacgacggaaacaacgaagacaacgaaaaacuccgcaaacccaagcacaaaaaacuaaaacaacccgcagacggaaaccccgaccccaacgcaaacccgaacgucgacccaaacgccaacccaaacguagaccccaacgcgaacccaaacguagacccaaacgccaacccaaacgcaaaccccaacgccaaccccaacgcaaacccaaacgccaacccaaacgcaaaccccaaugcaaaccccaacgcaaacccaaacgccaaccccaacgcaaacccaaacgcaaacccaaacgcaaacccaaacgcaaacccaaacgcgaacccaaacgcaaacccaaacgcaaacccgaacgcaaacccaaacguagacccaaacgcaaaccccaacgccaacccaaacgcaaacccaaacgcaaacccaaacgcaaacccaaacgcgaacccaaacgccaacccaaacgcaaacccaaacgcaaacccaaacgcaaacccaaacgcaaacccaaacgcaaacccaaacgcaaacccgaacgcgaacccaaacgcaaacccaaacgcgaacccgaacgcaaaccccaacgcaaacccauaaggacuagucccuguucccagagcccacuuuuuuuucuuuuuuugaaauaaaauagccugucuuucagaucucaaaggcucuuuucagagccaccaaaaaaaaaaaaaaaaaaaaaaaaaaaaaaaaaaaaaaaaaaaaaaaaaaaaaaaaaaaaaaaaagaauu

SEQ ID NO: 7024 - RNA, 1319 nt, Artificial Sequence
  mRNA Design a-3 (hSL-A64-N5) comprising derived and/or modified sequence from Pf(3D7)__XP_001351122.1__HsALB_Pf-CSP(19-272)_L(AAY)_Pf-CSP(310-3 27)_L(AAY)_Pf-CSP(346-375) (opt11)
aggagagggcgcuuggcuugcaaggacccugagcugcggcauugaagcacacccaacccaacucgacugaagucagccucacugaaccggaucugagaaucuucucucucugggcuugccagggcucuccgaaccuagcuagcauccucuucaauuccaacuagaaagcuuaccaugaaaugggucaccuucaucucacuccuauuccuauucuccuccgcauacucacucuuccaagaauaccagugcuacggaucaagcuccaacacacgcguacuaaacgaacugaacuacgacaacgccggaaccaaccucuacaacgaacucgaaaugaauuacuacggcaaacaagagaacugguacucacucaaaaaaaacagcagaucccuaggcgaaaacgacgacggaaacaacgaagacaacgaaaaacuacgcaaacccaaacacaaaaaacuaaaacaacccgcagacggaaacccagauccaaacgcaaacccaaacguagacccaaacgccaacccaaacguagacccaaacgcaaacccaaacguagaccccaacgcaaacccaaacgcaaacccgaacgccaacccaaacgcaaaccccaacgccaacccaaacgcaaacccaaacgcaaacccaaacgcaaacccaaacgccaaccccaacgcgaacccaaacgcaaacccuaacgccaacccaaacgcaaacccaaacgcaaacccgaacgcaaacccaaacgcaaacccaaacgcaaacccgaacguagacccaaacgcaaacccaaacgcaaacccaaacgcaaacccaaacgccaacccaaacgccaacccaaacgcaaaccccaacgcaaaccccaacgcgaacccaaacgccaaccccaacgcaaacccaaacgccaacccaaacgccaacccgaacgcaaacccaaacgccaacccaaacgccaacccgaacgcaaacccaaacgccaacccaaacgccaacccagccgcguacgaacccucagauaaacacauaaaagaauaccucaacaaaauccaaaacucacuagcagccuacaucaaaccaggauccgccaacaaacccaaggacgaacucgacuacgcaaacgacaucgaaaaaaaaaucugcaaaauggaaaaaugcucaugaggacuagucccuguucccagagcccacuuuuuuuucuuuuuuugaaauaaaauagccugucuuucagaucucaaaggcucuuuucagagccaccaaaaaaaaaaaaaaaaaaaaaaaaaaaaaaaaaaaaaaaaaaaaaaaaaaaaaaaaaaaaaaaaagaauu

SEQ ID NO: 7025 - RNA, 1280 nt, Artificial Sequence
  mRNA Design a-3 (hSL-A64-N5) comprising derived and/or modified sequence from Pf(3D7)__XP_001351122.1__HsALB_Pf-CSP(19-272)_L(AAY)_Pf-CSP(346-3 65)_L(AAY)_P2 (opt11)
aggagagggcgcuuggcuugcaaggacccugagcugcggcauugaagcacacccaacccaacucgacugaagucagccucacugaaccggaucugagaaucuucucucucugggcuugccagggcucuccgaaccuagcuagcauccucuucaauuccaacuagaaagcuuaccaugaaaugggucaccuucaucucacuccuauuccuauucucgagcgcauacucacucuuccaagaauaccaaugcuauggcuccagcucaaacacacgcguccuaaacgaacucaacuacgacaacgccggaacaaaccucuacaacgaacucgaaaugaacuacuacggcaaacaagaaaacugguacucgcucaaaaaaaacucccgaagucuaggcgaaaacgacgacggaaacaacgaagacaacgaaaaacuacgcaaacccaaacacaaaaaacuaaaacaacccgcagacggaaaccccgacccaaacgcaaaccccaacguagacccaaacgcaaaccccaacguagacccaaacgcaaacccgaacguagacccaaacgccaacccaaacgccaaccccaacgcaaacccaaacgccaaccccaacgcaaacccaaacgcaaacccaaacgcaaacccaaacgcaaacccaaacgccaaccccaacgccaacccaaacgccaaccccaacgcgaaccccaacgcgaacccaaacgccaacccaaacgcaaaccccaacgcaaacccaaacgcaaacccaaacgucgacccaaacgcaaacccaaacgcaaacccgaacgcaaacccaaacgcaaaccccaacgccaacccaaacgcgaacccaaacgccaacccaaacgccaacccaaacgcaaacccaaacgccaacccaaacgcaaacccaaacgcaaaccccaacgcaaaccccaacgcaaacccaaacgccaaccccaacgcaaaccccaacgcaaacccaaacgccaacccagccgcauacauaaaacccggcuccgccaacaaaccaaaagacgaacuagacuacgccaacgacauagaagcagccuaccaauacaucaaagccaacagcaaauucauaggaauaaccgagcuauaaggacuagucccuguucccagagcccacuuuuuuuucuuuuuuugaaauaaaauagccugucuuucagaucucaaaggcucuuuucagagccaccaaaaaaaaaaaaaaaaaaaaaaaaaaaaaaaaaaaaaaaaaaaaaaaaaaaaaaaaaaaaaaaaagaauu

SEQ ID NO: 7026 - RNA, 1274 nt, Artificial Sequence
  mRNA Design a-3 (hSL-A64-N5) comprising derived and/or modified sequence from Pf(3D7)__XP_001351122.1__HsALB_Pf-CSP(19-272)_L(AAY)_Pf-CSP(346-3 65)_L(AAY)_PADRE (opt11)
aggagagggcgcuuggcuugcaaggacccugagcugcggcauugaagcacacccaacccaacucgacugaagucagccucacugaaccggaucugagaaucuucucucucugggcuugccagggcucuccgaaccuagcuagcauccucuucaauuccaacuagaaagcuuaccaugaaauggguaaccuucaucucgcuacuguuccucuucucauccgcauacucccucuuccaagaauaccaaugcuacggcucauccucaaacacacgaguacuaaacgaacucaacuacgacaacgccggaaccaaccuauacaacgaacucgaaaugaacuacuacggcaaacaagaaaacugguacucacucaaaaaaaacucccgaucccucggcgaaaacgacgacggaaacaacgaagacaacgaaaaacugagaaaacccaaacacaaaaaacuaaaacaaccagccgacggcaacccagaccccaacgcaaaccccaacguagacccaaacgccaaccccaacguagacccaaacgcaaacccaaacguagaccccaacgccaacccaaacgccaacccaaacgccaaccccaacgcaaacccaaacgcaaacccaaacgcaaacccaaacgccaacccaaacgcaaacccaaacgccaacccgaacgcaaaccccaacgcaaacccaaacgcaaaccccaacgccaacccaaacgcaaacccaaacgcaaaccccaacgcaaacccaaaugcgaacccaaacguggacccgaacgcaaaccccaacgccaacccaaacgcaaaccccaacgccaaccccaacgccaaccccaacgcaaaccccaacgccaaccccaacgccaacccaaacgccaacccaaacgcgaacccaaacgcaaaccccaacgcaaacccaaacgcaaacccaaacgcaaacccaaacgcaaaccccaacgcaaacccaaacgcaaacccaaacgcaaaccccgcagccuacauuaaaccaggcuccgccaacaaacccaaagacgaacucgacuacgccaacgacauagaagcagccuacgccaaauucguagccgcauggacacucaaagccgcagccuaaggacuagucccuguucccagagcccacuuuuuuuucuuuuuuugaaauaaaauagccugucuuucagaucucaaaggcucuuuucagagccaccaaaaaaaaaaaaaaaaaaaaaaaaaaaaaaaaaaaaaaaaaaaaaaaaaaaaaaaaaaaaaaaaagaauu

SEQ ID NO: 7027 - RNA, 1331 nt, Artificial Sequence
  mRNA Design a-3 (hSL-A64-N5) comprising derived and/or modified sequence from Pf(3D7)__XP_001351122.1__HsALB_Pf-CSP(19-272)_L(G4S)_Pf-CSP(310-3 27)_L(G4S)_Pf-CSP(346-375) (opt11)
aggagagggcgcuuggcuugcaaggacccugagcugcggcauugaagcacacccaacccaacucgacugaagucagccucacugaaccggaucugagaaucuucucucucugggcuugccagggcucuccgaaccuagcuagcauccucuucaauuccaacuagaaagcuuaccaugaaaugggucaccuucaucucccuacuauuccucuucucaucagccuacucacucuuccaagaguaccaaugcuacggcucaagcucaaacacacgcguacucaacgaacuaaacuacgacaacgcaggcaccaaccucuacaacgaacucgagaugaacuacuacggcaaacaagaaaacugguacucacucaaaaaaaacucccgcagccucggcgaaaacgacgacggcaacaacgaagauaacgagaaacuacgcaaacccaaacacaaaaaacuaaaacaacccgccgacggaaacccagacccaaacgccaacccaaacguagacccaaacgcaaacccaaacguagacccaaacgccaaccccaacguagacccaaacgccaacccaaacgccaacccaaacgcaaacccaaacgcaaacccaaacgcgaacccaaacgcaaaccccaacgccaacccaaacgcaaacccaaacgccaaccccaacgcaaacccaaacgcaaaccccaacgcaaacccaaacgccaaccccaacgcaaaccccaacgcaaacccaaacgcaaacccaaacgcaaacccaaacgucgacccaaacgcaaaccccaacgcaaacccaaacgcaaacccaaacgccaacccaaacgcaaacccaaacgccaacccaaacgcaaaccccaacgcaaaccccaacgccaacccaaacgcaaaccccaacgcgaacccaaacgcaaacccaaacgcaaacccaaacgcaaaccccaacgcaaaccccaacgcaaacccaaacgcaaacccaaacgcaaacccaggcggcggcggaagcgaacccucggacaaacacauaaaagaauaccucaacaaaauccaaaacucccucggaggcggaggcuccaucaaacccggaagcgcaaacaaacccaaagacgaacucgacuacgcaaacgacaucgagaaaaaaauaugcaaaauggaaaaaugcucauaaggacuagucccuguucccagagcccacuuuuuuuucuuuuuuugaaauaaaauagccugucuuucagaucucaaaggcucuuuucagagccaccaaaaaaaaaaaaaaaaaaaaaaaaaaaaaaaaaaaaaaaaaaaaaaaaaaaaaaaaaaaaaaaaagaauu

SEQ ID NO: 7028 - RNA, 1316 nt, Artificial Sequence
  mRNA Design a-3 (hSL-A64-N5) comprising derived and/or modified sequence from Pf(3D7)__XP_001351122.1__HsALB_Pf-CSP(19-272)_L(G4S)_Pf-CSP(310-3 27)_Pf-CSP(346-375) (opt11)
aggagagggcgcuuggcuugcaaggacccugagcugcggcauugaagcacacccaacccaacucgacugaagucagccucacugaaccggaucugagaaucuucucucucugggcuugccagggcucuccgaaccuagcuagcauccucuucaauuccaacuagaaagcuuaccaugaaauggguaaccuucaucucacuccuauuccucuucuccuccgcauacucgcucuuccaagaauaccaaugcuacggcucaagcucaaacacccgcguccucaacgaacucaacuacgacaacgccgguaccaaccuauacaacgaacucgaaaugaacuacuacggcaaacaagaaaacugguacucacucaaaaaaaacuccaggucccuaggagaaaacgacgauggcaacaacgaagacaacgaaaaacuccgaaagccaaaacacaaaaaacuaaaacagcccgcagacggcaacccagacccaaacgcaaacccaaacguagacccaaacgcgaaccccaacguagacccaaacgcaaacccaaacguagacccaaacgcaaaccccaacgcaaacccaaacgcaaaccccaacgcaaaccccaacgcaaacccaaacgcaaacccaaacgcaaacccaaacgcaaacccaaacgcaaaccccaacgccaaccccaacgcaaacccaaacgcaaacccaaacgcaaacccaaacgcaaacccaaacgcaaaccccaacgccaacccaaacgcaaacccaaacguagacccaaacgcaaacccaaacgcaaacccaaacgcaaaccccaacgccaacccaaacgcaaacccaaacgcaaacccaaacgcaaacccaaacgcaaauccaaacgcuaacccaaacgcaaacccgaacgcaaaccccaaugcaaaccccaacgcaaacccaaacgccaacccaaacgcaaacccaaacgcgaacccaaacgcaaacccaaacgcaaacccaggcggaggcggauccgaacccuccgacaaacacauaaaagaauaccuaaacaaaauccaaaacucucucauaaaacccggaucagccaacaaaccaaaagacgaacuagacuacgccaaugacauagaaaaaaaaauaugcaagauggaaaaaugcagcuaaggacuagucccuguucccagagcccacuuuuuuuucuuuuuuugaaauaaaauagccugucuuucagaucucaaaggcucuuuucagagccaccaaaaaaaaaaaaaaaaaaaaaaaaaaaaaaaaaaaaaaaaaaaaaaaaaaaaaaaaaaaaaaaaagaauu

SEQ ID NO: 7029 - RNA, 1316 nt, Artificial Sequence
  mRNA Design a-3 (hSL-A64-N5) comprising derived and/or modified sequence from Pf(3D7)__XP_001351122.1__HsALB_Pf-CSP(19-325) (opt11)
aggagagggcgcuuggcuugcaaggacccugagcugcggcauugaagcacacccaacccaacucgacugaagucagccucacugaaccggaucugagaaucuucucucucugggcuugccagggcucuccgaaccuagcuagcauccucuucaauuccaacuagaaagcuuaccaugaaauggguaaccuucaucucacuccuguuccuauucucauccgcauacucacucuuccaagaauaccaaugcuacggcucgucuucaaacacccgcguacucaacgaacucaacuacgacaacgccggaaccaaccucuacaacgaacucgaaaugaacuacuacggcaaacaagaaaacugguacucacucaaaaaaaacagccgaagccuaggcgaaaacgacgacggaaacaaugaagacaacgaaaaacuccgcaaacccaaacacaaaaaacucaaacaaccagcagacggaaaccccgacccgaacgcaaacccaaacguagacccaaacgcaaacccaaacguagacccaaacgcgaacccaaacguagaccccaacgcaaacccaaacgcaaacccaaacgcaaacccaaacgccaaccccaacgccaacccaaacgccaacccaaacgcaaacccgaacgcgaacccaaacgcaaaccccaacgcaaacccaaacgcaaacccaaacgcgaacccaaacgccaacccaaacgccaacccaaacgcaaacccaaacgccaacccaaacgcaaaccccaacguggaccccaacgcaaacccaaacgcaaacccaaacgccaaccccaacgcaaacccaaacgcaaacccuaacgcaaacccaaacgcaaaccccaacgcgaacccaaacgcaaacccaaacgcaaacccaaacgcaaaccccaacgcaaacccaaacgccaacccaaacgccaacccaaacgcgaauccaaacgcaaaccccaacgcaaacccaaacgcaaacccgaacaaaaacaaccaagggaacggacaaggacacaacaugccaaacgaccccaaccgcaacgucgacgaaaacgccaacgccaacuccgcaguaaaaaacaacaacaacgaagaacccuccgacaaacacauaaaagaauaccucaacaagauacaaaacuagggacuagucccuguucccagagcccacuuuuuuuucuuuuuuugaaauaaaauagccugucuuucagaucucaaaggcucuuuucagagccaccaaaaaaaaaaaaaaaaaaaaaaaaaaaaaaaaaaaaaaaaaaaaaaaaaaaaaaaaaaaaaaaaagaauu

SEQ ID NO: 7030 - RNA, 1493 nt, Artificial Sequence
  mRNA Design a-3 (hSL-A64-N5) comprising derived and/or modified sequence from Pf(3D7)__XP_001351122.1__HsALB_Pf-CSP(19-384) (opt11)
aggagagggcgcuuggcuugcaaggacccugagcugcggcauugaagcacacccaacccaacucgacugaagucagccucacugaaccggaucugagaaucuucucucucugggcuugccagggcucuccgaaccuagcuagcauccucuucaauuccaacuagaaagcuuaccaugaaauggguaaccuucaucucacuacucuuccuauucucaagcgcguacucacucuuccaagaauaccaaugcuacggcucgagcucaaacacccgcguucucaacgaacuaaacuacgacaacgccggaaccaaccuauacaacgaacuugaaaugaacuacuacggcaaacaagaaaacugguacucgcucaaaaaaaacuccaggagccuaggcgaaaacgacgacggaaacaacgaagacaacgagaaacuaagaaaacccaaacacaaaaaacucaaacagcccgcggacggaaaccccgacccaaacgcaaaccccaacguagacccgaacgccaacccaaacguagacccaaacgcaaacccaaacguagaccccaacgcaaacccgaacgccaacccaaacgcaaacccaaaugcgaaccccaacgcgaacccaaacgcaaacccgaacgcaaaccccaacgccaacccaaacgcaaacccaaacgcaaaccccaacgcaaacccaaacgcgaacccaaacgcaaacccaaacgcgaacccgaacgcaaacccaaacgcaaacccgaacgcaaacccaaacguagacccaaacgccaacccaaacgcaaacccaaacgcaaaccccaacgcaaacccaaacgcaaacccgaacgcaaacccaaacgcaaacccaaacgcgaacccaaacgcaaaccccaacgcaaacccaaacgcaaacccuaacgcaaacccgaacgcaaacccaaacgccaacccaaacgcgaaccccaacgcaaacccaaacgccaacccaaacgccaacccgaacaaaaacaaccaaggaaacggacaaggacacaacaugccaaacgaccccaaccgaaacgucgacgaaaacgcaaacgccaacagugccgucaaaaacaacaacaaugaagaacccucagacaaacacauaaaagaauaccuaaacaaaauccagaacucgcucucaaccgaauggucacccugcagcgucaccugcggcaacggaauacaaguacgcaucaaaccaggcucggccaacaaaccaaaagacgaauuagacuacgcaaacgacaucgaaaaaaaaauaugcaaaauggaaaaaugcagcucagucuucaacguagucaauagcucauaaggacuagucccuguucccagagcccacuuuuuuuucuuuuuuugaaauaaaauagccugucuuucagaucucaaaggcucuuuucagagccaccaaaaaaaaaaaaaaaaaaaaaaaaaaaaaaaaaaaaaaaaaaaaaaaaaaaaaaaaaaaaaaaaagaauu

SEQ ID NO: 7031 - RNA, 1631 nt, Artificial Sequence
  mRNA Design a-3 (hSL-A64-N5) comprising derived and/or modified sequence from Pf(3D7)__XP_001351122.1__HsALB_Pf-CSP(19-384)_TM domain HA (opt11)
aggagagggcgcuuggcuugcaaggacccugagcugcggcauugaagcacacccaacccaacucgacugaagucagccucacugaaccggaucugagaaucuucucucucugggcuugccagggcucuccgaaccuagcuagcauccucuucaauuccaacuagaaagcuuaccaugaagugggucaccuucaucucccuccuauuccucuucucuagcgcguacucacucuuccaagaauaccaaugcuacggauccagcucaaacacacgcguccucaaugaacugaacuacgauaacgccggaaccaaccucuacaacgaacucgaaaugaacuacuacggcaaacaagaaaacugguacucacuaaagaaaaauagcaggucccucggcgaaaacgacgacgggaacaacgaagauaacgaaaaacuacgcaaacccaagcacaagaaacuaaaacagccagcagacggaaacccagaccccaacgccaacccaaacgucgaccccaacgcaaacccaaacguagauccgaacgcaaacccaaacgucgauccaaacgcaaacccaaacgcaaacccaaacgcuaaccccaacgccaacccaaacgcaaacccgaacgcaaaccccaacgcgaacccgaacgcaaacccaaacgcaaacccaaacgccaacccaaacgcaaacccaaacgcaaacccaaacgccaacccaaacgcaaaccccaacgcgaaccccaacgcaaaccccaacgcaaacccaaacgucgacccaaacgcaaaccccaacgcaaaccccaacgcaaaccccaaugcaaacccaaacgcgaaccccaacgcaaacccaaacgcgaacccaaaugcaaaccccaacgccaaccccaacgccaacccgaacgcaaacccaaacgccaacccaaacgccaacccaaacgcaaaucccaacgccaacccaaacgcgaacccgaacgcaaacccaaacgcaaacccgaacaaaaacaaccaaggaaacggucaaggacacaacaugccaaacgaccccaaccgcaacgucgacgaaaacgccaaugccaacagcgccgucaaaaacaacaacaacgaagaacccucagacaaacacaucaaagaguaccuaaacaagauccaaaacucccucuccaccgaauggucccccugcagcguaaccugcggaaacggcauccaaguccgcauaaaaccaggcucagccaacaaaccaaaagaugaacucgacuacgcaaacgacauagaaaagaaaaucugcaaaauggaaaaaugcagcuccguauucaacgugguuaacuccucaaaacuagaauccacccgcaucuaccaaauacucgcaauauacagcacaguagccagcucacucguccuagucgucucccucggagccaucagcuucuggaugugcuccaacggaaguuuacaaugucgcauaugcauauaaggacuagucccuguucccagagcccacuuuuuuuucuuuuuuugaaauaaaauagccugucuuucagaucucaaaggcucuuuucagagccaccaaaaaaaaaaaaaaaaaaaaaaaaaaaaaaaaaaaaaaaaaaaaaaaaaaaaaaaaaaaaaaaaagaauu

SEQ ID NO: 7032 - RNA, 1343 nt, Artificial Sequence
  mRNA Design a-3 (hSL-A64-N5) comprising derived and/or modified sequence from Pf(3D7)__XP_001351122.1__HsALB_Pf-CSP(82-397) (opt11)
aggagagggcgcuuggcuugcaaggacccugagcugcggcauugaagcacacccaacccaacucgacugaagucagccucacugaaccggaucugagaaucuucucucucugggcuugccagggcucuccgaaccuagcuagcauccucuucaauuccaacuagaaagcuuaccaugaaaugggucaccuucaucucacuccuguuccucuucucauccgccuacagcgacaacgaaaaacugcgcaaacccaaacacaagaaacucaaacaaccagccgacggcaaccccgaccccaacgccaacccaaacguagaccccaacgccaaccccaacguagacccaaacgccaacccaaacguggaccccaacgcaaacccaaacgccaacccaaacgccaauccaaacgccaacccaaacgcaaacccaaacgcaaaccccaacgccaacccuaacgccaaccccaacgcaaacccaaacgccaaccccaacgccaaccccaacgcaaaccccaacgcaaacccuaacgccaaccccaacgccaaccccaacgcaaacccaaacgccaaccccaacguagacccaaacgccaaccccaacgcaaaccccaacgccaacccaaacgcaaacccaaacgccaaccccaacgccaaccccaacgcaaacccaaacgcaaacccaaaugcaaaccccaacgccaaccccaacgccaaccccaacgcaaaccccaacgcaaaccccaacgcaaacccgaacgccaacccaaacgccaacccaaacgccaaccccaacgcaaaccccaacaaaaacaaccaaggcaacggacaaggacacaacaugcccaacgaccccaaccgcaacgucgacgaaaacgccaacgccaacuccgccgucaaaaacaacaacaacgaagaacccuccgacaaacacaucaaagaauaccucaacaaaauccaaaacucccucucaaccgaauggucacccugcuccguaaccugcggcaacggcauccaaguccgcaucaaacccggcucagccaacaaacccaaagacgaacucgacuacgccaaugacaucgaaaagaaaauaugcaaaauggaaaaaugcuccuccgucuucaacgucgucaacuccuccaucggccucaucaugguccucucguuccuauuccuaaacuaaggacuagucccuguucccagagcccacuuuuuuuucuuuuuuugaaauaaaauagccugucuuucagaucucaaaggcucuuuucagagccaccaaaaaaaaaaaaaaaaaaaaaaaaaaaaaaaaaaaaaaaaaaaaaaaaaaaaaaaaaaaaaaaaagaauu

SEQ ID NO: 7033 - RNA, 695 nt, Artificial Sequence
  mRNA Design a-3 (hSL-A64-N5) comprising derived and/or modified sequence from Pf(3D7)__XP_001351122.1__HsALB_Pf-CSP(93-192) (opt11)
aggagagggcgcuuggcuugcaaggacccugagcugcggcauugaagcacacccaacccaacucgacugaagucagccucacugaaccggaucugagaaucuucucucucugggcuugccagggcucuccgaaccuagcuagcauccucuucaauuccaacuagaaagcuuaccaugaaauggguaaccuucaucucacuccuauuccuauucucaagcgcauacucaaaacuaaaacaacccgcagacggaaacccagacccaaacgcaaacccaaacguagacccaaacgcaaacccaaacguagacccaaacgcaaacccaaacguagacccaaacgcaaacccaaacgcaaacccaaacgcaaacccaaacgcaaacccaaacgcaaaccccaacgcaaacccaaacgcaaacccaaacgcaaacccaaacgcaaacccaaacgcaaacccaaacgcaaacccaaacgcaaacccaaacgcaaacccaaacgcaaacccaaacgccaacccaaacgcaaacccauaaggacuagucccuguucccagagcccacuuuuuuuucuuuuuuugaaauaaaauagccugucuuucagaucucaaaggcucuuuucagagccaccaaaaaaaaaaaaaaaaaaaaaaaaaaaaaaaaaaaaaaaaaaaaaaaaaaaaaaaaaaaaaaaaagaauu

SEQ ID NO: 7034 - RNA, 935 nt, Artificial Sequence
  mRNA Design a-3 (hSL-A64-N5) comprising derived and/or modified sequence from Pf(3D7)__XP_001351122.1__HsALB_Pf-CSP(93-272) (opt11)
aggagagggcgcuuggcuugcaaggacccugagcugcggcauugaagcacacccaacccaacucgacugaagucagccucacugaaccggaucugagaaucuucucucucugggcuugccagggcucuccgaaccuagcuagcauccucuucaauuccaacuagaaagcuuaccaugaaaugggucaccuucaucucacuccuauuccuauucucauccgcauacucaaaacuaaaacaacccgccgacggaaacccagacccaaacgcaaacccaaacguagacccaaacgcaaacccaaacguagacccaaacgcaaacccaaacguagacccaaacgcaaacccaaacgccaacccaaacgcaaauccaaacgcaaacccaaacgcaaacccaaacgcaaacccaaacgcaaacccaaacgccaacccaaacgccaacccaaacgcaaacccaaacgcaaacccaaacgcaaacccaaacgcaaacccaaacgcaaacccaaacgccaaccccaacgcaaacccaaacgcaaaccccaacguagacccaaacgcaaacccaaacgccaaccccaacgcaaaccccaacgccaaccccaacgccaacccaaacgccaacccaaacgcaaacccaaacgcaaacccaaacgcaaacccaaacgcaaacccaaacgcaaacccaaacgcaaacccaaacgcaaacccaaacgcaaacccaaacgccaacccaaacgcaaacccaaacgcaaacccgaacgcaaacccauaaggacuagucccuguucccagagcccacuuuuuuuucuuuuuuugaaauaaaauagccugucuuucagaucucaaaggcucuuuucagagccaccaaaaaaaaaaaaaaaaaaaaaaaaaaaaaaaaaaaaaaaaaaaaaaaaaaaaaaaaaaaaaaaaagaauu

SEQ ID NO: 7035 - RNA, 1310 nt, Artificial Sequence
  mRNA Design a-3 (hSL-A64-N5) comprising derived and/or modified sequence from Pf(3D7)__XP_001351122.1__HsALB_Pf-CSP(93-397) (opt11)
aggagagggcgcuuggcuugcaaggacccugagcugcggcauugaagcacacccaacccaacucgacugaagucagccucacugaaccggaucugagaaucuucucucucugggcuugccagggcucuccgaaccuagcuagcauccucuucaauuccaacuagaaagcuuaccaugaaaugggucacauucaucucacuccuauuccuauucucaagcgccuacuccaaacucaaacaacccgccgacggcaacccagacccaaacgccaaccccaacgucgacccaaacgccaacccaaacgucgacccaaacgcaaacccaaacgucgaccccaacgccaaccccaacgccaaccccaacgccaacccaaacgccaaucccaacgccaaccccaacgccaacccaaacgcaaaccccaacgccaauccaaacgccaaccccaacgcaaaccccaacgccaaccccaacgcaaacccaaacgcaaacccaaacgcaaaccccaacgccaaccccaacgcaaaccccaacgccaaccccaacgucgaccccaacgccaacccaaacgccaacccaaacgccaaccccaacgccaaccccaacgcaaacccaaacgcgaaccccaacgcaaaccccaacgccaacccgaacgccaacccgaacgcaaacccaaacgccaaccccaacgcaaaccccaacgcaaacccaaacgcgaaccccaacgccaacccaaacgccaacccaaacgcgaacccaaacgccaaccccaacaaaaacaaccaagggaacggacaaggccacaacaugcccaacgaccccaaccgcaacgucgacgaaaacgccaacgccaacuccgccgucaaaaacaacaacaacgaagaacccuccgacaaacacauaaaagaauaccuaaacaaaauccaaaacucacucucuacugaauggucccccugcucagucaccugcggcaacggcauacaaguccgcauaaaacccggcucggccaacaaaccaaaagacgaacuagacuacgcaaacgacaucgaaaaaaaaauaugcaaaauggaaaaaugcuccucagucuucaacguaguaaacuccuccaucggccucauaaugguccucuccuuccuauuccucaacuaaggacuagucccuguucccagagcccacuuuuuuuucuuuuuuugaaauaaaauagccugucuuucagaucucaaaggcucuuuucagagccaccaaaaaaaaaaaaaaaaaaaaaaaaaaaaaaaaaaaaaaaaaaaaaaaaaaaaaaaaaaaaaaaaagaauu

SEQ ID NO: 7036 - RNA, 680 nt, Artificial Sequence
  mRNA Design a-3 (hSL-A64-N5) comprising derived and/or modified sequence from Pf(3D7)__XP_001351122.1__HsALB_Pf-CSP(98-192) (opt11)
aggagagggcgcuuggcuugcaaggacccugagcugcggcauugaagcacacccaacccaacucgacugaagucagccucacugaaccggaucugagaaucuucucucucugggcuugccagggcucuccgaaccuagcuagcauccucuucaauuccaacuagaaagcuuaccaugaaaugggucacauucauaagccuacucuuccucuucagcucagccuacuccgcagacggaaacccagacccaaacgcaaacccaaacguagacccaaacgcaaacccaaacguagacccaaacgcaaacccaaacguagacccaaacgcaaacccaaacgcaaacccaaacgcaaacccaaacgcaaacccaaacgcaaacccaaacgcaaacccaaacgcaaacccaaacgcaaacccaaacgcaaacccaaacgcaaaccccaacgcaaacccaaacgcaaacccaaacgcaaacccaaacgcaaacccaaacgcaaacccaaacgcaaacccauaaggacuagucccuguucccagagcccacuuuuuuuucuuuuuuugaaauaaaauagccugucuuucagaucucaaaggcucuuuucagagccaccaaaaaaaaaaaaaaaaaaaaaaaaaaaaaaaaaaaaaaaaaaaaaaaaaaaaaaaaaaaaaaaaagaauu

SEQ ID NO: 7037 - RNA, 920 nt, Artificial Sequence
  mRNA Design a-3 (hSL-A64-N5) comprising derived and/or modified sequence from Pf(3D7)__XP_001351122.1__HsALB_Pf-CSP(98-272) (opt11)
aggagagggcgcuuggcuugcaaggacccugagcugcggcauugaagcacacccaacccaacucgacugaagucagccucacugaaccggaucugagaaucuucucucucugggcuugccagggcucuccgaaccuagcuagcauccucuucaauuccaacuagaaagcuuaccaugaaauggguaaccuucauaagccuacucuuccuauucucaucagccuacagcgcagacggaaacccagaccccaacgcaaacccaaacguagacccaaacgcaaacccaaacguagaccccaacgcaaacccaaacguagacccaaacgccaacccaaacgcaaacccaaacgcaaacccaaacgccaacccaaacgcaaacccaaacgccaacccaaacgcaaacccaaacgcaaacccaaacgcaaacccaaacgcaaacccaaacgcaaacccaaacgcaaacccaaacgccaacccaaacgcaaacccaaacgcaaacccaaacgcaaacccaaacgccaaccccaacguagacccaaacgccaaccccaacgcaaacccaaacgcaaacccaaacgcaaacccaaacgcaaacccaaacgcaaacccaaacgcaaacccaaacgcaaacccaaacgcaaacccgaacgccaacccaaacgcaaacccaaacgcaaacccaaacgcaaacccaaacgcaaacccaaacgcaaaccccaacgcaaacccaaacgcaaacccaaacgcaaacccauaaggacuagucccuguucccagagcccacuuuuuuuucuuuuuuugaaauaaaauagccugucuuucagaucucaaaggcucuuuucagagccaccaaaaaaaaaaaaaaaaaaaaaaaaaaaaaaaaaaaaaaaaaaaaaaaaaaaaaaaaaaaaaaaaagaauu

SEQ ID NO: 7038 - RNA, 1226 nt, Artificial Sequence
  mRNA Design a-3 (hSL-A64-N5) comprising derived and/or modified sequence from Pf(3D7)__XP_001351122.1__HsALB_Pf-CSP(98-374) (opt11)
aggagagggcgcuuggcuugcaaggacccugagcugcggcauugaagcacacccaacccaacucgacugaagucagccucacugaaccggaucugagaaucuucucucucugggcuugccagggcucuccgaaccuagcuagcauccucuucaauuccaacuagaaagcuuaccaugaaauggguaaccuucauaucccuacucuuccuuuucuccucggccuacuccgcagacggaaacccagacccaaacgcaaaccccaacguagacccaaacgcaaacccaaauguagacccaaacgcaaacccaaacguggacccaaacgcgaaccccaacgcaaaccccaacgcaaacccaaacgccaacccaaacgcaaacccaaacgccaacccaaacgcaaaccccaacgccaaccccaacgccaacccaaacgcaaacccaaacgcaaaccccaacgcaaacccaaacgccaacccaaacgccaacccaaacgccaaccccaacgcaaacccaaacgccaacccaaacguagacccaaacgcaaacccaaacgcaaacccaaacgcaaaccccaacgcaaaccccaacgcaaacccaaacgcaaacccaaacgcaaacccaaacgcaaacccaaacgccaacccaaacgcgaaccccaacgccaacccaaacgcaaacccaaacgccaacccaaacgccaacccaaacgcaaaccccaacgcaaacccaaacgcaaacccaaacgccaacccgaacaaaaacaaccaaggcaacggccaaggacacaacaugccaaacgaccccaaccgcaacguagacgaaaacgccaacgcaaacuccgcagucaaaaacaacaacaacgaagaacccuccgacaaacacauaaaagaauaccuaaacaaaauccaaaacucgcucucaaccgaauggucccccugcuccgucaccugcggcaacggcauccaaguacgcaucaaaccaggcucagcaaacaaaccaaaagacgaacucgacuacgccaacgacauagaaaaaaaaauaugcaaaauggagaaaugcuaaggacuagucccuguucccagagcccacuuuuuuuucuuuuuuugaaauaaaauagccugucuuucagaucucaaaggcucuuuucagagccaccaaaaaaaaaaaaaaaaaaaaaaaaaaaaaaaaaaaaaaaaaaaaaaaaaaaaaaaaaaaaaaaaagaauu

SEQ ID NO: 7039 - RNA, 1295 nt, Artificial Sequence
  mRNA Design a-3 (hSL-A64-N5) comprising derived and/or modified sequence from Pf(3D7)__XP_001351122.1__HsALB_Pf-CSP(98-397) (opt11)
aggagagggcgcuuggcuugcaaggacccugagcugcggcauugaagcacacccaacccaacucgacugaagucagccucacugaaccggaucugagaaucuucucucucugggcuugccagggcucuccgaaccuagcuagcauccucuucaauuccaacuagaaagcuuaccaugaaauggguaaccuucaucagccuacuauuccuauucagcuccgccuacagcgccgacggaaacccagacccaaacgccaaccccaacgucgacccaaacgccaaccccaacguagacccaaacgccaaccccaacgucgaccccaacgccaaccccaacgccaacccaaacgccaacccuaacgccaacccaaacgccaacccgaacgccaaccccaacgcgaacccaaacgccaacccaaacgcaaaccccaacgccaaccccaacgccaaccccaacgcaaaccccaacgcaaacccaaacgccaacccaaacgccaaccccaacgccaaccccaaugcaaacccaaacgucgaccccaacgccaacccaaacgccaaccccaacgccaaccccaacgccaaccccaacgcaaaccccaacgccaaccccaacgcgaaccccaacgccaaccccaacgccaacccaaacgccaaccccaacgccaaccccaacgccaaccccaacgcuaaccccaacgcaaacccaaacgccaacccaaacgccaacccaaacgccaaccccaacgccaacccaaacaaaaacaaccaaggcaacggacaaggacacaacaugccaaacgaccccaaccgcaacgucgacgaaaaugccaacgccaacuccgccgucaaaaacaacaacaacgaagaacccuccgacaaacacaucaaagaauaccuaaacaaaauacaaaacucucucucaaccgaauggucccccugcuccgucacaugcggcaacggcauccaaguccgcaucaaaccaggaucagccaauaaacccaaagacgaacucgacuacgccaacgacauagaaaaaaaaaucugcaaaauggaaaaaugcagcucagucuucaacgucgucaacuccucaaucggacuuauaaugguccuauccuuccucuuccuuaacuaaggacuagucccuguucccagagcccacuuuuuuuucuuuuuuugaaauaaaauagccugucuuucagaucucaaaggcucuuuucagagccaccaaaaaaaaaaaaaaaaaaaaaaaaaaaaaaaaaaaaaaaaaaaaaaaaaaaaaaaaaaaaaaaaagaauu

SEQ ID NO: 7040 - RNA, 1622 nt, Artificial Sequence
  mRNA Design a-3 (hSL-A64-N5) comprising derived and/or modified sequence from Pf(3D7)__XP_001351122.1__HsALB_Pf-CSP(199-377)_L(PVTN)_HBsAg (opt11)
aggagagggcgcuuggcuugcaaggacccugagcugcggcauugaagcacacccaacccaacucgacugaagucagccucacugaaccggaucugagaaucuucucucucugggcuugccagggcucuccgaaccuagcuagcauccucuucaauuccaacuagaaagcuuaccaugaaaugggucacauucaucucgcuccucuuccuauucuccuccgccuacuccgacccuaacgccaaucccaacgccaaccccaacgccaaccccaacgccaaccccaacgccaaccccaaugcaaacccaaacgcaaaccccaacgccaaccccaacgcaaacccaaaugcaaaccccaacgcaaaccccaacgccaaccccaaugccaaccccaacgcuaaccccaacgccaauccaaacgccaaccccaacgcaaaccccaacgccaacccuaacaaaaauaaccaaggcaacggccaaggacacaacaugcccaacgaccccaaccgaaaugucgacgaaaacgcuaacgcuaacagcgccgucaaaaacaacaacaacgaagaacccuccgacaaacacauuaaagaauaccucaacaaaauccaaaacucccucuccaccgaauggucccccugcucuguaacuugcggcaacggcauccaaguccgcauaaaacccggaucagcaaacaaacccaaagacgaacucgacuacgcaaacgacauugagaagaaaaucugcaaaauggaaaaaugcucaucaguacccgucacuaacauggaaaacaucaccuccggcuuccucggcccccuccuaguccuacaagccgguuucuuccuucuuacacgcauccuaaccaucccacaaucccuagacuccugguggacaucuuuaaacuuccuuggaggauccccugucugccucggccaaaacucccaauccccaaccucuaaccacucucccacauccugcccucccauaugccccgguuaccgcuggaugugccuccgccgcuucaucaucuuccucuucauacuccucuuaugccucaucuuccuccucguacuacucgacuaccaagguaugcuacccguaugcccucucauccccggcuccaccacaaccaacaccggccccugcaaaacaugcaccacccccgcacagggcaauuccauguuccccuccugcuguugcaccaaacccacagacggcaacuguaccugcauccccauccccuccucuugggcauuugccaaauaccucugggaaugggccuccguccgauucucuuggcuuucacuccucguucccuucguacaaugguucgucggccuaucacccaccgucuggcucuccgccaucuggaugaugugguacuggggcccuucacuuuacuccauagucagccccuucauaccacuccuccccaucuucuucugccuauggguauacaucuaaggacuagucccuguucccagagcccacuuuuuuuucuuuuuuugaaauaaaauagccugucuuucagaucucaaaggcucuuuucagagccaccaaaaaaaaaaaaaaaaaaaaaaaaaaaaaaaaaaaaaaaaaaaaaaaaaaaaaaaaaaaaaaaaagaauu

SEQ ID NO: 7041 - RNA, 1376 nt, Artificial Sequence
  mRNA Design i-3 (hSL-A64-N5) comprising derived and/or modified sequence from Pf(3D7)__XP_001351122.1__Pf-CSP (wt)
aggagaaagcuuaccaugaugagaaaauuagcuauuuuaucuguuucuuccuuuuuauuuguugaggccuuauuccaggaauaccagugcuauggaaguucgucaaacacaaggguucuaaaugaauuaaauuaugauaaugcaggcacuaauuuauauaaugaauuagaaaugaauuauuaugggaaacaggaaaauugguauagucuuaaaaaaaauaguagaucacuuggagaaaaugaugauggaaauaacgaagacaacgagaaauuaaggaaaccaaaacauaaaaaauuaaagcaaccagcggaugguaauccugauccaaaugcaaacccaaauguagaucccaaugccaacccaaauguagauccaaaugcaaacccaaauguagauccaaaugcaaacccaaaugcaaacccaaaugcaaacccaaaugcaaacccaaaugcaaacccaaaugcaaacccaaaugcaaacccaaaugcaaacccaaaugcaaacccaaaugcaaacccaaaugcaaacccaaaugcaaacccaaaugcaaacccaaaugcaaaccccaaugcaaauccuaaugcaaacccaaaugcaaacccaaacguagauccuaaugcaaauccaaaugcaaacccaaacgcaaaccccaaugcaaauccuaaugcaaaccccaaugcaaauccuaaugcaaauccuaaugccaauccaaaugcaaauccaaaugcaaacccaaacgcaaaccccaaugcaaauccuaaugccaauccaaaugcaaauccaaaugcaaacccaaaugcaaacccaaaugcaaaccccaaugcaaauccuaauaaaaacaaucaagguaauggacaaggucacaauaugccaaaugacccaaaccgaaauguagaugaaaaugcuaaugccaacagugcuguaaaaaauaauaauaacgaagaaccaagugauaagcacauaaaagaauauuuaaacaaaauacaaaauucucuuucaacugaaugguccccauguaguguaacuuguggaaaugguauucaaguuagaauaaagccuggcucugcuaauaaaccuaaagacgaauuagauuaugcaaaugauauugaaaaaaaaauuuguaaaauggaaaaauguuccaguguguuuaaugucguaaauaguucaauaggauuaauaaugguauuauccuucuuguuccuuaauuagggacuaguuauaagacugacuagcccgaugggccucccaacgggcccuccuccccuccuugcaccgagauuaaucaaaggcucuuuucagagccaccaaaaaaaaaaaaaaaaaaaaaaaaaaaaaaaaaaaaaaaaaaaaaaaaaaaaaaaaaaaaaaaaagaauu

SEQ ID NO: 7042 - RNA, 1307 nt, Artificial Sequence
  mRNA Design i-3 (hSL-A64-N5) comprising derived and/or modified sequence from Pf(3D7)__XP_001351122.1__Pf-CSP(1-374) (wt)
aggagaaagcuuaccaugaugagaaaauuagcuauuuuaucuguuucuuccuuuuuauuuguugaggccuuauuccaggaauaccagugcuauggaaguucgucaaacacaaggguucuaaaugaauuaaauuaugauaaugcaggcacuaauuuauauaaugaauuagaaaugaauuauuaugggaaacaggaaaauugguauagucuuaaaaaaaauaguagaucacuuggagaaaaugaugauggaaauaacgaagacaacgagaaauuaaggaaaccaaaacauaaaaaauuaaagcaaccagcggaugguaauccugauccaaaugcaaacccaaauguagaucccaaugccaacccaaauguagauccaaaugcaaacccaaauguagauccaaaugcaaacccaaaugcaaacccaaaugcaaacccaaaugcaaacccaaaugcaaacccaaaugcaaacccaaaugcaaacccaaaugcaaacccaaaugcaaacccaaaugcaaacccaaaugcaaacccaaaugcaaacccaaaugcaaacccaaaugcaaaccccaaugcaaauccuaaugcaaacccaaaugcaaacccaaacguagauccuaaugcaaauccaaaugcaaacccaaacgcaaaccccaaugcaaauccuaaugcaaaccccaaugcaaauccuaaugcaaauccuaaugccaauccaaaugcaaauccaaaugcaaacccaaacgcaaaccccaaugcaaauccuaaugccaauccaaaugcaaauccaaaugcaaacccaaaugcaaacccaaaugcaaaccccaaugcaaauccuaauaaaaacaaucaagguaauggacaaggucacaauaugccaaaugacccaaaccgaaauguagaugaaaaugcuaaugccaacagugcuguaaaaaauaauaauaacgaagaaccaagugauaagcacauaaaagaauauuuaaacaaaauacaaaauucucuuucaacugaaugguccccauguaguguaacuuguggaaaugguauucaaguuagaauaaagccuggcucugcuaauaaaccuaaagacgaauuagauuaugcaaaugauauugaaaaaaaaauuuguaaaauggaaaaauguugaggacuaguuauaagacugacuagcccgaugggccucccaacgggcccuccuccccuccuugcaccgagauuaaucaaaggcucuuuucagagccaccaaaaaaaaaaaaaaaaaaaaaaaaaaaaaaaaaaaaaaaaaaaaaaaaaaaaaaaaaaaaaaaaagaauu

SEQ ID NO: 7043 - RNA, 1160 nt, Artificial Sequence
  mRNA Design i-3 (hSL-A64-N5) comprising derived and/or modified sequence from Pf(3D7)__XP_001351122.1__Pf-CSP(1-325) (wt)
aggagaaagcuuaccaugaugagaaaauuagcuauuuuaucuguuucuuccuuuuuauuuguugaggccuuauuccaggaauaccagugcuauggaaguucgucaaacacaaggguucuaaaugaauuaaauuaugauaaugcaggcacuaauuuauauaaugaauuagaaaugaauuauuaugggaaacaggaaaauugguauagucuuaaaaaaaauaguagaucacuuggagaaaaugaugauggaaauaacgaagacaacgagaaauuaaggaaaccaaaacauaaaaaauuaaagcaaccagcggaugguaauccugauccaaaugcaaacccaaauguagaucccaaugccaacccaaauguagauccaaaugcaaacccaaauguagauccaaaugcaaacccaaaugcaaacccaaaugcaaacccaaaugcaaacccaaaugcaaacccaaaugcaaacccaaaugcaaacccaaaugcaaacccaaaugcaaacccaaaugcaaacccaaaugcaaacccaaaugcaaacccaaaugcaaacccaaaugcaaaccccaaugcaaauccuaaugcaaacccaaaugcaaacccaaacguagauccuaaugcaaauccaaaugcaaacccaaacgcaaaccccaaugcaaauccuaaugcaaaccccaaugcaaauccuaaugcaaauccuaaugccaauccaaaugcaaauccaaaugcaaacccaaacgcaaaccccaaugcaaauccuaaugccaauccaaaugcaaauccaaaugcaaacccaaaugcaaacccaaaugcaaaccccaaugcaaauccuaauaaaaacaaucaagguaauggacaaggucacaauaugccaaaugacccaaaccgaaauguagaugaaaaugcuaaugccaacagugcuguaaaaaauaauaauaacgaagaaccaagugauaagcacauaaaagaauauuuaaacaaaauacaaaauugaggacuaguuauaagacugacuagcccgaugggccucccaacgggcccuccuccccuccuugcaccgagauuaaucaaaggcucuuuucagagccaccaaaaaaaaaaaaaaaaaaaaaaaaaaaaaaaaaaaaaaaaaaaaaaaaaaaaaaaaaaaaaaaaagaauu

SEQ ID NO: 7044 - RNA, 1376 nt, Artificial Sequence
  mRNA Design i-3 (hSL-A64-N5) comprising derived and/or modified sequence from Pf(3D7)__XP_001351122.1__Pf-CSP (opt1)
aggagaaagcuuaccaugaugcgcaagcuggccauccucagcguguccagcuuccuguucgucgaggcccuguuccaggaguaccagugcuacggcuccagcuccaacacccgggugcucaacgagcugaacuacgacaacgcggggaccaaccuguacaacgagcucgagaugaacuacuacggcaagcaggagaacugguacagccugaagaagaacucccgcagccugggggagaacgacgacggcaacaacgaggacaacgagaagcuccggaagcccaagcacaagaagcugaagcagccggccgacgggaaccccgaccccaacgccaaccccaacguggacccgaacgccaaccccaacgucgaccccaacgccaaccccaacguggacccgaacgcgaaccccaacgccaaccccaacgccaaccccaacgccaacccgaacgcgaaccccaacgccaaccccaacgccaaccccaacgccaacccgaacgccaaccccaacgcgaaccccaacgccaaccccaacgccaacccgaacgccaaccccaacgccaaccccaacgcgaaccccaacgccaacccgaacgccaaccccaacguggaccccaacgccaaccccaacgccaacccgaacgcgaaccccaacgccaaccccaacgccaacccgaacgccaaccccaacgccaaccccaacgcgaaccccaacgccaacccgaacgccaaccccaacgccaaccccaacgcgaaccccaacgccaacccgaacgccaaccccaacgccaaccccaacgccaaccccaacgcgaacccgaacgccaaccccaacaagaacaaccagggcaacggccaggggcacaacaugcccaacgaccccaaccgcaacgucgacgagaacgccaacgccaacuccgccgugaagaacaacaacaacgaggagccgagcgacaagcacaucaaggaguaccugaacaagauccagaacucccucagcacggaguggucccccugcagcgugaccugcggcaacgggauccagguccggaucaagcccggcuccgcgaacaagcccaaggacgagcuggacuacgccaacgacaucgagaagaagaucugcaagauggagaagugcagcuccguguucaacguggucaacagcuccaucgggcugaucauggugcucagcuuccuguuccugaacugaggacuaguuauaagacugacuagcccgaugggccucccaacgggcccuccuccccuccuugcaccgagauuaaucaaaggcucuuuucagagccaccaaaaaaaaaaaaaaaaaaaaaaaaaaaaaaaaaaaaaaaaaaaaaaaaaaaaaaaaaaaaaaaaagaauu

SEQ ID NO: 7045 - RNA, 1307 nt, Artificial Sequence
  mRNA Design i-3 (hSL-A64-N5) comprising derived and/or modified sequence from Pf(3D7)__XP_001351122.1__Pf-CSP(1-374) (opt1)
aggagaaagcuuaccaugaugcgcaagcuggccauccucagcguguccagcuuccuguucgucgaggcccuguuccaggaguaccagugcuacggcuccagcuccaacacccgggugcucaacgagcugaacuacgacaacgcggggaccaaccuguacaacgagcucgagaugaacuacuacggcaagcaggagaacugguacagccugaagaagaacucccgcagccugggggagaacgacgacggcaacaacgaggacaacgagaagcuccggaagcccaagcacaagaagcugaagcagccggccgacgggaaccccgaccccaacgccaaccccaacguggacccgaacgccaaccccaacgucgaccccaacgccaaccccaacguggacccgaacgcgaaccccaacgccaaccccaacgccaaccccaacgccaacccgaacgcgaaccccaacgccaaccccaacgccaaccccaacgccaacccgaacgccaaccccaacgcgaaccccaacgccaaccccaacgccaacccgaacgccaaccccaacgccaaccccaacgcgaaccccaacgccaacccgaacgccaaccccaacguggaccccaacgccaaccccaacgccaacccgaacgcgaaccccaacgccaaccccaacgccaacccgaacgccaaccccaacgccaaccccaacgcgaaccccaacgccaacccgaacgccaaccccaacgccaaccccaacgcgaaccccaacgccaacccgaacgccaaccccaacgccaaccccaacgccaaccccaacgcgaacccgaacgccaaccccaacaagaacaaccagggcaacggccaggggcacaacaugcccaacgaccccaaccgcaacgucgacgagaacgccaacgccaacuccgccgugaagaacaacaacaacgaggagccgagcgacaagcacaucaaggaguaccugaacaagauccagaacucccucagcacggaguggucccccugcagcgugaccugcggcaacgggauccagguccggaucaagcccggcuccgcgaacaagcccaaggacgagcuggacuacgccaacgacaucgagaagaagaucugcaagauggagaagugcugaggacuaguuauaagacugacuagcccgaugggccucccaacgggcccuccuccccuccuugcaccgagauuaaucaaaggcucuuuucagagccaccaaaaaaaaaaaaaaaaaaaaaaaaaaaaaaaaaaaaaaaaaaaaaaaaaaaaaaaaaaaaaaaaagaauu

SEQ ID NO: 7046 - RNA, 1160 nt, Artificial Sequence
  mRNA Design i-3 (hSL-A64-N5) comprising derived and/or modified sequence from Pf(3D7)__XP_001351122.1__Pf-CSP(1-325) (opt1)
aggagaaagcuuaccaugaugcgcaagcuggccauccucagcguguccagcuuccuguucgucgaggcccuguuccaggaguaccagugcuacggcuccagcuccaacacccgggugcucaacgagcugaacuacgacaacgcggggaccaaccuguacaacgagcucgagaugaacuacuacggcaagcaggagaacugguacagccugaagaagaacucccgcagccugggggagaacgacgacggcaacaacgaggacaacgagaagcuccggaagcccaagcacaagaagcugaagcagccggccgacgggaaccccgaccccaacgccaaccccaacguggacccgaacgccaaccccaacgucgaccccaacgccaaccccaacguggacccgaacgcgaaccccaacgccaaccccaacgccaaccccaacgccaacccgaacgcgaaccccaacgccaaccccaacgccaaccccaacgccaacccgaacgccaaccccaacgcgaaccccaacgccaaccccaacgccaacccgaacgccaaccccaacgccaaccccaacgcgaaccccaacgccaacccgaacgccaaccccaacguggaccccaacgccaaccccaacgccaacccgaacgcgaaccccaacgccaaccccaacgccaacccgaacgccaaccccaacgccaaccccaacgcgaaccccaacgccaacccgaacgccaaccccaacgccaaccccaacgcgaaccccaacgccaacccgaacgccaaccccaacgccaaccccaacgccaaccccaacgcgaacccgaacgccaaccccaacaagaacaaccagggcaacggccaggggcacaacaugcccaacgaccccaaccgcaacgucgacgagaacgccaacgccaacuccgccgugaagaacaacaacaacgaggagccgagcgacaagcacaucaaggaguaccugaacaagauccagaacugaggacuaguuauaagacugacuagcccgaugggccucccaacgggcccuccuccccuccuugcaccgagauuaaucaaaggcucuuuucagagccaccaaaaaaaaaaaaaaaaaaaaaaaaaaaaaaaaaaaaaaaaaaaaaaaaaaaaaaaaaaaaaaaaagaauu

SEQ ID NO: 7047 - RNA, 1376 nt, Artificial Sequence
  mRNA Design i-3 (hSL-A64-N5) comprising derived and/or modified sequence from Pf(3D7)__XP_001351122.1__HsALB_Pf-CSP(19-397) (opt1) R8528/R8531
aggagaaagcuuaccaugaagugggugaccuucaucagccugcucuuccuguucuccagcgccuacucccuguuccaggaguaccagugcuacggcuccagcuccaacacccgggugcucaacgagcugaacuacgacaacgcggggaccaaccuguacaacgagcucgagaugaacuacuacggcaagcaggagaacugguacagccugaagaagaacucccgcagccugggggagaacgacgacggcaacaacgaggacaacgagaagcuccggaagcccaagcacaagaagcugaagcagccggccgacgggaaccccgaccccaacgccaaccccaacguggacccgaacgccaaccccaacgucgaccccaacgccaaccccaacguggacccgaacgcgaaccccaacgccaaccccaacgccaaccccaacgccaacccgaacgcgaaccccaacgccaaccccaacgccaaccccaacgccaacccgaacgccaaccccaacgcgaaccccaacgccaaccccaacgccaacccgaacgccaaccccaacgccaaccccaacgcgaaccccaacgccaacccgaacgccaaccccaacguggaccccaacgccaaccccaacgccaacccgaacgcgaaccccaacgccaaccccaacgccaacccgaacgccaaccccaacgccaaccccaacgcgaaccccaacgccaacccgaacgccaaccccaacgccaaccccaacgcgaaccccaacgccaacccgaacgccaaccccaacgccaaccccaacgccaaccccaacgcgaacccgaacgccaaccccaacaagaacaaccagggcaacggccaggggcacaacaugcccaacgaccccaaccgcaacgucgacgagaacgccaacgccaacuccgccgugaagaacaacaacaacgaggagccgagcgacaagcacaucaaggaguaccugaacaagauccagaacucccucagcacggaguggucccccugcagcgugaccugcggcaacgggauccagguccggaucaagcccggcuccgcgaacaagcccaaggacgagcuggacuacgccaacgacaucgagaagaagaucugcaagauggagaagugcagcuccguguucaacguggucaacagcuccaucgggcugaucauggugcucagcuuccuguuccugaacugaggacuaguuauaagacugacuagcccgaugggccucccaacgggcccuccuccccuccuugcaccgagauuaaucaaaggcucuuuucagagccaccaaaaaaaaaaaaaaaaaaaaaaaaaaaaaaaaaaaaaaaaaaaaaaaaaaaaaaaaaaaaaaaaagaauu

SEQ ID NO: 7048 - RNA, 1394 nt, Artificial Sequence
  mRNA Design i-3 (hSL-A64-N5) comprising derived and/or modified sequence from Pf(3D7)__XP_001351122.1__HsIns-iso1_Pf-CSP(19-397) (opt1)
aggagaaagcuuaccauggcccuguggaugcgccuccugccccugcucgcccugcuggcgcucuggggcccggaccccgccgccgcccuguuccaggaguaccagugcuacggcuccagcuccaacacccgggugcucaacgagcugaacuacgacaacgcggggaccaaccuguacaacgagcucgagaugaacuacuacggcaagcaggagaacugguacagccugaagaagaacucccgcagccugggggagaacgacgacggcaacaacgaggacaacgagaagcuccggaagcccaagcacaagaagcugaagcagccggccgacgggaaccccgaccccaacgccaaccccaacguggacccgaacgccaaccccaacgucgaccccaacgccaaccccaacguggacccgaacgcgaaccccaacgccaaccccaacgccaaccccaacgccaacccgaacgcgaaccccaacgccaaccccaacgccaaccccaacgccaacccgaacgccaaccccaacgcgaaccccaacgccaaccccaacgccaacccgaacgccaaccccaacgccaaccccaacgcgaaccccaacgccaacccgaacgccaaccccaacguggaccccaacgccaaccccaacgccaacccgaacgcgaaccccaacgccaaccccaacgccaacccgaacgccaaccccaacgccaaccccaacgcgaaccccaacgccaacccgaacgccaaccccaacgccaaccccaacgcgaaccccaacgccaacccgaacgccaaccccaacgccaaccccaacgccaaccccaacgcgaacccgaacgccaaccccaacaagaacaaccagggcaacggccaggggcacaacaugcccaacgaccccaaccgcaacgucgacgagaacgccaacgccaacuccgccgugaagaacaacaacaacgaggagccgagcgacaagcacaucaaggaguaccugaacaagauccagaacucccucagcacggaguggucccccugcagcgugaccugcggcaacgggauccagguccggaucaagcccggcuccgcgaacaagcccaaggacgagcuggacuacgccaacgacaucgagaagaagaucugcaagauggagaagugcagcuccguguucaacguggucaacagcuccaucgggcugaucauggugcucagcuuccuguuccugaacugaggacuaguuauaagacugacuagcccgaugggccucccaacgggcccuccuccccuccuugcaccgagauuaaucaaaggcucuuuucagagccaccaaaaaaaaaaaaaaaaaaaaaaaaaaaaaaaaaaaaaaaaaaaaaaaaaaaaaaaaaaaaaaaaagaauu

SEQ ID NO: 7049 - RNA, 1373 nt, Artificial Sequence
  mRNA Design i-3 (hSL-A64-N5) comprising derived and/or modified sequence from Pf(3D7)__XP_001351122.1__HsSPARC_Pf-CSP(19-397) (opt1)
aggagaaagcuuaccaugcgcgccuggaucuucuuccugcucugccuggccggccgggcccuggcccuguuccaggaguaccagugcuacggcuccagcuccaacacccgggugcucaacgagcugaacuacgacaacgcggggaccaaccuguacaacgagcucgagaugaacuacuacggcaagcaggagaacugguacagccugaagaagaacucccgcagccugggggagaacgacgacggcaacaacgaggacaacgagaagcuccggaagcccaagcacaagaagcugaagcagccggccgacgggaaccccgaccccaacgccaaccccaacguggacccgaacgccaaccccaacgucgaccccaacgccaaccccaacguggacccgaacgcgaaccccaacgccaaccccaacgccaaccccaacgccaacccgaacgcgaaccccaacgccaaccccaacgccaaccccaacgccaacccgaacgccaaccccaacgcgaaccccaacgccaaccccaacgccaacccgaacgccaaccccaacgccaaccccaacgcgaaccccaacgccaacccgaacgccaaccccaacguggaccccaacgccaaccccaacgccaacccgaacgcgaaccccaacgccaaccccaacgccaacccgaacgccaaccccaacgccaaccccaacgcgaaccccaacgccaacccgaacgccaaccccaacgccaaccccaacgcgaaccccaacgccaacccgaacgccaaccccaacgccaaccccaacgccaaccccaacgcgaacccgaacgccaaccccaacaagaacaaccagggcaacggccaggggcacaacaugcccaacgaccccaaccgcaacgucgacgagaacgccaacgccaacuccgccgugaagaacaacaacaacgaggagccgagcgacaagcacaucaaggaguaccugaacaagauccagaacucccucagcacggaguggucccccugcagcgugaccugcggcaacgggauccagguccggaucaagcccggcuccgcgaacaagcccaaggacgagcuggacuacgccaacgacaucgagaagaagaucugcaagauggagaagugcagcuccguguucaacguggucaacagcuccaucgggcugaucauggugcucagcuuccuguuccugaacugaggacuaguuauaagacugacuagcccgaugggccucccaacgggcccuccuccccuccuugcaccgagauuaaucaaaggcucuuuucagagccaccaaaaaaaaaaaaaaaaaaaaaaaaaaaaaaaaaaaaaaaaaaaaaaaaaaaaaaaaaaaaaaaaagaauu

SEQ ID NO: 7050 - RNA, 1376 nt, Artificial Sequence
  mRNA Design i-3 (hSL-A64-N5) comprising derived and/or modified sequence from Pf(3D7)__XP_001351122.1__IgE_Pf-CSP(19-397) (opt1)
aggagaaagcuuaccauggacuggaccuggauccuguuccucguggccgccgcgacccgcguccacagccuguuccaggaguaccagugcuacggcuccagcuccaacacccgggugcucaacgagcugaacuacgacaacgcggggaccaaccuguacaacgagcucgagaugaacuacuacggcaagcaggagaacugguacagccugaagaagaacucccgcagccugggggagaacgacgacggcaacaacgaggacaacgagaagcuccggaagcccaagcacaagaagcugaagcagccggccgacgggaaccccgaccccaacgccaaccccaacguggacccgaacgccaaccccaacgucgaccccaacgccaaccccaacguggacccgaacgcgaaccccaacgccaaccccaacgccaaccccaacgccaacccgaacgcgaaccccaacgccaaccccaacgccaaccccaacgccaacccgaacgccaaccccaacgcgaaccccaacgccaaccccaacgccaacccgaacgccaaccccaacgccaaccccaacgcgaaccccaacgccaacccgaacgccaaccccaacguggaccccaacgccaaccccaacgccaacccgaacgcgaaccccaacgccaaccccaacgccaacccgaacgccaaccccaacgccaaccccaacgcgaaccccaacgccaacccgaacgccaaccccaacgccaaccccaacgcgaaccccaacgccaacccgaacgccaaccccaacgccaaccccaacgccaaccccaacgcgaacccgaacgccaaccccaacaagaacaaccagggcaacggccaggggcacaacaugcccaacgaccccaaccgcaacgucgacgagaacgccaacgccaacuccgccgugaagaacaacaacaacgaggagccgagcgacaagcacaucaaggaguaccugaacaagauccagaacucccucagcacggaguggucccccugcagcgugaccugcggcaacgggauccagguccggaucaagcccggcuccgcgaacaagcccaaggacgagcuggacuacgccaacgacaucgagaagaagaucugcaagauggagaagugcagcuccguguucaacguggucaacagcuccaucgggcugaucauggugcucagcuuccuguuccugaacugaggacuaguuauaagacugacuagcccgaugggccucccaacgggcccuccuccccuccuugcaccgagauuaaucaaaggcucuuuucagagccaccaaaaaaaaaaaaaaaaaaaaaaaaaaaaaaaaaaaaaaaaaaaaaaaaaaaaaaaaaaaaaaaaagaauu

SEQ ID NO: 7051 - RNA, 1541 nt, Artificial Sequence
  mRNA Design i-3 (hSL-A64-N5) comprising derived and/or modified sequence from Pf(3D7)__XP_001351122.1__Pf-CSP_L(G4SG4)_TM domain HA (opt1)
aggagaaagcuuaccaugaugcgcaagcuggccauccucagcguguccagcuuccuguucgucgaggcccuguuccaggaguaccagugcuacggcuccagcuccaacacccgggugcucaacgagcugaacuacgacaacgcggggaccaaccuguacaacgagcucgagaugaacuacuacggcaagcaggagaacugguacagccugaagaagaacucccgcagccugggggagaacgacgacggcaacaacgaggacaacgagaagcuccggaagcccaagcacaagaagcugaagcagccggccgacgggaaccccgaccccaacgccaaccccaacguggacccgaacgccaaccccaacgucgaccccaacgccaaccccaacguggacccgaacgcgaaccccaacgccaaccccaacgccaaccccaacgccaacccgaacgcgaaccccaacgccaaccccaacgccaaccccaacgccaacccgaacgccaaccccaacgcgaaccccaacgccaaccccaacgccaacccgaacgccaaccccaacgccaaccccaacgcgaaccccaacgccaacccgaacgccaaccccaacguggaccccaacgccaaccccaacgccaacccgaacgcgaaccccaacgccaaccccaacgccaacccgaacgccaaccccaacgccaaccccaacgcgaaccccaacgccaacccgaacgccaaccccaacgccaaccccaacgcgaaccccaacgccaacccgaacgccaaccccaacgccaaccccaacgccaaccccaacgcgaacccgaacgccaaccccaacaagaacaaccagggcaacggccaggggcacaacaugcccaacgaccccaaccgcaacgucgacgagaacgccaacgccaacuccgccgugaagaacaacaacaacgaggagccgagcgacaagcacaucaaggaguaccugaacaagauccagaacucccucagcacggaguggucccccugcagcgugaccugcggcaacgggauccagguccggaucaagcccggcuccgcgaacaagcccaaggacgagcuggacuacgccaacgacaucgagaagaagaucugcaagauggagaagugcagcuccguguucaacguggucaacagcuccaucgggcugaucauggugcucagcuuccuguuccugaacggcgggggcgggagcggcgggggcggcaagcucgaguccacgcggaucuaccagauccuggcgaucuacagcaccgucgccagcucccuggugcucguggucagccugggggccaucuccuucuggaugugcagcaacggcucccugcagugccgcaucugcaucugaggacuaguuauaagacugacuagcccgaugggccucccaacgggcccuccuccccuccuugcaccgagauuaaucaaaggcucuuuucagagccaccaaaaaaaaaaaaaaaaaaaaaaaaaaaaaaaaaaaaaaaaaaaaaaaaaaaaaaaaaaaaaaaaagaauu

SEQ ID NO: 7052 - RNA, 1415 nt, Artificial Sequence
  mRNA Design i-3 (hSL-A64-N5) comprising derived and/or modified sequence from Pf(3D7)__XP_001351122.1__Pf-CSP(199-377)_L(PVTN)_HBsAg (opt1)
aggagaaagcuuaccauggaccccaacgccaaccccaacgccaacccgaacgcgaaccccaacgccaaccccaacgccaacccgaacgccaaccccaacgccaaccccaacgcgaaccccaacgccaacccgaacgccaaccccaacgccaaccccaacgcgaaccccaacgccaacccgaacgccaaccccaacgccaaccccaacgccaaccccaacgcgaacccgaacgccaaccccaacaagaacaaccagggcaacggccaggggcacaacaugcccaacgaccccaaccgcaacgucgacgagaacgccaacgccaacuccgccgugaagaacaacaacaacgaggagccgagcgacaagcacaucaaggaguaccugaacaagauccagaacucccucagcacggaguggucccccugcagcgugaccugcggcaacgggauccagguccggaucaagcccggcuccgcgaacaagcccaaggacgagcuggacuacgccaacgacaucgagaagaagaucugcaagauggagaagugcagcuccgugccggugacgaacauggagaacaucaccagcggcuuccuggggccccuccuggugcugcaggccggcuucuuccuccugacccgcauccugaccaucccgcagucccucgacagcugguggaccucccugaacuuccucgggggcagccccgucugccuggggcagaacucccagagccccaccuccaaccacagccccaccuccugcccgcccaucugccccggcuaccgguggaugugccugcgccgguucaucaucuuccuguucauccuccugcugugccucaucuuccugcuggugcuccuggacuaccagggcaugcugcccgugugcccgcucauccccgggagcacgaccaccaacaccggccccugcaagacgugcaccacccccgcccaggggaacuccauguucccgagcugcugcugcaccaagcccacggacggcaacugcacgugcauccccauccccuccagcugggcguucgccaaguaccugugggagugggccuccguccgcuucagcuggcugucccuccuggugccguucgugcagugguucgucgggcugagccccaccguguggcucuccgccaucuggaugaugugguacuggggccccagccuguacagcaucgugucccccuucaucccgcugcuccccaucuucuucugccugugggucuacaucugaggacuaguuauaagacugacuagcccgaugggccucccaacgggcccuccuccccuccuugcaccgagauuaaucaaaggcucuuuucagagccaccaaaaaaaaaaaaaaaaaaaaaaaaaaaaaaaaaaaaaaaaaaaaaaaaaaaaaaaaaaaaaaaaagaauu

SEQ ID NO: 7053 - RNA, 1457 nt, Artificial Sequence
  mRNA Design i-3 (hSL-A64-N5) comprising derived and/or modified sequence from Pf(3D7)__XP_001351122.1__Pf-CSP(199-387)_L(PVTN)_HBsAg (opt1)
aggagaaagcuuaccaugauggccccggaccccaacgccaaccccaacgccaacccgaacgcgaaccccaacgccaaccccaacgccaacccgaacgccaaccccaacgccaaccccaacgcgaaccccaacgccaacccgaacgccaaccccaacgccaaccccaacgcgaaccccaacgccaacccgaacgccaaccccaacgccaaccccaacgccaaccccaacgcgaacccgaacgccaaccccaacaagaacaaccagggcaacggccaggggcacaacaugcccaacgaccccaaccgcaacgucgacgagaacgccaacgccaacuccgccgugaagaacaacaacaacgaggagccgagcgacaagcacaucaaggaguaccugaacaagauccagaacucccucagcacggaguggucccccugcagcgugaccugcggcaacgggauccagguccggaucaagcccggcuccgcgaacaagcccaaggacgagcuggacuacgccaacgacaucgagaagaagaucugcaagauggagaagugcagcuccguguucaacguggucaacagcuccaucgggcuggggccggugacgaacauggagaacaucaccagcggcuuccuggggccccuccuggugcugcaggccggcuucuuccuccugacccgcauccugaccaucccgcagucccucgacagcugguggaccucccugaacuuccucgggggcagccccgucugccuggggcagaacucccagagccccaccuccaaccacagccccaccuccugcccgcccaucugccccggcuaccgguggaugugccugcgccgguucaucaucuuccuguucauccuccugcugugccucaucuuccugcuggugcuccuggacuaccagggcaugcugcccgugugcccgcucauccccgggagcacgaccaccaacaccggccccugcaagacgugcaccacccccgcccaggggaacuccauguucccgagcugcugcugcaccaagcccacggacggcaacugcacgugcauccccauccccuccagcugggcguucgccaaguaccugugggagugggccuccguccgcuucagcuggcugucccuccuggugccguucgugcagugguucgucgggcugagccccaccguguggcucuccgccaucuggaugaugugguacuggggccccagccuguacagcaucgugucccccuucaucccgcugcuccccaucuucuucugccugugggucuacaucugaggacuaguuauaagacugacuagcccgaugggccucccaacgggcccuccuccccuccuugcaccgagauuaaucaaaggcucuuuucagagccaccaaaaaaaaaaaaaaaaaaaaaaaaaaaaaaaaaaaaaaaaaaaaaaaaaaaaaaaaaaaaaaaaagaauu

SEQ ID NO: 7054 - RNA, 641 nt, Artificial Sequence
  mRNA Design i-3 (hSL-A64-N5) comprising derived and/or modified sequence from Pf(3D7)__XP_001351122.1__HsALB_Pf-CSP(19-152) (opt1)
aggagaaagcuuaccaugaagugggugaccuucaucagccugcucuuccuguucuccagcgccuacucccuguuccaggaguaccagugcuacggcuccagcuccaacacccgggugcucaacgagcugaacuacgacaacgcggggaccaaccuguacaacgagcucgagaugaacuacuacggcaagcaggagaacugguacagccugaagaagaacucccgcagccugggggagaacgacgacggcaacaacgaggacaacgagaagcuccggaagcccaagcacaagaagcugaagcagccggccgacgggaaccccgaccccaacgccaaccccaacguggacccgaacgccaaccccaacgucgaccccaacgccaaccccaacguggacccgaacgcgaaccccaacgccaaccccaacgccaaccccaacgccaacccgaacgcgaaccccaacgccaaccccugaggacuaguuauaagacugacuagcccgaugggccucccaacgggcccuccuccccuccuugcaccgagauuaaucaaaggcucuuuucagagccaccaaaaaaaaaaaaaaaaaaaaaaaaaaaaaaaaaaaaaaaaaaaaaaaaaaaaaaaaaaaaaaaaagaauu

SEQ ID NO: 7055 - RNA, 761 nt, Artificial Sequence
  mRNA Design i-3 (hSL-A64-N5) comprising derived and/or modified sequence from Pf(3D7)__XP_001351122.1__HsALB_Pf-CSP(19-192) (opt1)
aggagaaagcuuaccaugaagugggugaccuucaucagccugcucuuccuguucuccagcgccuacucccuguuccaggaguaccagugcuacggcuccagcuccaacacccgggugcucaacgagcugaacuacgacaacgcggggaccaaccuguacaacgagcucgagaugaacuacuacggcaagcaggagaacugguacagccugaagaagaacucccgcagccugggggagaacgacgacggcaacaacgaggacaacgagaagcuccggaagcccaagcacaagaagcugaagcagccggccgacgggaaccccgaccccaacgccaaccccaacguggacccgaacgccaaccccaacgucgaccccaacgccaaccccaacguggacccgaacgcgaaccccaacgccaaccccaacgccaaccccaacgccaacccgaacgcgaaccccaacgccaaccccaacgccaaccccaacgccaacccgaacgccaaccccaacgcgaaccccaacgccaaccccaacgccaacccgaacgccaaccccaacgccaaccccaacgcgaaccccaacgccaacccgugaggacuaguuauaagacugacuagcccgaugggccucccaacgggcccuccuccccuccuugcaccgagauuaaucaaaggcucuuuucagagccaccaaaaaaaaaaaaaaaaaaaaaaaaaaaaaaaaaaaaaaaaaaaaaaaaaaaaaaaaaaaaaaaaagaauu

SEQ ID NO: 7056 - RNA, 1001 nt, Artificial Sequence
  mRNA Design i-3 (hSL-A64-N5) comprising derived and/or modified sequence from Pf(3D7)__XP_001351122.1__HsALB_Pf-CSP(19-272) (opt1)
aggagaaagcuuaccaugaagugggugaccuucaucagccugcucuuccuguucuccagcgccuacucccuguuccaggaguaccagugcuacggcuccagcuccaacacccgggugcucaacgagcugaacuacgacaacgcggggaccaaccuguacaacgagcucgagaugaacuacuacggcaagcaggagaacugguacagccugaagaagaacucccgcagccugggggagaacgacgacggcaacaacgaggacaacgagaagcuccggaagcccaagcacaagaagcugaagcagccggccgacgggaaccccgaccccaacgccaaccccaacguggacccgaacgccaaccccaacgucgaccccaacgccaaccccaacguggacccgaacgcgaaccccaacgccaaccccaacgccaaccccaacgccaacccgaacgcgaaccccaacgccaaccccaacgccaaccccaacgccaacccgaacgccaaccccaacgcgaaccccaacgccaaccccaacgccaacccgaacgccaaccccaacgccaaccccaacgcgaaccccaacgccaacccgaacgccaaccccaacguggaccccaacgccaaccccaacgccaacccgaacgcgaaccccaacgccaaccccaacgccaacccgaacgccaaccccaacgccaaccccaacgcgaaccccaacgccaacccgaacgccaaccccaacgccaaccccaacgcgaaccccaacgccaacccgaacgccaaccccaacgccaaccccaacgccaaccccaacgcgaacccgaacgccaaccccugaggacuaguuauaagacugacuagcccgaugggccucccaacgggcccuccuccccuccuugcaccgagauuaaucaaaggcucuuuucagagccaccaaaaaaaaaaaaaaaaaaaaaaaaaaaaaaaaaaaaaaaaaaaaaaaaaaaaaaaaaaaaaaaaagaauu

SEQ ID NO: 7057 - RNA, 1163 nt, Artificial Sequence
  mRNA Design i-3 (hSL-A64-N5) comprising derived and/or modified sequence from Pf(3D7)__XP_001351122.1__HsALB_Pf-CSP(19-272)_L(AAY)_Pf-CSP(310-3 27)_L(AAY)_Pf-CSP(346-375) (opt1)
aggagaaagcuuaccaugaagugggugaccuucaucagccugcucuuccuguucuccagcgccuacucccuguuccaggaguaccagugcuacggcuccagcuccaacacccgggugcucaacgagcugaacuacgacaacgcggggaccaaccuguacaacgagcucgagaugaacuacuacggcaagcaggagaacugguacagccugaagaagaacucccgcagccugggggagaacgacgacggcaacaacgaggacaacgagaagcuccggaagcccaagcacaagaagcugaagcagccggccgacgggaaccccgaccccaacgccaaccccaacguggacccgaacgccaaccccaacgucgaccccaacgccaaccccaacguggacccgaacgcgaaccccaacgccaaccccaacgccaaccccaacgccaacccgaacgcgaaccccaacgccaaccccaacgccaaccccaacgccaacccgaacgccaaccccaacgcgaaccccaacgccaaccccaacgccaacccgaacgccaaccccaacgccaaccccaacgcgaaccccaacgccaacccgaacgccaaccccaacguggaccccaacgccaaccccaacgccaacccgaacgcgaaccccaacgccaaccccaacgccaacccgaacgccaaccccaacgccaaccccaacgcgaaccccaacgccaacccgaacgccaaccccaacgccaaccccaacgcgaaccccaacgccaacccgaacgccaaccccaacgccaaccccaacgccaaccccaacgcgaacccgaacgccaaccccgccgcguaugagccgagcgacaagcacaucaaggaguaccugaacaagauccagaacucccucgcggccuacaucaagcccggcuccgcgaacaagcccaaggacgagcuggacuacgccaacgacaucgagaagaagaucugcaagauggagaagugcagcugaggacuaguuauaagacugacuagcccgaugggccucccaacgggcccuccuccccuccuugcaccgagauuaaucaaaggcucuuuucagagccaccaaaaaaaaaaaaaaaaaaaaaaaaaaaaaaaaaaaaaaaaaaaaaaaaaaaaaaaaaaaaaaaaagaauu

SEQ ID NO: 7058 - RNA, 1124 nt, Artificial Sequence
  mRNA Design i-3 (hSL-A64-N5) comprising derived and/or modified sequence from Pf(3D7)__XP_001351122.1__HsALB_Pf-CSP(19-272)_L(AAY)_Pf-CSP(346-3 65)_L(AAY)_P2 (opt1)
aggagaaagcuuaccaugaagugggugaccuucaucagccugcucuuccuguucuccagcgccuacucccuguuccaggaguaccagugcuacggcuccagcuccaacacccgggugcucaacgagcugaacuacgacaacgcggggaccaaccuguacaacgagcucgagaugaacuacuacggcaagcaggagaacugguacagccugaagaagaacucccgcagccugggggagaacgacgacggcaacaacgaggacaacgagaagcuccggaagcccaagcacaagaagcugaagcagccggccgacgggaaccccgaccccaacgccaaccccaacguggacccgaacgccaaccccaacgucgaccccaacgccaaccccaacguggacccgaacgcgaaccccaacgccaaccccaacgccaaccccaacgccaacccgaacgcgaaccccaacgccaaccccaacgccaaccccaacgccaacccgaacgccaaccccaacgcgaaccccaacgccaaccccaacgccaacccgaacgccaaccccaacgccaaccccaacgcgaaccccaacgccaacccgaacgccaaccccaacguggaccccaacgccaaccccaacgccaacccgaacgcgaaccccaacgccaaccccaacgccaacccgaacgccaaccccaacgccaaccccaacgcgaaccccaacgccaacccgaacgccaaccccaacgccaaccccaacgcgaaccccaacgccaacccgaacgccaaccccaacgccaaccccaacgccaaccccaacgcgaacccgaacgccaaccccgccgcguauaucaagcccggcuccgcgaacaagcccaaggacgagcuggacuacgccaacgacaucgaggcggccuaccaguacaucaaggccaacagcaaguucaucggcaucaccgagcugugaggacuaguuauaagacugacuagcccgaugggccucccaacgggcccuccuccccuccuugcaccgagauuaaucaaaggcucuuuucagagccaccaaaaaaaaaaaaaaaaaaaaaaaaaaaaaaaaaaaaaaaaaaaaaaaaaaaaaaaaaaaaaaaaagaauu

SEQ ID NO: 7059 - RNA, 1118 nt, Artificial Sequence
  mRNA Design i-3 (hSL-A64-N5) comprising derived and/or modified sequence from Pf(3D7)__XP_001351122.1__HsALB_Pf-CSP(19-272)_L(AAY)_Pf-CSP(346-3 65)_L(AAY)_PADRE (opt1)
aggagaaagcuuaccaugaagugggugaccuucaucagccugcucuuccuguucuccagcgccuacucccuguuccaggaguaccagugcuacggcuccagcuccaacacccgggugcucaacgagcugaacuacgacaacgcggggaccaaccuguacaacgagcucgagaugaacuacuacggcaagcaggagaacugguacagccugaagaagaacucccgcagccugggggagaacgacgacggcaacaacgaggacaacgagaagcuccggaagcccaagcacaagaagcugaagcagccggccgacgggaaccccgaccccaacgccaaccccaacguggacccgaacgccaaccccaacgucgaccccaacgccaaccccaacguggacccgaacgcgaaccccaacgccaaccccaacgccaaccccaacgccaacccgaacgcgaaccccaacgccaaccccaacgccaaccccaacgccaacccgaacgccaaccccaacgcgaaccccaacgccaaccccaacgccaacccgaacgccaaccccaacgccaaccccaacgcgaaccccaacgccaacccgaacgccaaccccaacguggaccccaacgccaaccccaacgccaacccgaacgcgaaccccaacgccaaccccaacgccaacccgaacgccaaccccaacgccaaccccaacgcgaaccccaacgccaacccgaacgccaaccccaacgccaaccccaacgcgaaccccaacgccaacccgaacgccaaccccaacgccaaccccaacgccaaccccaacgcgaacccgaacgccaaccccgccgcguauaucaagcccggcuccgcgaacaagcccaaggacgagcuggacuacgccaacgacaucgaggcggccuacgccaaguucguggccgccuggacccugaaggcggccgccugaggacuaguuauaagacugacuagcccgaugggccucccaacgggcccuccuccccuccuugcaccgagauuaaucaaaggcucuuuucagagccaccaaaaaaaaaaaaaaaaaaaaaaaaaaaaaaaaaaaaaaaaaaaaaaaaaaaaaaaaaaaaaaaaagaauu

SEQ ID NO: 7060 - RNA, 1175 nt, Artificial Sequence
  mRNA Design i-3 (hSL-A64-N5) comprising derived and/or modified sequence from Pf(3D7)__XP_001351122.1__HsALB_Pf-CSP(19-272)_L(G4S)_Pf-CSP(310-3 27)_L(G4S)_Pf-CSP(346-375) (opt1)
aggagaaagcuuaccaugaagugggugaccuucaucagccugcucuuccuguucuccagcgccuacucccuguuccaggaguaccagugcuacggcuccagcuccaacacccgggugcucaacgagcugaacuacgacaacgcggggaccaaccuguacaacgagcucgagaugaacuacuacggcaagcaggagaacugguacagccugaagaagaacucccgcagccugggggagaacgacgacggcaacaacgaggacaacgagaagcuccggaagcccaagcacaagaagcugaagcagccggccgacgggaaccccgaccccaacgccaaccccaacguggacccgaacgccaaccccaacgucgaccccaacgccaaccccaacguggacccgaacgcgaaccccaacgccaaccccaacgccaaccccaacgccaacccgaacgcgaaccccaacgccaaccccaacgccaaccccaacgccaacccgaacgccaaccccaacgcgaaccccaacgccaaccccaacgccaacccgaacgccaaccccaacgccaaccccaacgcgaaccccaacgccaacccgaacgccaaccccaacguggaccccaacgccaaccccaacgccaacccgaacgcgaaccccaacgccaaccccaacgccaacccgaacgccaaccccaacgccaaccccaacgcgaaccccaacgccaacccgaacgccaaccccaacgccaaccccaacgcgaaccccaacgccaacccgaacgccaaccccaacgccaaccccaacgccaaccccaacgcgaacccgaacgccaaccccggaggcggaggaucugagccgagcgacaagcacaucaaggaguaccugaacaagauccagaacucccucggcggagguggaaguaucaagcccggcuccgcgaacaagcccaaggacgagcuggacuacgccaacgacaucgagaagaagaucugcaagauggagaagugcagcugaggacuaguuauaagacugacuagcccgaugggccucccaacgggcccuccuccccuccuugcaccgagauuaaucaaaggcucuuuucagagccaccaaaaaaaaaaaaaaaaaaaaaaaaaaaaaaaaaaaaaaaaaaaaaaaaaaaaaaaaaaaaaaaaagaauu

SEQ ID NO: 7061 - RNA, 1160 nt, Artificial Sequence
  mRNA Design i-3 (hSL-A64-N5) comprising derived and/or modified sequence from Pf(3D7)__XP_001351122.1__HsALB_Pf-CSP(19-272)_L(G4S)_Pf-CSP(310-3 27)_Pf-CSP(346-375) (opt1)
aggagaaagcuuaccaugaagugggugaccuucaucagccugcucuuccuguucuccagcgccuacucccuguuccaggaguaccagugcuacggcuccagcuccaacacccgggugcucaacgagcugaacuacgacaacgcggggaccaaccuguacaacgagcucgagaugaacuacuacggcaagcaggagaacugguacagccugaagaagaacucccgcagccugggggagaacgacgacggcaacaacgaggacaacgagaagcuccggaagcccaagcacaagaagcugaagcagccggccgacgggaaccccgaccccaacgccaaccccaacguggacccgaacgccaaccccaacgucgaccccaacgccaaccccaacguggacccgaacgcgaaccccaacgccaaccccaacgccaaccccaacgccaacccgaacgcgaaccccaacgccaaccccaacgccaaccccaacgccaacccgaacgccaaccccaacgcgaaccccaacgccaaccccaacgccaacccgaacgccaaccccaacgccaaccccaacgcgaaccccaacgccaacccgaacgccaaccccaacguggaccccaacgccaaccccaacgccaacccgaacgcgaaccccaacgccaaccccaacgccaacccgaacgccaaccccaacgccaaccccaacgcgaaccccaacgccaacccgaacgccaaccccaacgccaaccccaacgcgaaccccaacgccaacccgaacgccaaccccaacgccaaccccaacgccaaccccaacgcgaacccgaacgccaaccccggaggcggaggaucugagccgagcgacaagcacaucaaggaguaccugaacaagauccagaacucccucaucaagcccggcuccgcgaacaagcccaaggacgagcuggacuacgccaacgacaucgagaagaagaucugcaagauggagaagugcagcugaggacuaguuauaagacugacuagcccgaugggccucccaacgggcccuccuccccuccuugcaccgagauuaaucaaaggcucuuuucagagccaccaaaaaaaaaaaaaaaaaaaaaaaaaaaaaaaaaaaaaaaaaaaaaaaaaaaaaaaaaaaaaaaaagaauu

SEQ ID NO: 7062 - RNA, 1160 nt, Artificial Sequence
  mRNA Design i-3 (hSL-A64-N5) comprising derived and/or modified sequence from Pf(3D7)__XP_001351122.1__HsALB_Pf-CSP(19-325) (opt1)
aggagaaagcuuaccaugaagugggugaccuucaucagccugcucuuccuguucuccagcgccuacucccuguuccaggaguaccagugcuacggcuccagcuccaacacccgggugcucaacgagcugaacuacgacaacgcggggaccaaccuguacaacgagcucgagaugaacuacuacggcaagcaggagaacugguacagccugaagaagaacucccgcagccugggggagaacgacgacggcaacaacgaggacaacgagaagcuccggaagcccaagcacaagaagcugaagcagccggccgacgggaaccccgaccccaacgccaaccccaacguggacccgaacgccaaccccaacgucgaccccaacgccaaccccaacguggacccgaacgcgaaccccaacgccaaccccaacgccaaccccaacgccaacccgaacgcgaaccccaacgccaaccccaacgccaaccccaacgccaacccgaacgccaaccccaacgcgaaccccaacgccaaccccaacgccaacccgaacgccaaccccaacgccaaccccaacgcgaaccccaacgccaacccgaacgccaaccccaacguggaccccaacgccaaccccaacgccaacccgaacgcgaaccccaacgccaaccccaacgccaacccgaacgccaaccccaacgccaaccccaacgcgaaccccaacgccaacccgaacgccaaccccaacgccaaccccaacgcgaaccccaacgccaacccgaacgccaaccccaacgccaaccccaacgccaaccccaacgcgaacccgaacgccaaccccaacaagaacaaccagggcaacggccaggggcacaacaugcccaacgaccccaaccgcaacgucgacgagaacgccaacgccaacuccgccgugaagaacaacaacaacgaggagccgagcgacaagcacaucaaggaguaccugaacaagauccagaacugaggacuaguuauaagacugacuagcccgaugggccucccaacgggcccuccuccccuccuugcaccgagauuaaucaaaggcucuuuucagagccaccaaaaaaaaaaaaaaaaaaaaaaaaaaaaaaaaaaaaaaaaaaaaaaaaaaaaaaaaaaaaaaaaagaauu

SEQ ID NO: 7063 - RNA, 1337 nt, Artificial Sequence
  mRNA Design i-3 (hSL-A64-N5) comprising derived and/or modified sequence from Pf(3D7)__XP_001351122.1__HsALB_Pf-CSP(19-384) (opt1)
aggagaaagcuuaccaugaagugggugaccuucaucagccugcucuuccuguucuccagcgccuacucccuguuccaggaguaccagugcuacggcuccagcuccaacacccgggugcucaacgagcugaacuacgacaacgcggggaccaaccuguacaacgagcucgagaugaacuacuacggcaagcaggagaacugguacagccugaagaagaacucccgcagccugggggagaacgacgacggcaacaacgaggacaacgagaagcuccggaagcccaagcacaagaagcugaagcagccggccgacgggaaccccgaccccaacgccaaccccaacguggacccgaacgccaaccccaacgucgaccccaacgccaaccccaacguggacccgaacgcgaaccccaacgccaaccccaacgccaaccccaacgccaacccgaacgcgaaccccaacgccaaccccaacgccaaccccaacgccaacccgaacgccaaccccaacgcgaaccccaacgccaaccccaacgccaacccgaacgccaaccccaacgccaaccccaacgcgaaccccaacgccaacccgaacgccaaccccaacguggaccccaacgccaaccccaacgccaacccgaacgcgaaccccaacgccaaccccaacgccaacccgaacgccaaccccaacgccaaccccaacgcgaaccccaacgccaacccgaacgccaaccccaacgccaaccccaacgcgaaccccaacgccaacccgaacgccaaccccaacgccaaccccaacgccaaccccaacgcgaacccgaacgccaaccccaacaagaacaaccagggcaacggccaggggcacaacaugcccaacgaccccaaccgcaacgucgacgagaacgccaacgccaacuccgccgugaagaacaacaacaacgaggagccgagcgacaagcacaucaaggaguaccugaacaagauccagaacucccucagcacggaguggucccccugcagcgugaccugcggcaacgggauccagguccggaucaagcccggcuccgcgaacaagcccaaggacgagcuggacuacgccaacgacaucgagaagaagaucugcaagauggagaagugcagcuccguguucaacguggucaacagcuccugaggacuaguuauaagacugacuagcccgaugggccucccaacgggcccuccuccccuccuugcaccgagauuaaucaaaggcucuuuucagagccaccaaaaaaaaaaaaaaaaaaaaaaaaaaaaaaaaaaaaaaaaaaaaaaaaaaaaaaaaaaaaaaaaagaauu

SEQ ID NO: 7064 - RNA, 1475 nt, Artificial Sequence
  mRNA Design i-3 (hSL-A64-N5) comprising derived and/or modified sequence from Pf(3D7)__XP_001351122.1__HsALB_Pf-CSP(19-384)_TM domain HA (opt1)
aggagaaagcuuaccaugaagugggugaccuucaucagccugcucuuccuguucuccagcgccuacucccuguuccaggaguaccagugcuacggcuccagcuccaacacccgggugcucaacgagcugaacuacgacaacgcggggaccaaccuguacaacgagcucgagaugaacuacuacggcaagcaggagaacugguacagccugaagaagaacucccgcagccugggggagaacgacgacggcaacaacgaggacaacgagaagcuccggaagcccaagcacaagaagcugaagcagccggccgacgggaaccccgaccccaacgccaaccccaacguggacccgaacgccaaccccaacgucgaccccaacgccaaccccaacguggacccgaacgcgaaccccaacgccaaccccaacgccaaccccaacgccaacccgaacgcgaaccccaacgccaaccccaacgccaaccccaacgccaacccgaacgccaaccccaacgcgaaccccaacgccaaccccaacgccaacccgaacgccaaccccaacgccaaccccaacgcgaaccccaacgccaacccgaacgccaaccccaacguggaccccaacgccaaccccaacgccaacccgaacgcgaaccccaacgccaaccccaacgccaacccgaacgccaaccccaacgccaaccccaacgcgaaccccaacgccaacccgaacgccaaccccaacgccaaccccaacgcgaaccccaacgccaacccgaacgccaaccccaacgccaaccccaacgccaaccccaacgcgaacccgaacgccaaccccaacaagaacaaccagggcaacggccaggggcacaacaugcccaacgaccccaaccgcaacgucgacgagaacgccaacgccaacuccgccgugaagaacaacaacaacgaggagccgagcgacaagcacaucaaggaguaccugaacaagauccagaacucccucagcacggaguggucccccugcagcgugaccugcggcaacgggauccagguccggaucaagcccggcuccgcgaacaagcccaaggacgagcuggacuacgccaacgacaucgagaagaagaucugcaagauggagaagugcagcuccguguucaacguggucaacagcuccaagcucgaguccacgcggaucuaccagauccuggcgaucuacagcaccgucgccagcucccuggugcucguggucagccugggggccaucuccuucuggaugugcagcaacggcucccugcagugccgcaucugcaucugaggacuaguuauaagacugacuagcccgaugggccucccaacgggcccuccuccccuccuugcaccgagauuaaucaaaggcucuuuucagagccaccaaaaaaaaaaaaaaaaaaaaaaaaaaaaaaaaaaaaaaaaaaaaaaaaaaaaaaaaaaaaaaaaagaauu

SEQ ID NO: 7065 - RNA, 1187 nt, Artificial Sequence
  mRNA Design i-3 (hSL-A64-N5) comprising derived and/or modified sequence from Pf(3D7)__XP_001351122.1__HsALB_Pf-CSP(82-397) (opt1)
aggagaaagcuuaccaugaagugggugaccuucaucagccugcucuuccuguucuccagcgccuacuccgacaacgagaagcuccggaagcccaagcacaagaagcugaagcagccggccgacgggaaccccgaccccaacgccaaccccaacguggacccgaacgccaaccccaacgucgaccccaacgccaaccccaacguggacccgaacgcgaaccccaacgccaaccccaacgccaaccccaacgccaacccgaacgcgaaccccaacgccaaccccaacgccaaccccaacgccaacccgaacgccaaccccaacgcgaaccccaacgccaaccccaacgccaacccgaacgccaaccccaacgccaaccccaacgcgaaccccaacgccaacccgaacgccaaccccaacguggaccccaacgccaaccccaacgccaacccgaacgcgaaccccaacgccaaccccaacgccaacccgaacgccaaccccaacgccaaccccaacgcgaaccccaacgccaacccgaacgccaaccccaacgccaaccccaacgcgaaccccaacgccaacccgaacgccaaccccaacgccaaccccaacgccaaccccaacgcgaacccgaacgccaaccccaacaagaacaaccagggcaacggccaggggcacaacaugcccaacgaccccaaccgcaacgucgacgagaacgccaacgccaacuccgccgugaagaacaacaacaacgaggagccgagcgacaagcacaucaaggaguaccugaacaagauccagaacucccucagcacggaguggucccccugcagcgugaccugcggcaacgggauccagguccggaucaagcccggcuccgcgaacaagcccaaggacgagcuggacuacgccaacgacaucgagaagaagaucugcaagauggagaagugcagcuccguguucaacguggucaacagcuccaucgggcugaucauggugcucagcuuccuguuccugaacugaggacuaguuauaagacugacuagcccgaugggccucccaacgggcccuccuccccuccuugcaccgagauuaaucaaaggcucuuuucagagccaccaaaaaaaaaaaaaaaaaaaaaaaaaaaaaaaaaaaaaaaaaaaaaaaaaaaaaaaaaaaaaaaaagaauu

SEQ ID NO: 7066 - RNA, 539 nt, Artificial Sequence
  mRNA Design i-3 (hSL-A64-N5) comprising derived and/or modified sequence from Pf(3D7)__XP_001351122.1__HsALB_Pf-CSP(93-192) (opt1)
aggagaaagcuuaccaugaagugggugaccuucaucagccugcucuuccuguucuccagcgccuacuccaagcugaagcagccggccgacgggaaccccgaccccaacgccaaccccaacguggacccgaacgccaaccccaacgucgaccccaacgccaaccccaacguggacccgaacgcgaaccccaacgccaaccccaacgccaaccccaacgccaacccgaacgcgaaccccaacgccaaccccaacgccaaccccaacgccaacccgaacgccaaccccaacgcgaaccccaacgccaaccccaacgccaacccgaacgccaaccccaacgccaaccccaacgcgaaccccaacgccaacccgugaggacuaguuauaagacugacuagcccgaugggccucccaacgggcccuccuccccuccuugcaccgagauuaaucaaaggcucuuuucagagccaccaaaaaaaaaaaaaaaaaaaaaaaaaaaaaaaaaaaaaaaaaaaaaaaaaaaaaaaaaaaaaaaaagaauu

SEQ ID NO: 7067 - RNA, 779 nt, Artificial Sequence
  mRNA Design i-3 (hSL-A64-N5) comprising derived and/or modified sequence from Pf(3D7)__XP_001351122.1__HsALB_Pf-CSP(93-272) (opt1)
aggagaaagcuuaccaugaagugggugaccuucaucagccugcucuuccuguucuccagcgccuacuccaagcugaagcagccggccgacgggaaccccgaccccaacgccaaccccaacguggacccgaacgccaaccccaacgucgaccccaacgccaaccccaacguggacccgaacgcgaaccccaacgccaaccccaacgccaaccccaacgccaacccgaacgcgaaccccaacgccaaccccaacgccaaccccaacgccaacccgaacgccaaccccaacgcgaaccccaacgccaaccccaacgccaacccgaacgccaaccccaacgccaaccccaacgcgaaccccaacgccaacccgaacgccaaccccaacguggaccccaacgccaaccccaacgccaacccgaacgcgaaccccaacgccaaccccaacgccaacccgaacgccaaccccaacgccaaccccaacgcgaaccccaacgccaacccgaacgccaaccccaacgccaaccccaacgcgaaccccaacgccaacccgaacgccaaccccaacgccaaccccaacgccaaccccaacgcgaacccgaacgccaaccccugaggacuaguuauaagacugacuagcccgaugggccucccaacgggcccuccuccccuccuugcaccgagauuaaucaaaggcucuuuucagagccaccaaaaaaaaaaaaaaaaaaaaaaaaaaaaaaaaaaaaaaaaaaaaaaaaaaaaaaaaaaaaaaaaagaauu

SEQ ID NO: 7068 - RNA, 1154 nt, Artificial Sequence
  mRNA Design i-3 (hSL-A64-N5) comprising derived and/or modified sequence from Pf(3D7)__XP_001351122.1__HsALB_Pf-CSP(93-397) (opt1)
aggagaaagcuuaccaugaagugggugaccuucaucagccugcucuuccuguucuccagcgccuacuccaagcugaagcagccggccgacgggaaccccgaccccaacgccaaccccaacguggacccgaacgccaaccccaacgucgaccccaacgccaaccccaacguggacccgaacgcgaaccccaacgccaaccccaacgccaaccccaacgccaacccgaacgcgaaccccaacgccaaccccaacgccaaccccaacgccaacccgaacgccaaccccaacgcgaaccccaacgccaaccccaacgccaacccgaacgccaaccccaacgccaaccccaacgcgaaccccaacgccaacccgaacgccaaccccaacguggaccccaacgccaaccccaacgccaacccgaacgcgaaccccaacgccaaccccaacgccaacccgaacgccaaccccaacgccaaccccaacgcgaaccccaacgccaacccgaacgccaaccccaacgccaaccccaacgcgaaccccaacgccaacccgaacgccaaccccaacgccaaccccaacgccaaccccaacgcgaacccgaacgccaaccccaacaagaacaaccagggcaacggccaggggcacaacaugcccaacgaccccaaccgcaacgucgacgagaacgccaacgccaacuccgccgugaagaacaacaacaacgaggagccgagcgacaagcacaucaaggaguaccugaacaagauccagaacucccucagcacggaguggucccccugcagcgugaccugcggcaacgggauccagguccggaucaagcccggcuccgcgaacaagcccaaggacgagcuggacuacgccaacgacaucgagaagaagaucugcaagauggagaagugcagcuccguguucaacguggucaacagcuccaucgggcugaucauggugcucagcuuccuguuccugaacugaggacuaguuauaagacugacuagcccgaugggccucccaacgggcccuccuccccuccuugcaccgagauuaaucaaaggcucuuuucagagccaccaaaaaaaaaaaaaaaaaaaaaaaaaaaaaaaaaaaaaaaaaaaaaaaaaaaaaaaaaaaaaaaaagaauu

SEQ ID NO: 7069 - RNA, 524 nt, Artificial Sequence
  mRNA Design i-3 (hSL-A64-N5) comprising derived and/or modified sequence from Pf(3D7)__XP_001351122.1__HsALB_Pf-CSP(98-192) (opt1)
aggagaaagcuuaccaugaagugggugaccuucaucagccugcucuuccuguucuccagcgccuacuccgccgacgggaaccccgaccccaacgccaaccccaacguggacccgaacgccaaccccaacgucgaccccaacgccaaccccaacguggacccgaacgcgaaccccaacgccaaccccaacgccaaccccaacgccaacccgaacgcgaaccccaacgccaaccccaacgccaaccccaacgccaacccgaacgccaaccccaacgcgaaccccaacgccaaccccaacgccaacccgaacgccaaccccaacgccaaccccaacgcgaaccccaacgccaacccgugaggacuaguuauaagacugacuagcccgaugggccucccaacgggcccuccuccccuccuugcaccgagauuaaucaaaggcucuuuucagagccaccaaaaaaaaaaaaaaaaaaaaaaaaaaaaaaaaaaaaaaaaaaaaaaaaaaaaaaaaaaaaaaaaagaauu

SEQ ID NO: 7070 - RNA, 764 nt, Artificial Sequence
  mRNA Design i-3 (hSL-A64-N5) comprising derived and/or modified sequence from Pf(3D7)__XP_001351122.1__HsALB_Pf-CSP(98-272) (opt1)
aggagaaagcuuaccaugaagugggugaccuucaucagccugcucuuccuguucuccagcgccuacuccgccgacgggaaccccgaccccaacgccaaccccaacguggacccgaacgccaaccccaacgucgaccccaacgccaaccccaacguggacccgaacgcgaaccccaacgccaaccccaacgccaaccccaacgccaacccgaacgcgaaccccaacgccaaccccaacgccaaccccaacgccaacccgaacgccaaccccaacgcgaaccccaacgccaaccccaacgccaacccgaacgccaaccccaacgccaaccccaacgcgaaccccaacgccaacccgaacgccaaccccaacguggaccccaacgccaaccccaacgccaacccgaacgcgaaccccaacgccaaccccaacgccaacccgaacgccaaccccaacgccaaccccaacgcgaaccccaacgccaacccgaacgccaaccccaacgccaaccccaacgcgaaccccaacgccaacccgaacgccaaccccaacgccaaccccaacgccaaccccaacgcgaacccgaacgccaaccccugaggacuaguuauaagacugacuagcccgaugggccucccaacgggcccuccuccccuccuugcaccgagauuaaucaaaggcucuuuucagagccaccaaaaaaaaaaaaaaaaaaaaaaaaaaaaaaaaaaaaaaaaaaaaaaaaaaaaaaaaaaaaaaaaagaauu

SEQ ID NO: 7071 - RNA, 1070 nt, Artificial Sequence
  mRNA Design i-3 (hSL-A64-N5) comprising derived and/or modified sequence from Pf(3D7)__XP_001351122.1__HsALB_Pf-CSP(98-374) (opt1)
aggagaaagcuuaccaugaagugggugaccuucaucagccugcucuuccuguucuccagcgccuacuccgccgacgggaaccccgaccccaacgccaaccccaacguggacccgaacgccaaccccaacgucgaccccaacgccaaccccaacguggacccgaacgcgaaccccaacgccaaccccaacgccaaccccaacgccaacccgaacgcgaaccccaacgccaaccccaacgccaaccccaacgccaacccgaacgccaaccccaacgcgaaccccaacgccaaccccaacgccaacccgaacgccaaccccaacgccaaccccaacgcgaaccccaacgccaacccgaacgccaaccccaacguggaccccaacgccaaccccaacgccaacccgaacgcgaaccccaacgccaaccccaacgccaacccgaacgccaaccccaacgccaaccccaacgcgaaccccaacgccaacccgaacgccaaccccaacgccaaccccaacgcgaaccccaacgccaacccgaacgccaaccccaacgccaaccccaacgccaaccccaacgcgaacccgaacgccaaccccaacaagaacaaccagggcaacggccaggggcacaacaugcccaacgaccccaaccgcaacgucgacgagaacgccaacgccaacuccgccgugaagaacaacaacaacgaggagccgagcgacaagcacaucaaggaguaccugaacaagauccagaacucccucagcacggaguggucccccugcagcgugaccugcggcaacgggauccagguccggaucaagcccggcuccgcgaacaagcccaaggacgagcuggacuacgccaacgacaucgagaagaagaucugcaagauggagaagugcugaggacuaguuauaagacugacuagcccgaugggccucccaacgggcccuccuccccuccuugcaccgagauuaaucaaaggcucuuuucagagccaccaaaaaaaaaaaaaaaaaaaaaaaaaaaaaaaaaaaaaaaaaaaaaaaaaaaaaaaaaaaaaaaaagaauu

SEQ ID NO: 7072 - RNA, 1139 nt, Artificial Sequence
  mRNA Design i-3 (hSL-A64-N5) comprising derived and/or modified sequence from Pf(3D7)__XP_001351122.1__HsALB_Pf-CSP(98-397) (opt1)
aggagaaagcuuaccaugaagugggugaccuucaucagccugcucuuccuguucuccagcgccuacuccgccgacgggaaccccgaccccaacgccaaccccaacguggacccgaacgccaaccccaacgucgaccccaacgccaaccccaacguggacccgaacgcgaaccccaacgccaaccccaacgccaaccccaacgccaacccgaacgcgaaccccaacgccaaccccaacgccaaccccaacgccaacccgaacgccaaccccaacgcgaaccccaacgccaaccccaacgccaacccgaacgccaaccccaacgccaaccccaacgcgaaccccaacgccaacccgaacgccaaccccaacguggaccccaacgccaaccccaacgccaacccgaacgcgaaccccaacgccaaccccaacgccaacccgaacgccaaccccaacgccaaccccaacgcgaaccccaacgccaacccgaacgccaaccccaacgccaaccccaacgcgaaccccaacgccaacccgaacgccaaccccaacgccaaccccaacgccaaccccaacgcgaacccgaacgccaaccccaacaagaacaaccagggcaacggccaggggcacaacaugcccaacgaccccaaccgcaacgucgacgagaacgccaacgccaacuccgccgugaagaacaacaacaacgaggagccgagcgacaagcacaucaaggaguaccugaacaagauccagaacucccucagcacggaguggucccccugcagcgugaccugcggcaacgggauccagguccggaucaagcccggcuccgcgaacaagcccaaggacgagcuggacuacgccaacgacaucgagaagaagaucugcaagauggagaagugcagcuccguguucaacguggucaacagcuccaucgggcugaucauggugcucagcuuccuguuccugaacugaggacuaguuauaagacugacuagcccgaugggccucccaacgggcccuccuccccuccuugcaccgagauuaaucaaaggcucuuuucagagccaccaaaaaaaaaaaaaaaaaaaaaaaaaaaaaaaaaaaaaaaaaaaaaaaaaaaaaaaaaaaaaaaaagaauu

SEQ ID NO: 7073 - RNA, 1466 nt, Artificial Sequence
  mRNA Design i-3 (hSL-A64-N5) comprising derived and/or modified sequence from Pf(3D7)__XP_001351122.1__HsALB_Pf-CSP(199-377)_L(PVTN)_HBsAg (opt1)
aggagaaagcuuaccaugaaguggguaaccuuuauuucccuucuuuuucucuuuagcucggcuuauuccgaccccaacgccaaccccaacgccaacccgaacgcgaaccccaacgccaaccccaacgccaacccgaacgccaaccccaacgccaaccccaacgcgaaccccaacgccaacccgaacgccaaccccaacgccaaccccaacgcgaaccccaacgccaacccgaacgccaaccccaacgccaaccccaacgccaaccccaacgcgaacccgaacgccaaccccaacaagaacaaccagggcaacggccaggggcacaacaugcccaacgaccccaaccgcaacgucgacgagaacgccaacgccaacuccgccgugaagaacaacaacaacgaggagccgagcgacaagcacaucaaggaguaccugaacaagauccagaacucccucagcacggaguggucccccugcagcgugaccugcggcaacgggauccagguccggaucaagcccggcuccgcgaacaagcccaaggacgagcuggacuacgccaacgacaucgagaagaagaucugcaagauggagaagugcagcuccgugccggugacgaacauggagaacaucaccagcggcuuccuggggccccuccuggugcugcaggccggcuucuuccuccugacccgcauccugaccaucccgcagucccucgacagcugguggaccucccugaacuuccucgggggcagccccgucugccuggggcagaacucccagagccccaccuccaaccacagccccaccuccugcccgcccaucugccccggcuaccgguggaugugccugcgccgguucaucaucuuccuguucauccuccugcugugccucaucuuccugcuggugcuccuggacuaccagggcaugcugcccgugugcccgcucauccccgggagcacgaccaccaacaccggccccugcaagacgugcaccacccccgcccaggggaacuccauguucccgagcugcugcugcaccaagcccacggacggcaacugcacgugcauccccauccccuccagcugggcguucgccaaguaccugugggagugggccuccguccgcuucagcuggcugucccuccuggugccguucgugcagugguucgucgggcugagccccaccguguggcucuccgccaucuggaugaugugguacuggggccccagccuguacagcaucgugucccccuucaucccgcugcuccccaucuucuucugccugugggucuacaucugaggacuaguuauaagacugacuagcccgaugggccucccaacgggcccuccuccccuccuugcaccgagauuaaucaaaggcucuuuucagagccaccaaaaaaaaaaaaaaaaaaaaaaaaaaaaaaaaaaaaaaaaaaaaaaaaaaaaaaaaaaaaaaaaagaauu

SEQ ID NO: 7074 - RNA, 1376 nt, Artificial Sequence; identical to SEQ ID NO: 7044
  mRNA Design i-3 (hSL-A64-N5) comprising derived and/or modified sequence from Pf(3D7)__XP_001351122.1__Pf-CSP (opt1)

SEQ ID NO: 7075 - RNA, 1307 nt, Artificial Sequence; identical to SEQ ID NO: 7045
  mRNA Design i-3 (hSL-A64-N5) comprising derived and/or modified sequence from Pf(3D7)__XP_001351122.1__Pf-CSP(1-374) (opt1)

SEQ ID NO: 7076 - RNA, 1160 nt, Artificial Sequence; identical to SEQ ID NO: 7046
  mRNA Design i-3 (hSL-A64-N5) comprising derived and/or modified sequence from Pf(3D7)__XP_001351122.1__Pf-CSP(1-325) (opt1)

SEQ ID NO: 7077 - RNA, 1376 nt, Artificial Sequence
  mRNA Design i-3 (hSL-A64-N5) comprising derived and/or modified sequence from Pf(3D7)__XP_001351122.1__HsALB_Pf-CSP(19-397) (opt1)
aggagaaagcuuaccaugaagugggugaccuucaucagccuccuguuccuguucuccagcgccuacucccuguuccaggaguaccagugcuacggcagcuccagcaacacccgcguccucaacgagcugaacuacgacaacgccgggacgaaccuguacaacgagcucgagaugaacuacuacggcaagcaggagaacugguacucccugaagaagaacagccggucccugggggagaacgacgacggcaacaacgaggacaacgagaagcuccgcaagcccaagcacaagaagcugaagcagccggcggacgggaaccccgaccccaacgccaaccccaacguggacccgaacgccaaccccaacguggaccccaacgccaaccccaacgucgacccgaacgccaaccccaacgcgaaccccaacgccaaccccaacgccaacccgaacgccaaccccaacgcgaaccccaacgccaaccccaacgccaacccgaacgccaaccccaacgccaaccccaacgcgaaccccaacgccaacccgaacgccaaccccaacgccaaccccaacgccaaccccaacgcgaacccgaacgccaaccccaacguggaccccaacgccaaccccaacgccaacccgaacgccaaccccaacgcgaaccccaacgccaacccgaacgccaaccccaacgccaaccccaacgccaaccccaacgcgaacccgaacgccaaccccaacgccaaccccaacgccaaccccaacgcgaacccgaacgccaaccccaacgccaaccccaacgccaaccccaacgccaacccgaacgcgaaccccaacaagaacaaccagggcaacggccaggggcacaacaugcccaacgaccccaaccggaacguggacgagaacgccaacgccaacagcgccgucaagaacaacaacaacgaggagccguccgacaagcacaucaaggaguaccugaacaagauccagaacagccucuccaccgaguggagccccugcuccgugaccugcggcaacgggauccaggugcgcaucaagcccggcagcgccaacaagcccaaggacgagcuggacuacgcgaacgacaucgagaagaagaucugcaagauggagaagugcuccagcgucuucaacguggugaacuccagcaucgggcugaucaugguccucagcuuccuguuccugaacugaggacuaguuauaagacugacuagcccgaugggccucccaacgggcccuccuccccuccuugcaccgagauuaaucaaaggcucuuuucagagccaccaaaaaaaaaaaaaaaaaaaaaaaaaaaaaaaaaaaaaaaaaaaaaaaaaaaaaaaaaaaaaaaaagaauu

SEQ ID NO: 7078 - RNA, 1394 nt, Artificial Sequence
  mRNA Design i-3 (hSL-A64-N5) comprising derived and/or modified sequence from Pf(3D7)__XP_001351122.1__HsIns-iso1_Pf-CSP(19-397) (opt1)
aggagaaagcuuaccauggcccuguggaugcgccuccugccccugcucgcccugcuggcgcucuggggcccggaccccgccgccgcccuguuccaggaguaccagugcuacgggagcuccagcaacacccgggugcugaacgagcucaacuacgacaacgccggcaccaaccuguacaacgagcuggagaugaacuacuacgggaagcaggagaacugguacucccucaagaagaacagccgcucccugggcgagaacgacgacgggaacaacgaggacaacgagaagcugcggaagcccaagcacaagaagcucaagcagcccgcggacggcaacccggaccccaacgccaaccccaacgucgaccccaacgccaacccgaacguggaccccaacgccaaccccaacguggaccccaacgcgaacccgaacgccaaccccaacgccaaccccaacgccaaccccaacgccaacccgaacgcgaaccccaacgccaaccccaacgccaaccccaacgccaacccgaacgccaaccccaacgcgaaccccaacgccaaccccaacgccaacccgaacgccaaccccaacgccaaccccaacgcgaaccccaacgccaacccgaacgucgaccccaacgccaaccccaacgccaacccgaacgccaaccccaacgcgaaccccaacgccaaccccaacgccaacccgaacgccaaccccaacgcgaaccccaacgccaaccccaacgccaacccgaacgccaaccccaacgccaaccccaacgcgaaccccaacgccaacccgaacgccaaccccaacgccaaccccaacgccaaccccaacgcgaacccgaacaagaacaaccagggcaacgggcagggccacaacaugcccaacgaccccaaccgcaacguggacgagaacgccaacgccaacagcgccgugaagaacaacaacaacgaggagcccuccgacaagcacaucaaggaguaccugaacaagauccagaacagccuguccacggaguggagcccgugcuccgugaccugcgggaacggcauccagguccggaucaagcccgggagcgccaacaagcccaaggacgagcucgacuacgcgaacgacaucgagaagaagaucugcaagauggagaagugcuccagcguguucaacgucgugaacuccagcaucggccugaucauggugcuguccuuccucuuccugaacugaggacuaguuauaagacugacuagcccgaugggccucccaacgggcccuccuccccuccuugcaccgagauuaaucaaaggcucuuuucagagccaccaaaaaaaaaaaaaaaaaaaaaaaaaaaaaaaaaaaaaaaaaaaaaaaaaaaaaaaaaaaaaaaaagaauu

SEQ ID NO: 7079 - RNA, 1373 nt, Artificial Sequence
  mRNA Design i-3 (hSL-A64-N5) comprising derived and/or modified sequence from Pf(3D7)__XP_001351122.1__HsSPARC_Pf-CSP(19-397) (opt1)
aggagaaagcuuaccaugcgcgccuggaucuucuuccugcucugccuggccggccgggcgcuggcccucuuccaggaguaccagugcuacgggagcuccagcaacacccgcgugcugaacgagcugaacuacgacaacgccggcaccaaccucuacaacgagcuggagaugaacuacuacgggaagcaggagaacugguacucccugaagaagaacagccggucccucggcgagaacgacgacgggaacaacgaggacaacgagaagcugcgcaagcccaagcacaagaagcugaagcagccggccgacggcaaccccgaccccaacgccaaccccaacgucgacccgaacgcgaaccccaacguggaccccaacgccaaccccaacguggacccgaacgccaaccccaacgccaaccccaacgcgaaccccaacgccaacccgaacgccaaccccaacgccaaccccaacgccaaccccaacgcgaacccgaacgccaaccccaacgccaaccccaacgccaaccccaacgccaacccgaacgcgaaccccaacgccaaccccaacgccaaccccaacgccaacccgaacgccaaccccaacgucgaccccaacgcgaaccccaacgccaacccgaacgccaaccccaacgccaaccccaacgccaacccgaacgcgaaccccaacgccaaccccaacgccaaccccaacgccaacccgaacgcgaaccccaacgccaaccccaacgccaaccccaacgccaacccgaacgccaaccccaacgcgaaccccaacgccaaccccaacgccaacccgaacgccaaccccaacaagaacaaccagggcaacgggcagggccacaacaugcccaacgaccccaaccggaacguggacgagaacgccaacgcgaacagcgccgugaagaacaacaacaacgaggagccguccgacaagcacaucaaggaguaccucaacaagauccagaacagccuguccacggaguggagccccugcuccgugaccugcgggaacggcauccagguccgcaucaagcccgggagcgccaacaagcccaaggacgagcuggacuacgccaacgacaucgagaagaagaucugcaagauggagaagugcuccagcguguucaacgucgugaacuccagcaucggccucaucauggugcuguccuuccuguuccucaacugaggacuaguuauaagacugacuagcccgaugggccucccaacgggcccuccuccccuccuugcaccgagauuaaucaaaggcucuuuucagagccaccaaaaaaaaaaaaaaaaaaaaaaaaaaaaaaaaaaaaaaaaaaaaaaaaaaaaaaaaaaaaaaaaagaauu

SEQ ID NO: 7080 - RNA, 1376 nt, Artificial Sequence
  mRNA Design i-3 (hSL-A64-N5) comprising derived and/or modified sequence from Pf(3D7)__XP_001351122.1__IgE_Pf-CSP(19-397) (opt1)
aggagaaagcuuaccauggacuggaccuggauccuguuccucguggccgccgcgacccgcguccacagccuguuccaggaguaccagugcuacggcuccagcuccaacacgcgggugcugaacgagcucaacuacgacaacgccgggaccaaccuguacaacgagcuggagaugaacuacuacggcaagcaggagaacugguacagccucaagaagaacucccgcagccugggggagaacgacgacggcaacaacgaggacaacgagaagcugcggaagcccaagcacaagaagcucaagcagccggccgacgggaaccccgaccccaacgccaaccccaacguggacccgaacgccaaccccaacgucgaccccaacgcgaaccccaacguggacccgaacgccaaccccaacgccaaccccaacgccaaccccaacgcgaacccgaacgccaaccccaacgccaaccccaacgccaaccccaacgccaacccgaacgcgaaccccaacgccaaccccaacgccaaccccaacgccaacccgaacgccaaccccaacgcgaaccccaacgccaaccccaacgccaacccgaacgccaaccccaacguggaccccaacgccaaccccaacgcgaacccgaacgccaaccccaacgccaaccccaacgccaacccgaacgccaaccccaacgcgaaccccaacgccaaccccaacgccaacccgaacgccaaccccaacgcgaaccccaacgccaaccccaacgccaacccgaacgccaaccccaacgccaaccccaacgcgaaccccaacgccaacccgaacgccaaccccaacaagaacaaccagggcaacggccaggggcacaacaugcccaacgaccccaaccgcaacgucgacgagaacgccaacgccaacuccgcggugaagaacaacaacaacgaggagccgagcgacaagcacaucaaggaguaccugaacaagauccagaacucccugagcaccgaguggucccccugcagcgugaccugcggcaacgggauccagguccggaucaagcccggcuccgccaacaagcccaaggacgagcucgacuacgccaacgacaucgagaagaagaucugcaagauggagaagugcagcuccguguucaacguggucaacagcuccaucgggcugaucauggugcugagcuuccucuuccugaacugaggacuaguuauaagacugacuagcccgaugggccucccaacgggcccuccuccccuccuugcaccgagauuaaucaaaggcucuuuucagagccaccaaaaaaaaaaaaaaaaaaaaaaaaaaaaaaaaaaaaaaaaaaaaaaaaaaaaaaaaaaaaaaaaagaauu

SEQ ID NO: 7081 - RNA, 1541 nt, Artificial Sequence
  mRNA Design i-3 (hSL-A64-N5) comprising derived and/or modified sequence from Pf(3D7)__XP_001351122.1__Pf-CSP_L(G4SG4)_TM domain HA (opt1)
aggagaaagcuuaccaugaugcgcaagcuggccauccucagcguguccagcuuccuguucgucgaggcccuguuccaggaguaccagugcuacggcuccagcuccaacacccgggugcucaacgagcugaacuacgacaacgcggggaccaaccuguacaacgagcucgagaugaacuacuacggcaagcaggagaacugguacagccugaagaagaacucccgcagccugggggagaacgacgacggcaacaacgaggacaacgagaagcuccggaagcccaagcacaagaagcugaagcagccggccgacgggaaccccgaccccaacgccaaccccaacguggacccgaacgccaaccccaacgucgaccccaacgccaaccccaacguggacccgaacgcgaaccccaacgccaaccccaacgccaaccccaacgccaacccgaacgcgaaccccaacgccaaccccaacgccaaccccaacgccaacccgaacgccaaccccaacgcgaaccccaacgccaaccccaacgccaacccgaacgccaaccccaacgccaaccccaacgcgaaccccaacgccaacccgaacgccaaccccaacguggaccccaacgccaaccccaacgccaacccgaacgcgaaccccaacgccaaccccaacgccaacccgaacgccaaccccaacgccaaccccaacgcgaaccccaacgccaacccgaacgccaaccccaacgccaaccccaacgcgaaccccaacgccaacccgaacgccaaccccaacgccaaccccaacgccaaccccaacgcgaacccgaacgccaaccccaacaagaacaaccagggcaacggccaggggcacaacaugcccaacgaccccaaccgcaacgucgacgagaacgccaacgccaacuccgccgugaagaacaacaacaacgaggagccgagcgacaagcacaucaaggaguaccugaacaagauccagaacucccucagcacggaguggucccccugcagcgugaccugcggcaacgggauccagguccggaucaagcccggcuccgcgaacaagcccaaggacgagcuggacuacgccaacgacaucgagaagaagaucugcaagauggagaagugcagcuccguguucaacguggucaacagcuccaucgggcugaucauggugcucagcuuccuguuccugaacggcggcgggggcagcgggggcggcgggaagcucgaguccacccgcaucuaccagauccuggccaucuacagcaccguggccuccagccugguccucguggugucccugggcgccaucagcuucuggaugugcuccaacgggagccugcagugccggaucugcaucugaggacuaguuauaagacugacuagcccgaugggccucccaacgggcccuccuccccuccuugcaccgagauuaaucaaaggcucuuuucagagccaccaaaaaaaaaaaaaaaaaaaaaaaaaaaaaaaaaaaaaaaaaaaaaaaaaaaaaaaaaaaaaaaaagaauu

SEQ ID NO: 7082 - RNA, 1415 nt, Artificial Sequence
  mRNA Design i-3 (hSL-A64-N5) comprising derived and/or modified sequence from Pf(3D7)__XP_001351122.1__Pf-CSP(199-377)_L(PVTN)_HBsAg (opt1)
aggagaaagcuuaccauggaccccaacgccaacccgaacgccaaccccaacgcgaaccccaacgccaaccccaacgccaacccgaacgccaaccccaacgccaaccccaacgcgaaccccaacgccaacccgaacgccaaccccaacgccaaccccaacgcgaaccccaacgccaacccgaacgccaaccccaacgccaaccccaacgccaaccccaacgcgaacccgaacgccaaccccaacaagaacaaccagggcaacgggcagggccacaacaugcccaacgaccccaaccgcaacguggacgagaacgccaacgccaacagcgccgucaagaacaacaacaacgaggagccguccgacaagcacaucaaggaguaccugaacaagauccagaacagccucuccaccgaguggagccccugcuccgugaccugcgggaacggcauccaggugcggaucaagcccgggagcgcgaacaagcccaaggacgagcuggacuacgccaacgacaucgagaagaagaucugcaagauggagaagugcuccagcgucccggugacgaacauggagaacaucaccuccggcuuccugggcccccuccuggugcugcaggccggguucuuccuccugacccgcauccugaccaucccccagagccucgacuccugguggacgagccugaacuuccugggcgggucccccgucugccucggccagaacagccaguccccgaccagcaaccacucccccaccagcugcccgcccaucugccccggguaccgguggaugugccugcgccgguucaucaucuuccuguucauccuccugcugugccucaucuuccugcuggugcuccuggacuaccagggcaugcugcccgugugcccccucaucccgggcuccaccacgaccaacaccgggcccugcaagaccugcacgacccccgcccagggcaacagcauguuccccagcugcugcugcaccaagccgaccgacgggaacugcacgugcauccccauccccuccagcugggccuucgcgaaguaccugugggagugggccuccguccgcuucagcuggcugucccuccuggugcccuucgugcagugguucgucggccugagcccgaccguguggcucuccgccaucuggaugaugugguacuggggccccagccuguacuccaucgugagccccuucaucccccugcucccgaucuucuucugccugugggucuacaucugaggacuaguuauaagacugacuagcccgaugggccucccaacgggcccuccuccccuccuugcaccgagauuaaucaaaggcucuuuucagagccaccaaaaaaaaaaaaaaaaaaaaaaaaaaaaaaaaaaaaaaaaaaaaaaaaaaaaaaaaaaaaaaaaagaauu

SEQ ID NO: 7083 - RNA, 1457 nt, Artificial Sequence
  mRNA Design i-3 (hSL-A64-N5) comprising derived and/or modified sequence from Pf(3D7)__XP_001351122.1__Pf-CSP(199-387)_L(PVTN)_HBsAg (opt1)
aggagaaagcuuaccaugauggcccccgacccgaacgccaaccccaacgcgaaccccaacgccaaccccaacgccaacccgaacgccaaccccaacgccaaccccaacgcgaaccccaacgccaacccgaacgccaaccccaacgccaaccccaacgcgaaccccaacgccaacccgaacgccaaccccaacgccaaccccaacgccaaccccaacgcgaacccgaacgccaaccccaacgccaaccccaacaagaacaaccagggcaacgggcagggccacaacaugcccaacgacccgaaccgcaacguggacgagaacgccaacgccaacagcgcggucaagaacaacaacaacgaggagcccuccgacaagcacaucaaggaguaccugaacaagauccagaacagccucuccaccgaguggagccccugcuccgugaccugcgggaacggcauccaggugcggaucaagcccgggagcgccaacaagccgaaggacgagcuggacuacgccaacgacaucgagaagaagaucugcaagauggagaagugcuccagcgucuucaacguggugaacuccagcaucggccugggccccgucacgaacauggagaacaucaccuccggguuccucggcccccugcuggugcuccaggccggguucuuccugcugacccgcauccucaccaucccccagagccuggacuccugguggacgagccugaacuuccucggcggguccccggugugccugggccagaacagccagucccccaccagcaaccacucccccaccagcugcccgcccaucugccccggcuaccgguggaugugccugcgccgguucaucaucuuccucuucauccugcugcucugccugaucuuccugcucguccugcuggacuaccaggggaugcuccccgugugcccgcugauccccggcagcaccacgaccaacaccgggcccugcaagaccugcacgacccccgcccagggcaacuccauguucccgagcugcugcugcaccaagcccaccgacggcaacugcacgugcauccccauccccuccagcugggcguucgccaaguaccugugggagugggccuccgugcgcuucagcuggcucucccugcuggucccguucgugcagugguucguggggcucagccccaccgucuggcuguccgccaucuggaugaugugguacuggggccccagccuguacuccaucgugagccccuucaucccgcuccugcccaucuucuucugccuguggguguacaucugaggacuaguuauaagacugacuagcccgaugggccucccaacgggcccuccuccccuccuugcaccgagauuaaucaaaggcucuuuucagagccaccaaaaaaaaaaaaaaaaaaaaaaaaaaaaaaaaaaaaaaaaaaaaaaaaaaaaaaaaaaaaaaaaagaauu

SEQ ID NO: 7084 - RNA, 641 nt, Artificial Sequence
  mRNA Design i-3 (hSL-A64-N5) comprising derived and/or modified sequence from Pf(3D7)__XP_001351122.1__HsALB_Pf-CSP(19-152) (opt1)
aggagaaagcuuaccaugaagugggugaccuucaucagccuccuguuccuguucuccagcgccuacucccuguuccaggaguaccagugcuacggcagcuccagcaacacccgcguccucaacgagcugaacuacgacaacgccgggacgaaccuguacaacgagcucgagaugaacuacuacggcaagcaggagaacugguacucccugaagaagaacagccggucccugggggagaacgacgacggcaacaacgaggacaacgagaagcuccgcaagcccaagcacaagaagcugaagcagccggcggacgggaaccccgaccccaacgccaaccccaacguggacccgaacgccaaccccaacguggaccccaacgccaaccccaacgucgacccgaacgccaaccccaacgcgaaccccaacgccaaccccaacgccaacccgaacgccaaccccaacgcgaaccccugaggacuaguuauaagacugacuagcccgaugggccucccaacgggcccuccuccccuccuugcaccgagauuaaucaaaggcucuuuucagagccaccaaaaaaaaaaaaaaaaaaaaaaaaaaaaaaaaaaaaaaaaaaaaaaaaaaaaaaaaaaaaaaaaagaauu

SEQ ID NO: 7085 - RNA, 761 nt, Artificial Sequence
  mRNA Design i-3 (hSL-A64-N5) comprising derived and/or modified sequence from Pf(3D7)__XP_001351122.1__HsALB_Pf-CSP(19-192) (opt1)
aggagaaagcuuaccaugaagugggugaccuucaucagccuccuguuccuguucuccagcgccuacucccuguuccaggaguaccagugcuacggcagcuccagcaacacccgcguccucaacgagcugaacuacgacaacgccgggacgaaccuguacaacgagcucgagaugaacuacuacggcaagcaggagaacugguacucccugaagaagaacagccggucccugggggagaacgacgacggcaacaacgaggacaacgagaagcuccgcaagcccaagcacaagaagcugaagcagccggcggacgggaaccccgaccccaacgccaaccccaacguggacccgaacgccaaccccaacguggaccccaacgccaaccccaacgucgacccgaacgccaaccccaacgcgaaccccaacgccaaccccaacgccaacccgaacgccaaccccaacgcgaaccccaacgccaaccccaacgccaacccgaacgccaaccccaacgccaaccccaacgcgaaccccaacgccaacccgaacgccaaccccaacgccaaccccaacgccaaccccaacgcgaacccgugaggacuaguuauaagacugacuagcccgaugggccucccaacgggcccuccuccccuccuugcaccgagauuaaucaaaggcucuuuucagagccaccaaaaaaaaaaaaaaaaaaaaaaaaaaaaaaaaaaaaaaaaaaaaaaaaaaaaaaaaaaaaaaaaagaauu

SEQ ID NO: 7086 - RNA, 1001 nt, Artificial Sequence
  mRNA Design i-3 (hSL-A64-N5) comprising derived and/or modified sequence from Pf(3D7)__XP_001351122.1__HsALB_Pf-CSP(19-272) (opt1)
aggagaaagcuuaccaugaagugggugaccuucaucagccuccuguuccuguucuccagcgccuacucccuguuccaggaguaccagugcuacggcagcuccagcaacacccgcguccucaacgagcugaacuacgacaacgccgggacgaaccuguacaacgagcucgagaugaacuacuacggcaagcaggagaacugguacucccugaagaagaacagccggucccugggggagaacgacgacggcaacaacgaggacaacgagaagcuccgcaagcccaagcacaagaagcugaagcagccggcggacgggaaccccgaccccaacgccaaccccaacguggacccgaacgccaaccccaacguggaccccaacgccaaccccaacgucgacccgaacgccaaccccaacgcgaaccccaacgccaaccccaacgccaacccgaacgccaaccccaacgcgaaccccaacgccaaccccaacgccaacccgaacgccaaccccaacgccaaccccaacgcgaaccccaacgccaacccgaacgccaaccccaacgccaaccccaacgccaaccccaacgcgaacccgaacgccaaccccaacguggaccccaacgccaaccccaacgccaacccgaacgccaaccccaacgcgaaccccaacgccaacccgaacgccaaccccaacgccaaccccaacgccaaccccaacgcgaacccgaacgccaaccccaacgccaaccccaacgccaaccccaacgcgaacccgaacgccaaccccaacgccaaccccaacgccaaccccaacgccaacccgaacgcgaaccccugaggacuaguuauaagacugacuagcccgaugggccucccaacgggcccuccuccccuccuugcaccgagauuaaucaaaggcucuuuucagagccaccaaaaaaaaaaaaaaaaaaaaaaaaaaaaaaaaaaaaaaaaaaaaaaaaaaaaaaaaaaaaaaaaagaauu

SEQ ID NO: 7087 - RNA, 1163 nt, Artificial Sequence
  mRNA Design i-3 (hSL-A64-N5) comprising derived and/or modified sequence from Pf(3D7)__XP_001351122.1__HsALB_Pf-CSP(19-272)_L(AAY)_Pf-CSP(310-3 27)_L(AAY)_Pf-CSP(346-375) (opt1)
aggagaaagcuuaccaugaagugggugaccuucaucagccuccuguuccuguucuccagcgccuacucccuguuccaggaguaccagugcuacggcagcuccagcaacacccgcguccucaacgagcugaacuacgacaacgccgggacgaaccuguacaacgagcucgagaugaacuacuacggcaagcaggagaacugguacucccugaagaagaacagccggucccugggggagaacgacgacggcaacaacgaggacaacgagaagcuccgcaagcccaagcacaagaagcugaagcagccggcggacgggaaccccgaccccaacgccaaccccaacguggacccgaacgccaaccccaacguggaccccaacgccaaccccaacgucgacccgaacgccaaccccaacgcgaaccccaacgccaaccccaacgccaacccgaacgccaaccccaacgcgaaccccaacgccaaccccaacgccaacccgaacgccaaccccaacgccaaccccaacgcgaaccccaacgccaacccgaacgccaaccccaacgccaaccccaacgccaaccccaacgcgaacccgaacgccaaccccaacguggaccccaacgccaaccccaacgccaacccgaacgccaaccccaacgcgaaccccaacgccaacccgaacgccaaccccaacgccaaccccaacgccaaccccaacgcgaacccgaacgccaaccccaacgccaaccccaacgccaaccccaacgcgaacccgaacgccaaccccaacgccaaccccaacgccaaccccaacgccaacccgaacgcgaaccccgccgccuacgagcccagcgacaagcacaucaaggaguaccugaacaagauccagaacucccucgccgccuacaucaagcccggcagcgcgaacaagccgaaggacgagcuggacuacgccaacgacaucgagaagaagaucugcaagauggagaagugcuccugaggacuaguuauaagacugacuagcccgaugggccucccaacgggcccuccuccccuccuugcaccgagauuaaucaaaggcucuuuucagagccaccaaaaaaaaaaaaaaaaaaaaaaaaaaaaaaaaaaaaaaaaaaaaaaaaaaaaaaaaaaaaaaaaagaauu

SEQ ID NO: 7088 - RNA, 1124 nt, Artificial Sequence
  mRNA Design i-3 (hSL-A64-N5) comprising derived and/or modified sequence from Pf(3D7)__XP_001351122.1__HsALB_Pf-CSP(19-272)_L(AAY)_Pf-CSP(346-3 65)_L(AAY)_P2 (opt1)
aggagaaagcuuaccaugaagugggugaccuucaucagccuccuguuccuguucuccagcgccuacucccuguuccaggaguaccagugcuacggcagcuccagcaacacccgcguccucaacgagcugaacuacgacaacgccgggacgaaccuguacaacgagcucgagaugaacuacuacggcaagcaggagaacugguacucccugaagaagaacagccggucccugggggagaacgacgacggcaacaacgaggacaacgagaagcuccgcaagcccaagcacaagaagcugaagcagccggcggacgggaaccccgaccccaacgccaaccccaacguggacccgaacgccaaccccaacguggaccccaacgccaaccccaacgucgacccgaacgccaaccccaacgcgaaccccaacgccaaccccaacgccaacccgaacgccaaccccaacgcgaaccccaacgccaaccccaacgccaacccgaacgccaaccccaacgccaaccccaacgcgaaccccaacgccaacccgaacgccaaccccaacgccaaccccaacgccaaccccaacgcgaacccgaacgccaaccccaacguggaccccaacgccaaccccaacgccaacccgaacgccaaccccaacgcgaaccccaacgccaacccgaacgccaaccccaacgccaaccccaacgccaaccccaacgcgaacccgaacgccaaccccaacgccaaccccaacgccaaccccaacgcgaacccgaacgccaaccccaacgccaaccccaacgccaaccccaacgccaacccgaacgcgaaccccgccgccuacaucaagcccggcagcgccaacaagcccaaggacgagcuggacuacgccaacgacaucgaggcggccuaccaguacaucaaggccaacuccaaguucaucggcaucaccgagcucugaggacuaguuauaagacugacuagcccgaugggccucccaacgggcccuccuccccuccuugcaccgagauuaaucaaaggcucuuuucagagccaccaaaaaaaaaaaaaaaaaaaaaaaaaaaaaaaaaaaaaaaaaaaaaaaaaaaaaaaaaaaaaaaaagaauu

SEQ ID NO: 7089 - RNA, 1118 nt, Artificial Sequence
  mRNA Design i-3 (hSL-A64-N5) comprising derived and/or modified sequence from Pf(3D7)__XP_001351122.1__HsALB_Pf-CSP(19-272)_L(AAY)_Pf-CSP(346-3 65)_L(AAY)_PADRE (opt1)
aggagaaagcuuaccaugaagugggugaccuucaucagccuccuguuccuguucuccagcgccuacucccuguuccaggaguaccagugcuacggcagcuccagcaacacccgcguccucaacgagcugaacuacgacaacgccgggacgaaccuguacaacgagcucgagaugaacuacuacggcaagcaggagaacugguacucccugaagaagaacagccggucccugggggagaacgacgacggcaacaacgaggacaacgagaagcuccgcaagcccaagcacaagaagcugaagcagccggcggacgggaaccccgaccccaacgccaaccccaacguggacccgaacgccaaccccaacguggaccccaacgccaaccccaacgucgacccgaacgccaaccccaacgcgaaccccaacgccaaccccaacgccaacccgaacgccaaccccaacgcgaaccccaacgccaaccccaacgccaacccgaacgccaaccccaacgccaaccccaacgcgaaccccaacgccaacccgaacgccaaccccaacgccaaccccaacgccaaccccaacgcgaacccgaacgccaaccccaacguggaccccaacgccaaccccaacgccaacccgaacgccaaccccaacgcgaaccccaacgccaacccgaacgccaaccccaacgccaaccccaacgccaaccccaacgcgaacccgaacgccaaccccaacgccaaccccaacgccaaccccaacgcgaacccgaacgccaaccccaacgccaaccccaacgccaaccccaacgccaacccgaacgcgaaccccgccgccuacaucaagcccggcagcgccaacaagcccaaggacgagcuggacuacgccaacgacaucgaggcggccuacgccaaguucguggccgccuggacccucaaggcggccgccugaggacuaguuauaagacugacuagcccgaugggccucccaacgggcccuccuccccuccuugcaccgagauuaaucaaaggcucuuuucagagccaccaaaaaaaaaaaaaaaaaaaaaaaaaaaaaaaaaaaaaaaaaaaaaaaaaaaaaaaaaaaaaaaaagaauu

SEQ ID NO: 7090 - RNA, 1175 nt, Artificial Sequence
  mRNA Design i-3 (hSL-A64-N5) comprising derived and/or modified sequence from Pf(3D7)__XP_001351122.1__HsALB_Pf-CSP(19-272)_L(G4S)_Pf-CSP(310-3 27)_L(G4S)_Pf-CSP(346-375) (opt1)
aggagaaagcuuaccaugaagugggugaccuucaucagccuccuguuccuguucuccagcgccuacucccuguuccaggaguaccagugcuacggcagcuccagcaacacccgcguccucaacgagcugaacuacgacaacgccgggacgaaccuguacaacgagcucgagaugaacuacuacggcaagcaggagaacugguacucccugaagaagaacagccggucccugggggagaacgacgacggcaacaacgaggacaacgagaagcuccgcaagcccaagcacaagaagcugaagcagccggcggacgggaaccccgaccccaacgccaaccccaacguggacccgaacgccaaccccaacguggaccccaacgccaaccccaacgucgacccgaacgccaaccccaacgcgaaccccaacgccaaccccaacgccaacccgaacgccaaccccaacgcgaaccccaacgccaaccccaacgccaacccgaacgccaaccccaacgccaaccccaacgcgaaccccaacgccaacccgaacgccaaccccaacgccaaccccaacgccaaccccaacgcgaacccgaacgccaaccccaacguggaccccaacgccaaccccaacgccaacccgaacgccaaccccaacgcgaaccccaacgccaacccgaacgccaaccccaacgccaaccccaacgccaaccccaacgcgaacccgaacgccaaccccaacgccaaccccaacgccaaccccaacgcgaacccgaacgccaaccccaacgccaaccccaacgccaaccccaacgccaacccgaacgcgaaccccggcggcgggggcagcgagcccuccgacaagcacaucaaggaguaccugaacaagauccagaacagccucgggggcgggggcuccaucaagcccggcagcgccaacaagccgaaggacgagcuggacuacgccaacgacaucgagaagaagaucugcaagauggagaagugcuccugaggacuaguuauaagacugacuagcccgaugggccucccaacgggcccuccuccccuccuugcaccgagauuaaucaaaggcucuuuucagagccaccaaaaaaaaaaaaaaaaaaaaaaaaaaaaaaaaaaaaaaaaaaaaaaaaaaaaaaaaaaaaaaaaagaauu

SEQ ID NO: 7091 - RNA, 1160 nt, Artificial Sequence
  mRNA Design i-3 (hSL-A64-N5) comprising derived and/or modified sequence from Pf(3D7)__XP_001351122.1__HsALB_Pf-CSP(19-272)_L(G4S)_Pf-CSP(310-3 27)_Pf-CSP(346-375) (opt1)
aggagaaagcuuaccaugaagugggugaccuucaucagccuccuguuccuguucuccagcgccuacucccuguuccaggaguaccagugcuacggcagcuccagcaacacccgcguccucaacgagcugaacuacgacaacgccgggacgaaccuguacaacgagcucgagaugaacuacuacggcaagcaggagaacugguacucccugaagaagaacagccggucccugggggagaacgacgacggcaacaacgaggacaacgagaagcuccgcaagcccaagcacaagaagcugaagcagccggcggacgggaaccccgaccccaacgccaaccccaacguggacccgaacgccaaccccaacguggaccccaacgccaaccccaacgucgacccgaacgccaaccccaacgcgaaccccaacgccaaccccaacgccaacccgaacgccaaccccaacgcgaaccccaacgccaaccccaacgccaacccgaacgccaaccccaacgccaaccccaacgcgaaccccaacgccaacccgaacgccaaccccaacgccaaccccaacgccaaccccaacgcgaacccgaacgccaaccccaacguggaccccaacgccaaccccaacgccaacccgaacgccaaccccaacgcgaaccccaacgccaacccgaacgccaaccccaacgccaaccccaacgccaaccccaacgcgaacccgaacgccaaccccaacgccaaccccaacgccaaccccaacgcgaacccgaacgccaaccccaacgccaaccccaacgccaaccccaacgccaacccgaacgcgaaccccggcggcgggggcagcgagcccuccgacaagcacaucaaggaguaccugaacaagauccagaacagccucaucaagcccggguccgccaacaagccgaaggacgagcuggacuacgccaacgacaucgagaagaagaucugcaagauggagaagugcagcugaggacuaguuauaagacugacuagcccgaugggccucccaacgggcccuccuccccuccuugcaccgagauuaaucaaaggcucuuuucagagccaccaaaaaaaaaaaaaaaaaaaaaaaaaaaaaaaaaaaaaaaaaaaaaaaaaaaaaaaaaaaaaaaaagaauu

SEQ ID NO: 7092 - RNA, 1160 nt, Artificial Sequence
  mRNA Design i-3 (hSL-A64-N5) comprising derived and/or modified sequence from Pf(3D7)__XP_001351122.1__HsALB_Pf-CSP(19-325) (opt1)
aggagaaagcuuaccaugaagugggugaccuucaucagccuccuguuccuguucuccagcgccuacucccuguuccaggaguaccagugcuacggcagcuccagcaacacccgcguccucaacgagcugaacuacgacaacgccgggacgaaccuguacaacgagcucgagaugaacuacuacggcaagcaggagaacugguacucccugaagaagaacagccggucccugggggagaacgacgacggcaacaacgaggacaacgagaagcuccgcaagcccaagcacaagaagcugaagcagccggcggacgggaaccccgaccccaacgccaaccccaacguggacccgaacgccaaccccaacguggaccccaacgccaaccccaacgucgacccgaacgccaaccccaacgcgaaccccaacgccaaccccaacgccaacccgaacgccaaccccaacgcgaaccccaacgccaaccccaacgccaacccgaacgccaaccccaacgccaaccccaacgcgaaccccaacgccaacccgaacgccaaccccaacgccaaccccaacgccaaccccaacgcgaacccgaacgccaaccccaacguggaccccaacgccaaccccaacgccaacccgaacgccaaccccaacgcgaaccccaacgccaacccgaacgccaaccccaacgccaaccccaacgccaaccccaacgcgaacccgaacgccaaccccaacgccaaccccaacgccaaccccaacgcgaacccgaacgccaaccccaacgccaaccccaacgccaaccccaacgccaacccgaacgcgaaccccaacaagaacaaccagggcaacggccaggggcacaacaugcccaacgaccccaaccggaacguggacgagaacgccaacgccaacagcgccgucaagaacaacaacaacgaggagccguccgacaagcacaucaaggaguaccugaacaagauccagaacugaggacuaguuauaagacugacuagcccgaugggccucccaacgggcccuccuccccuccuugcaccgagauuaaucaaaggcucuuuucagagccaccaaaaaaaaaaaaaaaaaaaaaaaaaaaaaaaaaaaaaaaaaaaaaaaaaaaaaaaaaaaaaaaaagaauu

SEQ ID NO: 7093 - RNA, 1337 nt, Artificial Sequence
  mRNA Design i-3 (hSL-A64-N5) comprising derived and/or modified sequence from Pf(3D7)__XP_001351122.1__HsALB_Pf-CSP(19-384) (opt1)
aggagaaagcuuaccaugaagugggugaccuucaucagccuccuguuccuguucuccagcgccuacucccuguuccaggaguaccagugcuacggcagcuccagcaacacccgcguccucaacgagcugaacuacgacaacgccgggacgaaccuguacaacgagcucgagaugaacuacuacggcaagcaggagaacugguacucccugaagaagaacagccggucccugggggagaacgacgacggcaacaacgaggacaacgagaagcuccgcaagcccaagcacaagaagcugaagcagccggcggacgggaaccccgaccccaacgccaaccccaacguggacccgaacgccaaccccaacguggaccccaacgccaaccccaacgucgacccgaacgccaaccccaacgcgaaccccaacgccaaccccaacgccaacccgaacgccaaccccaacgcgaaccccaacgccaaccccaacgccaacccgaacgccaaccccaacgccaaccccaacgcgaaccccaacgccaacccgaacgccaaccccaacgccaaccccaacgccaaccccaacgcgaacccgaacgccaaccccaacguggaccccaacgccaaccccaacgccaacccgaacgccaaccccaacgcgaaccccaacgccaacccgaacgccaaccccaacgccaaccccaacgccaaccccaacgcgaacccgaacgccaaccccaacgccaaccccaacgccaaccccaacgcgaacccgaacgccaaccccaacgccaaccccaacgccaaccccaacgccaacccgaacgcgaaccccaacaagaacaaccagggcaacggccaggggcacaacaugcccaacgaccccaaccggaacguggacgagaacgccaacgccaacagcgccgucaagaacaacaacaacgaggagccguccgacaagcacaucaaggaguaccugaacaagauccagaacagccucuccaccgaguggagccccugcuccgugaccugcggcaacgggauccaggugcgcaucaagcccggcagcgccaacaagcccaaggacgagcuggacuacgcgaacgacaucgagaagaagaucugcaagauggagaagugcuccagcgucuucaacguggugaacuccagcugaggacuaguuauaagacugacuagcccgaugggccucccaacgggcccuccuccccuccuugcaccgagauuaaucaaaggcucuuuucagagccaccaaaaaaaaaaaaaaaaaaaaaaaaaaaaaaaaaaaaaaaaaaaaaaaaaaaaaaaaaaaaaaaaagaauu

SEQ ID NO: 7094 - RNA, 1475 nt, Artificial Sequence
  mRNA Design i-3 (hSL-A64-N5) comprising derived and/or modified sequence from Pf(3D7)__XP_001351122.1__HsALB_Pf-CSP(19-384)_TM domain HA (opt1)
aggagaaagcuuaccaugaagugggugaccuucaucagccuccuguuccuguucuccagcgccuacucccuguuccaggaguaccagugcuacggcagcuccagcaacacccgcguccucaacgagcugaacuacgacaacgccgggacgaaccuguacaacgagcucgagaugaacuacuacggcaagcaggagaacugguacucccugaagaagaacagccggucccugggggagaacgacgacggcaacaacgaggacaacgagaagcuccgcaagcccaagcacaagaagcugaagcagccggcggacgggaaccccgaccccaacgccaaccccaacguggacccgaacgccaaccccaacguggaccccaacgccaaccccaacgucgacccgaacgccaaccccaacgcgaaccccaacgccaaccccaacgccaacccgaacgccaaccccaacgcgaaccccaacgccaaccccaacgccaacccgaacgccaaccccaacgccaaccccaacgcgaaccccaacgccaacccgaacgccaaccccaacgccaaccccaacgccaaccccaacgcgaacccgaacgccaaccccaacguggaccccaacgccaaccccaacgccaacccgaacgccaaccccaacgcgaaccccaacgccaacccgaacgccaaccccaacgccaaccccaacgccaaccccaacgcgaacccgaacgccaaccccaacgccaaccccaacgccaaccccaacgcgaacccgaacgccaaccccaacgccaaccccaacgccaaccccaacgccaacccgaacgcgaaccccaacaagaacaaccagggcaacggccaggggcacaacaugcccaacgaccccaaccggaacguggacgagaacgccaacgccaacagcgccgucaagaacaacaacaacgaggagccguccgacaagcacaucaaggaguaccugaacaagauccagaacagccucuccaccgaguggagccccugcuccgugaccugcggcaacgggauccaggugcgcaucaagcccggcagcgccaacaagcccaaggacgagcuggacuacgcgaacgacaucgagaagaagaucugcaagauggagaagugcuccagcgucuucaacguggugaacuccagcaagcuggagagcacccggaucuaccagauccucgccaucuacuccacggucgccagcucccuggugcugguggucagccucggggccaucuccuucuggaugugcagcaacggcucccugcagugccgcaucugcaucugaggacuaguuauaagacugacuagcccgaugggccucccaacgggcccuccuccccuccuugcaccgagauuaaucaaaggcucuuuucagagccaccaaaaaaaaaaaaaaaaaaaaaaaaaaaaaaaaaaaaaaaaaaaaaaaaaaaaaaaaaaaaaaaaagaauu

SEQ ID NO: 7095 - RNA, 1187 nt, Artificial Sequence
  mRNA Design i-3 (hSL-A64-N5) comprising derived and/or modified sequence from Pf(3D7)__XP_001351122.1__HsALB_Pf-CSP(82-397) (opt1)
aggagaaagcuuaccaugaagugggugaccuucaucagccuccuguuccuguucuccagcgccuacuccgacaacgagaagcugcgcaagcccaagcacaagaagcucaagcagccggccgacggcaaccccgaccccaacgcgaaccccaacgucgacccgaacgccaaccccaacguggaccccaacgccaaccccaacguggacccgaacgccaaccccaacgccaaccccaacgcgaaccccaacgccaacccgaacgccaaccccaacgccaaccccaacgcgaaccccaacgccaacccgaacgccaaccccaacgccaaccccaacgccaaccccaacgcgaacccgaacgccaaccccaacgccaaccccaacgccaaccccaacgccaacccgaacgcgaaccccaacgucgaccccaacgccaaccccaacgccaacccgaacgccaaccccaacgccaaccccaacgcgaacccgaacgccaaccccaacgccaaccccaacgccaaccccaacgccaacccgaacgcgaaccccaacgccaaccccaacgccaaccccaacgccaacccgaacgcgaaccccaacgccaaccccaacgccaaccccaacgccaacccgaacgccaaccccaacaagaacaaccaggggaacggccaggggcacaacaugcccaacgaccccaaccggaacguggacgagaacgcgaacgccaacagcgccgugaagaacaacaacaacgaggagccguccgacaagcacaucaaggaguaccugaacaagauccagaacagccuguccaccgaguggagccccugcuccgucacgugcggcaacgggauccaggugcgcaucaagcccggcagcgccaacaagcccaaggacgagcucgacuacgccaacgacaucgagaagaagaucugcaagauggagaagugcuccagcguguucaacgucgugaacuccagcaucggccugaucauggugcuguccuuccucuuccugaacugaggacuaguuauaagacugacuagcccgaugggccucccaacgggcccuccuccccuccuugcaccgagauuaaucaaaggcucuuuucagagccaccaaaaaaaaaaaaaaaaaaaaaaaaaaaaaaaaaaaaaaaaaaaaaaaaaaaaaaaaaaaaaaaaagaauu

SEQ ID NO: 7096 - RNA, 539 nt, Artificial Sequence
  mRNA Design i-3 (hSL-A64-N5) comprising derived and/or modified sequence from Pf(3D7)__XP_001351122.1__HsALB_Pf-CSP(93-192) (opt1)
aggagaaagcuuaccaugaagugggugaccuucaucagccuccuguuccuguucuccagcgccuacuccaagcugaagcagcccgccgacggcaacccggaccccaacgcgaaccccaacgucgaccccaacgccaacccgaacguggaccccaacgccaaccccaacguggaccccaacgccaacccgaacgccaaccccaacgcgaaccccaacgccaaccccaacgccaacccgaacgccaaccccaacgcgaaccccaacgccaaccccaacgccaacccgaacgccaaccccaacgccaaccccaacgcgaaccccaacgccaacccgaacgccaaccccaacgccaaccccaacgccaaccccugaggacuaguuauaagacugacuagcccgaugggccucccaacgggcccuccuccccuccuugcaccgagauuaaucaaaggcucuuuucagagccaccaaaaaaaaaaaaaaaaaaaaaaaaaaaaaaaaaaaaaaaaaaaaaaaaaaaaaaaaaaaaaaaaagaauu

SEQ ID NO: 7097 - RNA, 779 nt, Artificial Sequence
  mRNA Design i-3 (hSL-A64-N5) comprising derived and/or modified sequence from Pf(3D7)__XP_001351122.1__HsALB_Pf-CSP(93-272) (opt1)
aggagaaagcuuaccaugaagugggugaccuucaucagccuccuguuccuguucuccagcgccuacuccaagcugaagcagcccgccgacggcaacccggaccccaacgcgaaccccaacgucgaccccaacgccaacccgaacguggaccccaacgccaaccccaacguggaccccaacgccaacccgaacgccaaccccaacgcgaaccccaacgccaaccccaacgccaacccgaacgccaaccccaacgcgaaccccaacgccaaccccaacgccaacccgaacgccaaccccaacgccaaccccaacgcgaaccccaacgccaacccgaacgccaaccccaacgccaaccccaacgccaaccccaacgcgaacccgaacgucgaccccaacgccaaccccaacgccaaccccaacgccaacccgaacgccaaccccaacgcgaaccccaacgccaacccgaacgccaaccccaacgccaaccccaacgccaaccccaacgcgaacccgaacgccaaccccaacgccaaccccaacgccaaccccaacgcgaacccgaacgccaaccccaacgccaaccccaacgccaaccccaacgccaacccgugaggacuaguuauaagacugacuagcccgaugggccucccaacgggcccuccuccccuccuugcaccgagauuaaucaaaggcucuuuucagagccaccaaaaaaaaaaaaaaaaaaaaaaaaaaaaaaaaaaaaaaaaaaaaaaaaaaaaaaaaaaaaaaaaagaauu

SEQ ID NO: 7098 - RNA, 1154 nt, Artificial Sequence
  mRNA Design i-3 (hSL-A64-N5) comprising derived and/or modified sequence from Pf(3D7)__XP_001351122.1__HsALB_Pf-CSP(93-397) (opt1)
aggagaaagcuuaccaugaagugggugaccuucaucagccuccuguuccuguucuccagcgccuacuccaagcugaagcagcccgccgacggcaacccggaccccaacgcgaaccccaacgucgaccccaacgccaacccgaacguggaccccaacgccaaccccaacguggaccccaacgccaacccgaacgccaaccccaacgcgaaccccaacgccaaccccaacgccaacccgaacgccaaccccaacgcgaaccccaacgccaaccccaacgccaacccgaacgccaaccccaacgccaaccccaacgcgaaccccaacgccaacccgaacgccaaccccaacgccaaccccaacgccaaccccaacgcgaacccgaacgucgaccccaacgccaaccccaacgccaaccccaacgccaacccgaacgccaaccccaacgcgaaccccaacgccaacccgaacgccaaccccaacgccaaccccaacgccaaccccaacgcgaacccgaacgccaaccccaacgccaaccccaacgccaaccccaacgcgaacccgaacgccaaccccaacgccaaccccaacgccaaccccaacgccaacccgaacaagaacaaccaggggaacggccaggggcacaacaugcccaacgaccccaaccgcaacguggacgagaacgcgaacgccaacagcgccgugaagaacaacaacaacgaggagcccuccgacaagcacaucaaggaguaccucaacaagauccagaacagccuguccaccgaguggagcccgugcuccgucacgugcggcaacgggauccaggugcggaucaagcccggcagcgccaacaagcccaaggacgagcuggacuacgccaacgacaucgagaagaagaucugcaagauggagaagugcuccagcguguucaacgucgugaacuccagcaucggccucaucauggugcuguccuuccuguuccucaacugaggacuaguuauaagacugacuagcccgaugggccucccaacgggcccuccuccccuccuugcaccgagauuaaucaaaggcucuuuucagagccaccaaaaaaaaaaaaaaaaaaaaaaaaaaaaaaaaaaaaaaaaaaaaaaaaaaaaaaaaaaaaaaaaagaauu

SEQ ID NO: 7099 - RNA, 524 nt, Artificial Sequence
  mRNA Design i-3 (hSL-A64-N5) comprising derived and/or modified sequence from Pf(3D7)__XP_001351122.1__HsALB_Pf-CSP(98-192) (opt1)
aggagaaagcuuaccaugaagugggugaccuucaucagccuccuguuccuguucuccagcgccuacuccgccgacggcaaccccgacccgaacgcgaaccccaacgucgaccccaacgccaaccccaacguggacccgaacgccaaccccaacguggaccccaacgccaaccccaacgccaacccgaacgcgaaccccaacgccaaccccaacgccaaccccaacgccaacccgaacgcgaaccccaacgccaaccccaacgccaaccccaacgccaacccgaacgccaaccccaacgcgaaccccaacgccaaccccaacgccaacccgaacgccaaccccaacgccaaccccugaggacuaguuauaagacugacuagcccgaugggccucccaacgggcccuccuccccuccuugcaccgagauuaaucaaaggcucuuuucagagccaccaaaaaaaaaaaaaaaaaaaaaaaaaaaaaaaaaaaaaaaaaaaaaaaaaaaaaaaaaaaaaaaaagaauu

SEQ ID NO: 7100 - RNA, 764 nt, Artificial Sequence
  mRNA Design i-3 (hSL-A64-N5) comprising derived and/or modified sequence from Pf(3D7)__XP_001351122.1__HsALB_Pf-CSP(98-272) (opt1)
aggagaaagcuuaccaugaagugggugaccuucaucagccuccuguuccuguucuccagcgccuacuccgccgacggcaaccccgacccgaacgcgaaccccaacgucgaccccaacgccaaccccaacguggacccgaacgccaaccccaacguggaccccaacgccaaccccaacgccaacccgaacgcgaaccccaacgccaaccccaacgccaaccccaacgccaacccgaacgcgaaccccaacgccaaccccaacgccaaccccaacgccaacccgaacgccaaccccaacgcgaaccccaacgccaaccccaacgccaacccgaacgccaaccccaacgccaaccccaacgcgaaccccaacgucgacccgaacgccaaccccaacgccaaccccaacgccaaccccaacgccaacccgaacgcgaaccccaacgccaaccccaacgccaacccgaacgccaaccccaacgccaaccccaacgcgaaccccaacgccaacccgaacgccaaccccaacgccaaccccaacgcgaaccccaacgccaacccgaacgccaaccccaacgccaaccccaacgccaaccccugaggacuaguuauaagacugacuagcccgaugggccucccaacgggcccuccuccccuccuugcaccgagauuaaucaaaggcucuuuucagagccaccaaaaaaaaaaaaaaaaaaaaaaaaaaaaaaaaaaaaaaaaaaaaaaaaaaaaaaaaaaaaaaaaagaauu

SEQ ID NO: 7101 - RNA, 1070 nt, Artificial Sequence
  mRNA Design i-3 (hSL-A64-N5) comprising derived and/or modified sequence from Pf(3D7)__XP_001351122.1__HsALB_Pf-CSP(98-374) (opt1)
aggagaaagcuuaccaugaagugggugaccuucaucagccuccuguuccuguucuccagcgccuacuccgccgacggcaaccccgacccgaacgcgaaccccaacgucgaccccaacgccaaccccaacguggacccgaacgccaaccccaacguggaccccaacgccaaccccaacgccaacccgaacgcgaaccccaacgccaaccccaacgccaaccccaacgccaacccgaacgcgaaccccaacgccaaccccaacgccaaccccaacgccaacccgaacgccaaccccaacgcgaaccccaacgccaaccccaacgccaacccgaacgccaaccccaacgccaaccccaacgcgaaccccaacgucgacccgaacgccaaccccaacgccaaccccaacgccaaccccaacgccaacccgaacgcgaaccccaacgccaaccccaacgccaacccgaacgccaaccccaacgccaaccccaacgcgaaccccaacgccaacccgaacgccaaccccaacgccaaccccaacgcgaaccccaacgccaacccgaacgccaaccccaacgccaaccccaacgccaaccccaacaagaacaaccaggggaacggccaggggcacaacaugccgaacgaccccaaccgcaacguggacgagaacgcgaacgccaacagcgccgugaagaacaacaacaacgaggagcccuccgacaagcacaucaaggaguaccugaacaagauccagaacagccucuccaccgaguggagccccugcuccgucacgugcggcaacgggauccaggugcggaucaagccgggcagcgccaacaagcccaaggacgagcuggacuacgccaacgacaucgagaagaagaucugcaagauggagaagugcugaggacuaguuauaagacugacuagcccgaugggccucccaacgggcccuccuccccuccuugcaccgagauuaaucaaaggcucuuuucagagccaccaaaaaaaaaaaaaaaaaaaaaaaaaaaaaaaaaaaaaaaaaaaaaaaaaaaaaaaaaaaaaaaaagaauu

SEQ ID NO: 7102 - RNA, 1139 nt, Artificial Sequence
  mRNA Design i-3 (hSL-A64-N5) comprising derived and/or modified sequence from Pf(3D7)__XP_001351122.1__HsALB_Pf-CSP(98-397) (opt1)
aggagaaagcuuaccaugaagugggugaccuucaucagccuccuguuccuguucuccagcgccuacuccgccgacggcaaccccgacccgaacgcgaaccccaacgucgaccccaacgccaaccccaacguggacccgaacgccaaccccaacguggaccccaacgccaaccccaacgccaacccgaacgcgaaccccaacgccaaccccaacgccaaccccaacgccaacccgaacgcgaaccccaacgccaaccccaacgccaaccccaacgccaacccgaacgccaaccccaacgcgaaccccaacgccaaccccaacgccaacccgaacgccaaccccaacgccaaccccaacgcgaaccccaacgucgacccgaacgccaaccccaacgccaaccccaacgccaaccccaacgccaacccgaacgcgaaccccaacgccaaccccaacgccaacccgaacgccaaccccaacgccaaccccaacgcgaaccccaacgccaacccgaacgccaaccccaacgccaaccccaacgcgaaccccaacgccaacccgaacgccaaccccaacgccaaccccaacgccaaccccaacaagaacaaccaggggaacggccaggggcacaacaugccgaacgaccccaaccgcaacguggacgagaacgcgaacgccaacagcgccgugaagaacaacaacaacgaggagcccuccgacaagcacaucaaggaguaccugaacaagauccagaacagccucuccaccgaguggagccccugcuccgucacgugcggcaacgggauccaggugcggaucaagccgggcagcgccaacaagcccaaggacgagcuggacuacgccaacgacaucgagaagaagaucugcaagauggagaagugcuccagcguguucaacgucgugaacuccagcaucggccugaucauggugcucuccuuccuguuccugaacugaggacuaguuauaagacugacuagcccgaugggccucccaacgggcccuccuccccuccuugcaccgagauuaaucaaaggcucuuuucagagccaccaaaaaaaaaaaaaaaaaaaaaaaaaaaaaaaaaaaaaaaaaaaaaaaaaaaaaaaaaaaaaaaaagaauu

SEQ ID NO: 7103 - RNA, 1466 nt, Artificial Sequence
  mRNA Design i-3 (hSL-A64-N5) comprising derived and/or modified sequence from Pf(3D7)__XP_001351122.1__HsALB_Pf-CSP(199-377)_L(PVTN)_HBsAg (opt1)
aggagaaagcuuaccaugaagugggugaccuucaucagccuccuguuccuguucuccagcgccuacuccgaccccaacgccaacccgaacgcgaaccccaacgccaaccccaacgccaaccccaacgccaacccgaacgccaaccccaacgcgaaccccaacgccaaccccaacgccaacccgaacgccaaccccaacgcgaaccccaacgccaaccccaacgccaacccgaacgccaaccccaacgccaaccccaacgcgaaccccaacgccaacccgaacgccaaccccaacaagaacaaccagggcaacgggcagggccacaacaugcccaacgaccccaaccgcaacgucgacgagaacgccaacgccaacagcgcggugaagaacaacaacaacgaggagccguccgacaagcacaucaaggaguaccugaacaagauccagaacagccucuccaccgaguggagccccugcuccgugaccugcgggaacggcauccagguccggaucaagcccgggagcgccaacaagcccaaggacgagcuggacuacgccaacgacaucgagaagaagaucugcaagauggagaagugcuccagcgugccggugaccaacauggagaacaucaccuccggcuuccugggcccccuccugguccugcaggccggguucuuccuccugacccgcauccugacgaucccccagagccucgacuccugguggaccagccugaacuuccugggcgggucccccgugugccucggccagaacagccaguccccgaccagcaaccacagccccaccuccugcccgcccaucugccccggguaccgguggaugugccugcgccgguucaucaucuuccuguucauccuccugcugugccucaucuuccugcuggugcuccuggacuaccagggcaugcugcccgucugcccccucaucccgggcagcacgaccaccaacaccgggcccugcaagacgugcaccacccccgcccagggcaacuccauguuccccagcugcugcugcaccaagccgacggacgggaacugcacgugcauccccauccccuccagcugggcguucgccaaguaccugugggagugggccuccgugcgcuucagcuggcugucccuccuggugcccuucguccagugguucgugggccugagcccgaccguguggcucuccgccaucuggaugaugugguacuggggccccagccuguacuccaucgucagccccuucaucccccugcucccgaucuucuucugccuguggguguacaucugaggacuaguuauaagacugacuagcccgaugggccucccaacgggcccuccuccccuccuugcaccgagauuaaucaaaggcucuuuucagagccaccaaaaaaaaaaaaaaaaaaaaaaaaaaaaaaaaaaaaaaaaaaaaaaaaaaaaaaaaaaaaaaaaagaauu

SEQ ID NO: 7104 - RNA, 1376 nt, Artificial Sequence
  mRNA Design i-3 (hSL-A64-N5) comprising derived and/or modified sequence from Pf(3D7)__XP_001351122.1__Pf-CSP (opt2)
aggagaaagcuuaccaugaugcgcaagcucgccauccucuccgucuccuccuuccucuucgucgaggcccucuuccaggaguaccagugcuacggcuccuccuccaacacccgcguccucaacgagcucaacuacgacaacgccggcaccaaccucuacaacgagcucgagaugaacuacuacggcaagcaggagaacugguacucccucaagaagaacucccgcucccucggcgagaacgacgacggcaacaacgaggacaacgagaagcuccgcaagcccaagcacaagaagcucaagcagcccgccgacggcaaccccgaccccaacgccaaccccaacgucgaccccaacgccaaccccaacgucgaccccaacgccaaccccaacgucgaccccaacgccaaccccaacgccaaccccaacgccaaccccaacgccaaccccaacgccaaccccaacgccaaccccaacgccaaccccaacgccaaccccaacgccaaccccaacgccaaccccaacgccaaccccaacgccaaccccaacgccaaccccaacgccaaccccaacgccaaccccaacgccaaccccaacgccaaccccaacgucgaccccaacgccaaccccaacgccaaccccaacgccaaccccaacgccaaccccaacgccaaccccaacgccaaccccaacgccaaccccaacgccaaccccaacgccaaccccaacgccaaccccaacgccaaccccaacgccaaccccaacgccaaccccaacgccaaccccaacgccaaccccaacgccaaccccaacgccaaccccaacgccaaccccaacaagaacaaccagggcaacggccagggccacaacaugcccaacgaccccaaccgcaacgucgacgagaacgccaacgccaacuccgccgucaagaacaacaacaacgaggagcccuccgacaagcacaucaaggaguaccucaacaagauccagaacucccucuccaccgaguggucccccugcuccgucaccugcggcaacggcauccagguccgcaucaagcccggcuccgccaacaagcccaaggacgagcucgacuacgccaacgacaucgagaagaagaucugcaagauggagaagugcuccuccgucuucaacgucgucaacuccuccaucggccucaucaugguccucuccuuccucuuccucaacugaggacuaguuauaagacugacuagcccgaugggccucccaacgggcccuccuccccuccuugcaccgagauuaaucaaaggcucuuuucagagccaccaaaaaaaaaaaaaaaaaaaaaaaaaaaaaaaaaaaaaaaaaaaaaaaaaaaaaaaaaaaaaaaaagaauu

SEQ ID NO: 7105 - RNA, 1307 nt, Artificial Sequence
  mRNA Design i-3 (hSL-A64-N5) comprising derived and/or modified sequence from Pf(3D7)__XP_001351122.1__Pf-CSP(1-374) (opt2)
aggagaaagcuuaccaugaugcgcaagcucgccauccucuccgucuccuccuuccucuucgucgaggcccucuuccaggaguaccagugcuacggcuccuccuccaacacccgcguccucaacgagcucaacuacgacaacgccggcaccaaccucuacaacgagcucgagaugaacuacuacggcaagcaggagaacugguacucccucaagaagaacucccgcucccucggcgagaacgacgacggcaacaacgaggacaacgagaagcuccgcaagcccaagcacaagaagcucaagcagcccgccgacggcaaccccgaccccaacgccaaccccaacgucgaccccaacgccaaccccaacgucgaccccaacgccaaccccaacgucgaccccaacgccaaccccaacgccaaccccaacgccaaccccaacgccaaccccaacgccaaccccaacgccaaccccaacgccaaccccaacgccaaccccaacgccaaccccaacgccaaccccaacgccaaccccaacgccaaccccaacgccaaccccaacgccaaccccaacgccaaccccaacgccaaccccaacgccaaccccaacgucgaccccaacgccaaccccaacgccaaccccaacgccaaccccaacgccaaccccaacgccaaccccaacgccaaccccaacgccaaccccaacgccaaccccaacgccaaccccaacgccaaccccaacgccaaccccaacgccaaccccaacgccaaccccaacgccaaccccaacgccaaccccaacgccaaccccaacgccaaccccaacgccaaccccaacaagaacaaccagggcaacggccagggccacaacaugcccaacgaccccaaccgcaacgucgacgagaacgccaacgccaacuccgccgucaagaacaacaacaacgaggagcccuccgacaagcacaucaaggaguaccucaacaagauccagaacucccucuccaccgaguggucccccugcuccgucaccugcggcaacggcauccagguccgcaucaagcccggcuccgccaacaagcccaaggacgagcucgacuacgccaacgacaucgagaagaagaucugcaagauggagaagugcugaggacuaguuauaagacugacuagcccgaugggccucccaacgggcccuccuccccuccuugcaccgagauuaaucaaaggcucuuuucagagccaccaaaaaaaaaaaaaaaaaaaaaaaaaaaaaaaaaaaaaaaaaaaaaaaaaaaaaaaaaaaaaaaaagaauu

SEQ ID NO: 7106 - RNA, 1160 nt, Artificial Sequence
  mRNA Design i-3 (hSL-A64-N5) comprising derived and/or modified sequence from Pf(3D7)__XP_001351122.1__Pf-CSP(1-325) (opt2)
aggagaaagcuuaccaugaugcgcaagcucgccauccucuccgucuccuccuuccucuucgucgaggcccucuuccaggaguaccagugcuacggcuccuccuccaacacccgcguccucaacgagcucaacuacgacaacgccggcaccaaccucuacaacgagcucgagaugaacuacuacggcaagcaggagaacugguacucccucaagaagaacucccgcucccucggcgagaacgacgacggcaacaacgaggacaacgagaagcuccgcaagcccaagcacaagaagcucaagcagcccgccgacggcaaccccgaccccaacgccaaccccaacgucgaccccaacgccaaccccaacgucgaccccaacgccaaccccaacgucgaccccaacgccaaccccaacgccaaccccaacgccaaccccaacgccaaccccaacgccaaccccaacgccaaccccaacgccaaccccaacgccaaccccaacgccaaccccaacgccaaccccaacgccaaccccaacgccaaccccaacgccaaccccaacgccaaccccaacgccaaccccaacgccaaccccaacgccaaccccaacgucgaccccaacgccaaccccaacgccaaccccaacgccaaccccaacgccaaccccaacgccaaccccaacgccaaccccaacgccaaccccaacgccaaccccaacgccaaccccaacgccaaccccaacgccaaccccaacgccaaccccaacgccaaccccaacgccaaccccaacgccaaccccaacgccaaccccaacgccaaccccaacgccaaccccaacaagaacaaccagggcaacggccagggccacaacaugcccaacgaccccaaccgcaacgucgacgagaacgccaacgccaacuccgccgucaagaacaacaacaacgaggagcccuccgacaagcacaucaaggaguaccucaacaagauccagaacugaggacuaguuauaagacugacuagcccgaugggccucccaacgggcccuccuccccuccuugcaccgagauuaaucaaaggcucuuuucagagccaccaaaaaaaaaaaaaaaaaaaaaaaaaaaaaaaaaaaaaaaaaaaaaaaaaaaaaaaaaaaaaaaaagaauu

SEQ ID NO: 7107 - RNA, 1376 nt, Artificial Sequence
  mRNA Design i-3 (hSL-A64-N5) comprising derived and/or modified sequence from Pf(3D7)__XP_001351122.1__HsALB_Pf-CSP(19-397) (opt2)
aggagaaagcuuaccaugaagugggucaccuucaucucccuccucuuccucuucuccuccgccuacucccucuuccaggaguaccagugcuacggcuccuccuccaacacccgcguccucaacgagcucaacuacgacaacgccggcaccaaccucuacaacgagcucgagaugaacuacuacggcaagcaggagaacugguacucccucaagaagaacucccgcucccucggcgagaacgacgacggcaacaacgaggacaacgagaagcuccgcaagcccaagcacaagaagcucaagcagcccgccgacggcaaccccgaccccaacgccaaccccaacgucgaccccaacgccaaccccaacgucgaccccaacgccaaccccaacgucgaccccaacgccaaccccaacgccaaccccaacgccaaccccaacgccaaccccaacgccaaccccaacgccaaccccaacgccaaccccaacgccaaccccaacgccaaccccaacgccaaccccaacgccaaccccaacgccaaccccaacgccaaccccaacgccaaccccaacgccaaccccaacgccaaccccaacgccaaccccaacgucgaccccaacgccaaccccaacgccaaccccaacgccaaccccaacgccaaccccaacgccaaccccaacgccaaccccaacgccaaccccaacgccaaccccaacgccaaccccaacgccaaccccaacgccaaccccaacgccaaccccaacgccaaccccaacgccaaccccaacgccaaccccaacgccaaccccaacgccaaccccaacgccaaccccaacaagaacaaccagggcaacggccagggccacaacaugcccaacgaccccaaccgcaacgucgacgagaacgccaacgccaacuccgccgucaagaacaacaacaacgaggagcccuccgacaagcacaucaaggaguaccucaacaagauccagaacucccucuccaccgaguggucccccugcuccgucaccugcggcaacggcauccagguccgcaucaagcccggcuccgccaacaagcccaaggacgagcucgacuacgccaacgacaucgagaagaagaucugcaagauggagaagugcuccuccgucuucaacgucgucaacuccuccaucggccucaucaugguccucuccuuccucuuccucaacugaggacuaguuauaagacugacuagcccgaugggccucccaacgggcccuccuccccuccuugcaccgagauuaaucaaaggcucuuuucagagccaccaaaaaaaaaaaaaaaaaaaaaaaaaaaaaaaaaaaaaaaaaaaaaaaaaaaaaaaaaaaaaaaaagaauu

SEQ ID NO: 7108 - RNA, 1394 nt, Artificial Sequence
  mRNA Design i-3 (hSL-A64-N5) comprising derived and/or modified sequence from Pf(3D7)__XP_001351122.1__HsIns-iso1_Pf-CSP(19-397) (opt2)
aggagaaagcuuaccauggcccucuggaugcgccuccucccccuccucgcccuccucgcccucuggggccccgaccccgccgccgcccucuuccaggaguaccagugcuacggcuccuccuccaacacccgcguccucaacgagcucaacuacgacaacgccggcaccaaccucuacaacgagcucgagaugaacuacuacggcaagcaggagaacugguacucccucaagaagaacucccgcucccucggcgagaacgacgacggcaacaacgaggacaacgagaagcuccgcaagcccaagcacaagaagcucaagcagcccgccgacggcaaccccgaccccaacgccaaccccaacgucgaccccaacgccaaccccaacgucgaccccaacgccaaccccaacgucgaccccaacgccaaccccaacgccaaccccaacgccaaccccaacgccaaccccaacgccaaccccaacgccaaccccaacgccaaccccaacgccaaccccaacgccaaccccaacgccaaccccaacgccaaccccaacgccaaccccaacgccaaccccaacgccaaccccaacgccaaccccaacgccaaccccaacgccaaccccaacgucgaccccaacgccaaccccaacgccaaccccaacgccaaccccaacgccaaccccaacgccaaccccaacgccaaccccaacgccaaccccaacgccaaccccaacgccaaccccaacgccaaccccaacgccaaccccaacgccaaccccaacgccaaccccaacgccaaccccaacgccaaccccaacgccaaccccaacgccaaccccaacgccaaccccaacaagaacaaccagggcaacggccagggccacaacaugcccaacgaccccaaccgcaacgucgacgagaacgccaacgccaacuccgccgucaagaacaacaacaacgaggagcccuccgacaagcacaucaaggaguaccucaacaagauccagaacucccucuccaccgaguggucccccugcuccgucaccugcggcaacggcauccagguccgcaucaagcccggcuccgccaacaagcccaaggacgagcucgacuacgccaacgacaucgagaagaagaucugcaagauggagaagugcuccuccgucuucaacgucgucaacuccuccaucggccucaucaugguccucuccuuccucuuccucaacugaggacuaguuauaagacugacuagcccgaugggccucccaacgggcccuccuccccuccuugcaccgagauuaaucaaaggcucuuuucagagccaccaaaaaaaaaaaaaaaaaaaaaaaaaaaaaaaaaaaaaaaaaaaaaaaaaaaaaaaaaaaaaaaaagaauu

SEQ ID NO: 7109 - RNA, 1373 nt, Artificial Sequence
  mRNA Design i-3 (hSL-A64-N5) comprising derived and/or modified sequence from Pf(3D7)__XP_001351122.1__HsSPARC_Pf-CSP(19-397) (opt2)
aggagaaagcuuaccaugcgcgccuggaucuucuuccuccucugccucgccggccgcgcccucgcccucuuccaggaguaccagugcuacggcuccuccuccaacacccgcguccucaacgagcucaacuacgacaacgccggcaccaaccucuacaacgagcucgagaugaacuacuacggcaagcaggagaacugguacucccucaagaagaacucccgcucccucggcgagaacgacgacggcaacaacgaggacaacgagaagcuccgcaagcccaagcacaagaagcucaagcagcccgccgacggcaaccccgaccccaacgccaaccccaacgucgaccccaacgccaaccccaacgucgaccccaacgccaaccccaacgucgaccccaacgccaaccccaacgccaaccccaacgccaaccccaacgccaaccccaacgccaaccccaacgccaaccccaacgccaaccccaacgccaaccccaacgccaaccccaacgccaaccccaacgccaaccccaacgccaaccccaacgccaaccccaacgccaaccccaacgccaaccccaacgccaaccccaacgccaaccccaacgucgaccccaacgccaaccccaacgccaaccccaacgccaaccccaacgccaaccccaacgccaaccccaacgccaaccccaacgccaaccccaacgccaaccccaacgccaaccccaacgccaaccccaacgccaaccccaacgccaaccccaacgccaaccccaacgccaaccccaacgccaaccccaacgccaaccccaacgccaaccccaacgccaaccccaacaagaacaaccagggcaacggccagggccacaacaugcccaacgaccccaaccgcaacgucgacgagaacgccaacgccaacuccgccgucaagaacaacaacaacgaggagcccuccgacaagcacaucaaggaguaccucaacaagauccagaacucccucuccaccgaguggucccccugcuccgucaccugcggcaacggcauccagguccgcaucaagcccggcuccgccaacaagcccaaggacgagcucgacuacgccaacgacaucgagaagaagaucugcaagauggagaagugcuccuccgucuucaacgucgucaacuccuccaucggccucaucaugguccucuccuuccucuuccucaacugaggacuaguuauaagacugacuagcccgaugggccucccaacgggcccuccuccccuccuugcaccgagauuaaucaaaggcucuuuucagagccaccaaaaaaaaaaaaaaaaaaaaaaaaaaaaaaaaaaaaaaaaaaaaaaaaaaaaaaaaaaaaaaaaagaauu

SEQ ID NO: 7110 - RNA, 1376 nt, Artificial Sequence
  mRNA Design i-3 (hSL-A64-N5) comprising derived and/or modified sequence from Pf(3D7)__XP_001351122.1__IgE_Pf-CSP(19-397) (opt2)
aggagaaagcuuaccauggacuggaccuggauccucuuccucgucgccgccgccacccgcguccacucccucuuccaggaguaccagugcuacggcuccuccuccaacacccgcguccucaacgagcucaacuacgacaacgccggcaccaaccucuacaacgagcucgagaugaacuacuacggcaagcaggagaacugguacucccucaagaagaacucccgcucccucggcgagaacgacgacggcaacaacgaggacaacgagaagcuccgcaagcccaagcacaagaagcucaagcagcccgccgacggcaaccccgaccccaacgccaaccccaacgucgaccccaacgccaaccccaacgucgaccccaacgccaaccccaacgucgaccccaacgccaaccccaacgccaaccccaacgccaaccccaacgccaaccccaacgccaaccccaacgccaaccccaacgccaaccccaacgccaaccccaacgccaaccccaacgccaaccccaacgccaaccccaacgccaaccccaacgccaaccccaacgccaaccccaacgccaaccccaacgccaaccccaacgccaaccccaacgucgaccccaacgccaaccccaacgccaaccccaacgccaaccccaacgccaaccccaacgccaaccccaacgccaaccccaacgccaaccccaacgccaaccccaacgccaaccccaacgccaaccccaacgccaaccccaacgccaaccccaacgccaaccccaacgccaaccccaacgccaaccccaacgccaaccccaacgccaaccccaacgccaaccccaacaagaacaaccagggcaacggccagggccacaacaugcccaacgaccccaaccgcaacgucgacgagaacgccaacgccaacuccgccgucaagaacaacaacaacgaggagcccuccgacaagcacaucaaggaguaccucaacaagauccagaacucccucuccaccgaguggucccccugcuccgucaccugcggcaacggcauccagguccgcaucaagcccggcuccgccaacaagcccaaggacgagcucgacuacgccaacgacaucgagaagaagaucugcaagauggagaagugcuccuccgucuucaacgucgucaacuccuccaucggccucaucaugguccucuccuuccucuuccucaacugaggacuaguuauaagacugacuagcccgaugggccucccaacgggcccuccuccccuccuugcaccgagauuaaucaaaggcucuuuucagagccaccaaaaaaaaaaaaaaaaaaaaaaaaaaaaaaaaaaaaaaaaaaaaaaaaaaaaaaaaaaaaaaaaagaauu

SEQ ID NO: 7111 - RNA, 1541 nt, Artificial Sequence
  mRNA Design i-3 (hSL-A64-N5) comprising derived and/or modified sequence from Pf(3D7)__XP_001351122.1__Pf-CSP_L(G4SG4)_TM domain HA (opt2)
aggagaaagcuuaccaugaugcgcaagcucgccauccucuccgucuccuccuuccucuucgucgaggcccucuuccaggaguaccagugcuacggcuccuccuccaacacccgcguccucaacgagcucaacuacgacaacgccggcaccaaccucuacaacgagcucgagaugaacuacuacggcaagcaggagaacugguacucccucaagaagaacucccgcucccucggcgagaacgacgacggcaacaacgaggacaacgagaagcuccgcaagcccaagcacaagaagcucaagcagcccgccgacggcaaccccgaccccaacgccaaccccaacgucgaccccaacgccaaccccaacgucgaccccaacgccaaccccaacgucgaccccaacgccaaccccaacgccaaccccaacgccaaccccaacgccaaccccaacgccaaccccaacgccaaccccaacgccaaccccaacgccaaccccaacgccaaccccaacgccaaccccaacgccaaccccaacgccaaccccaacgccaaccccaacgccaaccccaacgccaaccccaacgccaaccccaacgccaaccccaacgucgaccccaacgccaaccccaacgccaaccccaacgccaaccccaacgccaaccccaacgccaaccccaacgccaaccccaacgccaaccccaacgccaaccccaacgccaaccccaacgccaaccccaacgccaaccccaacgccaaccccaacgccaaccccaacgccaaccccaacgccaaccccaacgccaaccccaacgccaaccccaacgccaaccccaacaagaacaaccagggcaacggccagggccacaacaugcccaacgaccccaaccgcaacgucgacgagaacgccaacgccaacuccgccgucaagaacaacaacaacgaggagcccuccgacaagcacaucaaggaguaccucaacaagauccagaacucccucuccaccgaguggucccccugcuccgucaccugcggcaacggcauccagguccgcaucaagcccggcuccgccaacaagcccaaggacgagcucgacuacgccaacgacaucgagaagaagaucugcaagauggagaagugcuccuccgucuucaacgucgucaacuccuccaucggccucaucaugguccucuccuuccucuuccucaacggcggcggcggcuccggcggcggcggcaagcucgaguccacccgcaucuaccagauccucgccaucuacuccaccgucgccuccucccucguccucgucgucucccucggcgccaucuccuucuggaugugcuccaacggcucccuccagugccgcaucugcaucugaggacuaguuauaagacugacuagcccgaugggccucccaacgggcccuccuccccuccuugcaccgagauuaaucaaaggcucuuuucagagccaccaaaaaaaaaaaaaaaaaaaaaaaaaaaaaaaaaaaaaaaaaaaaaaaaaaaaaaaaaaaaaaaaagaauu

SEQ ID NO: 7112 - RNA, 1415 nt, Artificial Sequence
  mRNA Design i-3 (hSL-A64-N5) comprising derived and/or modified sequence from Pf(3D7)__XP_001351122.1__Pf-CSP(199-377)_L(PVTN)_HBsAg (opt2)
aggagaaagcuuaccauggaccccaacgccaaccccaacgccaaccccaacgccaaccccaacgccaaccccaacgccaaccccaacgccaaccccaacgccaaccccaacgccaaccccaacgccaaccccaacgccaaccccaacgccaaccccaacgccaaccccaacgccaaccccaacgccaaccccaacgccaaccccaacgccaaccccaacgccaaccccaacgccaaccccaacaagaacaaccagggcaacggccagggccacaacaugcccaacgaccccaaccgcaacgucgacgagaacgccaacgccaacuccgccgucaagaacaacaacaacgaggagcccuccgacaagcacaucaaggaguaccucaacaagauccagaacucccucuccaccgaguggucccccugcuccgucaccugcggcaacggcauccagguccgcaucaagcccggcuccgccaacaagcccaaggacgagcucgacuacgccaacgacaucgagaagaagaucugcaagauggagaagugcuccuccguccccgucaccaacauggagaacaucaccuccggcuuccucggcccccuccucguccuccaggccggcuucuuccuccucacccgcauccucaccaucccccagucccucgacuccugguggaccucccucaacuuccucggcggcucccccgucugccucggccagaacucccagucccccaccuccaaccacucccccaccuccugcccccccaucugccccggcuaccgcuggaugugccuccgccgcuucaucaucuuccucuucauccuccuccucugccucaucuuccuccucguccuccucgacuaccagggcaugcuccccgucugcccccucauccccggcuccaccaccaccaacaccggccccugcaagaccugcaccacccccgcccagggcaacuccauguuccccuccugcugcugcaccaagcccaccgacggcaacugcaccugcauccccauccccuccuccugggccuucgccaaguaccucugggagugggccuccguccgcuucuccuggcucucccuccucguccccuucguccagugguucgucggccucucccccaccgucuggcucuccgccaucuggaugaugugguacuggggccccucccucuacuccaucgucucccccuucaucccccuccuccccaucuucuucugccucugggucuacaucugaggacuaguuauaagacugacuagcccgaugggccucccaacgggcccuccuccccuccuugcaccgagauuaaucaaaggcucuuuucagagccaccaaaaaaaaaaaaaaaaaaaaaaaaaaaaaaaaaaaaaaaaaaaaaaaaaaaaaaaaaaaaaaaaagaauu

SEQ ID NO: 7113 - RNA, 1457 nt, Artificial Sequence
  mRNA Design i-3 (hSL-A64-N5) comprising derived and/or modified sequence from Pf(3D7)__XP_001351122.1__Pf-CSP(199-387)_L(PVTN)_HBsAg (opt2)
aggagaaagcuuaccaugauggcccccgaccccaacgccaaccccaacgccaaccccaacgccaaccccaacgccaaccccaacgccaaccccaacgccaaccccaacgccaaccccaacgccaaccccaacgccaaccccaacgccaaccccaacgccaaccccaacgccaaccccaacgccaaccccaacgccaaccccaacgccaaccccaacgccaaccccaacgccaaccccaacgccaaccccaacaagaacaaccagggcaacggccagggccacaacaugcccaacgaccccaaccgcaacgucgacgagaacgccaacgccaacuccgccgucaagaacaacaacaacgaggagcccuccgacaagcacaucaaggaguaccucaacaagauccagaacucccucuccaccgaguggucccccugcuccgucaccugcggcaacggcauccagguccgcaucaagcccggcuccgccaacaagcccaaggacgagcucgacuacgccaacgacaucgagaagaagaucugcaagauggagaagugcuccuccgucuucaacgucgucaacuccuccaucggccucggccccgucaccaacauggagaacaucaccuccggcuuccucggcccccuccucguccuccaggccggcuucuuccuccucacccgcauccucaccaucccccagucccucgacuccugguggaccucccucaacuuccucggcggcucccccgucugccucggccagaacucccagucccccaccuccaaccacucccccaccuccugcccccccaucugccccggcuaccgcuggaugugccuccgccgcuucaucaucuuccucuucauccuccuccucugccucaucuuccuccucguccuccucgacuaccagggcaugcuccccgucugcccccucauccccggcuccaccaccaccaacaccggccccugcaagaccugcaccacccccgcccagggcaacuccauguuccccuccugcugcugcaccaagcccaccgacggcaacugcaccugcauccccauccccuccuccugggccuucgccaaguaccucugggagugggccuccguccgcuucuccuggcucucccuccucguccccuucguccagugguucgucggccucucccccaccgucuggcucuccgccaucuggaugaugugguacuggggccccucccucuacuccaucgucucccccuucaucccccuccuccccaucuucuucugccucugggucuacaucugaggacuaguuauaagacugacuagcccgaugggccucccaacgggcccuccuccccuccuugcaccgagauuaaucaaaggcucuuuucagagccaccaaaaaaaaaaaaaaaaaaaaaaaaaaaaaaaaaaaaaaaaaaaaaaaaaaaaaaaaaaaaaaaaagaauu

SEQ ID NO: 7114 - RNA, 641 nt, Artificial Sequence
  mRNA Design i-3 (hSL-A64-N5) comprising derived and/or modified sequence from Pf(3D7)__XP_001351122.1__HsALB_Pf-CSP(19-152) (opt2)
aggagaaagcuuaccaugaagugggucaccuucaucucccuccucuuccucuucuccuccgccuacucccucuuccaggaguaccagugcuacggcuccuccuccaacacccgcguccucaacgagcucaacuacgacaacgccggcaccaaccucuacaacgagcucgagaugaacuacuacggcaagcaggagaacugguacucccucaagaagaacucccgcucccucggcgagaacgacgacggcaacaacgaggacaacgagaagcuccgcaagcccaagcacaagaagcucaagcagcccgccgacggcaaccccgaccccaacgccaaccccaacgucgaccccaacgccaaccccaacgucgaccccaacgccaaccccaacgucgaccccaacgccaaccccaacgccaaccccaacgccaaccccaacgccaaccccaacgccaaccccaacgccaaccccugaggacuaguuauaagacugacuagcccgaugggccucccaacgggcccuccuccccuccuugcaccgagauuaaucaaaggcucuuuucagagccaccaaaaaaaaaaaaaaaaaaaaaaaaaaaaaaaaaaaaaaaaaaaaaaaaaaaaaaaaaaaaaaaaagaauu

SEQ ID NO: 7115 - RNA, 761 nt, Artificial Sequence
  mRNA Design i-3 (hSL-A64-N5) comprising derived and/or modified sequence from Pf(3D7)__XP_001351122.1__HsALB_Pf-CSP(19-192) (opt2)
aggagaaagcuuaccaugaagugggucaccuucaucucccuccucuuccucuucuccuccgccuacucccucuuccaggaguaccagugcuacggcuccuccuccaacacccgcguccucaacgagcucaacuacgacaacgccggcaccaaccucuacaacgagcucgagaugaacuacuacggcaagcaggagaacugguacucccucaagaagaacucccgcucccucggcgagaacgacgacggcaacaacgaggacaacgagaagcuccgcaagcccaagcacaagaagcucaagcagcccgccgacggcaaccccgaccccaacgccaaccccaacgucgaccccaacgccaaccccaacgucgaccccaacgccaaccccaacgucgaccccaacgccaaccccaacgccaaccccaacgccaaccccaacgccaaccccaacgccaaccccaacgccaaccccaacgccaaccccaacgccaaccccaacgccaaccccaacgccaaccccaacgccaaccccaacgccaaccccaacgccaaccccaacgccaaccccaacgccaaccccaacgccaaccccugaggacuaguuauaagacugacuagcccgaugggccucccaacgggcccuccuccccuccuugcaccgagauuaaucaaaggcucuuuucagagccaccaaaaaaaaaaaaaaaaaaaaaaaaaaaaaaaaaaaaaaaaaaaaaaaaaaaaaaaaaaaaaaaaagaauu

SEQ ID NO: 7116 - RNA, 1001 nt, Artificial Sequence
  mRNA Design i-3 (hSL-A64-N5) comprising derived and/or modified sequence from Pf(3D7)__XP_001351122.1__HsALB_Pf-CSP(19-272) (opt2)
aggagaaagcuuaccaugaagugggucaccuucaucucccuccucuuccucuucuccuccgccuacucccucuuccaggaguaccagugcuacggcuccuccuccaacacccgcguccucaacgagcucaacuacgacaacgccggcaccaaccucuacaacgagcucgagaugaacuacuacggcaagcaggagaacugguacucccucaagaagaacucccgcucccucggcgagaacgacgacggcaacaacgaggacaacgagaagcuccgcaagcccaagcacaagaagcucaagcagcccgccgacggcaaccccgaccccaacgccaaccccaacgucgaccccaacgccaaccccaacgucgaccccaacgccaaccccaacgucgaccccaacgccaaccccaacgccaaccccaacgccaaccccaacgccaaccccaacgccaaccccaacgccaaccccaacgccaaccccaacgccaaccccaacgccaaccccaacgccaaccccaacgccaaccccaacgccaaccccaacgccaaccccaacgccaaccccaacgccaaccccaacgccaaccccaacgccaaccccaacgucgaccccaacgccaaccccaacgccaaccccaacgccaaccccaacgccaaccccaacgccaaccccaacgccaaccccaacgccaaccccaacgccaaccccaacgccaaccccaacgccaaccccaacgccaaccccaacgccaaccccaacgccaaccccaacgccaaccccaacgccaaccccaacgccaaccccaacgccaaccccaacgccaaccccugaggacuaguuauaagacugacuagcccgaugggccucccaacgggcccuccuccccuccuugcaccgagauuaaucaaaggcucuuuucagagccaccaaaaaaaaaaaaaaaaaaaaaaaaaaaaaaaaaaaaaaaaaaaaaaaaaaaaaaaaaaaaaaaaagaauu

SEQ ID NO: 7117 - RNA, 1163 nt, Artificial Sequence
  mRNA Design i-3 (hSL-A64-N5) comprising derived and/or modified sequence from Pf(3D7)__XP_001351122.1__HsALB_Pf-CSP(19-272)_L(AAY)_Pf-CSP(310-3 27)_L(AAY)_Pf-CSP(346-375) (opt2)
aggagaaagcuuaccaugaagugggucaccuucaucucccuccucuuccucuucuccuccgccuacucccucuuccaggaguaccagugcuacggcuccuccuccaacacccgcguccucaacgagcucaacuacgacaacgccggcaccaaccucuacaacgagcucgagaugaacuacuacggcaagcaggagaacugguacucccucaagaagaacucccgcucccucggcgagaacgacgacggcaacaacgaggacaacgagaagcuccgcaagcccaagcacaagaagcucaagcagcccgccgacggcaaccccgaccccaacgccaaccccaacgucgaccccaacgccaaccccaacgucgaccccaacgccaaccccaacgucgaccccaacgccaaccccaacgccaaccccaacgccaaccccaacgccaaccccaacgccaaccccaacgccaaccccaacgccaaccccaacgccaaccccaacgccaaccccaacgccaaccccaacgccaaccccaacgccaaccccaacgccaaccccaacgccaaccccaacgccaaccccaacgccaaccccaacgccaaccccaacgucgaccccaacgccaaccccaacgccaaccccaacgccaaccccaacgccaaccccaacgccaaccccaacgccaaccccaacgccaaccccaacgccaaccccaacgccaaccccaacgccaaccccaacgccaaccccaacgccaaccccaacgccaaccccaacgccaaccccaacgccaaccccaacgccaaccccaacgccaaccccaacgccaaccccgccgccuacgagcccuccgacaagcacaucaaggaguaccucaacaagauccagaacucccucgccgccuacaucaagcccggcuccgccaacaagcccaaggacgagcucgacuacgccaacgacaucgagaagaagaucugcaagauggagaagugcuccugaggacuaguuauaagacugacuagcccgaugggccucccaacgggcccuccuccccuccuugcaccgagauuaaucaaaggcucuuuucagagccaccaaaaaaaaaaaaaaaaaaaaaaaaaaaaaaaaaaaaaaaaaaaaaaaaaaaaaaaaaaaaaaaaagaauu

SEQ ID NO: 7118 - RNA, 1124 nt, Artificial Sequence
  mRNA Design i-3 (hSL-A64-N5) comprising derived and/or modified sequence from Pf(3D7)__XP_001351122.1__HsALB_Pf-CSP(19-272)_L(AAY)_Pf-CSP(346-3 65)_L(AAY)_P2 (opt2)
aggagaaagcuuaccaugaagugggucaccuucaucucccuccucuuccucuucuccuccgccuacucccucuuccaggaguaccagugcuacggcuccuccuccaacacccgcguccucaacgagcucaacuacgacaacgccggcaccaaccucuacaacgagcucgagaugaacuacuacggcaagcaggagaacugguacucccucaagaagaacucccgcucccucggcgagaacgacgacggcaacaacgaggacaacgagaagcuccgcaagcccaagcacaagaagcucaagcagcccgccgacggcaaccccgaccccaacgccaaccccaacgucgaccccaacgccaaccccaacgucgaccccaacgccaaccccaacgucgaccccaacgccaaccccaacgccaaccccaacgccaaccccaacgccaaccccaacgccaaccccaacgccaaccccaacgccaaccccaacgccaaccccaacgccaaccccaacgccaaccccaacgccaaccccaacgccaaccccaacgccaaccccaacgccaaccccaacgccaaccccaacgccaaccccaacgccaaccccaacgucgaccccaacgccaaccccaacgccaaccccaacgccaaccccaacgccaaccccaacgccaaccccaacgccaaccccaacgccaaccccaacgccaaccccaacgccaaccccaacgccaaccccaacgccaaccccaacgccaaccccaacgccaaccccaacgccaaccccaacgccaaccccaacgccaaccccaacgccaaccccaacgccaaccccgccgccuacaucaagcccggcuccgccaacaagcccaaggacgagcucgacuacgccaacgacaucgaggccgccuaccaguacaucaaggccaacuccaaguucaucggcaucaccgagcucugaggacuaguuauaagacugacuagcccgaugggccucccaacgggcccuccuccccuccuugcaccgagauuaaucaaaggcucuuuucagagccaccaaaaaaaaaaaaaaaaaaaaaaaaaaaaaaaaaaaaaaaaaaaaaaaaaaaaaaaaaaaaaaaaagaauu

SEQ ID NO: 7119 - RNA, 1118 nt, Artificial Sequence
  mRNA Design i-3 (hSL-A64-N5) comprising derived and/or modified sequence from Pf(3D7)__XP_001351122.1__HsALB_Pf-CSP(19-272)_L(AAY)_Pf-CSP(346-3 65)_L(AAY)_PADRE (opt2)
aggagaaagcuuaccaugaagugggucaccuucaucucccuccucuuccucuucuccuccgccuacucccucuuccaggaguaccagugcuacggcuccuccuccaacacccgcguccucaacgagcucaacuacgacaacgccggcaccaaccucuacaacgagcucgagaugaacuacuacggcaagcaggagaacugguacucccucaagaagaacucccgcucccucggcgagaacgacgacggcaacaacgaggacaacgagaagcuccgcaagcccaagcacaagaagcucaagcagcccgccgacggcaaccccgaccccaacgccaaccccaacgucgaccccaacgccaaccccaacgucgaccccaacgccaaccccaacgucgaccccaacgccaaccccaacgccaaccccaacgccaaccccaacgccaaccccaacgccaaccccaacgccaaccccaacgccaaccccaacgccaaccccaacgccaaccccaacgccaaccccaacgccaaccccaacgccaaccccaacgccaaccccaacgccaaccccaacgccaaccccaacgccaaccccaacgccaaccccaacgucgaccccaacgccaaccccaacgccaaccccaacgccaaccccaacgccaaccccaacgccaaccccaacgccaaccccaacgccaaccccaacgccaaccccaacgccaaccccaacgccaaccccaacgccaaccccaacgccaaccccaacgccaaccccaacgccaaccccaacgccaaccccaacgccaaccccaacgccaaccccaacgccaaccccgccgccuacaucaagcccggcuccgccaacaagcccaaggacgagcucgacuacgccaacgacaucgaggccgccuacgccaaguucgucgccgccuggacccucaaggccgccgccugaggacuaguuauaagacugacuagcccgaugggccucccaacgggcccuccuccccuccuugcaccgagauuaaucaaaggcucuuuucagagccaccaaaaaaaaaaaaaaaaaaaaaaaaaaaaaaaaaaaaaaaaaaaaaaaaaaaaaaaaaaaaaaaaagaauu

SEQ ID NO: 7120 - RNA, 1175 nt, Artificial Sequence
  mRNA Design i-3 (hSL-A64-N5) comprising derived and/or modified sequence from Pf(3D7)__XP_001351122.1__HsALB_Pf-CSP(19-272)_L(G4S)_Pf-CSP(310-3 27)_L(G4S)_Pf-CSP(346-375) (opt2)
aggagaaagcuuaccaugaagugggucaccuucaucucccuccucuuccucuucuccuccgccuacucccucuuccaggaguaccagugcuacggcuccuccuccaacacccgcguccucaacgagcucaacuacgacaacgccggcaccaaccucuacaacgagcucgagaugaacuacuacggcaagcaggagaacugguacucccucaagaagaacucccgcucccucggcgagaacgacgacggcaacaacgaggacaacgagaagcuccgcaagcccaagcacaagaagcucaagcagcccgccgacggcaaccccgaccccaacgccaaccccaacgucgaccccaacgccaaccccaacgucgaccccaacgccaaccccaacgucgaccccaacgccaaccccaacgccaaccccaacgccaaccccaacgccaaccccaacgccaaccccaacgccaaccccaacgccaaccccaacgccaaccccaacgccaaccccaacgccaaccccaacgccaaccccaacgccaaccccaacgccaaccccaacgccaaccccaacgccaaccccaacgccaaccccaacgccaaccccaacgucgaccccaacgccaaccccaacgccaaccccaacgccaaccccaacgccaaccccaacgccaaccccaacgccaaccccaacgccaaccccaacgccaaccccaacgccaaccccaacgccaaccccaacgccaaccccaacgccaaccccaacgccaaccccaacgccaaccccaacgccaaccccaacgccaaccccaacgccaaccccaacgccaaccccggcggcggcggcuccgagcccuccgacaagcacaucaaggaguaccucaacaagauccagaacucccucggcggcggcggcuccaucaagcccggcuccgccaacaagcccaaggacgagcucgacuacgccaacgacaucgagaagaagaucugcaagauggagaagugcuccugaggacuaguuauaagacugacuagcccgaugggccucccaacgggcccuccuccccuccuugcaccgagauuaaucaaaggcucuuuucagagccaccaaaaaaaaaaaaaaaaaaaaaaaaaaaaaaaaaaaaaaaaaaaaaaaaaaaaaaaaaaaaaaaaagaauu

SEQ ID NO: 7121 - RNA, 1160 nt, Artificial Sequence
  mRNA Design i-3 (hSL-A64-N5) comprising derived and/or modified sequence from Pf(3D7)__XP_001351122.1__HsALB_Pf-CSP(19-272)_L(G4S)_Pf-CSP(310-3 27)_Pf-CSP(346-375) (opt2)
aggagaaagcuuaccaugaagugggucaccuucaucucccuccucuuccucuucuccuccgccuacucccucuuccaggaguaccagugcuacggcuccuccuccaacacccgcguccucaacgagcucaacuacgacaacgccggcaccaaccucuacaacgagcucgagaugaacuacuacggcaagcaggagaacugguacucccucaagaagaacucccgcucccucggcgagaacgacgacggcaacaacgaggacaacgagaagcuccgcaagcccaagcacaagaagcucaagcagcccgccgacggcaaccccgaccccaacgccaaccccaacgucgaccccaacgccaaccccaacgucgaccccaacgccaaccccaacgucgaccccaacgccaaccccaacgccaaccccaacgccaaccccaacgccaaccccaacgccaaccccaacgccaaccccaacgccaaccccaacgccaaccccaacgccaaccccaacgccaaccccaacgccaaccccaacgccaaccccaacgccaaccccaacgccaaccccaacgccaaccccaacgccaaccccaacgccaaccccaacgucgaccccaacgccaaccccaacgccaaccccaacgccaaccccaacgccaaccccaacgccaaccccaacgccaaccccaacgccaaccccaacgccaaccccaacgccaaccccaacgccaaccccaacgccaaccccaacgccaaccccaacgccaaccccaacgccaaccccaacgccaaccccaacgccaaccccaacgccaaccccaacgccaaccccggcggcggcggcuccgagcccuccgacaagcacaucaaggaguaccucaacaagauccagaacucccucaucaagcccggcuccgccaacaagcccaaggacgagcucgacuacgccaacgacaucgagaagaagaucugcaagauggagaagugcuccugaggacuaguuauaagacugacuagcccgaugggccucccaacgggcccuccuccccuccuugcaccgagauuaaucaaaggcucuuuucagagccaccaaaaaaaaaaaaaaaaaaaaaaaaaaaaaaaaaaaaaaaaaaaaaaaaaaaaaaaaaaaaaaaaagaauu

SEQ ID NO: 7122 - RNA, 1160 nt, Artificial Sequence
  mRNA Design i-3 (hSL-A64-N5) comprising derived and/or modified sequence from Pf(3D7)__XP_001351122.1__HsALB_Pf-CSP(19-325) (opt2)
aggagaaagcuuaccaugaagugggucaccuucaucucccuccucuuccucuucuccuccgccuacucccucuuccaggaguaccagugcuacggcuccuccuccaacacccgcguccucaacgagcucaacuacgacaacgccggcaccaaccucuacaacgagcucgagaugaacuacuacggcaagcaggagaacugguacucccucaagaagaacucccgcucccucggcgagaacgacgacggcaacaacgaggacaacgagaagcuccgcaagcccaagcacaagaagcucaagcagcccgccgacggcaaccccgaccccaacgccaaccccaacgucgaccccaacgccaaccccaacgucgaccccaacgccaaccccaacgucgaccccaacgccaaccccaacgccaaccccaacgccaaccccaacgccaaccccaacgccaaccccaacgccaaccccaacgccaaccccaacgccaaccccaacgccaaccccaacgccaaccccaacgccaaccccaacgccaaccccaacgccaaccccaacgccaaccccaacgccaaccccaacgccaaccccaacgccaaccccaacgucgaccccaacgccaaccccaacgccaaccccaacgccaaccccaacgccaaccccaacgccaaccccaacgccaaccccaacgccaaccccaacgccaaccccaacgccaaccccaacgccaaccccaacgccaaccccaacgccaaccccaacgccaaccccaacgccaaccccaacgccaaccccaacgccaaccccaacgccaaccccaacgccaaccccaacaagaacaaccagggcaacggccagggccacaacaugcccaacgaccccaaccgcaacgucgacgagaacgccaacgccaacuccgccgucaagaacaacaacaacgaggagcccuccgacaagcacaucaaggaguaccucaacaagauccagaacugaggacuaguuauaagacugacuagcccgaugggccucccaacgggcccuccuccccuccuugcaccgagauuaaucaaaggcucuuuucagagccaccaaaaaaaaaaaaaaaaaaaaaaaaaaaaaaaaaaaaaaaaaaaaaaaaaaaaaaaaaaaaaaaaagaauu

SEQ ID NO: 7123 - RNA, 1337 nt, Artificial Sequence
  mRNA Design i-3 (hSL-A64-N5) comprising derived and/or modified sequence from Pf(3D7)__XP_001351122.1__HsALB_Pf-CSP(19-384) (opt2)
aggagaaagcuuaccaugaagugggucaccuucaucucccuccucuuccucuucuccuccgccuacucccucuuccaggaguaccagugcuacggcuccuccuccaacacccgcguccucaacgagcucaacuacgacaacgccggcaccaaccucuacaacgagcucgagaugaacuacuacggcaagcaggagaacugguacucccucaagaagaacucccgcucccucggcgagaacgacgacggcaacaacgaggacaacgagaagcuccgcaagcccaagcacaagaagcucaagcagcccgccgacggcaaccccgaccccaacgccaaccccaacgucgaccccaacgccaaccccaacgucgaccccaacgccaaccccaacgucgaccccaacgccaaccccaacgccaaccccaacgccaaccccaacgccaaccccaacgccaaccccaacgccaaccccaacgccaaccccaacgccaaccccaacgccaaccccaacgccaaccccaacgccaaccccaacgccaaccccaacgccaaccccaacgccaaccccaacgccaaccccaacgccaaccccaacgccaaccccaacgucgaccccaacgccaaccccaacgccaaccccaacgccaaccccaacgccaaccccaacgccaaccccaacgccaaccccaacgccaaccccaacgccaaccccaacgccaaccccaacgccaaccccaacgccaaccccaacgccaaccccaacgccaaccccaacgccaaccccaacgccaaccccaacgccaaccccaacgccaaccccaacgccaaccccaacaagaacaaccagggcaacggccagggccacaacaugcccaacgaccccaaccgcaacgucgacgagaacgccaacgccaacuccgccgucaagaacaacaacaacgaggagcccuccgacaagcacaucaaggaguaccucaacaagauccagaacucccucuccaccgaguggucccccugcuccgucaccugcggcaacggcauccagguccgcaucaagcccggcuccgccaacaagcccaaggacgagcucgacuacgccaacgacaucgagaagaagaucugcaagauggagaagugcuccuccgucuucaacgucgucaacuccuccugaggacuaguuauaagacugacuagcccgaugggccucccaacgggcccuccuccccuccuugcaccgagauuaaucaaaggcucuuuucagagccaccaaaaaaaaaaaaaaaaaaaaaaaaaaaaaaaaaaaaaaaaaaaaaaaaaaaaaaaaaaaaaaaaagaauu

SEQ ID NO: 7124 - RNA, 1475 nt, Artificial Sequence
  mRNA Design i-3 (hSL-A64-N5) comprising derived and/or modified sequence from Pf(3D7)__XP_001351122.1__HsALB_Pf-CSP(19-384)_TM domain HA (opt2)
aggagaaagcuuaccaugaagugggucaccuucaucucccuccucuuccucuucuccuccgccuacucccucuuccaggaguaccagugcuacggcuccuccuccaacacccgcguccucaacgagcucaacuacgacaacgccggcaccaaccucuacaacgagcucgagaugaacuacuacggcaagcaggagaacugguacucccucaagaagaacucccgcucccucggcgagaacgacgacggcaacaacgaggacaacgagaagcuccgcaagcccaagcacaagaagcucaagcagcccgccgacggcaaccccgaccccaacgccaaccccaacgucgaccccaacgccaaccccaacgucgaccccaacgccaaccccaacgucgaccccaacgccaaccccaacgccaaccccaacgccaaccccaacgccaaccccaacgccaaccccaacgccaaccccaacgccaaccccaacgccaaccccaacgccaaccccaacgccaaccccaacgccaaccccaacgccaaccccaacgccaaccccaacgccaaccccaacgccaaccccaacgccaaccccaacgccaaccccaacgucgaccccaacgccaaccccaacgccaaccccaacgccaaccccaacgccaaccccaacgccaaccccaacgccaaccccaacgccaaccccaacgccaaccccaacgccaaccccaacgccaaccccaacgccaaccccaacgccaaccccaacgccaaccccaacgccaaccccaacgccaaccccaacgccaaccccaacgccaaccccaacgccaaccccaacaagaacaaccagggcaacggccagggccacaacaugcccaacgaccccaaccgcaacgucgacgagaacgccaacgccaacuccgccgucaagaacaacaacaacgaggagcccuccgacaagcacaucaaggaguaccucaacaagauccagaacucccucuccaccgaguggucccccugcuccgucaccugcggcaacggcauccagguccgcaucaagcccggcuccgccaacaagcccaaggacgagcucgacuacgccaacgacaucgagaagaagaucugcaagauggagaagugcuccuccgucuucaacgucgucaacuccuccaagcucgaguccacccgcaucuaccagauccucgccaucuacuccaccgucgccuccucccucguccucgucgucucccucggcgccaucuccuucuggaugugcuccaacggcucccuccagugccgcaucugcaucugaggacuaguuauaagacugacuagcccgaugggccucccaacgggcccuccuccccuccuugcaccgagauuaaucaaaggcucuuuucagagccaccaaaaaaaaaaaaaaaaaaaaaaaaaaaaaaaaaaaaaaaaaaaaaaaaaaaaaaaaaaaaaaaaagaauu

SEQ ID NO: 7125 - RNA, 1187 nt, Artificial Sequence
  mRNA Design i-3 (hSL-A64-N5) comprising derived and/or modified sequence from Pf(3D7)__XP_001351122.1__HsALB_Pf-CSP(82-397) (opt2)
aggagaaagcuuaccaugaagugggucaccuucaucucccuccucuuccucuucuccuccgccuacuccgacaacgagaagcuccgcaagcccaagcacaagaagcucaagcagcccgccgacggcaaccccgaccccaacgccaaccccaacgucgaccccaacgccaaccccaacgucgaccccaacgccaaccccaacgucgaccccaacgccaaccccaacgccaaccccaacgccaaccccaacgccaaccccaacgccaaccccaacgccaaccccaacgccaaccccaacgccaaccccaacgccaaccccaacgccaaccccaacgccaaccccaacgccaaccccaacgccaaccccaacgccaaccccaacgccaaccccaacgccaaccccaacgccaaccccaacgucgaccccaacgccaaccccaacgccaaccccaacgccaaccccaacgccaaccccaacgccaaccccaacgccaaccccaacgccaaccccaacgccaaccccaacgccaaccccaacgccaaccccaacgccaaccccaacgccaaccccaacgccaaccccaacgccaaccccaacgccaaccccaacgccaaccccaacgccaaccccaacgccaaccccaacaagaacaaccagggcaacggccagggccacaacaugcccaacgaccccaaccgcaacgucgacgagaacgccaacgccaacuccgccgucaagaacaacaacaacgaggagcccuccgacaagcacaucaaggaguaccucaacaagauccagaacucccucuccaccgaguggucccccugcuccgucaccugcggcaacggcauccagguccgcaucaagcccggcuccgccaacaagcccaaggacgagcucgacuacgccaacgacaucgagaagaagaucugcaagauggagaagugcuccuccgucuucaacgucgucaacuccuccaucggccucaucaugguccucuccuuccucuuccucaacugaggacuaguuauaagacugacuagcccgaugggccucccaacgggcccuccuccccuccuugcaccgagauuaaucaaaggcucuuuucagagccaccaaaaaaaaaaaaaaaaaaaaaaaaaaaaaaaaaaaaaaaaaaaaaaaaaaaaaaaaaaaaaaaaagaauu

SEQ ID NO: 7126 - RNA, 539 nt, Artificial Sequence
  mRNA Design i-3 (hSL-A64-N5) comprising derived and/or modified sequence from Pf(3D7)__XP_001351122.1__HsALB_Pf-CSP(93-192) (opt2)
aggagaaagcuuaccaugaagugggucaccuucaucucccuccucuuccucuucuccuccgccuacuccaagcucaagcagcccgccgacggcaaccccgaccccaacgccaaccccaacgucgaccccaacgccaaccccaacgucgaccccaacgccaaccccaacgucgaccccaacgccaaccccaacgccaaccccaacgccaaccccaacgccaaccccaacgccaaccccaacgccaaccccaacgccaaccccaacgccaaccccaacgccaaccccaacgccaaccccaacgccaaccccaacgccaaccccaacgccaaccccaacgccaaccccaacgccaaccccaacgccaaccccugaggacuaguuauaagacugacuagcccgaugggccucccaacgggcccuccuccccuccuugcaccgagauuaaucaaaggcucuuuucagagccaccaaaaaaaaaaaaaaaaaaaaaaaaaaaaaaaaaaaaaaaaaaaaaaaaaaaaaaaaaaaaaaaaagaauu

SEQ ID NO: 7127 - RNA, 779 nt, Artificial Sequence
  mRNA Design i-3 (hSL-A64-N5) comprising derived and/or modified sequence from Pf(3D7)__XP_001351122.1__HsALB_Pf-CSP(93-272) (opt2)
aggagaaagcuuaccaugaagugggucaccuucaucucccuccucuuccucuucuccuccgccuacuccaagcucaagcagcccgccgacggcaaccccgaccccaacgccaaccccaacgucgaccccaacgccaaccccaacgucgaccccaacgccaaccccaacgucgaccccaacgccaaccccaacgccaaccccaacgccaaccccaacgccaaccccaacgccaaccccaacgccaaccccaacgccaaccccaacgccaaccccaacgccaaccccaacgccaaccccaacgccaaccccaacgccaaccccaacgccaaccccaacgccaaccccaacgccaaccccaacgccaaccccaacgccaaccccaacgucgaccccaacgccaaccccaacgccaaccccaacgccaaccccaacgccaaccccaacgccaaccccaacgccaaccccaacgccaaccccaacgccaaccccaacgccaaccccaacgccaaccccaacgccaaccccaacgccaaccccaacgccaaccccaacgccaaccccaacgccaaccccaacgccaaccccaacgccaaccccaacgccaaccccugaggacuaguuauaagacugacuagcccgaugggccucccaacgggcccuccuccccuccuugcaccgagauuaaucaaaggcucuuuucagagccaccaaaaaaaaaaaaaaaaaaaaaaaaaaaaaaaaaaaaaaaaaaaaaaaaaaaaaaaaaaaaaaaaagaauu

SEQ ID NO: 7128 - RNA, 1154 nt, Artificial Sequence
  mRNA Design i-3 (hSL-A64-N5) comprising derived and/or modified sequence from Pf(3D7)__XP_001351122.1__HsALB_Pf-CSP(93-397) (opt2)
aggagaaagcuuaccaugaagugggucaccuucaucucccuccucuuccucuucuccuccgccuacuccaagcucaagcagcccgccgacggcaaccccgaccccaacgccaaccccaacgucgaccccaacgccaaccccaacgucgaccccaacgccaaccccaacgucgaccccaacgccaaccccaacgccaaccccaacgccaaccccaacgccaaccccaacgccaaccccaacgccaaccccaacgccaaccccaacgccaaccccaacgccaaccccaacgccaaccccaacgccaaccccaacgccaaccccaacgccaaccccaacgccaaccccaacgccaaccccaacgccaaccccaacgccaaccccaacgucgaccccaacgccaaccccaacgccaaccccaacgccaaccccaacgccaaccccaacgccaaccccaacgccaaccccaacgccaaccccaacgccaaccccaacgccaaccccaacgccaaccccaacgccaaccccaacgccaaccccaacgccaaccccaacgccaaccccaacgccaaccccaacgccaaccccaacgccaaccccaacgccaaccccaacaagaacaaccagggcaacggccagggccacaacaugcccaacgaccccaaccgcaacgucgacgagaacgccaacgccaacuccgccgucaagaacaacaacaacgaggagcccuccgacaagcacaucaaggaguaccucaacaagauccagaacucccucuccaccgaguggucccccugcuccgucaccugcggcaacggcauccagguccgcaucaagcccggcuccgccaacaagcccaaggacgagcucgacuacgccaacgacaucgagaagaagaucugcaagauggagaagugcuccuccgucuucaacgucgucaacuccuccaucggccucaucaugguccucuccuuccucuuccucaacugaggacuaguuauaagacugacuagcccgaugggccucccaacgggcccuccuccccuccuugcaccgagauuaaucaaaggcucuuuucagagccaccaaaaaaaaaaaaaaaaaaaaaaaaaaaaaaaaaaaaaaaaaaaaaaaaaaaaaaaaaaaaaaaaagaauu

SEQ ID NO: 7129 - RNA, 524 nt, Artificial Sequence
  mRNA Design i-3 (hSL-A64-N5) comprising derived and/or modified sequence from Pf(3D7)__XP_001351122.1__HsALB_Pf-CSP(98-192) (opt2)
aggagaaagcuuaccaugaagugggucaccuucaucucccuccucuuccucuucuccuccgccuacuccgccgacggcaaccccgaccccaacgccaaccccaacgucgaccccaacgccaaccccaacgucgaccccaacgccaaccccaacgucgaccccaacgccaaccccaacgccaaccccaacgccaaccccaacgccaaccccaacgccaaccccaacgccaaccccaacgccaaccccaacgccaaccccaacgccaaccccaacgccaaccccaacgccaaccccaacgccaaccccaacgccaaccccaacgccaaccccaacgccaaccccaacgccaaccccugaggacuaguuauaagacugacuagcccgaugggccucccaacgggcccuccuccccuccuugcaccgagauuaaucaaaggcucuuuucagagccaccaaaaaaaaaaaaaaaaaaaaaaaaaaaaaaaaaaaaaaaaaaaaaaaaaaaaaaaaaaaaaaaaagaauu

SEQ ID NO: 7130 - RNA, 764 nt, Artificial Sequence
  mRNA Design i-3 (hSL-A64-N5) comprising derived and/or modified sequence from Pf(3D7)__XP_001351122.1__HsALB_Pf-CSP(98-272) (opt2)
aggagaaagcuuaccaugaagugggucaccuucaucucccuccucuuccucuucuccuccgccuacuccgccgacggcaaccccgaccccaacgccaaccccaacgucgaccccaacgccaaccccaacgucgaccccaacgccaaccccaacgucgaccccaacgccaaccccaacgccaaccccaacgccaaccccaacgccaaccccaacgccaaccccaacgccaaccccaacgccaaccccaacgccaaccccaacgccaaccccaacgccaaccccaacgccaaccccaacgccaaccccaacgccaaccccaacgccaaccccaacgccaaccccaacgccaaccccaacgccaaccccaacgucgaccccaacgccaaccccaacgccaaccccaacgccaaccccaacgccaaccccaacgccaaccccaacgccaaccccaacgccaaccccaacgccaaccccaacgccaaccccaacgccaaccccaacgccaaccccaacgccaaccccaacgccaaccccaacgccaaccccaacgccaaccccaacgccaaccccaacgccaaccccaacgccaaccccugaggacuaguuauaagacugacuagcccgaugggccucccaacgggcccuccuccccuccuugcaccgagauuaaucaaaggcucuuuucagagccaccaaaaaaaaaaaaaaaaaaaaaaaaaaaaaaaaaaaaaaaaaaaaaaaaaaaaaaaaaaaaaaaaagaauu

SEQ ID NO: 7131 - RNA, 1070 nt, Artificial Sequence
  mRNA Design i-3 (hSL-A64-N5) comprising derived and/or modified sequence from Pf(3D7)__XP_001351122.1__HsALB_Pf-CSP(98-374) (opt2)
aggagaaagcuuaccaugaagugggucaccuucaucucccuccucuuccucuucuccuccgccuacuccgccgacggcaaccccgaccccaacgccaaccccaacgucgaccccaacgccaaccccaacgucgaccccaacgccaaccccaacgucgaccccaacgccaaccccaacgccaaccccaacgccaaccccaacgccaaccccaacgccaaccccaacgccaaccccaacgccaaccccaacgccaaccccaacgccaaccccaacgccaaccccaacgccaaccccaacgccaaccccaacgccaaccccaacgccaaccccaacgccaaccccaacgccaaccccaacgccaaccccaacgucgaccccaacgccaaccccaacgccaaccccaacgccaaccccaacgccaaccccaacgccaaccccaacgccaaccccaacgccaaccccaacgccaaccccaacgccaaccccaacgccaaccccaacgccaaccccaacgccaaccccaacgccaaccccaacgccaaccccaacgccaaccccaacgccaaccccaacgccaaccccaacgccaaccccaacaagaacaaccagggcaacggccagggccacaacaugcccaacgaccccaaccgcaacgucgacgagaacgccaacgccaacuccgccgucaagaacaacaacaacgaggagcccuccgacaagcacaucaaggaguaccucaacaagauccagaacucccucuccaccgaguggucccccugcuccgucaccugcggcaacggcauccagguccgcaucaagcccggcuccgccaacaagcccaaggacgagcucgacuacgccaacgacaucgagaagaagaucugcaagauggagaagugcugaggacuaguuauaagacugacuagcccgaugggccucccaacgggcccuccuccccuccuugcaccgagauuaaucaaaggcucuuuucagagccaccaaaaaaaaaaaaaaaaaaaaaaaaaaaaaaaaaaaaaaaaaaaaaaaaaaaaaaaaaaaaaaaaagaauu

SEQ ID NO: 7132 - RNA, 1139 nt, Artificial Sequence
  mRNA Design i-3 (hSL-A64-N5) comprising derived and/or modified sequence from Pf(3D7)__XP_001351122.1__HsALB_Pf-CSP(98-397) (opt2)
aggagaaagcuuaccaugaagugggucaccuucaucucccuccucuuccucuucuccuccgccuacuccgccgacggcaaccccgaccccaacgccaaccccaacgucgaccccaacgccaaccccaacgucgaccccaacgccaaccccaacgucgaccccaacgccaaccccaacgccaaccccaacgccaaccccaacgccaaccccaacgccaaccccaacgccaaccccaacgccaaccccaacgccaaccccaacgccaaccccaacgccaaccccaacgccaaccccaacgccaaccccaacgccaaccccaacgccaaccccaacgccaaccccaacgccaaccccaacgccaaccccaacgucgaccccaacgccaaccccaacgccaaccccaacgccaaccccaacgccaaccccaacgccaaccccaacgccaaccccaacgccaaccccaacgccaaccccaacgccaaccccaacgccaaccccaacgccaaccccaacgccaaccccaacgccaaccccaacgccaaccccaacgccaaccccaacgccaaccccaacgccaaccccaacgccaaccccaacaagaacaaccagggcaacggccagggccacaacaugcccaacgaccccaaccgcaacgucgacgagaacgccaacgccaacuccgccgucaagaacaacaacaacgaggagcccuccgacaagcacaucaaggaguaccucaacaagauccagaacucccucuccaccgaguggucccccugcuccgucaccugcggcaacggcauccagguccgcaucaagcccggcuccgccaacaagcccaaggacgagcucgacuacgccaacgacaucgagaagaagaucugcaagauggagaagugcuccuccgucuucaacgucgucaacuccuccaucggccucaucaugguccucuccuuccucuuccucaacugaggacuaguuauaagacugacuagcccgaugggccucccaacgggcccuccuccccuccuugcaccgagauuaaucaaaggcucuuuucagagccaccaaaaaaaaaaaaaaaaaaaaaaaaaaaaaaaaaaaaaaaaaaaaaaaaaaaaaaaaaaaaaaaaagaauu

SEQ ID NO: 7133 - RNA, 1466 nt, Artificial Sequence
  mRNA Design i-3 (hSL-A64-N5) comprising derived and/or modified sequence from Pf(3D7)__XP_001351122.1__HsALB_Pf-CSP(199-377)_L(PVTN)_HBsAg (opt2)
aggagaaagcuuaccaugaagugggucaccuucaucucccuccucuuccucuucuccuccgccuacuccgaccccaacgccaaccccaacgccaaccccaacgccaaccccaacgccaaccccaacgccaaccccaacgccaaccccaacgccaaccccaacgccaaccccaacgccaaccccaacgccaaccccaacgccaaccccaacgccaaccccaacgccaaccccaacgccaaccccaacgccaaccccaacgccaaccccaacgccaaccccaacgccaaccccaacaagaacaaccagggcaacggccagggccacaacaugcccaacgaccccaaccgcaacgucgacgagaacgccaacgccaacuccgccgucaagaacaacaacaacgaggagcccuccgacaagcacaucaaggaguaccucaacaagauccagaacucccucuccaccgaguggucccccugcuccgucaccugcggcaacggcauccagguccgcaucaagcccggcuccgccaacaagcccaaggacgagcucgacuacgccaacgacaucgagaagaagaucugcaagauggagaagugcuccuccguccccgucaccaacauggagaacaucaccuccggcuuccucggcccccuccucguccuccaggccggcuucuuccuccucacccgcauccucaccaucccccagucccucgacuccugguggaccucccucaacuuccucggcggcucccccgucugccucggccagaacucccagucccccaccuccaaccacucccccaccuccugcccccccaucugccccggcuaccgcuggaugugccuccgccgcuucaucaucuuccucuucauccuccuccucugccucaucuuccuccucguccuccucgacuaccagggcaugcuccccgucugcccccucauccccggcuccaccaccaccaacaccggccccugcaagaccugcaccacccccgcccagggcaacuccauguuccccuccugcugcugcaccaagcccaccgacggcaacugcaccugcauccccauccccuccuccugggccuucgccaaguaccucugggagugggccuccguccgcuucuccuggcucucccuccucguccccuucguccagugguucgucggccucucccccaccgucuggcucuccgccaucuggaugaugugguacuggggccccucccucuacuccaucgucucccccuucaucccccuccuccccaucuucuucugccucugggucuacaucugaggacuaguuauaagacugacuagcccgaugggccucccaacgggcccuccuccccuccuugcaccgagauuaaucaaaggcucuuuucagagccaccaaaaaaaaaaaaaaaaaaaaaaaaaaaaaaaaaaaaaaaaaaaaaaaaaaaaaaaaaaaaaaaaagaauu

SEQ ID NO: 7134 - RNA, 1376 nt, Artificial Sequence
  mRNA Design i-3 (hSL-A64-N5) comprising derived and/or modified sequence from Pf(3D7)__XP_001351122.1__Pf-CSP (opt3)
aggagaaagcuuaccaugaugagaaagcuggccauccucagcguguccucuuuccuuuuugucgaggcucuguuccaggaauaccaaugcuauggcucaaguagcaacaccaggguuuugaaugaguuaaacuacgacaaugcagggacaaaccuguauaaugaacuagagaugaacuacuauggaaaacaggaaaauugguacucccucaagaaaaacucucggucgcugggugagaaugaugacggcaacaaugaggauaacgaaaaacuucgcaagcccaagcacaagaaacugaagcagccugccgacgggaauccagauccgaacgcgaaucccaacguggacccuaacgcuaauccaaacguagaucccaaugccaacccuaauguggacccaaacgcaaaucccaacgccaauccuaacgcuaauccaaacgcaaauccgaacgccaaucccaacgcuaacccuaaugccaacccaaaugcgaaccccaaugcaaacccuaaugccaacccaaaugcuaaccccaaugccaacccgaaugcaaacccuaaugcuaaccccaacgccaauccaaacgcgaauccuaacgccaaucccaacgucgauccaaaugcaaaccccaaugcuaacccuaaugccaacccaaaugcuaacccgaaugccaaccccaacgcaaauccuaacgccaauccaaacgcuaaucccaacgcgaauccuaacgcaaauccaaacgccaaucccaacgcuaauccgaacgccaauccuaacgcaaauccaaacgccaaccccaaugcuaacccuaaugccaaccccaaugcaaacccaaauaaaaacaaucagggaaacggccaaggucauaauaugccuaacgaccccaaucgaaacguggaugagaaugcgaacgcuaacucagccguuaagaauaacaauaacgaggaaccaagcgacaaacacauuaaggaguauuugaauaagauacagaacagucucuccacugaauggucuccguguagcgugacgugcgggaauggaauccagguccguauuaaaccuggcuccgcaaacaagcccaaagaugagcuggacuacgccaaugacaucgaaaagaaaauuuguaagauggagaaaugcucaaguguguuuaacguaguuaauagcucuaucggccugauaauggugcucuccuucuuauuucugaacugaggacuaguuauaagacugacuagcccgaugggccucccaacgggcccuccuccccuccuugcaccgagauuaaucaaaggcucuuuucagagccaccaaaaaaaaaaaaaaaaaaaaaaaaaaaaaaaaaaaaaaaaaaaaaaaaaaaaaaaaaaaaaaaaagaauu

SEQ ID NO: 7135 - RNA, 1307 nt, Artificial Sequence
  mRNA Design i-3 (hSL-A64-N5) comprising derived and/or modified sequence from Pf(3D7)__XP_001351122.1__Pf-CSP(1-374) (opt3)
aggagaaagcuuaccaugaugagaaagcuggccauccucagcguguccucuuuccuuuuugucgaggcucuguuccaggaauaccaaugcuauggcucaaguagcaacaccaggguuuugaaugaguuaaacuacgacaaugcagggacaaaccuguauaaugaacuagagaugaacuacuauggaaaacaggaaaauugguacucccucaagaaaaacucucggucgcugggugagaaugaugacggcaacaaugaggauaacgaaaaacuucgcaagcccaagcacaagaaacugaagcagccugccgacgggaauccagauccgaacgcgaaucccaacguggacccuaacgcuaauccaaacguagaucccaaugccaacccuaauguggacccaaacgcaaaucccaacgccaauccuaacgcuaauccaaacgcaaauccgaacgccaaucccaacgcuaacccuaaugccaacccaaaugcgaaccccaaugcaaacccuaaugccaacccaaaugcuaaccccaaugccaacccgaaugcaaacccuaaugcuaaccccaacgccaauccaaacgcgaauccuaacgccaaucccaacgucgauccaaaugcaaaccccaaugcuaacccuaaugccaacccaaaugcuaacccgaaugccaaccccaacgcaaauccuaacgccaauccaaacgcuaaucccaacgcgaauccuaacgcaaauccaaacgccaaucccaacgcuaauccgaacgccaauccuaacgcaaauccaaacgccaaccccaaugcuaacccuaaugccaaccccaaugcaaacccaaauaaaaacaaucagggaaacggccaaggucauaauaugccuaacgaccccaaucgaaacguggaugagaaugcgaacgcuaacucagccguuaagaauaacaauaacgaggaaccaagcgacaaacacauuaaggaguauuugaauaagauacagaacagucucuccacugaauggucuccguguagcgugacgugcgggaauggaauccagguccguauuaaaccuggcuccgcaaacaagcccaaagaugagcuggacuacgccaaugacaucgaaaagaaaauuuguaagauggagaaaugcugaggacuaguuauaagacugacuagcccgaugggccucccaacgggcccuccuccccuccuugcaccgagauuaaucaaaggcucuuuucagagccaccaaaaaaaaaaaaaaaaaaaaaaaaaaaaaaaaaaaaaaaaaaaaaaaaaaaaaaaaaaaaaaaaagaauu

SEQ ID NO: 7136 - RNA, 1160 nt, Artificial Sequence
  mRNA Design i-3 (hSL-A64-N5) comprising derived and/or modified sequence from Pf(3D7)__XP_001351122.1__Pf-CSP(1-325) (opt3)
aggagaaagcuuaccaugaugagaaagcuggccauccucagcguguccucuuuccuuuuugucgaggcucuguuccaggaauaccaaugcuauggcucaaguagcaacaccaggguuuugaaugaguuaaacuacgacaaugcagggacaaaccuguauaaugaacuagagaugaacuacuauggaaaacaggaaaauugguacucccucaagaaaaacucucggucgcugggugagaaugaugacggcaacaaugaggauaacgaaaaacuucgcaagcccaagcacaagaaacugaagcagccugccgacgggaauccagauccgaacgcgaaucccaacguggacccuaacgcuaauccaaacguagaucccaaugccaacccuaauguggacccaaacgcaaaucccaacgccaauccuaacgcuaauccaaacgcaaauccgaacgccaaucccaacgcuaacccuaaugccaacccaaaugcgaaccccaaugcaaacccuaaugccaacccaaaugcuaaccccaaugccaacccgaaugcaaacccuaaugcuaaccccaacgccaauccaaacgcgaauccuaacgccaaucccaacgucgauccaaaugcaaaccccaaugcuaacccuaaugccaacccaaaugcuaacccgaaugccaaccccaacgcaaauccuaacgccaauccaaacgcuaaucccaacgcgaauccuaacgcaaauccaaacgccaaucccaacgcuaauccgaacgccaauccuaacgcaaauccaaacgccaaccccaaugcuaacccuaaugccaaccccaaugcaaacccaaauaaaaacaaucagggaaacggccaaggucauaauaugccuaacgaccccaaucgaaacguggaugagaaugcgaacgcuaacucagccguuaagaauaacaauaacgaggaaccaagcgacaaacacauuaaggaguauuugaauaagauacagaacugaggacuaguuauaagacugacuagcccgaugggccucccaacgggcccuccuccccuccuugcaccgagauuaaucaaaggcucuuuucagagccaccaaaaaaaaaaaaaaaaaaaaaaaaaaaaaaaaaaaaaaaaaaaaaaaaaaaaaaaaaaaaaaaaagaauu

SEQ ID NO: 7137 - RNA, 1376 nt, Artificial Sequence
  mRNA Design i-3 (hSL-A64-N5) comprising derived and/or modified sequence from Pf(3D7)__XP_001351122.1__HsALB_Pf-CSP(19-397) (opt3)
aggagaaagcuuaccaugaagugggugaccuucaucagccugcucuuucuuuucuccucugccuacucacuguuucaggaguaucaaugcuacggcaguagcuccaacacaagagucuugaaugaauuaaacuaugacaaugcugggacuaaccuguacaaugagcuagaaaugaacuauuacggaaaacaggagaauugguauucucucaagaaaaacucgaggucacugggugaaaaugaugacggcaacaaugaggauaacgagaaacuucggaagcccaagcacaagaaacugaagcagccugcagacgggaauccagauccgaacgccaaucccaacguugacccuaacgcgaauccaaacguggaucccaaugcuaacccuaauguagacccaaacgccaaucccaacgcaaauccuaacgccaauccaaacgcuaauccgaacgcaaaucccaacgccaacccuaaugcuaacccaaaugccaaccccaaugcgaacccuaaugcaaacccaaaugccaaccccaaugcuaacccgaaugccaacccuaaugcaaaccccaacgcuaauccaaacgccaauccuaacgcgaaucccaacguggauccaaaugccaaccccaaugcaaacccuaaugcuaacccaaaugccaacccgaaugcuaaccccaacgccaauccuaacgcaaauccaaacgccaaucccaacgcuaauccuaacgcgaauccaaacgcaaaucccaacgccaauccgaacgcuaauccuaacgccaauccaaacgcaaaccccaaugccaacccuaaugcuaaccccaaugccaacccaaauaaaaacaaucagggaaacggccaaggucauaauaugccuaacgaccccaaucgcaacgucgaugaaaaugcaaacgcgaacagcgcugugaagaauaacaauaacgaggaaccaagugacaaacacauuaaggaguacuugaauaagauacagaacucccucucuacggaguggagcccguguuccguuaccugcgggaauggaauccaggugcgaauuaaaccuggcucagccaacaagcccaaagaugaacuggacuacgcaaaugacaucgagaagaaaauuuguaagauggaaaaaugcaguagcgucuucaacgugguaaauucuuccaucggccugauaaugguucucucauuuuuauuccugaacugaggacuaguuauaagacugacuagcccgaugggccucccaacgggcccuccuccccuccuugcaccgagauuaaucaaaggcucuuuucagagccaccaaaaaaaaaaaaaaaaaaaaaaaaaaaaaaaaaaaaaaaaaaaaaaaaaaaaaaaaaaaaaaaaagaauu

SEQ ID NO: 7138 - RNA, 1394 nt, Artificial Sequence
  mRNA Design i-3 (hSL-A64-N5) comprising derived and/or modified sequence from Pf(3D7)__XP_001351122.1__HsIns-iso1_Pf-CSP(19-397) (opt3)
aggagaaagcuuaccauggcccuguggaugagacuccuuccccuguuggcuuuacuggcacuauggggcccugacccagccgcggcucucuuccaggaguaccaaugcuaugggagcuccucuaacaccagggugcugaaugaacuuaacuacgauaaugccggaacaaaccuguauaaugaguuggaaaugaacuacuaugguaagcaggagaauugguacucacucaaaaagaacagucggagccugggcgaaaaugacgaugggaacaaugaggacaacgagaaacugcgcaagccgaaacacaagaagcucaaacagcccgcagauggaaauccugacccaaacgccaaucccaacgucgauccuaacgcuaauccaaacguugaccccaaugcaaacccuaauguggauccaaacgccaauccgaacgcuaaucccaacgccaauccuaacgcgaauccaaacgcaaaucccaacgccaacccuaaugcuaacccaaaugccaaccccaaugcaaacccgaaugcuaacccuaaugccaaccccaaugcgaacccaaaugccaacccuaaugcaaaccccaacgcuaauccaaacgccaaucccaacgcuaauccuaacguagacccaaaugccaacccgaaugcaaaccccaaugccaacccuaaugcuaacccaaaugcgaaccccaacgcaaauccuaacgccaauccaaacgcuaaucccaacgccaauccgaacgcaaauccuaacgccaauccaaacgcuaaucccaacgccaauccuaacgcaaaucccaacgcgaacccaaaugcuaacccuaaugccaaccccaaugcaaacccaaauaagaacaaucagggcaacggucaagggcauaauaugccgaacgauccuaaucgaaacguggacgaaaaugccaacgcuaacuccgccgucaaaaauaacaauaacgaggaacccucugauaagcacaucaaagaguauuuaaauaagauucagaacucgcugucaacugaguggagcccauguagugugacgugcggaaauggcauacagguucguaucaagcccggcuccgcaaacaaaccuaaggacgaacuugacuacgcuaaugauauugagaaaaagaucuguaaaauggaaaagugcucuagcguguuuaacgucguaaauuccucaauuggguugaucauggugcugaguuuccuauuucucaacugaggacuaguuauaagacugacuagcccgaugggccucccaacgggcccuccuccccuccuugcaccgagauuaaucaaaggcucuuuucagagccaccaaaaaaaaaaaaaaaaaaaaaaaaaaaaaaaaaaaaaaaaaaaaaaaaaaaaaaaaaaaaaaaaagaauu

SEQ ID NO: 7139 - RNA, 1373 nt, Artificial Sequence
  mRNA Design i-3 (hSL-A64-N5) comprising derived and/or modified sequence from Pf(3D7)__XP_001351122.1__HsSPARC_Pf-CSP(19-397) (opt3)
aggagaaagcuuaccaugagagccuggaucuucuuucugcucugccuugcuggcagggcacuggccuuguuccaggaguaccaauguuaugggagcuccucuaacacccggguguuaaaugaacugaacuacgacaaugcgggaacaaaccuauauaaugagcucgaaaugaacuacuaugguaagcaggagaauugguacucacugaaaaagaacagucgcagccuuggcgaaaaugaugacgggaacaaugaggauaacgagaaacugcgaaagcccaaacacaagaaguugaaacagccugcugacggaaauccagauccgaacgccaaucccaacgucgacccuaacgcaaauccaaacguugaucccaaugccaacccuaauguggacccaaacgcuaaucccaacgcaaauccuaacgccaauccaaacgcuaauccgaacgccaaucccaacgcgaacccuaaugcaaacccaaaugccaaccccaaugcuaacccuaaugccaacccaaaugcaaaccccaaugcuaacccgaaugccaacccuaaugcgaaccccaacgccaauccaaacgcaaauccuaacgcuaaucccaacguagauccaaaugccaaccccaaugcuaacccuaaugccaacccaaaugcaaacccgaaugccaaccccaacgcuaauccuaacgcgaauccaaacgcaaaucccaacgccaauccuaacgcuaauccaaacgccaaucccaacgcaaauccgaacgccaauccuaacgcuaauccaaacgccaaccccaaugcaaacccuaaugcgaaccccaaugcuaacccaaauaagaacaaucagggcaacggucaagggcauaauaugccuaacgaccccaaucguaacguggaugaaaaugccaacgcaaacuccgccgucaaaaauaacaauaacgaggaaccaucugacaagcacauuaaagaguaucucaauaagauacagaacucgcugucaacugaguggagcccgugcagugugacguguggaaauggcauccagguuagaauuaagccuggcuccgcuaacaaacccaaggaugaacuggacuacgccaaugacaucgagaaaaagauuugcaaaauggaaaaguguucuagcguguuuaacgucguaaauuccucaaucgggcucauaaugguguuaaguuuccuguuucuuaacugaggacuaguuauaagacugacuagcccgaugggccucccaacgggcccuccuccccuccuugcaccgagauuaaucaaaggcucuuuucagagccaccaaaaaaaaaaaaaaaaaaaaaaaaaaaaaaaaaaaaaaaaaaaaaaaaaaaaaaaaaaaaaaaaagaauu

SEQ ID NO: 7140 - RNA, 1376 nt, Artificial Sequence
  mRNA Design i-3 (hSL-A64-N5) comprising derived and/or modified sequence from Pf(3D7)__XP_001351122.1__IgE_Pf-CSP(19-397) (opt3)
aggagaaagcuuaccauggacuggaccuggauccuguuccucguggccgcugcaacaagaguccacagccuuuuucaggaguaccaaugcuauggcuccucuucaaacacuaggguucugaaugaauugaacuacgauaaugccgggacgaacuuauauaaugagcuggaaaugaacuacuauggaaagcaggagaauugguacagucuaaagaagaacagccggucccucggugaaaaugacgauggcaacaaugaggacaacgagaaacugcgcaagcccaaacauaagaaacuuaaacagccugcggaugggaauccagacccgaacgcuaaucccaacguggauccuaacgccaauccaaacguagaccccaaugcaaacccuaauguggauccaaacgccaaucccaacgcuaauccuaacgcaaauccaaacgccaauccgaacgcuaaucccaacgccaacccuaaugcgaacccaaaugcaaaccccaaugccaacccuaaugcuaacccaaaugccaaccccaaugcaaacccgaaugcuaacccuaaugccaaccccaacgcgaauccaaacgccaauccuaacgcaaaucccaacgucgacccaaaugcuaaccccaaugccaacccuaaugcuaacccaaaugccaacccgaaugcaaaccccaacgccaauccuaacgcuaauccaaacgcgaaucccaacgcaaauccuaacgccaauccaaacgcuaaucccaacgccaauccgaacgcaaauccuaacgccaauccaaacgcuaaccccaaugccaacccuaaugcaaaccccaaugcgaacccaaauaagaacaaucagggaaacggccaaggucacaauaugccuaacgaucccaaucgaaacguggacgaaaaugcuaacgccaacucugcaguuaaaaauaacaauaacgaggaaccaucggauaagcauauuaaagaguaucugaauaagauacagaacucauugagcaccgaguggaguccguguuccgugacaugcgggaauggaauccagguccguauuaagccuggcucugccaacaaacccaaggacgaacucgacuacgcuaaugauaucgagaaaaagauuuguaaaauggaaaagugcagcuccguguucaacguaguuaauucaaguaucggccugauaauggugcugagcuuucucuucuuaaacugaggacuaguuauaagacugacuagcccgaugggccucccaacgggcccuccuccccuccuugcaccgagauuaaucaaaggcucuuuucagagccaccaaaaaaaaaaaaaaaaaaaaaaaaaaaaaaaaaaaaaaaaaaaaaaaaaaaaaaaaaaaaaaaaagaauu

SEQ ID NO: 7141 - RNA, 1541 nt, Artificial Sequence
  mRNA Design i-3 (hSL-A64-N5) comprising derived and/or modified sequence from Pf(3D7)__XP_001351122.1__Pf-CSP_L(G4SG4)_TM domain HA (opt3)
aggagaaagcuuaccaugaugagaaagcuggccauccucagcguguccucuuuccuuuuugucgaggcucuguuccaggaauaccaaugcuauggcucaaguagcaacaccaggguuuugaaugaguuaaacuacgacaaugcagggacaaaccuguauaaugaacuagagaugaacuacuauggaaagcaggaaaauugguacucccucaagaaaaacucucggucgcugggugagaaugaugacggcaacaaugaggauaacgaaaaacuucgcaagcccaagcacaagaaacugaagcagccugccgacgggaauccagauccgaacgcgaaucccaacguggacccuaacgcuaauccaaacguagaucccaaugccaacccuaauguggacccaaacgcaaaucccaacgccaauccuaacgcuaauccaaacgcaaauccgaacgccaaucccaacgcuaacccuaaugccaacccaaaugcgaaccccaaugcaaacccuaaugccaacccaaaugcuaaccccaaugccaacccgaaugcaaacccuaaugcuaaccccaacgccaauccaaacgcgaauccuaacgccaaucccaacgucgauccaaaugcaaaccccaaugcuaacccuaaugccaacccaaaugcuaacccgaaugccaaccccaacgcaaauccuaacgccaauccaaacgcuaaucccaacgcgaauccuaacgcaaauccaaacgccaaucccaacgcuaauccgaacgccaauccuaacgcaaauccaaacgccaaccccaaugcuaacccuaaugccaaccccaaugcaaacccaaauaaaaacaaucagggaaacggccaaggucauaauaugccuaacgaccccaaucgaaacguggaugagaaugcgaacgcuaacucagccguuaagaauaacaauaacgaggaaccaagcgacaaacacauuaaggaguauuugaauaagauacagaacagucucuccacugaauggucuccguguagcgugacgugcgggaauggaauccagguccguauuaaaccuggcuccgcaaacaagcccaaagaugagcuggacuacgccaaugacaucgaaaagaaaauuuguaagauggagaaaugcucaaguguguuuaacguaguuaauagcucuaucggccugauaauggugcucuccuucuuauuucugaacgggggagguggcucagggggaggcgguaaacuugaaagcaccagaaucuaccagauuuuggcuaucuauaguacagucgccucuucccuggugcuaguggucagccucggggcaauuucguucuggauguguucuaauggaucccugcaaugcaggaucuguauaugaggacuaguuauaagacugacuagcccgaugggccucccaacgggcccuccuccccuccuugcaccgagauuaaucaaaggcucuuuucagagccaccaaaaaaaaaaaaaaaaaaaaaaaaaaaaaaaaaaaaaaaaaaaaaaaaaaaaaaaaaaaaaaaaagaauu

SEQ ID NO: 7142 - RNA, 1415 nt, Artificial Sequence
  mRNA Design i-3 (hSL-A64-N5) comprising derived and/or modified sequence from Pf(3D7)__XP_001351122.1__Pf-CSP(199-377)_L(PVTN)_HBsAg (opt3)
aggagaaagcuuaccauggaccccaacgccaauccuaacgcuaauccaaacgcaaauccgaacgccaaucccaacgcgaauccuaacgcuaauccaaacgccaaucccaacgcaaauccuaacgccaacccaaaugcuaaccccaaugcaaacccuaaugccaacccaaaugcuaacccgaaugccaaccccaaugcgaacccuaaugcaaacccaaaugccaaccccaacgcuaauccuaacaagaauaaccagggcaaugggcaaggacacaacaugccaaaugaucccaacagaaauguggacgagaacgccaaugcaaacagcgcugucaaaaauaacaauaacgaggaaccguccgauaagcauaucaaagaauaccugaacaagauucaaaauucucucucaaccgaguggaguccuugcagcguuacaugugguaacggcauacaggugaggaucaaacccggguccgccaauaagccaaaggacgaacuugauuaugcgaacgacauugagaaaaagaucugcaaaauggagaaguguucuucgguaccugugacuaauauggaaaacauuacgucaggauuccugggccccuuguuaguccugcaggccggguuuuuccuacucacccggauccugacaauaccacagagccuugauaguugguggacuucccugaauuuucucgguggaucucccgugugcuugggccagaacagccaguccccuaccucaaaucacaguccaacaagcuguccgcccaucugcccuggcuaccgcuggaugugucugcgacguuucauuaucuuucuguucauucucuuacugugccuuaucuuuuugcugguucuacucgacuaucaggggaugcugccaguguguccccuuauaccuggaucuaccacuacaaacaccgguccaugcaaaacguguacuacccccgcacaaggcaauuccauguucccgucaugcugcuguacaaagccuacugaugggaacugcaccuguauuccaauccccagcaguugggcuuuugccaaguaccugugggagugggcuucugucagauucuccugguugagccuccuggugccuuuuguacagugguucguuggauuaucgcccacaguguggcugucugccauuuggaugaugugguauuggggcccaucccucuacucaaucgucaguccuuuuaucccccuucugccaauuuucuucugcuuguggguguauauaugaggacuaguuauaagacugacuagcccgaugggccucccaacgggcccuccuccccuccuugcaccgagauuaaucaaaggcucuuuucagagccaccaaaaaaaaaaaaaaaaaaaaaaaaaaaaaaaaaaaaaaaaaaaaaaaaaaaaaaaaaaaaaaaaagaauu

SEQ ID NO: 7143 - RNA, 1457 nt, Artificial Sequence
  mRNA Design i-3 (hSL-A64-N5) comprising derived and/or modified sequence from Pf(3D7)__XP_001351122.1__Pf-CSP(199-387)_L(PVTN)_HBsAg (opt3)
aggagaaagcuuaccaugauggcccccgacccuaacgcuaauccaaacgcaaauccgaacgccaaucccaacgcgaauccuaacgcuaauccaaacgccaaucccaacgcaaauccuaacgccaauccaaacgcuaaccccaaugcaaacccuaaugccaacccaaaugcuaacccgaaugccaaccccaaugcgaacccuaaugcaaacccaaaugccaaccccaaugcuaacccuaacgccaauccaaacaagaauaaccagggcaaugggcaaggacacaacaugcccaaugauccgaacagaaauguggacgagaacgcaaaugcuaacagcgccgucaaaaauaacaauaacgaggaaccuuccgauaagcauaucaaagaauaccugaacaagauucaaaauucucucucaaccgaguggagucccugcagcguuacaugugguaacggcauacaggugaggaucaaaccaggguccgcgaauaagccuaaggacgaacuugauuaugccaacgacauugagaaaaagaucugcaaaauggagaaguguucuucgguauucaauguggucaacucaagcauuggacugggccccgugacuaauauggaaaacaucacgaguggguuuuuggguccauuacugguucuacaggcaggauucuuucuccugacccggauacuuacaaucccccagucccuggauucuugguggacuagcuugaauuuccucggcggcuccccugugugccuggggcagaacucacagaguccaaccagcaaucacucuccgacauccugucccccuauuugcccaggauaccgcuggaugugucugcgacguuuuaucauuuuccucuuuaucuuacugcuuugcuugauauuccugcuaguccuccuggacuaucaggguaugcuucccguguguccucugauuccaggcucaaccacuacaaacaccgggcccugcaaaacguguacuaccccggcucaaggaaauagcauguuuccuaguugcugcuguacaaagccaacugauggcaacugcaccuguauccccauuccuucuuccugggccuucgcuaaguacuugugggagugggccagcguaagauuuucguggcucucucuguuaguucccuucgugcagugguuugucggucuguccccaacaguguggcucucagcaaucuggaugaugugguauugggggccuagucuuuacagcaucgugucccccuucauuccacuguugccgauauucuuuugccuaugggucuauaucugaggacuaguuauaagacugacuagcccgaugggccucccaacgggcccuccuccccuccuugcaccgagauuaaucaaaggcucuuuucagagccaccaaaaaaaaaaaaaaaaaaaaaaaaaaaaaaaaaaaaaaaaaaaaaaaaaaaaaaaaaaaaaaaaagaauu

SEQ ID NO: 7144 - RNA, 641 nt, Artificial Sequence
  mRNA Design i-3 (hSL-A64-N5) comprising derived and/or modified sequence from Pf(3D7)__XP_001351122.1__HsALB_Pf-CSP(19-152) (opt3)
aggagaaagcuuaccaugaagugggugaccuucaucagccugcucuuucuuuucuccucugccuacucacuguuucaggaguaucaaugcuacggcaguagcuccaacacaagagucuugaaugaauuaaacuaugacaaugcugggacuaaccuguacaaugagcuagaaaugaacuauuacggaaaacaggagaauugguauucucucaagaaaaacucgaggucacugggugaaaaugaugacggcaacaaugaggauaacgagaaacuucggaagcccaagcacaagaaacugaagcagccugcagacgggaauccagauccgaacgccaaucccaacguugacccuaacgcgaauccaaacguggaucccaaugcuaacccuaauguagacccaaacgccaaucccaacgcaaauccuaacgccaauccaaacgcuaauccgaacgcaaaucccaacgccaacccuugaggacuaguuauaagacugacuagcccgaugggccucccaacgggcccuccuccccuccuugcaccgagauuaaucaaaggcucuuuucagagccaccaaaaaaaaaaaaaaaaaaaaaaaaaaaaaaaaaaaaaaaaaaaaaaaaaaaaaaaaaaaaaaaaagaauu

SEQ ID NO: 7145 - RNA, 761 nt, Artificial Sequence
  mRNA Design i-3 (hSL-A64-N5) comprising derived and/or modified sequence from Pf(3D7)__XP_001351122.1__HsALB_Pf-CSP(19-192) (opt3)
aggagaaagcuuaccaugaagugggugaccuucaucagccugcucuuucuuuucuccucugccuacucacuguuucaggaguaucaaugcuacggcaguagcuccaacacaagagucuugaaugaauuaaacuaugacaaugcugggacuaaccuguacaaugagcuagaaaugaacuauuacggaaaacaggagaauugguauucucucaagaaaaacucgaggucacugggugaaaaugaugacggcaacaaugaggauaacgagaaacuucggaagcccaagcacaagaaacugaagcagccugcagacgggaauccagauccgaacgccaaucccaacguugacccuaacgcgaauccaaacguggaucccaaugcuaacccuaauguagacccaaacgccaaucccaacgcaaauccuaacgccaauccaaacgcuaauccgaacgcaaaucccaacgccaacccuaaugcuaacccaaaugccaaccccaaugcgaacccuaaugcaaacccaaaugccaaccccaaugcuaacccgaaugccaacccuaaugcaaaccccaacgcuaauccaaacgccaauccuugaggacuaguuauaagacugacuagcccgaugggccucccaacgggcccuccuccccuccuugcaccgagauuaaucaaaggcucuuuucagagccaccaaaaaaaaaaaaaaaaaaaaaaaaaaaaaaaaaaaaaaaaaaaaaaaaaaaaaaaaaaaaaaaaagaauu

SEQ ID NO: 7146 - RNA, 1001 nt, Artificial Sequence
  mRNA Design i-3 (hSL-A64-N5) comprising derived and/or modified sequence from Pf(3D7)__XP_001351122.1__HsALB_Pf-CSP(19-272) (opt3)
aggagaaagcuuaccaugaagugggugaccuucaucagccugcucuuucuuuucuccucugccuacucacuguuucaggaguaucaaugcuacggcaguagcuccaacacaagagucuugaaugaauuaaacuaugacaaugcugggacuaaccuguacaaugagcuagaaaugaacuauuacggaaaacaggagaauugguauucucucaagaaaaacucgaggucacugggugaaaaugaugacggcaacaaugaggauaacgagaaacuucggaagcccaagcacaagaaacugaagcagccugcagacgggaauccagauccgaacgccaaucccaacguugacccuaacgcgaauccaaacguggaucccaaugcuaacccuaauguagacccaaacgccaaucccaacgcaaauccuaacgccaauccaaacgcuaauccgaacgcaaaucccaacgccaacccuaaugcuaacccaaaugccaaccccaaugcgaacccuaaugcaaacccaaaugccaaccccaaugcuaacccgaaugccaacccuaaugcaaaccccaacgcuaauccaaacgccaauccuaacgcgaaucccaacguggauccaaaugccaaccccaaugcaaacccuaaugcuaacccaaaugccaacccgaaugcuaaccccaacgccaauccuaacgcaaauccaaacgccaaucccaacgcuaauccuaacgcgaauccaaacgcaaaucccaacgccaauccgaacgcuaauccuaacgccaauccaaacgcaaaccccaaugccaacccuaaugcuaaccccaaugccaacccaugaggacuaguuauaagacugacuagcccgaugggccucccaacgggcccuccuccccuccuugcaccgagauuaaucaaaggcucuuuucagagccaccaaaaaaaaaaaaaaaaaaaaaaaaaaaaaaaaaaaaaaaaaaaaaaaaaaaaaaaaaaaaaaaaagaauu

SEQ ID NO: 7147 - RNA, 1163 nt, Artificial Sequence
  mRNA Design i-3 (hSL-A64-N5) comprising derived and/or modified sequence from Pf(3D7)__XP_001351122.1__HsALB_Pf-CSP(19-272)_L(AAY)_Pf-CSP(310-3 27)_L(AAY)_Pf-CSP(346-375) (opt3)
aggagaaagcuuaccaugaagugggugaccuucaucagccugcucuuucuuuucuccucugccuacucacuguuucaggaguaucaaugcuacggcaguagcuccaacacaagagucuugaaugaauuaaacuaugacaaugcugggacuaaccuguacaaugagcuagaaaugaacuauuacggaaaacaggagaauugguauucucucaagaaaaacucgaggucacugggugaaaaugaugacggcaacaaugaggauaacgagaaacuucggaagcccaagcacaagaaacugaagcagccugcagacgggaauccagauccgaacgccaaucccaacguugacccuaacgcgaauccaaacguggaucccaaugcuaacccuaauguagacccaaacgccaaucccaacgcaaauccuaacgccaauccaaacgcuaauccgaacgcaaaucccaacgccaacccuaaugcuaacccaaaugccaaccccaaugcgaacccuaaugcaaacccaaaugccaaccccaaugcuaacccgaaugccaacccuaaugcaaaccccaacgcuaauccaaacgccaauccuaacgcgaaucccaacguggauccaaaugccaaccccaaugcaaacccuaaugcuaacccaaaugccaacccgaaugcuaaccccaacgccaauccuaacgcaaauccaaacgccaaucccaacgcuaauccuaacgcgaauccaaacgcaaaucccaacgccaauccgaacgcuaauccuaacgccaauccaaacgcaaaccccaaugccaacccuaaugcuaaccccaaugccaacccagcagcguacgaaccuagcgacaaacauauuaaggaguacuugaauaaaauacagaacagucucgcugccuauaucaagcccggauccgcaaauaagccaaaagaugaacuggacuacgccaacgauauugagaagaaaaucuguaagauggagaaaugcucuugaggacuaguuauaagacugacuagcccgaugggccucccaacgggcccuccuccccuccuugcaccgagauuaaucaaaggcucuuuucagagccaccaaaaaaaaaaaaaaaaaaaaaaaaaaaaaaaaaaaaaaaaaaaaaaaaaaaaaaaaaaaaaaaaagaauu

SEQ ID NO: 7148 - RNA, 1124 nt, Artificial Sequence
  mRNA Design i-3 (hSL-A64-N5) comprising derived and/or modified sequence from Pf(3D7)__XP_001351122.1__HsALB_Pf-CSP(19-272)_L(AAY)_Pf-CSP(346-3 65)_L(AAY)_P2 (opt3)
aggagaaagcuuaccaugaagugggugaccuucaucagccugcucuuucuuuucuccucugccuacucacuguuucaggaguaucaaugcuacggcaguagcuccaacacaagagucuugaaugaauuaaacuaugacaaugcugggacuaaccuguacaaugagcuagaaaugaacuauuacggaaaacaggagaauugguauucucucaagaaaaacucgaggucacugggugaaaaugaugacggcaacaaugaggauaacgagaaacuucggaagcccaagcacaagaaacugaagcagccugcagacgggaauccagauccgaacgccaaucccaacguugacccuaacgcgaauccaaacguggaucccaaugcuaacccuaauguagacccaaacgccaaucccaacgcaaauccuaacgccaauccaaacgcuaauccgaacgcaaaucccaacgccaacccuaaugcuaacccaaaugccaaccccaaugcgaacccuaaugcaaacccaaaugccaaccccaaugcuaacccgaaugccaacccuaaugcaaaccccaacgcuaauccaaacgccaauccuaacgcgaaucccaacguggauccaaaugccaaccccaaugcaaacccuaaugcuaacccaaaugccaacccgaaugcuaaccccaacgccaauccuaacgcaaauccaaacgccaaucccaacgcuaauccuaacgcgaauccaaacgcaaaucccaacgccaauccgaacgcuaauccuaacgccaauccaaacgcaaaccccaaugccaacccuaaugcuaaccccaaugccaacccagcagcguacauuaaaccuggaagcgcuaauaagcccaaagacgaauuggauuacgccaacgacauagaggcagccuaucaguacaucaaggcuaauaguaaguucauuggcaucacggaacucugaggacuaguuauaagacugacuagcccgaugggccucccaacgggcccuccuccccuccuugcaccgagauuaaucaaaggcucuuuucagagccaccaaaaaaaaaaaaaaaaaaaaaaaaaaaaaaaaaaaaaaaaaaaaaaaaaaaaaaaaaaaaaaaaagaauu

SEQ ID NO: 7149 - RNA, 1118 nt, Artificial Sequence
  mRNA Design i-3 (hSL-A64-N5) comprising derived and/or modified sequence from Pf(3D7)__XP_001351122.1__HsALB_Pf-CSP(19-272)_L(AAY)_Pf-CSP(346-3 65)_L(AAY)_PADRE (opt3)
aggagaaagcuuaccaugaagugggugaccuucaucagccugcucuuucuuuucuccucugccuacucacuguuucaggaguaucaaugcuacggcaguagcuccaacacaagagucuugaaugaauuaaacuaugacaaugcugggacuaaccuguacaaugagcuagaaaugaacuauuacggaaaacaggagaauugguauucucucaagaaaaacucgaggucacugggugaaaaugaugacggcaacaaugaggauaacgagaaacuucggaagcccaagcacaagaaacugaagcagccugcagacgggaauccagauccgaacgccaaucccaacguugacccuaacgcgaauccaaacguggaucccaaugcuaacccuaauguagacccaaacgccaaucccaacgcaaauccuaacgccaauccaaacgcuaauccgaacgcaaaucccaacgccaacccuaaugcuaacccaaaugccaaccccaaugcgaacccuaaugcaaacccaaaugccaaccccaaugcuaacccgaaugccaacccuaaugcaaaccccaacgcuaauccaaacgccaauccuaacgcgaaucccaacguggauccaaaugccaaccccaaugcaaacccuaaugcuaacccaaaugccaacccgaaugcuaaccccaacgccaauccuaacgcaaauccaaacgccaaucccaacgcuaauccuaacgcgaauccaaacgcaaaucccaacgccaauccgaacgcuaauccuaacgccaauccaaacgcaaaccccaaugccaacccuaaugcuaaccccaaugccaacccagcagcguacauuaaaccuggaagcgcuaauaagcccaaagacgaauuggauuacgccaacgacauagaggcagccuaugcuaaguucgucgccgcauggacgcucaaggcugccgcgugaggacuaguuauaagacugacuagcccgaugggccucccaacgggcccuccuccccuccuugcaccgagauuaaucaaaggcucuuuucagagccaccaaaaaaaaaaaaaaaaaaaaaaaaaaaaaaaaaaaaaaaaaaaaaaaaaaaaaaaaaaaaaaaaagaauu

SEQ ID NO: 7150 - RNA, 1175 nt, Artificial Sequence
  mRNA Design i-3 (hSL-A64-N5) comprising derived and/or modified sequence from Pf(3D7)__XP_001351122.1__HsALB_Pf-CSP(19-272)_L(G4S)_Pf-CSP(310-3 27)_L(G4S)_Pf-CSP(346-375) (opt3)
aggagaaagcuuaccaugaagugggugaccuucaucagccugcucuuucuuuucuccucugccuacucacuguuucaggaguaucaaugcuacggcaguagcuccaacacaagagucuugaaugaauuaaacuaugacaaugcugggacuaaccuguacaaugagcuagaaaugaacuauuacggaaaacaggagaauugguauucucucaagaaaaacucgaggucacugggugaaaaugaugacggcaacaaugaggauaacgagaaacuucggaagcccaagcacaagaaacugaagcagccugcagacgggaauccagauccgaacgccaaucccaacguugacccuaacgcgaauccaaacguggaucccaaugcuaacccuaauguagacccaaacgccaaucccaacgcaaauccuaacgccaauccaaacgcuaauccgaacgcaaaucccaacgccaacccuaaugcuaacccaaaugccaaccccaaugcgaacccuaaugcaaacccaaaugccaaccccaaugcuaacccgaaugccaacccuaaugcaaaccccaacgcuaauccaaacgccaauccuaacgcgaaucccaacguggauccaaaugccaaccccaaugcaaacccuaaugcuaacccaaaugccaacccgaaugcuaaccccaacgccaauccuaacgcaaauccaaacgccaaucccaacgcuaauccuaacgcgaauccaaacgcaaaucccaacgccaauccgaacgcuaauccuaacgccaauccaaacgcaaaccccaaugccaacccuaaugcuaaccccaaugccaacccaggaggcggugggagcgaaccuagugacaaacauauuaaggaguacuugaauaaaauacagaacucccucggaggcggcgggucuaucaagcccggaagcgcaaauaagccaaaagaugaacuggacuacgcgaacgauauugagaagaaaaucuguaagauggagaaaugcuccugaggacuaguuauaagacugacuagcccgaugggccucccaacgggcccuccuccccuccuugcaccgagauuaaucaaaggcucuuuucagagccaccaaaaaaaaaaaaaaaaaaaaaaaaaaaaaaaaaaaaaaaaaaaaaaaaaaaaaaaaaaaaaaaaagaauu

SEQ ID NO: 7151 - RNA, 1160 nt, Artificial Sequence
  mRNA Design i-3 (hSL-A64-N5) comprising derived and/or modified sequence from Pf(3D7)__XP_001351122.1__HsALB_Pf-CSP(19-272)_L(G4S)_Pf-CSP(310-3 27)_Pf-CSP(346-375) (opt3)
aggagaaagcuuaccaugaagugggugaccuucaucagccugcucuuucuuuucuccucugccuacucacuguuucaggaguaucaaugcuacggcaguagcuccaacacaagagucuugaaugaauuaaacuaugacaaugcugggacuaaccuguacaaugagcuagaaaugaacuauuacggaaaacaggagaauugguauucucucaagaaaaacucgaggucacugggugaaaaugaugacggcaacaaugaggauaacgagaaacuucggaagcccaagcacaagaaacugaagcagccugcagacgggaauccagauccgaacgccaaucccaacguugacccuaacgcgaauccaaacguggaucccaaugcuaacccuaauguagacccaaacgccaaucccaacgcaaauccuaacgccaauccaaacgcuaauccgaacgcaaaucccaacgccaacccuaaugcuaacccaaaugccaaccccaaugcgaacccuaaugcaaacccaaaugccaaccccaaugcuaacccgaaugccaacccuaaugcaaaccccaacgcuaauccaaacgccaauccuaacgcgaaucccaacguggauccaaaugccaaccccaaugcaaacccuaaugcuaacccaaaugccaacccgaaugcuaaccccaacgccaauccuaacgcaaauccaaacgccaaucccaacgcuaauccuaacgcgaauccaaacgcaaaucccaacgccaauccgaacgcuaauccuaacgccaauccaaacgcaaaccccaaugccaacccuaaugcuaaccccaaugccaacccaggaggcggugggagcgaaccuagugacaaacauauuaaggaguacuugaauaaaauacagaacucccucaucaagcccggaucugcaaauaagccaaaagaugaacuggacuacgcgaacgauauugagaagaaaaucuguaagauggagaaaugcagcugaggacuaguuauaagacugacuagcccgaugggccucccaacgggcccuccuccccuccuugcaccgagauuaaucaaaggcucuuuucagagccaccaaaaaaaaaaaaaaaaaaaaaaaaaaaaaaaaaaaaaaaaaaaaaaaaaaaaaaaaaaaaaaaaagaauu

SEQ ID NO: 7152 - RNA, 1160 nt, Artificial Sequence
  mRNA Design i-3 (hSL-A64-N5) comprising derived and/or modified sequence from Pf(3D7)__XP_001351122.1__HsALB_Pf-CSP(19-325) (opt3)
aggagaaagcuuaccaugaagugggugaccuucaucagccugcucuuucuuuucuccucugccuacucacuguuucaggaguaucaaugcuacggcaguagcuccaacacaagagucuugaaugaauuaaacuaugacaaugcugggacuaaccuguacaaugagcuagaaaugaacuauuacggaaaacaggagaauugguauucucucaagaaaaacucgaggucacugggugaaaaugaugacggcaacaaugaggauaacgagaaacuucggaagcccaagcacaagaaacugaagcagccugcagacgggaauccagauccgaacgccaaucccaacguugacccuaacgcgaauccaaacguggaucccaaugcuaacccuaauguagacccaaacgccaaucccaacgcaaauccuaacgccaauccaaacgcuaauccgaacgcaaaucccaacgccaacccuaaugcuaacccaaaugccaaccccaaugcgaacccuaaugcaaacccaaaugccaaccccaaugcuaacccgaaugccaacccuaaugcaaaccccaacgcuaauccaaacgccaauccuaacgcgaaucccaacguggauccaaaugccaaccccaaugcaaacccuaaugcuaacccaaaugccaacccgaaugcuaaccccaacgccaauccuaacgcaaauccaaacgccaaucccaacgcuaauccuaacgcgaauccaaacgcaaaucccaacgccaauccgaacgcuaauccuaacgccaauccaaacgcaaaccccaaugccaacccuaaugcuaaccccaaugccaacccaaauaaaaacaaucagggaaacggccaaggucauaauaugccuaacgaccccaaucgcaacgucgaugaaaaugcaaacgcgaacagcgcugugaagaauaacaauaacgaggaaccaagugacaaacacauuaaggaguacuugaauaagauacagaacugaggacuaguuauaagacugacuagcccgaugggccucccaacgggcccuccuccccuccuugcaccgagauuaaucaaaggcucuuuucagagccaccaaaaaaaaaaaaaaaaaaaaaaaaaaaaaaaaaaaaaaaaaaaaaaaaaaaaaaaaaaaaaaaaagaauu

SEQ ID NO: 7153 - RNA, 1337 nt, Artificial Sequence
  mRNA Design i-3 (hSL-A64-N5) comprising derived and/or modified sequence from Pf(3D7)__XP_001351122.1__HsALB_Pf-CSP(19-384) (opt3)
aggagaaagcuuaccaugaagugggugaccuucaucagccugcucuuucuuuucuccucugccuacucacuguuucaggaguaucaaugcuacggcaguagcuccaacacaagagucuugaaugaauuaaacuaugacaaugcugggacuaaccuguacaaugagcuagaaaugaacuauuacggaaaacaggagaauugguauucucucaagaaaaacucgaggucacugggugaaaaugaugacggcaacaaugaggauaacgagaaacuucggaagcccaagcacaagaaacugaagcagccugcagacgggaauccagauccgaacgccaaucccaacguugacccuaacgcgaauccaaacguggaucccaaugcuaacccuaauguagacccaaacgccaaucccaacgcaaauccuaacgccaauccaaacgcuaauccgaacgcaaaucccaacgccaacccuaaugcuaacccaaaugccaaccccaaugcgaacccuaaugcaaacccaaaugccaaccccaaugcuaacccgaaugccaacccuaaugcaaaccccaacgcuaauccaaacgccaauccuaacgcgaaucccaacguggauccaaaugccaaccccaaugcaaacccuaaugcuaacccaaaugccaacccgaaugcuaaccccaacgccaauccuaacgcaaauccaaacgccaaucccaacgcuaauccuaacgcgaauccaaacgcaaaucccaacgccaauccgaacgcuaauccuaacgccaauccaaacgcaaaccccaaugccaacccuaaugcuaaccccaaugccaacccaaauaaaaacaaucagggaaacggccaaggucauaauaugccuaacgaccccaaucgcaacgucgaugaaaaugcaaacgcgaacagcgcugugaagaauaacaauaacgaggaaccaagugacaaacacauuaaggaguacuugaauaagauacagaacucccucucuacggaguggagcccguguuccguuaccugcgggaauggaauccaggugcgaauuaaaccuggcucagccaacaagcccaaagaugaacuggacuacgcaaaugacaucgagaagaaaauuuguaagauggaaaaaugcaguagcgucuucaacgugguaaauucuuccugaggacuaguuauaagacugacuagcccgaugggccucccaacgggcccuccuccccuccuugcaccgagauuaaucaaaggcucuuuucagagccaccaaaaaaaaaaaaaaaaaaaaaaaaaaaaaaaaaaaaaaaaaaaaaaaaaaaaaaaaaaaaaaaaagaauu

SEQ ID NO: 7154 - RNA, 1475 nt, Artificial Sequence
  mRNA Design i-3 (hSL-A64-N5) comprising derived and/or modified sequence from Pf(3D7)__XP_001351122.1__HsALB_Pf-CSP(19-384)_TM domain HA (opt3)
aggagaaagcuuaccaugaagugggugaccuucaucagccugcucuuucuuuucuccucugccuacucacuguuucaggaguaucaaugcuacggcaguagcuccaacacaagagucuugaaugaauuaaacuaugacaaugcugggacuaaccuguacaaugagcuagaaaugaacuauuacggaaaacaggagaauugguauucucucaagaaaaacucgaggucacugggugaaaaugaugacggcaacaaugaggauaacgagaaacuucggaagcccaagcacaagaaacugaagcagccugcagacgggaauccagauccgaacgccaaucccaacguugacccuaacgcgaauccaaacguggaucccaaugcuaacccuaauguagacccaaacgccaaucccaacgcaaauccuaacgccaauccaaacgcuaauccgaacgcaaaucccaacgccaacccuaaugcuaacccaaaugccaaccccaaugcgaacccuaaugcaaacccaaaugccaaccccaaugcuaacccgaaugccaacccuaaugcaaaccccaacgcuaauccaaacgccaauccuaacgcgaaucccaacguggauccaaaugccaaccccaaugcaaacccuaaugcuaacccaaaugccaacccgaaugcuaaccccaacgccaauccuaacgcaaauccaaacgccaaucccaacgcuaauccuaacgcgaauccaaacgcaaaucccaacgccaauccgaacgcuaauccuaacgccaauccaaacgcaaaccccaaugccaacccuaaugcuaaccccaaugccaacccaaauaaaaacaaucagggaaacggccaaggucauaauaugccuaacgaccccaaucgcaacgucgaugaaaaugcaaacgcgaacagcgcugugaagaauaacaauaacgaggaaccaagugacaaacacauuaaggaguacuugaauaagauacagaacucccucucuacggaguggagcccguguuccguuaccugcgggaauggaauccaggugcgaauuaaaccuggcucagccaacaagcccaaagaugaacuggacuacgcaaaugacaucgagaagaaaauuuguaagauggaaaaaugcaguagcgucuucaacgugguaaauucuuccaagcuggagucaacacguaucuaucagauacucgccaucuacagcacuguugcuaguucuuuagugcuggucgugucccuuggcgccauuagcuuuuggauguguucgaacgggucuuugcaaugcagaaucuguauuugaggacuaguuauaagacugacuagcccgaugggccucccaacgggcccuccuccccuccuugcaccgagauuaaucaaaggcucuuuucagagccaccaaaaaaaaaaaaaaaaaaaaaaaaaaaaaaaaaaaaaaaaaaaaaaaaaaaaaaaaaaaaaaaaagaauu

SEQ ID NO: 7155 - RNA, 1187 nt, Artificial Sequence
  mRNA Design i-3 (hSL-A64-N5) comprising derived and/or modified sequence from Pf(3D7)__XP_001351122.1__HsALB_Pf-CSP(82-397) (opt3)
aggagaaagcuuaccaugaagugggugaccuucaucagccugcucuuucuuuucuccucugccuacucagacaacgagaaacugagaaagcccaaacacaagaaauugaagcagccugcugauggcaauccagacccgaacgcaaaucccaacgucgauccuaaugccaacccaaauguugaccccaacgcgaauccuaacguggauccaaaugcuaaccccaaugccaacccuaaugcaaacccaaacgccaauccgaacgcuaaucccaacgcaaauccuaacgccaauccaaacgcuaaucccaacgccaauccuaacgcgaauccaaacgcaaaucccaacgccaacccgaaugcuaacccuaaugccaaccccaaugcaaacccaaaugcuaacccuaaugccaaccccaauguagacccaaacgcgaaucccaacgccaauccuaacgcaaacccaaaugcuaacccgaaugccaaccccaaugcuaacccuaaugccaacccaaaugcaaaccccaaugccaacccuaaugcuaacccaaaugcgaaccccaacgcaaauccgaacgccaauccuaacgcuaauccaaacgccaaucccaacgcaaauccuaacgccaaucccaacgcuaauccaaacaagaauaaccaggggaauggacagggucauaacaugccuaacgaucccaauaggaacguggacgaaaaugccaacgcaaauagugcggucaaaaacaauaacaaugaggaaccaagcgauaagcacauuaaagaguauuuaaacaagauacaaaauucccugucuacagaauggucgccgugcucagugacuuguggcaacgggauccagguucggauuaaaccuggaagcgcuaauaagcccaaggacgagcuagauuacgccaacgacaucgagaaaaagauuugcaaaauggaaaaguguaguuccguguuuaaugucgugaacucuagcaucggccucauaaugguacuguccuuccuuuuucugaacugaggacuaguuauaagacugacuagcccgaugggccucccaacgggcccuccuccccuccuugcaccgagauuaaucaaaggcucuuuucagagccaccaaaaaaaaaaaaaaaaaaaaaaaaaaaaaaaaaaaaaaaaaaaaaaaaaaaaaaaaaaaaaaaaagaauu

SEQ ID NO: 7156 - RNA, 539 nt, Artificial Sequence
  mRNA Design i-3 (hSL-A64-N5) comprising derived and/or modified sequence from Pf(3D7)__XP_001351122.1__HsALB_Pf-CSP(93-192) (opt3)
aggagaaagcuuaccaugaagugggugaccuucaucagccugcucuuucuuuucuccucugccuacucaaaacugaagcagcccgcugacggcaacccugauccaaaugcaaacccgaaugucgaccccaacgccaauccuaacguugauccaaaugcgaaccccaauguggacccuaacgcuaauccaaacgccaaucccaacgcaaauccuaacgccaacccaaaugcuaacccgaaugcaaaccccaaugccaacccuaaugcuaacccaaaugccaaccccaaugcgaacccuaaugcaaacccaaaugccaaccccaacgcuaauccgaacgccaauccuaacgcaaaucccaacgcuaauccaugaggacuaguuauaagacugacuagcccgaugggccucccaacgggcccuccuccccuccuugcaccgagauuaaucaaaggcucuuuucagagccaccaaaaaaaaaaaaaaaaaaaaaaaaaaaaaaaaaaaaaaaaaaaaaaaaaaaaaaaaaaaaaaaaagaauu

SEQ ID NO: 7157 - RNA, 779 nt, Artificial Sequence
  mRNA Design i-3 (hSL-A64-N5) comprising derived and/or modified sequence from Pf(3D7)__XP_001351122.1__HsALB_Pf-CSP(93-272) (opt3)
aggagaaagcuuaccaugaagugggugaccuucaucagccugcucuuucuuuucuccucugccuacucaaaacugaagcagcccgcugacggcaacccugauccaaaugcaaacccgaaugucgaccccaacgccaauccuaacguugauccaaaugcgaaccccaauguggacccuaacgcuaauccaaacgccaaucccaacgcaaauccuaacgccaacccaaaugcuaacccgaaugcaaaccccaaugccaacccuaaugcuaacccaaaugccaaccccaaugcgaacccuaaugcaaacccaaaugccaaccccaacgcuaauccgaacgccaauccuaacgcaaaucccaacgcuaauccaaacgccaauccuaacguagaucccaaugcgaacccaaaugccaaccccaaugcaaacccuaacgcuaauccaaacgccaauccgaacgcuaaucccaacgccaauccuaacgcaaauccaaacgccaaucccaacgcuaauccuaacgcgaauccaaacgcaaaccccaaugccaacccgaaugcuaacccuaaugccaacccaaaugcaaaccccaaugccaacccuaaugcuaaccccugaggacuaguuauaagacugacuagcccgaugggccucccaacgggcccuccuccccuccuugcaccgagauuaaucaaaggcucuuuucagagccaccaaaaaaaaaaaaaaaaaaaaaaaaaaaaaaaaaaaaaaaaaaaaaaaaaaaaaaaaaaaaaaaaagaauu

SEQ ID NO: 7158 - RNA, 1154 nt, Artificial Sequence
  mRNA Design i-3 (hSL-A64-N5) comprising derived and/or modified sequence from Pf(3D7)__XP_001351122.1__HsALB_Pf-CSP(93-397) (opt3)
aggagaaagcuuaccaugaagugggugaccuucaucagccugcucuuucuuuucuccucugccuacucaaaacugaagcagcccgcugacggcaacccugauccaaaugcaaacccgaaugucgaccccaacgccaauccuaacguugauccaaaugcgaaccccaauguggacccuaacgcuaauccaaacgccaaucccaacgcaaauccuaacgccaacccaaaugcuaacccgaaugcaaaccccaaugccaacccuaaugcuaacccaaaugccaaccccaaugcgaacccuaaugcaaacccaaaugccaaccccaacgcuaauccgaacgccaauccuaacgcaaaucccaacgcuaauccaaacgccaauccuaacguagaucccaaugcgaacccaaaugccaaccccaaugcaaacccuaacgcuaauccaaacgccaauccgaacgcuaaucccaacgccaauccuaacgcaaauccaaacgccaaucccaacgcuaauccuaacgcgaauccaaacgcaaaccccaaugccaacccgaaugcuaacccuaaugccaacccaaaugcaaaccccaaugccaacccuaaugcuaaccccaauaaaaacaaucaagggaacggacagggucacaauaugccaaacgacccuaacagaaauguggaugagaacgccaaugcaaacagugcggucaagaauaacaauaacgaggaacccagcgacaaacauauuaaggaauauuugaauaagauacagaacuccuuaucuacagaguggucgccaugcucagugacuuguggcaaugggauccagguuaggauuaaaccgggaagcgcuaacaagccuaaagaugaacuggacuacgccaaugauaucgagaagaaaauuugcaagauggagaaguguaguuccguguuuaacgucguaaauucuagcaucggccuaauaauggugcucuccuuccuguuucuuaacugaggacuaguuauaagacugacuagcccgaugggccucccaacgggcccuccuccccuccuugcaccgagauuaaucaaaggcucuuuucagagccaccaaaaaaaaaaaaaaaaaaaaaaaaaaaaaaaaaaaaaaaaaaaaaaaaaaaaaaaaaaaaaaaaagaauu

SEQ ID NO: 7159 - RNA, 524 nt, Artificial Sequence
  mRNA Design i-3 (hSL-A64-N5) comprising derived and/or modified sequence from Pf(3D7)__XP_001351122.1__HsALB_Pf-CSP(98-192) (opt3)
aggagaaagcuuaccaugaagugggugaccuucaucagccugcucuuucuuuucuccucugccuacucagcugacggcaaccccgauccuaaugcaaacccaaaugucgacccgaacgccaaucccaacguugauccuaaugcgaacccaaauguggaccccaacgcuaauccuaacgccaauccaaacgcaaaucccaacgccaacccuaaugcuaacccaaaugcaaacccgaaugccaaccccaaugcuaacccuaaugccaacccaaaugcgaaccccaaugcaaacccuaaugccaacccaaacgcuaaucccaacgccaauccgaacgcaaauccuaacgcuaaucccugaggacuaguuauaagacugacuagcccgaugggccucccaacgggcccuccuccccuccuugcaccgagauuaaucaaaggcucuuuucagagccaccaaaaaaaaaaaaaaaaaaaaaaaaaaaaaaaaaaaaaaaaaaaaaaaaaaaaaaaaaaaaaaaaagaauu

SEQ ID NO: 7160 - RNA, 764 nt, Artificial Sequence
  mRNA Design i-3 (hSL-A64-N5) comprising derived and/or modified sequence from Pf(3D7)__XP_001351122.1__HsALB_Pf-CSP(98-272) (opt3)
aggagaaagcuuaccaugaagugggugaccuucaucagccugcucuuucuuuucuccucugccuacucagcugacggcaaccccgauccuaaugcaaacccaaaugucgacccgaacgccaaucccaacguugauccuaaugcgaacccaaauguggaccccaacgcuaauccuaacgccaauccaaacgcaaaucccaacgccaacccuaaugcuaacccaaaugcaaacccgaaugccaaccccaaugcuaacccuaaugccaacccaaaugcgaaccccaaugcaaacccuaaugccaacccaaacgcuaaucccaacgccaauccgaacgcaaauccuaacgcuaaucccaacgccaauccaaacguagauccuaaugcgaaccccaaugccaacccaaaugcaaaccccaacgcuaauccuaacgccaauccaaacgcuaauccgaacgccaaucccaacgcaaauccuaacgccaauccaaacgcuaaucccaacgcgaauccuaacgcaaacccaaaugccaaccccaaugcuaacccgaaugccaacccuaaugcaaacccaaaugccaaccccaaugcuaacccuugaggacuaguuauaagacugacuagcccgaugggccucccaacgggcccuccuccccuccuugcaccgagauuaaucaaaggcucuuuucagagccaccaaaaaaaaaaaaaaaaaaaaaaaaaaaaaaaaaaaaaaaaaaaaaaaaaaaaaaaaaaaaaaaaagaauu

SEQ ID NO: 7161 - RNA, 1070 nt, Artificial Sequence
  mRNA Design i-3 (hSL-A64-N5) comprising derived and/or modified sequence from Pf(3D7)__XP_001351122.1__HsALB_Pf-CSP(98-374) (opt3)
aggagaaagcuuaccaugaagugggugaccuucaucagccugcucuuucuuuucuccucugccuacucagcugacggcaaccccgauccuaaugcaaacccaaaugucgacccgaacgccaaucccaacguugauccuaaugcgaacccaaauguggaccccaacgcuaauccuaacgccaauccaaacgcaaaucccaacgccaacccuaaugcuaacccaaaugcaaacccgaaugccaaccccaaugcuaacccuaaugccaacccaaaugcgaaccccaaugcaaacccuaaugccaacccaaacgcuaaucccaacgccaauccgaacgcaaauccuaacgcuaaucccaacgccaauccaaacguagauccuaaugcgaaccccaaugccaacccaaaugcaaaccccaacgcuaauccuaacgccaauccaaacgcuaauccgaacgccaaucccaacgcaaauccuaacgccaauccaaacgcuaaucccaacgcgaauccuaacgcaaacccaaaugccaaccccaaugcuaacccgaaugccaacccuaaugcaaacccaaaugccaaccccaaugcuaacccuaauaaaaacaaucaggggaacggacaaggucacaauaugcccaacgacccaaacagaaauguggaugagaacgccaaugcaaacagugcggucaagaauaacaauaacgaggaaccuagcgacaaacauauuaaggaauaucugaauaaaauacagaacuccuugucuacagaguggucgcccugcucagugacuuguggcaaugggauccagguuaggauuaagccaggaagcgcuaacaagccgaaagaugaauuagacuacgccaaugauaucgagaagaaaauuugcaagauggagaaauguugaggacuaguuauaagacugacuagcccgaugggccucccaacgggcccuccuccccuccuugcaccgagauuaaucaaaggcucuuuucagagccaccaaaaaaaaaaaaaaaaaaaaaaaaaaaaaaaaaaaaaaaaaaaaaaaaaaaaaaaaaaaaaaaaagaauu

SEQ ID NO: 7162 - RNA, 1139 nt, Artificial Sequence
  mRNA Design i-3 (hSL-A64-N5) comprising derived and/or modified sequence from Pf(3D7)__XP_001351122.1__HsALB_Pf-CSP(98-397) (opt3)
aggagaaagcuuaccaugaagugggugaccuucaucagccugcucuuucuuuucuccucugccuacucagcugacggcaaccccgauccuaaugcaaacccaaaugucgacccgaacgccaaucccaacguugauccuaaugcgaacccaaauguggaccccaacgcuaauccuaacgccaauccaaacgcaaaucccaacgccaacccuaaugcuaacccaaaugcaaacccgaaugccaaccccaaugcuaacccuaaugccaacccaaaugcgaaccccaaugcaaacccuaaugccaacccaaacgcuaaucccaacgccaauccgaacgcaaauccuaacgcuaaucccaacgccaauccaaacguagauccuaaugcgaaccccaaugccaacccaaaugcaaaccccaacgcuaauccuaacgccaauccaaacgcuaauccgaacgccaaucccaacgcaaauccuaacgccaauccaaacgcuaaucccaacgcgaauccuaacgcaaacccaaaugccaaccccaaugcuaacccgaaugccaacccuaaugcaaacccaaaugccaaccccaaugcuaacccuaauaaaaacaaucaggggaacggacaaggucacaauaugcccaacgacccaaacagaaauguggaugagaacgccaaugcaaacagugcggucaagaauaacaauaacgaggaaccuagcgacaaacauauuaaggaauaucugaauaaaauacagaacuccuugucuacagaguggucgcccugcucagugacuuguggcaaugggauccagguuaggauuaagccaggaagcgcuaacaagccgaaagaugaauuagacuacgccaaugauaucgagaagaaaauuugcaagauggagaaauguaguuccguguuuaacgucguaaauucuagcaucggccugauaauggugcuauccuuccucuuucugaacugaggacuaguuauaagacugacuagcccgaugggccucccaacgggcccuccuccccuccuugcaccgagauuaaucaaaggcucuuuucagagccaccaaaaaaaaaaaaaaaaaaaaaaaaaaaaaaaaaaaaaaaaaaaaaaaaaaaaaaaaaaaaaaaaagaauu

SEQ ID NO: 7163 - RNA, 1466 nt, Artificial Sequence
  mRNA Design i-3 (hSL-A64-N5) comprising derived and/or modified sequence from Pf(3D7)__XP_001351122.1__HsALB_Pf-CSP(199-377)_L(PVTN)_HBsAg (opt3)
aggagaaagcuuaccaugaagugggugaccuucaucagccugcucuuucuuuucuccucugccuacucagaccccaacgcuaauccuaacgcaaauccaaacgccaauccgaacgcgaaucccaacgcuaauccuaacgccaauccaaacgcaaaucccaacgccaauccuaacgcuaacccaaaugcaaaccccaaugccaacccuaaugcuaacccaaaugccaacccgaaugcgaaccccaaugcaaacccuaaugccaacccaaaugcuaaccccaacgccaauccuaacaaaaauaaccagggcaaugggcaaggacacaacaugccaaaugaucccaacagaaaugucgacgagaacgcaaaugcuaacagugccguuaagaauaacaauaacgaggaaccgagcgauaaacauauuaaggaauaucugaacaaaauacaaaauuccuugucuacagaguggucgccuugcucagugacuugugguaacggcauccagguaaggauuaagcccgggagcgcgaauaagccaaaagacgaauuagauuacgccaacgacaucgagaagaaaauuugcaagauggagaaauguaguuccgugccugucacgaauauggaaaacaucaccucuggauuucugggcccccuacucgugcugcaggcagguuucuuucuucugacacggauauugacuaucccacagagccucgauuccugguggaccucacugaauuuccucgggggaagucccguuugccugggccagaacagccagucuccuacauccaaucacucaccaaccagcuguccgcccauuugcccuggcuaucgcuggauguguuuacgacguuuuaucauuuuccuguuuauccuuuugcugugccuaauauuccuccuggugcuucuggacuaccaggggauguugccagucuguccccucauuccuggaaguacuacaaccaacacggguccaugcaagacuuguaccacacccgcucaaggcaauucuauguuuccguccugcugcuguacuaagccuaccgaugggaacugcacauguaucccaauucccagcucgugggccuucgcuaaauaucugugggagugggccucugugagauuuuccugguuaucacugcucguaccuuucguucagugguucgugggacuuagucccaccgucuggcugagcgcaaucuggaugaugugguacuggggcccauccuuguauucuaucgugagcccuuuuauuccccuacugccaauauucuuuugccucuggguguacaucugaggacuaguuauaagacugacuagcccgaugggccucccaacgggcccuccuccccuccuugcaccgagauuaaucaaaggcucuuuucagagccaccaaaaaaaaaaaaaaaaaaaaaaaaaaaaaaaaaaaaaaaaaaaaaaaaaaaaaaaaaaaaaaaaagaauu

SEQ ID NO: 7164 - RNA, 1376 nt, Artificial Sequence
  mRNA Design i-3 (hSL-A64-N5) comprising derived and/or modified sequence from Pf(3D7)__XP_001351122.1__Pf-CSP (opt4)
aggagaaagcuuaccaugaugagaaagcuggccauccugagcgugagcagcuuccuguucguggaggcccuguuccaggaguaccagugcuacggcagcagcagcaacaccagagugcugaacgagcugaacuacgacaacgccggcaccaaccuguacaacgagcuggagaugaacuacuacggcaagcaggagaacugguacagccugaagaagaacagcagaagccugggcgagaacgacgacggcaacaacgaggacaacgagaagcugagaaagcccaagcacaagaagcugaagcagcccgccgacggcaaccccgaccccaacgccaaccccaacguggaccccaacgccaaccccaacguggaccccaacgccaaccccaacguggaccccaacgccaaccccaacgccaaccccaacgccaaccccaacgccaaccccaacgccaaccccaacgccaaccccaacgccaaccccaacgccaaccccaacgccaaccccaacgccaaccccaacgccaaccccaacgccaaccccaacgccaaccccaacgccaaccccaacgccaaccccaacgccaaccccaacgccaaccccaacguggaccccaacgccaaccccaacgccaaccccaacgccaaccccaacgccaaccccaacgccaaccccaacgccaaccccaacgccaaccccaacgccaaccccaacgccaaccccaacgccaaccccaacgccaaccccaacgccaaccccaacgccaaccccaacgccaaccccaacgccaaccccaacgccaaccccaacgccaaccccaacgccaaccccaacaagaacaaccagggcaacggccagggccacaacaugcccaacgaccccaacagaaacguggacgagaacgccaacgccaacagcgccgugaagaacaacaacaacgaggagcccagcgacaagcacaucaaggaguaccugaacaagauccagaacagccugagcaccgaguggagccccugcagcgugaccugcggcaacggcauccaggugagaaucaagcccggcagcgccaacaagcccaaggacgagcuggacuacgccaacgacaucgagaagaagaucugcaagauggagaagugcagcagcguguucaacguggugaacagcagcaucggccugaucauggugcugagcuuccuguuccugaacugaggacuaguuauaagacugacuagcccgaugggccucccaacgggcccuccuccccuccuugcaccgagauuaaucaaaggcucuuuucagagccaccaaaaaaaaaaaaaaaaaaaaaaaaaaaaaaaaaaaaaaaaaaaaaaaaaaaaaaaaaaaaaaaaagaauu

SEQ ID NO: 7165 - RNA, 1307 nt, Artificial Sequence
  mRNA Design i-3 (hSL-A64-N5) comprising derived and/or modified sequence from Pf(3D7)__XP_001351122.1__Pf-CSP(1-374) (opt4)
aggagaaagcuuaccaugaugagaaagcuggccauccugagcgugagcagcuuccuguucguggaggcccuguuccaggaguaccagugcuacggcagcagcagcaacaccagagugcugaacgagcugaacuacgacaacgccggcaccaaccuguacaacgagcuggagaugaacuacuacggcaagcaggagaacugguacagccugaagaagaacagcagaagccugggcgagaacgacgacggcaacaacgaggacaacgagaagcugagaaagcccaagcacaagaagcugaagcagcccgccgacggcaaccccgaccccaacgccaaccccaacguggaccccaacgccaaccccaacguggaccccaacgccaaccccaacguggaccccaacgccaaccccaacgccaaccccaacgccaaccccaacgccaaccccaacgccaaccccaacgccaaccccaacgccaaccccaacgccaaccccaacgccaaccccaacgccaaccccaacgccaaccccaacgccaaccccaacgccaaccccaacgccaaccccaacgccaaccccaacgccaaccccaacgccaaccccaacguggaccccaacgccaaccccaacgccaaccccaacgccaaccccaacgccaaccccaacgccaaccccaacgccaaccccaacgccaaccccaacgccaaccccaacgccaaccccaacgccaaccccaacgccaaccccaacgccaaccccaacgccaaccccaacgccaaccccaacgccaaccccaacgccaaccccaacgccaaccccaacgccaaccccaacaagaacaaccagggcaacggccagggccacaacaugcccaacgaccccaacagaaacguggacgagaacgccaacgccaacagcgccgugaagaacaacaacaacgaggagcccagcgacaagcacaucaaggaguaccugaacaagauccagaacagccugagcaccgaguggagccccugcagcgugaccugcggcaacggcauccaggugagaaucaagcccggcagcgccaacaagcccaaggacgagcuggacuacgccaacgacaucgagaagaagaucugcaagauggagaagugcugaggacuaguuauaagacugacuagcccgaugggccucccaacgggcccuccuccccuccuugcaccgagauuaaucaaaggcucuuuucagagccaccaaaaaaaaaaaaaaaaaaaaaaaaaaaaaaaaaaaaaaaaaaaaaaaaaaaaaaaaaaaaaaaaagaauu

SEQ ID NO: 7166 - RNA, 1160 nt, Artificial Sequence
  mRNA Design i-3 (hSL-A64-N5) comprising derived and/or modified sequence from Pf(3D7)__XP_001351122.1__Pf-CSP(1-325) (opt4)
aggagaaagcuuaccaugaugagaaagcuggccauccugagcgugagcagcuuccuguucguggaggcccuguuccaggaguaccagugcuacggcagcagcagcaacaccagagugcugaacgagcugaacuacgacaacgccggcaccaaccuguacaacgagcuggagaugaacuacuacggcaagcaggagaacugguacagccugaagaagaacagcagaagccugggcgagaacgacgacggcaacaacgaggacaacgagaagcugagaaagcccaagcacaagaagcugaagcagcccgccgacggcaaccccgaccccaacgccaaccccaacguggaccccaacgccaaccccaacguggaccccaacgccaaccccaacguggaccccaacgccaaccccaacgccaaccccaacgccaaccccaacgccaaccccaacgccaaccccaacgccaaccccaacgccaaccccaacgccaaccccaacgccaaccccaacgccaaccccaacgccaaccccaacgccaaccccaacgccaaccccaacgccaaccccaacgccaaccccaacgccaaccccaacgccaaccccaacguggaccccaacgccaaccccaacgccaaccccaacgccaaccccaacgccaaccccaacgccaaccccaacgccaaccccaacgccaaccccaacgccaaccccaacgccaaccccaacgccaaccccaacgccaaccccaacgccaaccccaacgccaaccccaacgccaaccccaacgccaaccccaacgccaaccccaacgccaaccccaacgccaaccccaacaagaacaaccagggcaacggccagggccacaacaugcccaacgaccccaacagaaacguggacgagaacgccaacgccaacagcgccgugaagaacaacaacaacgaggagcccagcgacaagcacaucaaggaguaccugaacaagauccagaacugaggacuaguuauaagacugacuagcccgaugggccucccaacgggcccuccuccccuccuugcaccgagauuaaucaaaggcucuuuucagagccaccaaaaaaaaaaaaaaaaaaaaaaaaaaaaaaaaaaaaaaaaaaaaaaaaaaaaaaaaaaaaaaaaagaauu

SEQ ID NO: 7167 - RNA, 1376 nt, Artificial Sequence
  mRNA Design i-3 (hSL-A64-N5) comprising derived and/or modified sequence from Pf(3D7)__XP_001351122.1__HsALB_Pf-CSP(19-397) (opt4)
aggagaaagcuuaccaugaagugggugaccuucaucagccugcuguuccuguucagcagcgccuacagccuguuccaggaguaccagugcuacggcagcagcagcaacaccagagugcugaacgagcugaacuacgacaacgccggcaccaaccuguacaacgagcuggagaugaacuacuacggcaagcaggagaacugguacagccugaagaagaacagcagaagccugggcgagaacgacgacggcaacaacgaggacaacgagaagcugagaaagcccaagcacaagaagcugaagcagcccgccgacggcaaccccgaccccaacgccaaccccaacguggaccccaacgccaaccccaacguggaccccaacgccaaccccaacguggaccccaacgccaaccccaacgccaaccccaacgccaaccccaacgccaaccccaacgccaaccccaacgccaaccccaacgccaaccccaacgccaaccccaacgccaaccccaacgccaaccccaacgccaaccccaacgccaaccccaacgccaaccccaacgccaaccccaacgccaaccccaacgccaaccccaacgccaaccccaacguggaccccaacgccaaccccaacgccaaccccaacgccaaccccaacgccaaccccaacgccaaccccaacgccaaccccaacgccaaccccaacgccaaccccaacgccaaccccaacgccaaccccaacgccaaccccaacgccaaccccaacgccaaccccaacgccaaccccaacgccaaccccaacgccaaccccaacgccaaccccaacgccaaccccaacaagaacaaccagggcaacggccagggccacaacaugcccaacgaccccaacagaaacguggacgagaacgccaacgccaacagcgccgugaagaacaacaacaacgaggagcccagcgacaagcacaucaaggaguaccugaacaagauccagaacagccugagcaccgaguggagccccugcagcgugaccugcggcaacggcauccaggugagaaucaagcccggcagcgccaacaagcccaaggacgagcuggacuacgccaacgacaucgagaagaagaucugcaagauggagaagugcagcagcguguucaacguggugaacagcagcaucggccugaucauggugcugagcuuccuguuccugaacugaggacuaguuauaagacugacuagcccgaugggccucccaacgggcccuccuccccuccuugcaccgagauuaaucaaaggcucuuuucagagccaccaaaaaaaaaaaaaaaaaaaaaaaaaaaaaaaaaaaaaaaaaaaaaaaaaaaaaaaaaaaaaaaaagaauu

SEQ ID NO: 7168 - RNA, 1394 nt, Artificial Sequence
  mRNA Design i-3 (hSL-A64-N5) comprising derived and/or modified sequence from Pf(3D7)__XP_001351122.1__HsIns-iso1_Pf-CSP(19-397) (opt4)
aggagaaagcuuaccauggcccuguggaugagacugcugccccugcuggcccugcuggcccuguggggccccgaccccgccgccgcccuguuccaggaguaccagugcuacggcagcagcagcaacaccagagugcugaacgagcugaacuacgacaacgccggcaccaaccuguacaacgagcuggagaugaacuacuacggcaagcaggagaacugguacagccugaagaagaacagcagaagccugggcgagaacgacgacggcaacaacgaggacaacgagaagcugagaaagcccaagcacaagaagcugaagcagcccgccgacggcaaccccgaccccaacgccaaccccaacguggaccccaacgccaaccccaacguggaccccaacgccaaccccaacguggaccccaacgccaaccccaacgccaaccccaacgccaaccccaacgccaaccccaacgccaaccccaacgccaaccccaacgccaaccccaacgccaaccccaacgccaaccccaacgccaaccccaacgccaaccccaacgccaaccccaacgccaaccccaacgccaaccccaacgccaaccccaacgccaaccccaacgccaaccccaacguggaccccaacgccaaccccaacgccaaccccaacgccaaccccaacgccaaccccaacgccaaccccaacgccaaccccaacgccaaccccaacgccaaccccaacgccaaccccaacgccaaccccaacgccaaccccaacgccaaccccaacgccaaccccaacgccaaccccaacgccaaccccaacgccaaccccaacgccaaccccaacgccaaccccaacaagaacaaccagggcaacggccagggccacaacaugcccaacgaccccaacagaaacguggacgagaacgccaacgccaacagcgccgugaagaacaacaacaacgaggagcccagcgacaagcacaucaaggaguaccugaacaagauccagaacagccugagcaccgaguggagccccugcagcgugaccugcggcaacggcauccaggugagaaucaagcccggcagcgccaacaagcccaaggacgagcuggacuacgccaacgacaucgagaagaagaucugcaagauggagaagugcagcagcguguucaacguggugaacagcagcaucggccugaucauggugcugagcuuccuguuccugaacugaggacuaguuauaagacugacuagcccgaugggccucccaacgggcccuccuccccuccuugcaccgagauuaaucaaaggcucuuuucagagccaccaaaaaaaaaaaaaaaaaaaaaaaaaaaaaaaaaaaaaaaaaaaaaaaaaaaaaaaaaaaaaaaaagaauu

SEQ ID NO: 7169 - RNA, 1373 nt, Artificial Sequence
  mRNA Design i-3 (hSL-A64-N5) comprising derived and/or modified sequence from Pf(3D7)__XP_001351122.1__HsSPARC_Pf-CSP(19-397) (opt4)
aggagaaagcuuaccaugagagccuggaucuucuuccugcugugccuggccggcagagcccuggcccuguuccaggaguaccagugcuacggcagcagcagcaacaccagagugcugaacgagcugaacuacgacaacgccggcaccaaccuguacaacgagcuggagaugaacuacuacggcaagcaggagaacugguacagccugaagaagaacagcagaagccugggcgagaacgacgacggcaacaacgaggacaacgagaagcugagaaagcccaagcacaagaagcugaagcagcccgccgacggcaaccccgaccccaacgccaaccccaacguggaccccaacgccaaccccaacguggaccccaacgccaaccccaacguggaccccaacgccaaccccaacgccaaccccaacgccaaccccaacgccaaccccaacgccaaccccaacgccaaccccaacgccaaccccaacgccaaccccaacgccaaccccaacgccaaccccaacgccaaccccaacgccaaccccaacgccaaccccaacgccaaccccaacgccaaccccaacgccaaccccaacgccaaccccaacguggaccccaacgccaaccccaacgccaaccccaacgccaaccccaacgccaaccccaacgccaaccccaacgccaaccccaacgccaaccccaacgccaaccccaacgccaaccccaacgccaaccccaacgccaaccccaacgccaaccccaacgccaaccccaacgccaaccccaacgccaaccccaacgccaaccccaacgccaaccccaacgccaaccccaacaagaacaaccagggcaacggccagggccacaacaugcccaacgaccccaacagaaacguggacgagaacgccaacgccaacagcgccgugaagaacaacaacaacgaggagcccagcgacaagcacaucaaggaguaccugaacaagauccagaacagccugagcaccgaguggagccccugcagcgugaccugcggcaacggcauccaggugagaaucaagcccggcagcgccaacaagcccaaggacgagcuggacuacgccaacgacaucgagaagaagaucugcaagauggagaagugcagcagcguguucaacguggugaacagcagcaucggccugaucauggugcugagcuuccuguuccugaacugaggacuaguuauaagacugacuagcccgaugggccucccaacgggcccuccuccccuccuugcaccgagauuaaucaaaggcucuuuucagagccaccaaaaaaaaaaaaaaaaaaaaaaaaaaaaaaaaaaaaaaaaaaaaaaaaaaaaaaaaaaaaaaaaagaauu

SEQ ID NO: 7170 - RNA, 1376 nt, Artificial Sequence
  mRNA Design i-3 (hSL-A64-N5) comprising derived and/or modified sequence from Pf(3D7)__XP_001351122.1__IgE_Pf-CSP(19-397) (opt4)
aggagaaagcuuaccauggacuggaccuggauccuguuccugguggccgccgccaccagagugcacagccuguuccaggaguaccagugcuacggcagcagcagcaacaccagagugcugaacgagcugaacuacgacaacgccggcaccaaccuguacaacgagcuggagaugaacuacuacggcaagcaggagaacugguacagccugaagaagaacagcagaagccugggcgagaacgacgacggcaacaacgaggacaacgagaagcugagaaagcccaagcacaagaagcugaagcagcccgccgacggcaaccccgaccccaacgccaaccccaacguggaccccaacgccaaccccaacguggaccccaacgccaaccccaacguggaccccaacgccaaccccaacgccaaccccaacgccaaccccaacgccaaccccaacgccaaccccaacgccaaccccaacgccaaccccaacgccaaccccaacgccaaccccaacgccaaccccaacgccaaccccaacgccaaccccaacgccaaccccaacgccaaccccaacgccaaccccaacgccaaccccaacgccaaccccaacguggaccccaacgccaaccccaacgccaaccccaacgccaaccccaacgccaaccccaacgccaaccccaacgccaaccccaacgccaaccccaacgccaaccccaacgccaaccccaacgccaaccccaacgccaaccccaacgccaaccccaacgccaaccccaacgccaaccccaacgccaaccccaacgccaaccccaacgccaaccccaacgccaaccccaacaagaacaaccagggcaacggccagggccacaacaugcccaacgaccccaacagaaacguggacgagaacgccaacgccaacagcgccgugaagaacaacaacaacgaggagcccagcgacaagcacaucaaggaguaccugaacaagauccagaacagccugagcaccgaguggagccccugcagcgugaccugcggcaacggcauccaggugagaaucaagcccggcagcgccaacaagcccaaggacgagcuggacuacgccaacgacaucgagaagaagaucugcaagauggagaagugcagcagcguguucaacguggugaacagcagcaucggccugaucauggugcugagcuuccuguuccugaacugaggacuaguuauaagacugacuagcccgaugggccucccaacgggcccuccuccccuccuugcaccgagauuaaucaaaggcucuuuucagagccaccaaaaaaaaaaaaaaaaaaaaaaaaaaaaaaaaaaaaaaaaaaaaaaaaaaaaaaaaaaaaaaaaagaauu

SEQ ID NO: 7171 - RNA, 1541 nt, Artificial Sequence
  mRNA Design i-3 (hSL-A64-N5) comprising derived and/or modified sequence from Pf(3D7)__XP_001351122.1__Pf-CSP_L(G4SG4)_TM domain HA (opt4)
aggagaaagcuuaccaugaugagaaagcuggccauccugagcgugagcagcuuccuguucguggaggcccuguuccaggaguaccagugcuacggcagcagcagcaacaccagagugcugaacgagcugaacuacgacaacgccggcaccaaccuguacaacgagcuggagaugaacuacuacggcaagcaggagaacugguacagccugaagaagaacagcagaagccugggcgagaacgacgacggcaacaacgaggacaacgagaagcugagaaagcccaagcacaagaagcugaagcagcccgccgacggcaaccccgaccccaacgccaaccccaacguggaccccaacgccaaccccaacguggaccccaacgccaaccccaacguggaccccaacgccaaccccaacgccaaccccaacgccaaccccaacgccaaccccaacgccaaccccaacgccaaccccaacgccaaccccaacgccaaccccaacgccaaccccaacgccaaccccaacgccaaccccaacgccaaccccaacgccaaccccaacgccaaccccaacgccaaccccaacgccaaccccaacgccaaccccaacguggaccccaacgccaaccccaacgccaaccccaacgccaaccccaacgccaaccccaacgccaaccccaacgccaaccccaacgccaaccccaacgccaaccccaacgccaaccccaacgccaaccccaacgccaaccccaacgccaaccccaacgccaaccccaacgccaaccccaacgccaaccccaacgccaaccccaacgccaaccccaacgccaaccccaacaagaacaaccagggcaacggccagggccacaacaugcccaacgaccccaacagaaacguggacgagaacgccaacgccaacagcgccgugaagaacaacaacaacgaggagcccagcgacaagcacaucaaggaguaccugaacaagauccagaacagccugagcaccgaguggagccccugcagcgugaccugcggcaacggcauccaggugagaaucaagcccggcagcgccaacaagcccaaggacgagcuggacuacgccaacgacaucgagaagaagaucugcaagauggagaagugcagcagcguguucaacguggugaacagcagcaucggccugaucauggugcugagcuuccuguuccugaacggcggcggcggcagcggcggcggcggcaagcuggagagcaccagaaucuaccagauccuggccaucuacagcaccguggccagcagccuggugcugguggugagccugggcgccaucagcuucuggaugugcagcaacggcagccugcagugcagaaucugcaucugaggacuaguuauaagacugacuagcccgaugggccucccaacgggcccuccuccccuccuugcaccgagauuaaucaaaggcucuuuucagagccaccaaaaaaaaaaaaaaaaaaaaaaaaaaaaaaaaaaaaaaaaaaaaaaaaaaaaaaaaaaaaaaaaagaauu

SEQ ID NO: 7172 - RNA, 1415 nt, Artificial Sequence
  mRNA Design i-3 (hSL-A64-N5) comprising derived and/or modified sequence from Pf(3D7)__XP_001351122.1__Pf-CSP(199-377)_L(PVTN)_HBsAg (opt4)
aggagaaagcuuaccauggaccccaacgccaaccccaacgccaaccccaacgccaaccccaacgccaaccccaacgccaaccccaacgccaaccccaacgccaaccccaacgccaaccccaacgccaaccccaacgccaaccccaacgccaaccccaacgccaaccccaacgccaaccccaacgccaaccccaacgccaaccccaacgccaaccccaacgccaaccccaacgccaaccccaacaagaacaaccagggcaacggccagggccacaacaugcccaacgaccccaacagaaacguggacgagaacgccaacgccaacagcgccgugaagaacaacaacaacgaggagcccagcgacaagcacaucaaggaguaccugaacaagauccagaacagccugagcaccgaguggagccccugcagcgugaccugcggcaacggcauccaggugagaaucaagcccggcagcgccaacaagcccaaggacgagcuggacuacgccaacgacaucgagaagaagaucugcaagauggagaagugcagcagcgugcccgugaccaacauggagaacaucaccagcggcuuccugggcccccugcuggugcugcaggccggcuucuuccugcugaccagaauccugaccaucccccagagccuggacagcugguggaccagccugaacuuccugggcggcagccccgugugccugggccagaacagccagagccccaccagcaaccacagccccaccagcugcccccccaucugccccggcuacagauggaugugccugagaagauucaucaucuuccuguucauccugcugcugugccugaucuuccugcuggugcugcuggacuaccagggcaugcugcccgugugcccccugauccccggcagcaccaccaccaacaccggccccugcaagaccugcaccacccccgcccagggcaacagcauguuccccagcugcugcugcaccaagcccaccgacggcaacugcaccugcauccccauccccagcagcugggccuucgccaaguaccugugggagugggccagcgugagauucagcuggcugagccugcuggugcccuucgugcagugguucgugggccugagccccaccguguggcugagcgccaucuggaugaugugguacuggggccccagccuguacagcaucgugagccccuucaucccccugcugcccaucuucuucugccuguggguguacaucugaggacuaguuauaagacugacuagcccgaugggccucccaacgggcccuccuccccuccuugcaccgagauuaaucaaaggcucuuuucagagccaccaaaaaaaaaaaaaaaaaaaaaaaaaaaaaaaaaaaaaaaaaaaaaaaaaaaaaaaaaaaaaaaaagaauu

SEQ ID NO: 7173 - RNA, 1457 nt, Artificial Sequence
  mRNA Design i-3 (hSL-A64-N5) comprising derived and/or modified sequence from Pf(3D7)__XP_001351122.1__Pf-CSP(199-387)_L(PVTN)_HBsAg (opt4)
aggagaaagcuuaccaugauggcccccgaccccaacgccaaccccaacgccaaccccaacgccaaccccaacgccaaccccaacgccaaccccaacgccaaccccaacgccaaccccaacgccaaccccaacgccaaccccaacgccaaccccaacgccaaccccaacgccaaccccaacgccaaccccaacgccaaccccaacgccaaccccaacgccaaccccaacgccaaccccaacgccaaccccaacaagaacaaccagggcaacggccagggccacaacaugcccaacgaccccaacagaaacguggacgagaacgccaacgccaacagcgccgugaagaacaacaacaacgaggagcccagcgacaagcacaucaaggaguaccugaacaagauccagaacagccugagcaccgaguggagccccugcagcgugaccugcggcaacggcauccaggugagaaucaagcccggcagcgccaacaagcccaaggacgagcuggacuacgccaacgacaucgagaagaagaucugcaagauggagaagugcagcagcguguucaacguggugaacagcagcaucggccugggccccgugaccaacauggagaacaucaccagcggcuuccugggcccccugcuggugcugcaggccggcuucuuccugcugaccagaauccugaccaucccccagagccuggacagcugguggaccagccugaacuuccugggcggcagccccgugugccugggccagaacagccagagccccaccagcaaccacagccccaccagcugcccccccaucugccccggcuacagauggaugugccugagaagauucaucaucuuccuguucauccugcugcugugccugaucuuccugcuggugcugcuggacuaccagggcaugcugcccgugugcccccugauccccggcagcaccaccaccaacaccggccccugcaagaccugcaccacccccgcccagggcaacagcauguuccccagcugcugcugcaccaagcccaccgacggcaacugcaccugcauccccauccccagcagcugggccuucgccaaguaccugugggagugggccagcgugagauucagcuggcugagccugcuggugcccuucgugcagugguucgugggccugagccccaccguguggcugagcgccaucuggaugaugugguacuggggccccagccuguacagcaucgugagccccuucaucccccugcugcccaucuucuucugccuguggguguacaucugaggacuaguuauaagacugacuagcccgaugggccucccaacgggcccuccuccccuccuugcaccgagauuaaucaaaggcucuuuucagagccaccaaaaaaaaaaaaaaaaaaaaaaaaaaaaaaaaaaaaaaaaaaaaaaaaaaaaaaaaaaaaaaaaagaauu

SEQ ID NO: 7174 - RNA, 641 nt, Artificial Sequence
  mRNA Design i-3 (hSL-A64-N5) comprising derived and/or modified sequence from Pf(3D7)__XP_001351122.1__HsALB_Pf-CSP(19-152) (opt4)
aggagaaagcuuaccaugaagugggugaccuucaucagccugcuguuccuguucagcagcgccuacagccuguuccaggaguaccagugcuacggcagcagcagcaacaccagagugcugaacgagcugaacuacgacaacgccggcaccaaccuguacaacgagcuggagaugaacuacuacggcaagcaggagaacugguacagccugaagaagaacagcagaagccugggcgagaacgacgacggcaacaacgaggacaacgagaagcugagaaagcccaagcacaagaagcugaagcagcccgccgacggcaaccccgaccccaacgccaaccccaacguggaccccaacgccaaccccaacguggaccccaacgccaaccccaacguggaccccaacgccaaccccaacgccaaccccaacgccaaccccaacgccaaccccaacgccaaccccaacgccaaccccugaggacuaguuauaagacugacuagcccgaugggccucccaacgggcccuccuccccuccuugcaccgagauuaaucaaaggcucuuuucagagccaccaaaaaaaaaaaaaaaaaaaaaaaaaaaaaaaaaaaaaaaaaaaaaaaaaaaaaaaaaaaaaaaaagaauu

SEQ ID NO: 7175 - RNA, 761 nt, Artificial Sequence
  mRNA Design i-3 (hSL-A64-N5) comprising derived and/or modified sequence from Pf(3D7)__XP_001351122.1__HsALB_Pf-CSP(19-192) (opt4)
aggagaaagcuuaccaugaagugggugaccuucaucagccugcuguuccuguucagcagcgccuacagccuguuccaggaguaccagugcuacggcagcagcagcaacaccagagugcugaacgagcugaacuacgacaacgccggcaccaaccuguacaacgagcuggagaugaacuacuacggcaagcaggagaacugguacagccugaagaagaacagcagaagccugggcgagaacgacgacggcaacaacgaggacaacgagaagcugagaaagcccaagcacaagaagcugaagcagcccgccgacggcaaccccgaccccaacgccaaccccaacguggaccccaacgccaaccccaacguggaccccaacgccaaccccaacguggaccccaacgccaaccccaacgccaaccccaacgccaaccccaacgccaaccccaacgccaaccccaacgccaaccccaacgccaaccccaacgccaaccccaacgccaaccccaacgccaaccccaacgccaaccccaacgccaaccccaacgccaaccccaacgccaaccccaacgccaaccccaacgccaaccccugaggacuaguuauaagacugacuagcccgaugggccucccaacgggcccuccuccccuccuugcaccgagauuaaucaaaggcucuuuucagagccaccaaaaaaaaaaaaaaaaaaaaaaaaaaaaaaaaaaaaaaaaaaaaaaaaaaaaaaaaaaaaaaaaagaauu

SEQ ID NO: 7176 - RNA, 1001 nt, Artificial Sequence
  mRNA Design i-3 (hSL-A64-N5) comprising derived and/or modified sequence from Pf(3D7)__XP_001351122.1__HsALB_Pf-CSP(19-272) (opt4)
aggagaaagcuuaccaugaagugggugaccuucaucagccugcuguuccuguucagcagcgccuacagccuguuccaggaguaccagugcuacggcagcagcagcaacaccagagugcugaacgagcugaacuacgacaacgccggcaccaaccuguacaacgagcuggagaugaacuacuacggcaagcaggagaacugguacagccugaagaagaacagcagaagccugggcgagaacgacgacggcaacaacgaggacaacgagaagcugagaaagcccaagcacaagaagcugaagcagcccgccgacggcaaccccgaccccaacgccaaccccaacguggaccccaacgccaaccccaacguggaccccaacgccaaccccaacguggaccccaacgccaaccccaacgccaaccccaacgccaaccccaacgccaaccccaacgccaaccccaacgccaaccccaacgccaaccccaacgccaaccccaacgccaaccccaacgccaaccccaacgccaaccccaacgccaaccccaacgccaaccccaacgccaaccccaacgccaaccccaacgccaaccccaacgccaaccccaacguggaccccaacgccaaccccaacgccaaccccaacgccaaccccaacgccaaccccaacgccaaccccaacgccaaccccaacgccaaccccaacgccaaccccaacgccaaccccaacgccaaccccaacgccaaccccaacgccaaccccaacgccaaccccaacgccaaccccaacgccaaccccaacgccaaccccaacgccaaccccaacgccaaccccugaggacuaguuauaagacugacuagcccgaugggccucccaacgggcccuccuccccuccuugcaccgagauuaaucaaaggcucuuuucagagccaccaaaaaaaaaaaaaaaaaaaaaaaaaaaaaaaaaaaaaaaaaaaaaaaaaaaaaaaaaaaaaaaaagaauu

SEQ ID NO: 7177 - RNA, 1163 nt, Artificial Sequence
  mRNA Design i-3 (hSL-A64-N5) comprising derived and/or modified sequence from Pf(3D7)__XP_001351122.1__HsALB_Pf-CSP(19-272)_L(AAY)_Pf-CSP(310-3 27)_L(AAY)_Pf-CSP(346-375) (opt4)
aggagaaagcuuaccaugaagugggugaccuucaucagccugcuguuccuguucagcagcgccuacagccuguuccaggaguaccagugcuacggcagcagcagcaacaccagagugcugaacgagcugaacuacgacaacgccggcaccaaccuguacaacgagcuggagaugaacuacuacggcaagcaggagaacugguacagccugaagaagaacagcagaagccugggcgagaacgacgacggcaacaacgaggacaacgagaagcugagaaagcccaagcacaagaagcugaagcagcccgccgacggcaaccccgaccccaacgccaaccccaacguggaccccaacgccaaccccaacguggaccccaacgccaaccccaacguggaccccaacgccaaccccaacgccaaccccaacgccaaccccaacgccaaccccaacgccaaccccaacgccaaccccaacgccaaccccaacgccaaccccaacgccaaccccaacgccaaccccaacgccaaccccaacgccaaccccaacgccaaccccaacgccaaccccaacgccaaccccaacgccaaccccaacgccaaccccaacguggaccccaacgccaaccccaacgccaaccccaacgccaaccccaacgccaaccccaacgccaaccccaacgccaaccccaacgccaaccccaacgccaaccccaacgccaaccccaacgccaaccccaacgccaaccccaacgccaaccccaacgccaaccccaacgccaaccccaacgccaaccccaacgccaaccccaacgccaaccccaacgccaaccccgccgccuacgagcccagcgacaagcacaucaaggaguaccugaacaagauccagaacagccuggccgccuacaucaagcccggcagcgccaacaagcccaaggacgagcuggacuacgccaacgacaucgagaagaagaucugcaagauggagaagugcagcugaggacuaguuauaagacugacuagcccgaugggccucccaacgggcccuccuccccuccuugcaccgagauuaaucaaaggcucuuuucagagccaccaaaaaaaaaaaaaaaaaaaaaaaaaaaaaaaaaaaaaaaaaaaaaaaaaaaaaaaaaaaaaaaaagaauu

SEQ ID NO: 7178 - RNA, 1124 nt, Artificial Sequence
  mRNA Design i-3 (hSL-A64-N5) comprising derived and/or modified sequence from Pf(3D7)__XP_001351122.1__HsALB_Pf-CSP(19-272)_L(AAY)_Pf-CSP(346-3 65)_L(AAY)_P2 (opt4)
aggagaaagcuuaccaugaagugggugaccuucaucagccugcuguuccuguucagcagcgccuacagccuguuccaggaguaccagugcuacggcagcagcagcaacaccagagugcugaacgagcugaacuacgacaacgccggcaccaaccuguacaacgagcuggagaugaacuacuacggcaagcaggagaacugguacagccugaagaagaacagcagaagccugggcgagaacgacgacggcaacaacgaggacaacgagaagcugagaaagcccaagcacaagaagcugaagcagcccgccgacggcaaccccgaccccaacgccaaccccaacguggaccccaacgccaaccccaacguggaccccaacgccaaccccaacguggaccccaacgccaaccccaacgccaaccccaacgccaaccccaacgccaaccccaacgccaaccccaacgccaaccccaacgccaaccccaacgccaaccccaacgccaaccccaacgccaaccccaacgccaaccccaacgccaaccccaacgccaaccccaacgccaaccccaacgccaaccccaacgccaaccccaacgccaaccccaacguggaccccaacgccaaccccaacgccaaccccaacgccaaccccaacgccaaccccaacgccaaccccaacgccaaccccaacgccaaccccaacgccaaccccaacgccaaccccaacgccaaccccaacgccaaccccaacgccaaccccaacgccaaccccaacgccaaccccaacgccaaccccaacgccaaccccaacgccaaccccaacgccaaccccgccgccuacaucaagcccggcagcgccaacaagcccaaggacgagcuggacuacgccaacgacaucgaggccgccuaccaguacaucaaggccaacagcaaguucaucggcaucaccgagcugugaggacuaguuauaagacugacuagcccgaugggccucccaacgggcccuccuccccuccuugcaccgagauuaaucaaaggcucuuuucagagccaccaaaaaaaaaaaaaaaaaaaaaaaaaaaaaaaaaaaaaaaaaaaaaaaaaaaaaaaaaaaaaaaaagaauu

SEQ ID NO: 7179 - RNA, 1118 nt, Artificial Sequence
  mRNA Design i-3 (hSL-A64-N5) comprising derived and/or modified sequence from Pf(3D7)__XP_001351122.1__HsALB_Pf-CSP(19-272)_L(AAY)_Pf-CSP(346-3 65)_L(AAY)_PADRE (opt4)
aggagaaagcuuaccaugaagugggugaccuucaucagccugcuguuccuguucagcagcgccuacagccuguuccaggaguaccagugcuacggcagcagcagcaacaccagagugcugaacgagcugaacuacgacaacgccggcaccaaccuguacaacgagcuggagaugaacuacuacggcaagcaggagaacugguacagccugaagaagaacagcagaagccugggcgagaacgacgacggcaacaacgaggacaacgagaagcugagaaagcccaagcacaagaagcugaagcagcccgccgacggcaaccccgaccccaacgccaaccccaacguggaccccaacgccaaccccaacguggaccccaacgccaaccccaacguggaccccaacgccaaccccaacgccaaccccaacgccaaccccaacgccaaccccaacgccaaccccaacgccaaccccaacgccaaccccaacgccaaccccaacgccaaccccaacgccaaccccaacgccaaccccaacgccaaccccaacgccaaccccaacgccaaccccaacgccaaccccaacgccaaccccaacgccaaccccaacguggaccccaacgccaaccccaacgccaaccccaacgccaaccccaacgccaaccccaacgccaaccccaacgccaaccccaacgccaaccccaacgccaaccccaacgccaaccccaacgccaaccccaacgccaaccccaacgccaaccccaacgccaaccccaacgccaaccccaacgccaaccccaacgccaaccccaacgccaaccccaacgccaaccccgccgccuacaucaagcccggcagcgccaacaagcccaaggacgagcuggacuacgccaacgacaucgaggccgccuacgccaaguucguggccgccuggacccugaaggccgccgccugaggacuaguuauaagacugacuagcccgaugggccucccaacgggcccuccuccccuccuugcaccgagauuaaucaaaggcucuuuucagagccaccaaaaaaaaaaaaaaaaaaaaaaaaaaaaaaaaaaaaaaaaaaaaaaaaaaaaaaaaaaaaaaaaagaauu

SEQ ID NO: 7180 - RNA, 1175 nt, Artificial Sequence
  mRNA Design i-3 (hSL-A64-N5) comprising derived and/or modified sequence from Pf(3D7)__XP_001351122.1__HsALB_Pf-CSP(19-272)_L(G4S)_Pf-CSP(310-3 27)_L(G4S)_Pf-CSP(346-375) (opt4)
aggagaaagcuuaccaugaagugggugaccuucaucagccugcuguuccuguucagcagcgccuacagccuguuccaggaguaccagugcuacggcagcagcagcaacaccagagugcugaacgagcugaacuacgacaacgccggcaccaaccuguacaacgagcuggagaugaacuacuacggcaagcaggagaacugguacagccugaagaagaacagcagaagccugggcgagaacgacgacggcaacaacgaggacaacgagaagcugagaaagcccaagcacaagaagcugaagcagcccgccgacggcaaccccgaccccaacgccaaccccaacguggaccccaacgccaaccccaacguggaccccaacgccaaccccaacguggaccccaacgccaaccccaacgccaaccccaacgccaaccccaacgccaaccccaacgccaaccccaacgccaaccccaacgccaaccccaacgccaaccccaacgccaaccccaacgccaaccccaacgccaaccccaacgccaaccccaacgccaaccccaacgccaaccccaacgccaaccccaacgccaaccccaacgccaaccccaacguggaccccaacgccaaccccaacgccaaccccaacgccaaccccaacgccaaccccaacgccaaccccaacgccaaccccaacgccaaccccaacgccaaccccaacgccaaccccaacgccaaccccaacgccaaccccaacgccaaccccaacgccaaccccaacgccaaccccaacgccaaccccaacgccaaccccaacgccaaccccaacgccaaccccggcggcggcggcagcgagcccagcgacaagcacaucaaggaguaccugaacaagauccagaacagccugggcggcggcggcagcaucaagcccggcagcgccaacaagcccaaggacgagcuggacuacgccaacgacaucgagaagaagaucugcaagauggagaagugcagcugaggacuaguuauaagacugacuagcccgaugggccucccaacgggcccuccuccccuccuugcaccgagauuaaucaaaggcucuuuucagagccaccaaaaaaaaaaaaaaaaaaaaaaaaaaaaaaaaaaaaaaaaaaaaaaaaaaaaaaaaaaaaaaaaagaauu

SEQ ID NO: 7181 - RNA, 1160 nt, Artificial Sequence
  mRNA Design i-3 (hSL-A64-N5) comprising derived and/or modified sequence from Pf(3D7)__XP_001351122.1__HsALB_Pf-CSP(19-272)_L(G4S)_Pf-CSP(310-3 27)_Pf-CSP(346-375) (opt4)
aggagaaagcuuaccaugaagugggugaccuucaucagccugcuguuccuguucagcagcgccuacagccuguuccaggaguaccagugcuacggcagcagcagcaacaccagagugcugaacgagcugaacuacgacaacgccggcaccaaccuguacaacgagcuggagaugaacuacuacggcaagcaggagaacugguacagccugaagaagaacagcagaagccugggcgagaacgacgacggcaacaacgaggacaacgagaagcugagaaagcccaagcacaagaagcugaagcagcccgccgacggcaaccccgaccccaacgccaaccccaacguggaccccaacgccaaccccaacguggaccccaacgccaaccccaacguggaccccaacgccaaccccaacgccaaccccaacgccaaccccaacgccaaccccaacgccaaccccaacgccaaccccaacgccaaccccaacgccaaccccaacgccaaccccaacgccaaccccaacgccaaccccaacgccaaccccaacgccaaccccaacgccaaccccaacgccaaccccaacgccaaccccaacgccaaccccaacguggaccccaacgccaaccccaacgccaaccccaacgccaaccccaacgccaaccccaacgccaaccccaacgccaaccccaacgccaaccccaacgccaaccccaacgccaaccccaacgccaaccccaacgccaaccccaacgccaaccccaacgccaaccccaacgccaaccccaacgccaaccccaacgccaaccccaacgccaaccccaacgccaaccccggcggcggcggcagcgagcccagcgacaagcacaucaaggaguaccugaacaagauccagaacagccugaucaagcccggcagcgccaacaagcccaaggacgagcuggacuacgccaacgacaucgagaagaagaucugcaagauggagaagugcagcugaggacuaguuauaagacugacuagcccgaugggccucccaacgggcccuccuccccuccuugcaccgagauuaaucaaaggcucuuuucagagccaccaaaaaaaaaaaaaaaaaaaaaaaaaaaaaaaaaaaaaaaaaaaaaaaaaaaaaaaaaaaaaaaaagaauu

SEQ ID NO: 7182 - RNA, 1160 nt, Artificial Sequence
  mRNA Design i-3 (hSL-A64-N5) comprising derived and/or modified sequence from Pf(3D7)__XP_001351122.1__HsALB_Pf-CSP(19-325) (opt4)
aggagaaagcuuaccaugaagugggugaccuucaucagccugcuguuccuguucagcagcgccuacagccuguuccaggaguaccagugcuacggcagcagcagcaacaccagagugcugaacgagcugaacuacgacaacgccggcaccaaccuguacaacgagcuggagaugaacuacuacggcaagcaggagaacugguacagccugaagaagaacagcagaagccugggcgagaacgacgacggcaacaacgaggacaacgagaagcugagaaagcccaagcacaagaagcugaagcagcccgccgacggcaaccccgaccccaacgccaaccccaacguggaccccaacgccaaccccaacguggaccccaacgccaaccccaacguggaccccaacgccaaccccaacgccaaccccaacgccaaccccaacgccaaccccaacgccaaccccaacgccaaccccaacgccaaccccaacgccaaccccaacgccaaccccaacgccaaccccaacgccaaccccaacgccaaccccaacgccaaccccaacgccaaccccaacgccaaccccaacgccaaccccaacgccaaccccaacguggaccccaacgccaaccccaacgccaaccccaacgccaaccccaacgccaaccccaacgccaaccccaacgccaaccccaacgccaaccccaacgccaaccccaacgccaaccccaacgccaaccccaacgccaaccccaacgccaaccccaacgccaaccccaacgccaaccccaacgccaaccccaacgccaaccccaacgccaaccccaacgccaaccccaacaagaacaaccagggcaacggccagggccacaacaugcccaacgaccccaacagaaacguggacgagaacgccaacgccaacagcgccgugaagaacaacaacaacgaggagcccagcgacaagcacaucaaggaguaccugaacaagauccagaacugaggacuaguuauaagacugacuagcccgaugggccucccaacgggcccuccuccccuccuugcaccgagauuaaucaaaggcucuuuucagagccaccaaaaaaaaaaaaaaaaaaaaaaaaaaaaaaaaaaaaaaaaaaaaaaaaaaaaaaaaaaaaaaaaagaauu

SEQ ID NO: 7183 - RNA, 1337 nt, Artificial Sequence
  mRNA Design i-3 (hSL-A64-N5) comprising derived and/or modified sequence from Pf(3D7)__XP_001351122.1__HsALB_Pf-CSP(19-384) (opt4)
aggagaaagcuuaccaugaagugggugaccuucaucagccugcuguuccuguucagcagcgccuacagccuguuccaggaguaccagugcuacggcagcagcagcaacaccagagugcugaacgagcugaacuacgacaacgccggcaccaaccuguacaacgagcuggagaugaacuacuacggcaagcaggagaacugguacagccugaagaagaacagcagaagccugggcgagaacgacgacggcaacaacgaggacaacgagaagcugagaaagcccaagcacaagaagcugaagcagcccgccgacggcaaccccgaccccaacgccaaccccaacguggaccccaacgccaaccccaacguggaccccaacgccaaccccaacguggaccccaacgccaaccccaacgccaaccccaacgccaaccccaacgccaaccccaacgccaaccccaacgccaaccccaacgccaaccccaacgccaaccccaacgccaaccccaacgccaaccccaacgccaaccccaacgccaaccccaacgccaaccccaacgccaaccccaacgccaaccccaacgccaaccccaacgccaaccccaacguggaccccaacgccaaccccaacgccaaccccaacgccaaccccaacgccaaccccaacgccaaccccaacgccaaccccaacgccaaccccaacgccaaccccaacgccaaccccaacgccaaccccaacgccaaccccaacgccaaccccaacgccaaccccaacgccaaccccaacgccaaccccaacgccaaccccaacgccaaccccaacgccaaccccaacaagaacaaccagggcaacggccagggccacaacaugcccaacgaccccaacagaaacguggacgagaacgccaacgccaacagcgccgugaagaacaacaacaacgaggagcccagcgacaagcacaucaaggaguaccugaacaagauccagaacagccugagcaccgaguggagccccugcagcgugaccugcggcaacggcauccaggugagaaucaagcccggcagcgccaacaagcccaaggacgagcuggacuacgccaacgacaucgagaagaagaucugcaagauggagaagugcagcagcguguucaacguggugaacagcagcugaggacuaguuauaagacugacuagcccgaugggccucccaacgggcccuccuccccuccuugcaccgagauuaaucaaaggcucuuuucagagccaccaaaaaaaaaaaaaaaaaaaaaaaaaaaaaaaaaaaaaaaaaaaaaaaaaaaaaaaaaaaaaaaaagaauu

SEQ ID NO: 7184 - RNA, 1475 nt, Artificial Sequence
  mRNA Design i-3 (hSL-A64-N5) comprising derived and/or modified sequence from Pf(3D7)__XP_001351122.1__HsALB_Pf-CSP(19-384)_TM domain HA (opt4)
aggagaaagcuuaccaugaagugggugaccuucaucagccugcuguuccuguucagcagcgccuacagccuguuccaggaguaccagugcuacggcagcagcagcaacaccagagugcugaacgagcugaacuacgacaacgccggcaccaaccuguacaacgagcuggagaugaacuacuacggcaagcaggagaacugguacagccugaagaagaacagcagaagccugggcgagaacgacgacggcaacaacgaggacaacgagaagcugagaaagcccaagcacaagaagcugaagcagcccgccgacggcaaccccgaccccaacgccaaccccaacguggaccccaacgccaaccccaacguggaccccaacgccaaccccaacguggaccccaacgccaaccccaacgccaaccccaacgccaaccccaacgccaaccccaacgccaaccccaacgccaaccccaacgccaaccccaacgccaaccccaacgccaaccccaacgccaaccccaacgccaaccccaacgccaaccccaacgccaaccccaacgccaaccccaacgccaaccccaacgccaaccccaacgccaaccccaacguggaccccaacgccaaccccaacgccaaccccaacgccaaccccaacgccaaccccaacgccaaccccaacgccaaccccaacgccaaccccaacgccaaccccaacgccaaccccaacgccaaccccaacgccaaccccaacgccaaccccaacgccaaccccaacgccaaccccaacgccaaccccaacgccaaccccaacgccaaccccaacgccaaccccaacaagaacaaccagggcaacggccagggccacaacaugcccaacgaccccaacagaaacguggacgagaacgccaacgccaacagcgccgugaagaacaacaacaacgaggagcccagcgacaagcacaucaaggaguaccugaacaagauccagaacagccugagcaccgaguggagccccugcagcgugaccugcggcaacggcauccaggugagaaucaagcccggcagcgccaacaagcccaaggacgagcuggacuacgccaacgacaucgagaagaagaucugcaagauggagaagugcagcagcguguucaacguggugaacagcagcaagcuggagagcaccagaaucuaccagauccuggccaucuacagcaccguggccagcagccuggugcugguggugagccugggcgccaucagcuucuggaugugcagcaacggcagccugcagugcagaaucugcaucugaggacuaguuauaagacugacuagcccgaugggccucccaacgggcccuccuccccuccuugcaccgagauuaaucaaaggcucuuuucagagccaccaaaaaaaaaaaaaaaaaaaaaaaaaaaaaaaaaaaaaaaaaaaaaaaaaaaaaaaaaaaaaaaaagaauu

SEQ ID NO: 7185 - RNA, 1187 nt, Artificial Sequence
  mRNA Design i-3 (hSL-A64-N5) comprising derived and/or modified sequence from Pf(3D7)__XP_001351122.1__HsALB_Pf-CSP(82-397) (opt4)
aggagaaagcuuaccaugaagugggugaccuucaucagccugcuguuccuguucagcagcgccuacagcgacaacgagaagcugagaaagcccaagcacaagaagcugaagcagcccgccgacggcaaccccgaccccaacgccaaccccaacguggaccccaacgccaaccccaacguggaccccaacgccaaccccaacguggaccccaacgccaaccccaacgccaaccccaacgccaaccccaacgccaaccccaacgccaaccccaacgccaaccccaacgccaaccccaacgccaaccccaacgccaaccccaacgccaaccccaacgccaaccccaacgccaaccccaacgccaaccccaacgccaaccccaacgccaaccccaacgccaaccccaacgccaaccccaacguggaccccaacgccaaccccaacgccaaccccaacgccaaccccaacgccaaccccaacgccaaccccaacgccaaccccaacgccaaccccaacgccaaccccaacgccaaccccaacgccaaccccaacgccaaccccaacgccaaccccaacgccaaccccaacgccaaccccaacgccaaccccaacgccaaccccaacgccaaccccaacgccaaccccaacaagaacaaccagggcaacggccagggccacaacaugcccaacgaccccaacagaaacguggacgagaacgccaacgccaacagcgccgugaagaacaacaacaacgaggagcccagcgacaagcacaucaaggaguaccugaacaagauccagaacagccugagcaccgaguggagccccugcagcgugaccugcggcaacggcauccaggugagaaucaagcccggcagcgccaacaagcccaaggacgagcuggacuacgccaacgacaucgagaagaagaucugcaagauggagaagugcagcagcguguucaacguggugaacagcagcaucggccugaucauggugcugagcuuccuguuccugaacugaggacuaguuauaagacugacuagcccgaugggccucccaacgggcccuccuccccuccuugcaccgagauuaaucaaaggcucuuuucagagccaccaaaaaaaaaaaaaaaaaaaaaaaaaaaaaaaaaaaaaaaaaaaaaaaaaaaaaaaaaaaaaaaaagaauu

SEQ ID NO: 7186 - RNA, 539 nt, Artificial Sequence
  mRNA Design i-3 (hSL-A64-N5) comprising derived and/or modified sequence from Pf(3D7)__XP_001351122.1__HsALB_Pf-CSP(93-192) (opt4)
aggagaaagcuuaccaugaagugggugaccuucaucagccugcuguuccuguucagcagcgccuacagcaagcugaagcagcccgccgacggcaaccccgaccccaacgccaaccccaacguggaccccaacgccaaccccaacguggaccccaacgccaaccccaacguggaccccaacgccaaccccaacgccaaccccaacgccaaccccaacgccaaccccaacgccaaccccaacgccaaccccaacgccaaccccaacgccaaccccaacgccaaccccaacgccaaccccaacgccaaccccaacgccaaccccaacgccaaccccaacgccaaccccaacgccaaccccaacgccaaccccugaggacuaguuauaagacugacuagcccgaugggccucccaacgggcccuccuccccuccuugcaccgagauuaaucaaaggcucuuuucagagccaccaaaaaaaaaaaaaaaaaaaaaaaaaaaaaaaaaaaaaaaaaaaaaaaaaaaaaaaaaaaaaaaaagaauu

SEQ ID NO: 7187 - RNA, 779 nt, Artificial Sequence
  mRNA Design i-3 (hSL-A64-N5) comprising derived and/or modified sequence from Pf(3D7)__XP_001351122.1__HsALB_Pf-CSP(93-272) (opt4)
aggagaaagcuuaccaugaagugggugaccuucaucagccugcuguuccuguucagcagcgccuacagcaagcugaagcagcccgccgacggcaaccccgaccccaacgccaaccccaacguggaccccaacgccaaccccaacguggaccccaacgccaaccccaacguggaccccaacgccaaccccaacgccaaccccaacgccaaccccaacgccaaccccaacgccaaccccaacgccaaccccaacgccaaccccaacgccaaccccaacgccaaccccaacgccaaccccaacgccaaccccaacgccaaccccaacgccaaccccaacgccaaccccaacgccaaccccaacgccaaccccaacgccaaccccaacguggaccccaacgccaaccccaacgccaaccccaacgccaaccccaacgccaaccccaacgccaaccccaacgccaaccccaacgccaaccccaacgccaaccccaacgccaaccccaacgccaaccccaacgccaaccccaacgccaaccccaacgccaaccccaacgccaaccccaacgccaaccccaacgccaaccccaacgccaaccccaacgccaaccccugaggacuaguuauaagacugacuagcccgaugggccucccaacgggcccuccuccccuccuugcaccgagauuaaucaaaggcucuuuucagagccaccaaaaaaaaaaaaaaaaaaaaaaaaaaaaaaaaaaaaaaaaaaaaaaaaaaaaaaaaaaaaaaaaagaauu

SEQ ID NO: 7188 - RNA, 1154 nt, Artificial Sequence
  mRNA Design i-3 (hSL-A64-N5) comprising derived and/or modified sequence from Pf(3D7)__XP_001351122.1__HsALB_Pf-CSP(93-397) (opt4)
aggagaaagcuuaccaugaagugggugaccuucaucagccugcuguuccuguucagcagcgccuacagcaagcugaagcagcccgccgacggcaaccccgaccccaacgccaaccccaacguggaccccaacgccaaccccaacguggaccccaacgccaaccccaacguggaccccaacgccaaccccaacgccaaccccaacgccaaccccaacgccaaccccaacgccaaccccaacgccaaccccaacgccaaccccaacgccaaccccaacgccaaccccaacgccaaccccaacgccaaccccaacgccaaccccaacgccaaccccaacgccaaccccaacgccaaccccaacgccaaccccaacgccaaccccaacguggaccccaacgccaaccccaacgccaaccccaacgccaaccccaacgccaaccccaacgccaaccccaacgccaaccccaacgccaaccccaacgccaaccccaacgccaaccccaacgccaaccccaacgccaaccccaacgccaaccccaacgccaaccccaacgccaaccccaacgccaaccccaacgccaaccccaacgccaaccccaacgccaaccccaacaagaacaaccagggcaacggccagggccacaacaugcccaacgaccccaacagaaacguggacgagaacgccaacgccaacagcgccgugaagaacaacaacaacgaggagcccagcgacaagcacaucaaggaguaccugaacaagauccagaacagccugagcaccgaguggagccccugcagcgugaccugcggcaacggcauccaggugagaaucaagcccggcagcgccaacaagcccaaggacgagcuggacuacgccaacgacaucgagaagaagaucugcaagauggagaagugcagcagcguguucaacguggugaacagcagcaucggccugaucauggugcugagcuuccuguuccugaacugaggacuaguuauaagacugacuagcccgaugggccucccaacgggcccuccuccccuccuugcaccgagauuaaucaaaggcucuuuucagagccaccaaaaaaaaaaaaaaaaaaaaaaaaaaaaaaaaaaaaaaaaaaaaaaaaaaaaaaaaaaaaaaaaagaauu

SEQ ID NO: 7189 - RNA, 524 nt, Artificial Sequence
  mRNA Design i-3 (hSL-A64-N5) comprising derived and/or modified sequence from Pf(3D7)__XP_001351122.1__HsALB_Pf-CSP(98-192) (opt4)
aggagaaagcuuaccaugaagugggugaccuucaucagccugcuguuccuguucagcagcgccuacagcgccgacggcaaccccgaccccaacgccaaccccaacguggaccccaacgccaaccccaacguggaccccaacgccaaccccaacguggaccccaacgccaaccccaacgccaaccccaacgccaaccccaacgccaaccccaacgccaaccccaacgccaaccccaacgccaaccccaacgccaaccccaacgccaaccccaacgccaaccccaacgccaaccccaacgccaaccccaacgccaaccccaacgccaaccccaacgccaaccccaacgccaaccccugaggacuaguuauaagacugacuagcccgaugggccucccaacgggcccuccuccccuccuugcaccgagauuaaucaaaggcucuuuucagagccaccaaaaaaaaaaaaaaaaaaaaaaaaaaaaaaaaaaaaaaaaaaaaaaaaaaaaaaaaaaaaaaaaagaauu

SEQ ID NO: 7190 - RNA, 764 nt, Artificial Sequence
  mRNA Design i-3 (hSL-A64-N5) comprising derived and/or modified sequence from Pf(3D7)__XP_001351122.1__HsALB_Pf-CSP(98-272) (opt4)
aggagaaagcuuaccaugaagugggugaccuucaucagccugcuguuccuguucagcagcgccuacagcgccgacggcaaccccgaccccaacgccaaccccaacguggaccccaacgccaaccccaacguggaccccaacgccaaccccaacguggaccccaacgccaaccccaacgccaaccccaacgccaaccccaacgccaaccccaacgccaaccccaacgccaaccccaacgccaaccccaacgccaaccccaacgccaaccccaacgccaaccccaacgccaaccccaacgccaaccccaacgccaaccccaacgccaaccccaacgccaaccccaacgccaaccccaacgccaaccccaacguggaccccaacgccaaccccaacgccaaccccaacgccaaccccaacgccaaccccaacgccaaccccaacgccaaccccaacgccaaccccaacgccaaccccaacgccaaccccaacgccaaccccaacgccaaccccaacgccaaccccaacgccaaccccaacgccaaccccaacgccaaccccaacgccaaccccaacgccaaccccaacgccaaccccugaggacuaguuauaagacugacuagcccgaugggccucccaacgggcccuccuccccuccuugcaccgagauuaaucaaaggcucuuuucagagccaccaaaaaaaaaaaaaaaaaaaaaaaaaaaaaaaaaaaaaaaaaaaaaaaaaaaaaaaaaaaaaaaaagaauu

SEQ ID NO: 7191 - RNA, 1070 nt, Artificial Sequence
  mRNA Design i-3 (hSL-A64-N5) comprising derived and/or modified sequence from Pf(3D7)__XP_001351122.1__HsALB_Pf-CSP(98-374) (opt4)
aggagaaagcuuaccaugaagugggugaccuucaucagccugcuguuccuguucagcagcgccuacagcgccgacggcaaccccgaccccaacgccaaccccaacguggaccccaacgccaaccccaacguggaccccaacgccaaccccaacguggaccccaacgccaaccccaacgccaaccccaacgccaaccccaacgccaaccccaacgccaaccccaacgccaaccccaacgccaaccccaacgccaaccccaacgccaaccccaacgccaaccccaacgccaaccccaacgccaaccccaacgccaaccccaacgccaaccccaacgccaaccccaacgccaaccccaacgccaaccccaacguggaccccaacgccaaccccaacgccaaccccaacgccaaccccaacgccaaccccaacgccaaccccaacgccaaccccaacgccaaccccaacgccaaccccaacgccaaccccaacgccaaccccaacgccaaccccaacgccaaccccaacgccaaccccaacgccaaccccaacgccaaccccaacgccaaccccaacgccaaccccaacgccaaccccaacaagaacaaccagggcaacggccagggccacaacaugcccaacgaccccaacagaaacguggacgagaacgccaacgccaacagcgccgugaagaacaacaacaacgaggagcccagcgacaagcacaucaaggaguaccugaacaagauccagaacagccugagcaccgaguggagccccugcagcgugaccugcggcaacggcauccaggugagaaucaagcccggcagcgccaacaagcccaaggacgagcuggacuacgccaacgacaucgagaagaagaucugcaagauggagaagugcugaggacuaguuauaagacugacuagcccgaugggccucccaacgggcccuccuccccuccuugcaccgagauuaaucaaaggcucuuuucagagccaccaaaaaaaaaaaaaaaaaaaaaaaaaaaaaaaaaaaaaaaaaaaaaaaaaaaaaaaaaaaaaaaaagaauu

SEQ ID NO: 7192 - RNA, 1139 nt, Artificial Sequence
  mRNA Design i-3 (hSL-A64-N5) comprising derived and/or modified sequence from Pf(3D7)__XP_001351122.1__HsALB_Pf-CSP(98-397) (opt4)
aggagaaagcuuaccaugaagugggugaccuucaucagccugcuguuccuguucagcagcgccuacagcgccgacggcaaccccgaccccaacgccaaccccaacguggaccccaacgccaaccccaacguggaccccaacgccaaccccaacguggaccccaacgccaaccccaacgccaaccccaacgccaaccccaacgccaaccccaacgccaaccccaacgccaaccccaacgccaaccccaacgccaaccccaacgccaaccccaacgccaaccccaacgccaaccccaacgccaaccccaacgccaaccccaacgccaaccccaacgccaaccccaacgccaaccccaacgccaaccccaacguggaccccaacgccaaccccaacgccaaccccaacgccaaccccaacgccaaccccaacgccaaccccaacgccaaccccaacgccaaccccaacgccaaccccaacgccaaccccaacgccaaccccaacgccaaccccaacgccaaccccaacgccaaccccaacgccaaccccaacgccaaccccaacgccaaccccaacgccaaccccaacgccaaccccaacaagaacaaccagggcaacggccagggccacaacaugcccaacgaccccaacagaaacguggacgagaacgccaacgccaacagcgccgugaagaacaacaacaacgaggagcccagcgacaagcacaucaaggaguaccugaacaagauccagaacagccugagcaccgaguggagccccugcagcgugaccugcggcaacggcauccaggugagaaucaagcccggcagcgccaacaagcccaaggacgagcuggacuacgccaacgacaucgagaagaagaucugcaagauggagaagugcagcagcguguucaacguggugaacagcagcaucggccugaucauggugcugagcuuccuguuccugaacugaggacuaguuauaagacugacuagcccgaugggccucccaacgggcccuccuccccuccuugcaccgagauuaaucaaaggcucuuuucagagccaccaaaaaaaaaaaaaaaaaaaaaaaaaaaaaaaaaaaaaaaaaaaaaaaaaaaaaaaaaaaaaaaaagaauu

SEQ ID NO: 7193 - RNA, 1466 nt, Artificial Sequence
  mRNA Design i-3 (hSL-A64-N5) comprising derived and/or modified sequence from Pf(3D7)__XP_001351122.1__HsALB_Pf-CSP(199-377)_L(PVTN)_HBsAg (opt4)
aggagaaagcuuaccaugaagugggugaccuucaucagccugcuguuccuguucagcagcgccuacagcgaccccaacgccaaccccaacgccaaccccaacgccaaccccaacgccaaccccaacgccaaccccaacgccaaccccaacgccaaccccaacgccaaccccaacgccaaccccaacgccaaccccaacgccaaccccaacgccaaccccaacgccaaccccaacgccaaccccaacgccaaccccaacgccaaccccaacgccaaccccaacgccaaccccaacaagaacaaccagggcaacggccagggccacaacaugcccaacgaccccaacagaaacguggacgagaacgccaacgccaacagcgccgugaagaacaacaacaacgaggagcccagcgacaagcacaucaaggaguaccugaacaagauccagaacagccugagcaccgaguggagccccugcagcgugaccugcggcaacggcauccaggugagaaucaagcccggcagcgccaacaagcccaaggacgagcuggacuacgccaacgacaucgagaagaagaucugcaagauggagaagugcagcagcgugcccgugaccaacauggagaacaucaccagcggcuuccugggcccccugcuggugcugcaggccggcuucuuccugcugaccagaauccugaccaucccccagagccuggacagcugguggaccagccugaacuuccugggcggcagccccgugugccugggccagaacagccagagccccaccagcaaccacagccccaccagcugcccccccaucugccccggcuacagauggaugugccugagaagauucaucaucuuccuguucauccugcugcugugccugaucuuccugcuggugcugcuggacuaccagggcaugcugcccgugugcccccugauccccggcagcaccaccaccaacaccggccccugcaagaccugcaccacccccgcccagggcaacagcauguuccccagcugcugcugcaccaagcccaccgacggcaacugcaccugcauccccauccccagcagcugggccuucgccaaguaccugugggagugggccagcgugagauucagcuggcugagccugcuggugcccuucgugcagugguucgugggccugagccccaccguguggcugagcgccaucuggaugaugugguacuggggccccagccuguacagcaucgugagccccuucaucccccugcugcccaucuucuucugccuguggguguacaucugaggacuaguuauaagacugacuagcccgaugggccucccaacgggcccuccuccccuccuugcaccgagauuaaucaaaggcucuuuucagagccaccaaaaaaaaaaaaaaaaaaaaaaaaaaaaaaaaaaaaaaaaaaaaaaaaaaaaaaaaaaaaaaaaagaauu

SEQ ID NO: 7194 - RNA, 1376 nt, Artificial Sequence
  mRNA Design i-3 (hSL-A64-N5) comprising derived and/or modified sequence from Pf(3D7)__XP_001351122.1__Pf-CSP (opt5)
aggagaaagcuuaccaugaugagaaagcuggccauccucagcguguccucuuuccuguuugucgaggcucuuuuccaggaauaccaaugcuauggcagcuccucuaacacccggguucugaaugagcucaacuacgacaaugccgggacaaaccuguauaaugaacuugagaugaacuacuauggaaaacaggaaaauugguacagccugaagaaaaacucccgcucucucggcgagaaugaugacgggaacaaugaggauaacgaaaagcugagaaaacccaagcacaagaaacugaagcagccugcggacggaaauccggaucccaacgcuaauccuaacguggaccccaacgccaauccuaacguggaucccaaugccaacccuaaugucgacccgaacgcuaaucccaacgccaauccuaacgcuaaucccaacgccaauccuaacgcgaaucccaacgccaacccgaaugcuaacccuaaugccaaccccaaugcuaacccuaaugccaaccccaaugcgaaccccaaugccaacccuaaugcuaacccgaaugccaaccccaacgcuaauccuaacgccaaucccaacgccaauccuaacguggaucccaaugcuaacccgaaugcgaacccuaaugccaaccccaaugcuaacccuaaugccaaccccaacgccaauccuaacgcuaaucccaacgccaauccgaacgcgaauccuaacgcuaaucccaacgccaaucccaacgccaauccuaacgcuaauccgaacgccaaucccaacgcuaacccuaaugccaaccccaaugcgaacccuaaugccaaccccaauaaaaacaaucagggcaacgggcaaggacauaauaugccuaacgaccccaaucggaacguugaugagaaugcuaacgccaacagcgcugugaagaauaacaauaacgaggaaccguccgacaaacacauuaaggaguaucucaauaagauccagaacagccugucuacggaaugguccccuuguagcgugaccugcggcaauggcauucagguccgcaucaaacccgggucugccaacaagccuaaagaugagcuugacuacgcgaaugacauugaaaagaaaaucuguaagauggagaaaugcuccagcguuuuuaacguggucaauucuuccaucggacugauuauggugcucagcuuccuguuucuuaacugaggacuaguuauaagacugacuagcccgaugggccucccaacgggcccuccuccccuccuugcaccgagauuaaucaaaggcucuuuucagagccaccaaaaaaaaaaaaaaaaaaaaaaaaaaaaaaaaaaaaaaaaaaaaaaaaaaaaaaaaaaaaaaaaagaauu

SEQ ID NO: 7195 - RNA, 1307 nt, Artificial Sequence
  mRNA Design i-3 (hSL-A64-N5) comprising derived and/or modified sequence from Pf(3D7)__XP_001351122.1__Pf-CSP(1-374) (opt5)
aggagaaagcuuaccaugaugagaaagcuggccauccucagcguguccucuuuccuguuugucgaggcucuuuuccaggaauaccaaugcuauggcagcuccucuaacacccggguucugaaugagcucaacuacgacaaugccgggacaaaccuguauaaugaacuugagaugaacuacuauggaaaacaggaaaauugguacagccugaagaaaaacucccgcucucucggcgagaaugaugacgggaacaaugaggauaacgaaaagcugagaaaacccaagcacaagaaacugaagcagccugcggacggaaauccggaucccaacgcuaauccuaacguggaccccaacgccaauccuaacguggaucccaaugccaacccuaaugucgacccgaacgcuaaucccaacgccaauccuaacgcuaaucccaacgccaauccuaacgcgaaucccaacgccaacccgaaugcuaacccuaaugccaaccccaaugcuaacccuaaugccaaccccaaugcgaaccccaaugccaacccuaaugcuaacccgaaugccaaccccaacgcuaauccuaacgccaaucccaacgccaauccuaacguggaucccaaugcuaacccgaaugcgaacccuaaugccaaccccaaugcuaacccuaaugccaaccccaacgccaauccuaacgcuaaucccaacgccaauccgaacgcgaauccuaacgcuaaucccaacgccaaucccaacgccaauccuaacgcuaauccgaacgccaaucccaacgcuaacccuaaugccaaccccaaugcgaacccuaaugccaaccccaauaaaaacaaucagggcaacgggcaaggacauaauaugccuaacgaccccaaucggaacguugaugagaaugcuaacgccaacagcgcugugaagaauaacaauaacgaggaaccguccgacaaacacauuaaggaguaucucaauaagauccagaacagccugucuacggaaugguccccuuguagcgugaccugcggcaauggcauucagguccgcaucaaacccgggucugccaacaagccuaaagaugagcuugacuacgcgaaugacauugaaaagaaaaucuguaagauggagaaaugcugaggacuaguuauaagacugacuagcccgaugggccucccaacgggcccuccuccccuccuugcaccgagauuaaucaaaggcucuuuucagagccaccaaaaaaaaaaaaaaaaaaaaaaaaaaaaaaaaaaaaaaaaaaaaaaaaaaaaaaaaaaaaaaaaagaauu

SEQ ID NO: 7196 - RNA, 1160 nt, Artificial Sequence
  mRNA Design i-3 (hSL-A64-N5) comprising derived and/or modified sequence from Pf(3D7)__XP_001351122.1__Pf-CSP(1-325) (opt5)
aggagaaagcuuaccaugaugagaaagcuggccauccucagcguguccucuuuccuguuugucgaggcucuuuuccaggaauaccaaugcuauggcagcuccucuaacacccggguucugaaugagcucaacuacgacaaugccgggacaaaccuguauaaugaacuugagaugaacuacuauggaaaacaggaaaauugguacagccugaagaaaaacucccgcucucucggcgagaaugaugacgggaacaaugaggauaacgaaaagcugagaaaacccaagcacaagaaacugaagcagccugcggacggaaauccggaucccaacgcuaauccuaacguggaccccaacgccaauccuaacguggaucccaaugccaacccuaaugucgacccgaacgcuaaucccaacgccaauccuaacgcuaaucccaacgccaauccuaacgcgaaucccaacgccaacccgaaugcuaacccuaaugccaaccccaaugcuaacccuaaugccaaccccaaugcgaaccccaaugccaacccuaaugcuaacccgaaugccaaccccaacgcuaauccuaacgccaaucccaacgccaauccuaacguggaucccaaugcuaacccgaaugcgaacccuaaugccaaccccaaugcuaacccuaaugccaaccccaacgccaauccuaacgcuaaucccaacgccaauccgaacgcgaauccuaacgcuaaucccaacgccaaucccaacgccaauccuaacgcuaauccgaacgccaaucccaacgcuaacccuaaugccaaccccaaugcgaacccuaaugccaaccccaauaaaaacaaucagggcaacgggcaaggacauaauaugccuaacgaccccaaucggaacguugaugagaaugcuaacgccaacagcgcugugaagaauaacaauaacgaggaaccguccgacaaacacauuaaggaguaucucaauaagauccagaacugaggacuaguuauaagacugacuagcccgaugggccucccaacgggcccuccuccccuccuugcaccgagauuaaucaaaggcucuuuucagagccaccaaaaaaaaaaaaaaaaaaaaaaaaaaaaaaaaaaaaaaaaaaaaaaaaaaaaaaaaaaaaaaaaagaauu

SEQ ID NO: 7197 - RNA, 1376 nt, Artificial Sequence
  mRNA Design i-3 (hSL-A64-N5) comprising derived and/or modified sequence from Pf(3D7)__XP_001351122.1__HsALB_Pf-CSP(19-397) (opt5)
aggagaaagcuuaccaugaagugggugaccuucaucagccugcucuuucuguucuccucugccuacagccuuuuucaggaguaucaaugcuacggcuccucuagcaacacaagaguccugaaugaacucaacuaugacaaugcugggacgaaccuguacaaugagcuugaaaugaacuauuacggaaaacaggagaauugguauucccugaagaaaaacucucggagccucggcgaaaaugaugacgggaacaaugaggauaacgagaagcugcgcaaacccaagcacaagaaacugaagcagccugccgacggaaauccggaucccaacgcgaauccuaacguugaccccaacgcuaauccuaacguggaucccaaugccaacccuaauguggacccgaacgccaaucccaacgcuaauccuaacgccaaucccaacgcuaauccuaacgccaaucccaacgcgaacccgaaugccaacccuaaugcuaaccccaaugccaacccuaaugcuaaccccaaugccaaccccaaugcgaacccuaaugccaacccgaaugcuaaccccaacgccaauccuaacgcuaaucccaacgccaauccuaacgucgaucccaaugccaacccgaaugcuaacccuaaugcgaaccccaaugccaacccuaaugcuaaccccaacgccaauccuaacgccaaucccaacgcuaauccgaacgccaauccuaacgcgaaucccaacgcuaaucccaacgccaauccuaacgccaauccgaacgcuaaucccaacgccaacccuaaugcuaaccccaaugccaacccuaaugcgaaccccaauaaaaacaaucagggcaacgggcaaggacauaauaugccuaacgaccccaauagaaacguggaugaaaaugccaacgcuaacuccgccguuaagaauaacaauaacgaggaaccgagcgacaaacacauuaaggaguaccucaauaagauccagaacucucuguccaccgaguggagcccuuguucugugacaugcggcaauggcauucagguccggaucaaacccggguccgcuaacaagccuaaagaugaacuugacuacgccaaugacauugagaagaaaaucuguaagauggaaaaaugcagcucuguguucaacguugucaauuccagcaucggacugauuauggugcucuccuuucuguuccuuaacugaggacuaguuauaagacugacuagcccgaugggccucccaacgggcccuccuccccuccuugcaccgagauuaaucaaaggcucuuuucagagccaccaaaaaaaaaaaaaaaaaaaaaaaaaaaaaaaaaaaaaaaaaaaaaaaaaaaaaaaaaaaaaaaaagaauu

SEQ ID NO: 7198 - RNA, 1394 nt, Artificial Sequence
  mRNA Design i-3 (hSL-A64-N5) comprising derived and/or modified sequence from Pf(3D7)__XP_001351122.1__HsIns-iso1_Pf-CSP(19-397) (opt5)
aggagaaagcuuaccauggcccuguggaugagacuccugccccuucuggcucuccuggcccuuuggggcccugacccggcggcugcccuguuccaggaguaccaaugcuaugggagcuccucuaacacccgggugcucaaugaacugaacuacgauaaugccggaacaaaccuguauaaugagcucgaaaugaacuacuauggcaagcaggagaauugguacagccugaaaaagaacucccgcucucuuggggaaaaugacgauggaaacaaugaggacaacgagaaacugagaaagcccaaacacaagaagcucaaacagccugcugauggcaaucccgacccuaacgccaaucccaacgucgauccuaacgcuaauccgaacguugaccccaaugccaacccuaauguggaucccaacgcgaauccuaacgccaaucccaacgcuaauccgaacgccaauccuaacgcuaaucccaacgccaacccuaaugcgaaccccaaugccaaccccaaugcuaacccuaaugccaacccgaaugcuaaccccaaugccaacccuaaugccaaccccaaugcuaacccuaacgcgaaucccaacgccaauccgaacgcuaauccuaacguggaccccaaugccaacccuaaugccaaccccaaugcuaacccuaaugccaaccccaaugcgaacccgaacgcuaauccuaacgccaaucccaacgccaaucccaacgcuaauccuaacgccaauccgaacgcuaaucccaacgccaauccuaacgcgaaucccaacgccaauccuaacgcuaaccccaaugccaacccuaaugcuaaccccaaugccaacccgaauaagaacaaucaggggaacggacaaggccauaauaugccuaacgaucccaaucggaacgucgacgaaaaugcgaacgccaacagcgcugugaaaaauaacaauaacgaggaaccuuccgauaagcacaucaaagaguaucugaauaagauucagaacucucuuagcacggaguggucccccuguagcguuaccugcggcaaugggauccaggugcgcauuaagccgggaucugccaacaaaccuaaggacgaacuggacuacgcuaaugauaucgagaaaaagauuuguaaaauggaaaagugcuccagcgucuuuaacgugguuaauucuuccaucggccucaucauggugcugagcuuccuguuucucaacugaggacuaguuauaagacugacuagcccgaugggccucccaacgggcccuccuccccuccuugcaccgagauuaaucaaaggcucuuuucagagccaccaaaaaaaaaaaaaaaaaaaaaaaaaaaaaaaaaaaaaaaaaaaaaaaaaaaaaaaaaaaaaaaaagaauu

SEQ ID NO: 7199 - RNA, 1373 nt, Artificial Sequence
  mRNA Design i-3 (hSL-A64-N5) comprising derived and/or modified sequence from Pf(3D7)__XP_001351122.1__HsSPARC_Pf-CSP(19-397) (opt5)
aggagaaagcuuaccaugagagccuggaucuucuuucugcucugccuggcuggccgggcccuugcgcuguuccaggaguaccaauguuaugggagcuccucuaacacccgcgugcucaaugaacugaacuacgacaaugcuggaacaaaccuuuauaaugagcuggaaaugaacuacuauggcaagcaggagaauugguacagccucaaaaagaacuccagaucucugggggaaaaugaugacggaaacaaugaggauaacgagaaacugcggaagcccaaacacaagaagcucaaacagccugccgacggcaauccggaucccaacgccaauccuaacgucgaccccaacgcuaauccuaacguugaucccaaugccaacccuaauguggacccgaacgcuaaucccaacgccaauccuaacgcgaaucccaacgccaauccuaacgcuaaucccaacgccaacccgaaugcuaacccuaaugccaaccccaaugcgaacccuaaugccaaccccaaugcuaaccccaaugccaacccuaaugcuaacccgaaugccaaccccaacgccaauccuaacgcuaaucccaacgcgaauccuaacguggaucccaaugccaacccgaaugcuaacccuaaugccaaccccaaugccaacccuaaugcuaaccccaacgccaauccuaacgcgaaucccaacgcuaauccgaacgccaauccuaacgccaaucccaacgcuaaucccaacgccaauccuaacgcuaauccgaacgccaaucccaacgcgaacccuaaugccaaccccaaugcuaacccuaaugccaaccccaauaagaacaaucaggggaacggacaaggccauaauaugccuaacgaccccaaucgcaacgucgaugaaaaugcuaacgccaacagcgcggugaaaaauaacaauaacgaggaaccguccgacaagcacauuaaagaguaucugaauaagauccagaacucucuuagcacggagugguccccuugcagcguuaccuguggcaaugggauucaggugagaaucaagcccggaucugccaacaaaccuaaggaugaacuggacuacgcuaaugacauugagaaaaagaucugcaaaauggaaaaguguuccagcgucuuuaacgugguuaauucuuccaucggccucauuauggugcugagcuuccuuuuucugaacugaggacuaguuauaagacugacuagcccgaugggccucccaacgggcccuccuccccuccuugcaccgagauuaaucaaaggcucuuuucagagccaccaaaaaaaaaaaaaaaaaaaaaaaaaaaaaaaaaaaaaaaaaaaaaaaaaaaaaaaaaaaaaaaaagaauu

SEQ ID NO: 7200 - RNA, 1376 nt, Artificial Sequence
  mRNA Design i-3 (hSL-A64-N5) comprising derived and/or modified sequence from Pf(3D7)__XP_001351122.1__IgE_Pf-CSP(19-397) (opt5)
aggagaaagcuuaccauggacuggaccuggauccuguuccucguggccgcugccacaagaguccacagccuguuucaggaguaccaaugcuauggcuccucuagcaacacgcggguucuuaaugaacugaacuacgauaaugcggggaccaaccucuauaaugagcuggaaaugaacuacuauggaaagcaggagaauugguacucccuuaaaaagaacucucgcagccugggcgaaaaugacgaugggaacaaugaggacaacgagaaacucagaaagcccaaacauaagaagcugaaacagccugcugauggaaauccggaccccaacgccaauccuaacguggaucccaacgccaauccuaacguggaccccaaugcuaacccuaaugucgauccgaacgccaaucccaacgcuaauccuaacgccaaucccaacgcgaauccuaacgccaaucccaacgcuaacccgaaugccaacccuaaugcuaaccccaaugccaacccuaaugcgaaccccaaugccaaccccaaugcuaacccuaaugccaacccgaaugcuaaccccaacgccaauccuaacgccaaucccaacgcuaauccuaacguggaccccaaugcgaacccgaaugccaacccuaaugcuaaccccaaugccaacccuaaugccaaccccaacgcuaauccuaacgccaaucccaacgcgaauccgaacgcuaauccuaacgccaaucccaacgccaaucccaacgcuaauccuaacgccaauccgaacgcuaaucccaacgccaacccuaaugcgaaccccaaugccaacccuaaugcuaaccccaauaagaacaaucagggcaacgggcaaggacacaauaugccuaacgaucccaaucggaacguugacgaaaaugccaacgcuaacuccgccgugaaaaauaacaauaacgaggaaccgucugauaagcauauuaaagaguaucugaauaagauccagaacagccucuccacagaguggagcccuuguucugugaccugcggcaauggcauucagguccgcaucaagcccggguccgcgaacaaaccuaaggacgaacuggacuacgccaaugauauugagaaaaagaucuguaaaauggaaaagugcagcucuguuuucaacguggucaauuccagcaucggacuuauuauggugcugucuuuucucuuccugaacugaggacuaguuauaagacugacuagcccgaugggccucccaacgggcccuccuccccuccuugcaccgagauuaaucaaaggcucuuuucagagccaccaaaaaaaaaaaaaaaaaaaaaaaaaaaaaaaaaaaaaaaaaaaaaaaaaaaaaaaaaaaaaaaaagaauu

SEQ ID NO: 7201 - RNA, 1541 nt, Artificial Sequence
  mRNA Design i-3 (hSL-A64-N5) comprising derived and/or modified sequence from Pf(3D7)__XP_001351122.1__Pf-CSP_L(G4SG4)_TM domain HA (opt5)
aggagaaagcuuaccaugaugagaaagcuggccauccucagcguguccucuuuccuguuugucgaggcucuuuuccaggaauaccaaugcuauggcagcuccucuaacacccggguucugaaugagcucaacuacgacaaugccgggacaaaccuguauaaugaacuugagaugaacuacuauggaaaacaggaaaauugguacagccugaagaaaaacucccgcucucucggcgagaaugaugacgggaacaaugaggauaacgaaaagcugagaaaacccaagcacaagaaacugaagcagccugcggacggaaauccggaucccaacgcuaauccuaacguggaccccaacgccaauccuaacguggaucccaaugccaacccuaaugucgacccgaacgcuaaucccaacgccaauccuaacgcuaaucccaacgccaauccuaacgcgaaucccaacgccaacccgaaugcuaacccuaaugccaaccccaaugcuaacccuaaugccaaccccaaugcgaaccccaaugccaacccuaaugcuaacccgaaugccaaccccaacgcuaauccuaacgccaaucccaacgccaauccuaacguggaucccaaugcuaacccgaaugcgaacccuaaugccaaccccaaugcuaacccuaaugccaaccccaacgccaauccuaacgcuaaucccaacgccaauccgaacgcgaauccuaacgcuaaucccaacgccaaucccaacgccaauccuaacgcuaauccgaacgccaaucccaacgcuaacccuaaugccaaccccaaugcgaacccuaaugccaaccccaauaaaaacaaucagggcaacgggcaaggacauaauaugccuaacgaccccaaucggaacguugaugagaaugcuaacgccaacagcgcugugaagaauaacaauaacgaggaaccguccgacaaacacauuaaggaguaucucaauaagauccagaacagccugucuacggaaugguccccuuguagcgugaccugcggcaauggcauucagguccgcaucaaacccgggucugccaacaagccuaaagaugagcuugacuacgcgaaugacauugaaaagaaaaucuguaagauggagaaaugcuccagcguuuuuaacguggucaauucuuccaucggacugauuauggugcucagcuuccuguuucuuaacggcgggggaggcuccgggggaggcggcaagcuggaaucuacaagaaucuaccagauucucgccaucuauagcaccguggcuuccagccugguccugguugugucucucggggccauuuccuucuggauguguagcaauggaucucugcaaugccggaucuguauuugaggacuaguuauaagacugacuagcccgaugggccucccaacgggcccuccuccccuccuugcaccgagauuaaucaaaggcucuuuucagagccaccaaaaaaaaaaaaaaaaaaaaaaaaaaaaaaaaaaaaaaaaaaaaaaaaaaaaaaaaaaaaaaaaagaauu

SEQ ID NO: 7202 - RNA, 1415 nt, Artificial Sequence
  mRNA Design i-3 (hSL-A64-N5) comprising derived and/or modified sequence from Pf(3D7)__XP_001351122.1__Pf-CSP(199-377)_L(PVTN)_HBsAg (opt5)
aggagaaagcuuaccauggaccccaacgccaauccuaacgcuaauccgaacgccaaucccaacgcgaauccuaacgcuaaucccaacgccaauccuaacgccaaucccaacgcuaauccuaacgccaacccgaaugcuaaccccaaugccaacccuaaugcgaaccccaaugccaacccuaaugcuaaccccaaugccaacccgaaugcuaacccuaaugccaaccccaacgcgaauccuaacaagaauaaccagggcaaugggcaaggacacaacaugcccaaugaucccaacagaaauguggacgagaacgccaaugcuaacagcgccgucaaaaauaacaauaacgaggaaccuuccgauaagcauaucaaagaauaccugaacaagauucaaaauucucucagcaccgagugguccccgugcucuguuacauguggcaacgggauccaggugcggauuaaacccggaagcgcuaauaagccuaaggacgaacuggauuaugccaacgacaucgagaaaaagauuugcaaaauggagaaguguuccucugugcccgucacgaauauggaaaacaucaccagcggcuuccuugggccucugcucgugcugcaggccggauuuuuccuucugacacgcauccucaccauuccccagucccuggauagcugguggacaucucugaauuuucucggcggcuccccgguuugccuggggcagaacagccagucuccuaccuccaaucacagccccacaucuuguccucccaucugcccuggauacagauggaugugucuucggcgcuucauuaucuuucuguucauucuccugcuuugccugaucuuucuccuggugcugcucgacuaucagggcaugcugcccgucuguccgcuuauuccuggguccaccacgaccaacacaggacccugcaaaaccuguacaacccccgcucaaggcaauagcauguucccuuccugcugcuguacgaagccgacagaugggaacugcaccuguauccccaucccuucuagcugggcguuugccaaguaccugugggagugggcuuccgugagauucagcuggcucucucugcuuguucccuuugugcagugguucgucggacuguccccuacaguguggcucagcgccauuuggaugaugugguauuggggccccucucuguacagcaucguguccccuuuuauuccccugcucccgaucuucuucugccugugggucuauauuugaggacuaguuauaagacugacuagcccgaugggccucccaacgggcccuccuccccuccuugcaccgagauuaaucaaaggcucuuuucagagccaccaaaaaaaaaaaaaaaaaaaaaaaaaaaaaaaaaaaaaaaaaaaaaaaaaaaaaaaaaaaaaaaaagaauu

SEQ ID NO: 7203 - RNA, 1457 nt, Artificial Sequence
  mRNA Design i-3 (hSL-A64-N5) comprising derived and/or modified sequence from Pf(3D7)__XP_001351122.1__Pf-CSP(199-387)_L(PVTN)_HBsAg (opt5)
aggagaaagcuuaccaugauggcccccgacccuaacgcuaauccgaacgccaaucccaacgcgaauccuaacgcuaaucccaacgccaauccuaacgccaaucccaacgcuaauccuaacgccaauccgaacgcuaaccccaaugccaacccuaaugcgaaccccaaugccaacccuaaugcuaaccccaaugccaacccgaaugcuaacccuaaugccaaccccaaugcgaacccuaacgccaaucccaacaagaauaaccagggcaaugggcaaggacacaacaugcccaaugauccuaacagaaauguggacgagaacgcuaaugccaacagcgcugucaaaaauaacaauaacgaggaaccguccgauaagcauaucaaagaauaccugaacaagauucaaaauucucucagcaccgaguggucccccugcucuguuacauguggcaacgggauccaggugcggauuaaaccuggaagcgccaauaagcccaaggacgaacuggauuaugccaacgacaucgagaaaaagauuugcaaaauggagaaguguuccucuguguucaaugucgugaacagcuccaucggccuugggccuguuacgaauauggaaaacaucaccagcggauuucugggcccccuccuggugcuucaggcuggcuucuuucugcucacacgcauucugaccaucccgcagucucuggauuccugguggacaagccucaauuuccuugggggaucuccugucugccugggccagaacucccagagccccaccucuaaucacuccccuacaagcugucccccuauuugccccggguacagauggaugugucugcggcgcuuuaucauuuuccucuuuauccugcuucugugccucauuuuccugcuggugcuccuggacuaucagggaaugcuuccgguuuguccucugauccccggcuccaccacgaccaacacagggcccugcaaaaccuguacaaccccugcgcaaggaaauucuauguuuccgagcugcugcuguacgaagcccacagauggcaacugcaccuguaucccuauucccuccagcugggccuucgcuaaguaccucugggagugggccucugugagauuuuccuggcugagccuucuggucccuuucgugcagugguuugugggccucucucccacagucuggcugagcgccaucuggaugaugugguauugggggccuucccuguacucuauuguuagccccuucaucccgcuccugccuauuuucuuuugccuuuggguguauaucugaggacuaguuauaagacugacuagcccgaugggccucccaacgggcccuccuccccuccuugcaccgagauuaaucaaaggcucuuuucagagccaccaaaaaaaaaaaaaaaaaaaaaaaaaaaaaaaaaaaaaaaaaaaaaaaaaaaaaaaaaaaaaaaaagaauu

SEQ ID NO: 7204 - RNA, 641 nt, Artificial Sequence
  mRNA Design i-3 (hSL-A64-N5) comprising derived and/or modified sequence from Pf(3D7)__XP_001351122.1__HsALB_Pf-CSP(19-152) (opt5)
aggagaaagcuuaccaugaagugggugaccuucaucagccugcucuuucuguucuccucugccuacagccuuuuucaggaguaucaaugcuacggcuccucuagcaacacaagaguccugaaugaacucaacuaugacaaugcugggacgaaccuguacaaugagcuugaaaugaacuauuacggaaaacaggagaauugguauucccugaagaaaaacucucggagccucggcgaaaaugaugacgggaacaaugaggauaacgagaagcugcgcaaacccaagcacaagaaacugaagcagccugccgacggaaauccggaucccaacgcgaauccuaacguugaccccaacgcuaauccuaacguggaucccaaugccaacccuaauguggacccgaacgccaaucccaacgcuaauccuaacgccaaucccaacgcuaauccuaacgccaaucccaacgcgaacccgugaggacuaguuauaagacugacuagcccgaugggccucccaacgggcccuccuccccuccuugcaccgagauuaaucaaaggcucuuuucagagccaccaaaaaaaaaaaaaaaaaaaaaaaaaaaaaaaaaaaaaaaaaaaaaaaaaaaaaaaaaaaaaaaaagaauu

SEQ ID NO: 7205 - RNA, 761 nt, Artificial Sequence
  mRNA Design i-3 (hSL-A64-N5) comprising derived and/or modified sequence from Pf(3D7)__XP_001351122.1__HsALB_Pf-CSP(19-192) (opt5)
aggagaaagcuuaccaugaagugggugaccuucaucagccugcucuuucuguucuccucugccuacagccuuuuucaggaguaucaaugcuacggcuccucuagcaacacaagaguccugaaugaacucaacuaugacaaugcugggacgaaccuguacaaugagcuugaaaugaacuauuacggaaaacaggagaauugguauucccugaagaaaaacucucggagccucggcgaaaaugaugacgggaacaaugaggauaacgagaagcugcgcaaacccaagcacaagaaacugaagcagccugccgacggaaauccggaucccaacgcgaauccuaacguugaccccaacgcuaauccuaacguggaucccaaugccaacccuaauguggacccgaacgccaaucccaacgcuaauccuaacgccaaucccaacgcuaauccuaacgccaaucccaacgcgaacccgaaugccaacccuaaugcuaaccccaaugccaacccuaaugcuaaccccaaugccaaccccaaugcgaacccuaaugccaacccgaaugcuaaccccaacgccaauccuaacgcuaaucccugaggacuaguuauaagacugacuagcccgaugggccucccaacgggcccuccuccccuccuugcaccgagauuaaucaaaggcucuuuucagagccaccaaaaaaaaaaaaaaaaaaaaaaaaaaaaaaaaaaaaaaaaaaaaaaaaaaaaaaaaaaaaaaaaagaauu

SEQ ID NO: 7206 - RNA, 1001 nt, Artificial Sequence
  mRNA Design i-3 (hSL-A64-N5) comprising derived and/or modified sequence from Pf(3D7)__XP_001351122.1__HsALB_Pf-CSP(19-272) (opt5)
aggagaaagcuuaccaugaagugggugaccuucaucagccugcucuuucuguucuccucugccuacagccuuuuucaggaguaucaaugcuacggcuccucuagcaacacaagaguccugaaugaacucaacuaugacaaugcugggacgaaccuguacaaugagcuugaaaugaacuauuacggaaaacaggagaauugguauucccugaagaaaaacucucggagccucggcgaaaaugaugacgggaacaaugaggauaacgagaagcugcgcaaacccaagcacaagaaacugaagcagccugccgacggaaauccggaucccaacgcgaauccuaacguugaccccaacgcuaauccuaacguggaucccaaugccaacccuaauguggacccgaacgccaaucccaacgcuaauccuaacgccaaucccaacgcuaauccuaacgccaaucccaacgcgaacccgaaugccaacccuaaugcuaaccccaaugccaacccuaaugcuaaccccaaugccaaccccaaugcgaacccuaaugccaacccgaaugcuaaccccaacgccaauccuaacgcuaaucccaacgccaauccuaacgucgaucccaaugccaacccgaaugcuaacccuaaugcgaaccccaaugccaacccuaaugcuaaccccaacgccaauccuaacgccaaucccaacgcuaauccgaacgccaauccuaacgcgaaucccaacgcuaaucccaacgccaauccuaacgccaauccgaacgcuaaucccaacgccaacccuaaugcuaaccccaaugccaacccuaaugcgaaccccugaggacuaguuauaagacugacuagcccgaugggccucccaacgggcccuccuccccuccuugcaccgagauuaaucaaaggcucuuuucagagccaccaaaaaaaaaaaaaaaaaaaaaaaaaaaaaaaaaaaaaaaaaaaaaaaaaaaaaaaaaaaaaaaaagaauu

SEQ ID NO: 7207 - RNA, 1163 nt, Artificial Sequence
  mRNA Design i-3 (hSL-A64-N5) comprising derived and/or modified sequence from Pf(3D7)__XP_001351122.1__HsALB_Pf-CSP(19-272)_L(AAY)_Pf-CSP(310-3 27)_L(AAY)_Pf-CSP(346-375) (opt5)
aggagaaagcuuaccaugaagugggugaccuucaucagccugcucuuucuguucuccucugccuacagccuuuuucaggaguaucaaugcuacggcuccucuagcaacacaagaguccugaaugaacucaacuaugacaaugcugggacgaaccuguacaaugagcuugaaaugaacuauuacggaaaacaggagaauugguauucccugaagaaaaacucucggagccucggcgaaaaugaugacgggaacaaugaggauaacgagaagcugcgcaaacccaagcacaagaaacugaagcagccugccgacggaaauccggaucccaacgcgaauccuaacguugaccccaacgcuaauccuaacguggaucccaaugccaacccuaauguggacccgaacgccaaucccaacgcuaauccuaacgccaaucccaacgcuaauccuaacgccaaucccaacgcgaacccgaaugccaacccuaaugcuaaccccaaugccaacccuaaugcuaaccccaaugccaaccccaaugcgaacccuaaugccaacccgaaugcuaaccccaacgccaauccuaacgcuaaucccaacgccaauccuaacgucgaucccaaugccaacccgaaugcuaacccuaaugcgaaccccaaugccaacccuaaugcuaaccccaacgccaauccuaacgccaaucccaacgcuaauccgaacgccaauccuaacgcgaaucccaacgcuaaucccaacgccaauccuaacgccaauccgaacgcuaaucccaacgccaacccuaaugcuaaccccaaugccaacccuaaugcgaaccccgccgcuuacgaaccuuccgacaaacauauuaaggaguaccucaauaaaauccagaacagccuggccgcuuauauuaagcccggcucugccaauaagccgaaagaugaacuugacuacgcgaacgauaucgagaagaaaauuuguaagauggagaaaugcuccugaggacuaguuauaagacugacuagcccgaugggccucccaacgggcccuccuccccuccuugcaccgagauuaaucaaaggcucuuuucagagccaccaaaaaaaaaaaaaaaaaaaaaaaaaaaaaaaaaaaaaaaaaaaaaaaaaaaaaaaaaaaaaaaaagaauu

SEQ ID NO: 7208 - RNA, 1124 nt, Artificial Sequence
  mRNA Design i-3 (hSL-A64-N5) comprising derived and/or modified sequence from Pf(3D7)__XP_001351122.1__HsALB_Pf-CSP(19-272)_L(AAY)_Pf-CSP(346-3 65)_L(AAY)_P2 (opt5)
aggagaaagcuuaccaugaagugggugaccuucaucagccugcucuuucuguucuccucugccuacagccuuuuucaggaguaucaaugcuacggcuccucuagcaacacaagaguccugaaugaacucaacuaugacaaugcugggacgaaccuguacaaugagcuugaaaugaacuauuacggaaaacaggagaauugguauucccugaagaaaaacucucggagccucggcgaaaaugaugacgggaacaaugaggauaacgagaagcugcgcaaacccaagcacaagaaacugaagcagccugccgacggaaauccggaucccaacgcgaauccuaacguugaccccaacgcuaauccuaacguggaucccaaugccaacccuaauguggacccgaacgccaaucccaacgcuaauccuaacgccaaucccaacgcuaauccuaacgccaaucccaacgcgaacccgaaugccaacccuaaugcuaaccccaaugccaacccuaaugcuaaccccaaugccaaccccaaugcgaacccuaaugccaacccgaaugcuaaccccaacgccaauccuaacgcuaaucccaacgccaauccuaacgucgaucccaaugccaacccgaaugcuaacccuaaugcgaaccccaaugccaacccuaaugcuaaccccaacgccaauccuaacgccaaucccaacgcuaauccgaacgccaauccuaacgcgaaucccaacgcuaaucccaacgccaauccuaacgccaauccgaacgcuaaucccaacgccaacccuaaugcuaaccccaaugccaacccuaaugcgaaccccgccgcuuacauuaaaccuggcuccgccaauaagcccaaagacgaacucgauuacgcuaacgacaucgaggccgcguaucaguacauuaaggccaauagcaaguucaucgggauuaccgaacugugaggacuaguuauaagacugacuagcccgaugggccucccaacgggcccuccuccccuccuugcaccgagauuaaucaaaggcucuuuucagagccaccaaaaaaaaaaaaaaaaaaaaaaaaaaaaaaaaaaaaaaaaaaaaaaaaaaaaaaaaaaaaaaaaagaauu

SEQ ID NO: 7209 - RNA, 1118 nt, Artificial Sequence
  mRNA Design i-3 (hSL-A64-N5) comprising derived and/or modified sequence from Pf(3D7)__XP_001351122.1__HsALB_Pf-CSP(19-272)_L(AAY)_Pf-CSP(346-3 65)_L(AAY)_PADRE (opt5)
aggagaaagcuuaccaugaagugggugaccuucaucagccugcucuuucuguucuccucugccuacagccuuuuucaggaguaucaaugcuacggcuccucuagcaacacaagaguccugaaugaacucaacuaugacaaugcugggacgaaccuguacaaugagcuugaaaugaacuauuacggaaaacaggagaauugguauucccugaagaaaaacucucggagccucggcgaaaaugaugacgggaacaaugaggauaacgagaagcugcgcaaacccaagcacaagaaacugaagcagccugccgacggaaauccggaucccaacgcgaauccuaacguugaccccaacgcuaauccuaacguggaucccaaugccaacccuaauguggacccgaacgccaaucccaacgcuaauccuaacgccaaucccaacgcuaauccuaacgccaaucccaacgcgaacccgaaugccaacccuaaugcuaaccccaaugccaacccuaaugcuaaccccaaugccaaccccaaugcgaacccuaaugccaacccgaaugcuaaccccaacgccaauccuaacgcuaaucccaacgccaauccuaacgucgaucccaaugccaacccgaaugcuaacccuaaugcgaaccccaaugccaacccuaaugcuaaccccaacgccaauccuaacgccaaucccaacgcuaauccgaacgccaauccuaacgcgaaucccaacgcuaaucccaacgccaauccuaacgccaauccgaacgcuaaucccaacgccaacccuaaugcuaaccccaaugccaacccuaaugcgaaccccgccgcuuacauuaaaccuggcuccgccaauaagcccaaagacgaacucgauuacgcuaacgacaucgaggccgcguaugccaaguucguggcugccuggacccugaaggcugccgccugaggacuaguuauaagacugacuagcccgaugggccucccaacgggcccuccuccccuccuugcaccgagauuaaucaaaggcucuuuucagagccaccaaaaaaaaaaaaaaaaaaaaaaaaaaaaaaaaaaaaaaaaaaaaaaaaaaaaaaaaaaaaaaaaagaauu

SEQ ID NO: 7210 - RNA, 1175 nt, Artificial Sequence
  mRNA Design i-3 (hSL-A64-N5) comprising derived and/or modified sequence from Pf(3D7)__XP_001351122.1__HsALB_Pf-CSP(19-272)_L(G4S)_Pf-CSP(310-3 27)_L(G4S)_Pf-CSP(346-375) (opt5)
aggagaaagcuuaccaugaagugggugaccuucaucagccugcucuuucuguucuccucugccuacagccuuuuucaggaguaucaaugcuacggcuccucuagcaacacaagaguccugaaugaacucaacuaugacaaugcugggacgaaccuguacaaugagcuugaaaugaacuauuacggaaaacaggagaauugguauucccugaagaaaaacucucggagccucggcgaaaaugaugacgggaacaaugaggauaacgagaagcugcgcaaacccaagcacaagaaacugaagcagccugccgacggaaauccggaucccaacgcgaauccuaacguugaccccaacgcuaauccuaacguggaucccaaugccaacccuaauguggacccgaacgccaaucccaacgcuaauccuaacgccaaucccaacgcuaauccuaacgccaaucccaacgcgaacccgaaugccaacccuaaugcuaaccccaaugccaacccuaaugcuaaccccaaugccaaccccaaugcgaacccuaaugccaacccgaaugcuaaccccaacgccaauccuaacgcuaaucccaacgccaauccuaacgucgaucccaaugccaacccgaaugcuaacccuaaugcgaaccccaaugccaacccuaaugcuaaccccaacgccaauccuaacgccaaucccaacgcuaauccgaacgccaauccuaacgcgaaucccaacgcuaaucccaacgccaauccuaacgccaauccgaacgcuaaucccaacgccaacccuaaugcuaaccccaaugccaacccuaaugcgaaccccggcgggggaggcuccgaaccuagcgacaaacauauuaaggaguaccucaauaaaauccagaacucucugggcgggggaggcuccauuaagcccgggagcgccaauaagccgaaagaugaacuugacuacgcuaacgauaucgagaagaaaauuuguaagauggagaaaugcucuugaggacuaguuauaagacugacuagcccgaugggccucccaacgggcccuccuccccuccuugcaccgagauuaaucaaaggcucuuuucagagccaccaaaaaaaaaaaaaaaaaaaaaaaaaaaaaaaaaaaaaaaaaaaaaaaaaaaaaaaaaaaaaaaaagaauu

SEQ ID NO: 7211 - RNA, 1160 nt, Artificial Sequence
  mRNA Design i-3 (hSL-A64-N5) comprising derived and/or modified sequence from Pf(3D7)__XP_001351122.1__HsALB_Pf-CSP(19-272)_L(G4S)_Pf-CSP(310-3 27)_Pf-CSP(346-375) (opt5)
aggagaaagcuuaccaugaagugggugaccuucaucagccugcucuuucuguucuccucugccuacagccuuuuucaggaguaucaaugcuacggcuccucuagcaacacaagaguccugaaugaacucaacuaugacaaugcugggacgaaccuguacaaugagcuugaaaugaacuauuacggaaaacaggagaauugguauucccugaagaaaaacucucggagccucggcgaaaaugaugacgggaacaaugaggauaacgagaagcugcgcaaacccaagcacaagaaacugaagcagccugccgacggaaauccggaucccaacgcgaauccuaacguugaccccaacgcuaauccuaacguggaucccaaugccaacccuaauguggacccgaacgccaaucccaacgcuaauccuaacgccaaucccaacgcuaauccuaacgccaaucccaacgcgaacccgaaugccaacccuaaugcuaaccccaaugccaacccuaaugcuaaccccaaugccaaccccaaugcgaacccuaaugccaacccgaaugcuaaccccaacgccaauccuaacgcuaaucccaacgccaauccuaacgucgaucccaaugccaacccgaaugcuaacccuaaugcgaaccccaaugccaacccuaaugcuaaccccaacgccaauccuaacgccaaucccaacgcuaauccgaacgccaauccuaacgcgaaucccaacgcuaaucccaacgccaauccuaacgccaauccgaacgcuaaucccaacgccaacccuaaugcuaaccccaaugccaacccuaaugcgaaccccggcgggggaggcuccgaaccuagcgacaaacauauuaaggaguaccucaauaaaauccagaacucucugauuaagcccggcuccgccaauaagccgaaagaugaacuugacuacgcuaacgauaucgagaagaaaauuuguaagauggagaaaugcagcugaggacuaguuauaagacugacuagcccgaugggccucccaacgggcccuccuccccuccuugcaccgagauuaaucaaaggcucuuuucagagccaccaaaaaaaaaaaaaaaaaaaaaaaaaaaaaaaaaaaaaaaaaaaaaaaaaaaaaaaaaaaaaaaaagaauu

SEQ ID NO: 7212 - RNA, 1160 nt, Artificial Sequence
  mRNA Design i-3 (hSL-A64-N5) comprising derived and/or modified sequence from Pf(3D7)__XP_001351122.1__HsALB_Pf-CSP(19-325) (opt5)
aggagaaagcuuaccaugaagugggugaccuucaucagccugcucuuucuguucuccucugccuacagccuuuuucaggaguaucaaugcuacggcuccucuagcaacacaagaguccugaaugaacucaacuaugacaaugcugggacgaaccuguacaaugagcuugaaaugaacuauuacggaaaacaggagaauugguauucccugaagaaaaacucucggagccucggcgaaaaugaugacgggaacaaugaggauaacgagaagcugcgcaaacccaagcacaagaaacugaagcagccugccgacggaaauccggaucccaacgcgaauccuaacguugaccccaacgcuaauccuaacguggaucccaaugccaacccuaauguggacccgaacgccaaucccaacgcuaauccuaacgccaaucccaacgcuaauccuaacgccaaucccaacgcgaacccgaaugccaacccuaaugcuaaccccaaugccaacccuaaugcuaaccccaaugccaaccccaaugcgaacccuaaugccaacccgaaugcuaaccccaacgccaauccuaacgcuaaucccaacgccaauccuaacgucgaucccaaugccaacccgaaugcuaacccuaaugcgaaccccaaugccaacccuaaugcuaaccccaacgccaauccuaacgccaaucccaacgcuaauccgaacgccaauccuaacgcgaaucccaacgcuaaucccaacgccaauccuaacgccaauccgaacgcuaaucccaacgccaacccuaaugcuaaccccaaugccaacccuaaugcgaaccccaauaaaaacaaucagggcaacgggcaaggacauaauaugccuaacgaccccaauagaaacguggaugaaaaugccaacgcuaacuccgccguuaagaauaacaauaacgaggaaccgagcgacaaacacauuaaggaguaccucaauaagauccagaacugaggacuaguuauaagacugacuagcccgaugggccucccaacgggcccuccuccccuccuugcaccgagauuaaucaaaggcucuuuucagagccaccaaaaaaaaaaaaaaaaaaaaaaaaaaaaaaaaaaaaaaaaaaaaaaaaaaaaaaaaaaaaaaaaagaauu

SEQ ID NO: 7213 - RNA, 1337 nt, Artificial Sequence
  mRNA Design i-3 (hSL-A64-N5) comprising derived and/or modified sequence from Pf(3D7)__XP_001351122.1__HsALB_Pf-CSP(19-384) (opt5)
aggagaaagcuuaccaugaagugggugaccuucaucagccugcucuuucuguucuccucugccuacagccuuuuucaggaguaucaaugcuacggcuccucuagcaacacaagagugcugaaugaacucaacuaugacaaugcugggacgaaccuguacaaugagcuugaaaugaacuauuacggaaaacaggagaauugguauucccugaagaaaaacucucggagccucggcgaaaaugaugacgggaacaaugaggauaacgagaagcugcgcaaacccaagcacaagaaacugaagcagccugccgacggaaauccggaucccaacgcgaauccuaacguugaccccaacgcuaauccuaacguggaucccaaugccaacccuaauguggacccgaacgccaaucccaacgcuaauccuaacgccaaucccaacgcuaauccuaacgccaaucccaacgcgaacccgaaugccaacccuaaugcuaaccccaaugccaacccuaaugcuaaccccaaugccaaccccaaugcgaacccuaaugccaacccgaaugcuaaccccaacgccaauccuaacgcuaaucccaacgccaauccuaacgucgaucccaaugccaacccgaaugcuaacccuaaugcgaaccccaaugccaacccuaaugcuaaccccaacgccaauccuaacgccaaucccaacgcuaauccgaacgccaauccuaacgcgaaucccaacgcuaaucccaacgccaauccuaacgccaauccgaacgcuaaucccaacgccaacccuaaugcuaaccccaaugccaacccuaaugcgaaccccaauaaaaacaaucagggcaacgggcaaggacauaauaugccuaacgaccccaauagaaacguggaugaaaaugccaacgcuaacuccgccguuaagaauaacaauaacgaggaaccgagcgacaaacacauuaaggaguaccucaauaagauccagaacucucuguccaccgaguggagcccuuguucugugacaugcggcaauggcauucagguccggaucaaacccggguccgcuaacaagccuaaagaugaacuugacuacgccaaugacauugagaagaaaaucuguaagauggaaaaaugcagcucuguguucaacguugucaauuccagcugaggacuaguuauaagacugacuagcccgaugggccucccaacgggcccuccuccccuccuugcaccgagauuaaucaaaggcucuuuucagagccaccaaaaaaaaaaaaaaaaaaaaaaaaaaaaaaaaaaaaaaaaaaaaaaaaaaaaaaaaaaaaaaaaagaauu

SEQ ID NO: 7214 - RNA, 1475 nt, Artificial Sequence
  mRNA Design i-3 (hSL-A64-N5) comprising derived and/or modified sequence from Pf(3D7)__XP_001351122.1__HsALB_Pf-CSP(19-384)_TM domain HA (opt5)
aggagaaagcuuaccaugaagugggugaccuucaucagccugcucuuucuguucuccucugccuacagccuuuuucaggaguaucaaugcuacggcuccucuagcaacacaagaguccugaaugaacucaacuaugacaaugcugggacgaaccuguacaaugagcuugaaaugaacuauuacggaaaacaggagaauugguauucccugaagaaaaacucucggagccucggcgaaaaugaugacgggaacaaugaggauaacgagaagcugcgcaaacccaagcacaagaaacugaagcagccugccgacggaaauccggaucccaacgcgaauccuaacguugaccccaacgcuaauccuaacguggaucccaaugccaacccuaauguggacccgaacgccaaucccaacgcuaauccuaacgccaaucccaacgcuaauccuaacgccaaucccaacgcgaacccgaaugccaacccuaaugcuaaccccaaugccaacccuaaugcuaaccccaaugccaaccccaaugcgaacccuaaugccaacccgaaugcuaaccccaacgccaauccuaacgcuaaucccaacgccaauccuaacgucgaucccaaugccaacccgaaugcuaacccuaaugcgaaccccaaugccaacccuaaugcuaaccccaacgccaauccuaacgccaaucccaacgcuaauccgaacgccaauccuaacgcgaaucccaacgcuaaucccaacgccaauccuaacgccaauccgaacgcuaaucccaacgccaacccuaaugcuaaccccaaugccaacccuaaugcgaaccccaauaaaaacaaucagggcaacgggcaaggacauaauaugccuaacgaccccaauagaaacguggaugaaaaugccaacgcuaacuccgccguuaagaauaacaauaacgaggaaccgagcgacaaacacauuaaggaguaccucaauaagauccagaacucucuguccaccgaguggagcccuuguucugugacaugcggcaauggcauucagguccggaucaaacccggguccgcuaacaagccuaaagaugaacuugacuacgccaaugacauugagaagaaaaucuguaagauggaaaaaugcagcucuguguucaacguugucaauuccagcaagcuggaguccacccgcaucuaucagauucucgcgaucuacucuacaguggccagcucccuggugcuuguggucagccugggagcuauuucuuuuuggauguguuccaacggcagccuccaaugcagaaucuguauuugaggacuaguuauaagacugacuagcccgaugggccucccaacgggcccuccuccccuccuugcaccgagauuaaucaaaggcucuuuucagagccaccaaaaaaaaaaaaaaaaaaaaaaaaaaaaaaaaaaaaaaaaaaaaaaaaaaaaaaaaaaaaaaaaagaauu

SEQ ID NO: 7215 - RNA, 1187 nt, Artificial Sequence
  mRNA Design i-3 (hSL-A64-N5) comprising derived and/or modified sequence from Pf(3D7)__XP_001351122.1__HsALB_Pf-CSP(82-397) (opt5)
aggagaaagcuuaccaugaagugggugaccuucaucagccugcucuuucuguucuccucugccuacagcgacaacgagaaacuuagaaagcccaaacacaagaaacugaagcagccugcugauggcaauccggaccccaacgccaauccuaacgucgaucccaaugcgaacccuaauguugaccccaacgcuaauccuaacguggauccgaaugccaaccccaaugccaacccuaaugcuaaccccaacgccaauccuaacgcuaaucccaacgccaauccgaacgcgaauccuaacgccaaucccaacgcuaauccuaacgccaaucccaacgcuaaucccaacgccaacccuaaugcgaacccgaaugccaaccccaaugcuaacccuaaugccaaccccaaugcuaacccuaauguggaccccaacgccaauccgaacgccaauccuaacgcuaaccccaaugcgaacccuaaugccaaccccaaugcuaacccuaaugccaaccccaaugccaacccgaaugcuaacccuaaugccaaccccaaugcgaaccccaacgcuaauccuaacgccaauccgaacgccaaucccaacgcuaauccuaacgccaaucccaacgcuaauccuaacgccaaucccaacaagaauaaccaagggaauggacagggccauaacaugccuaacgaucccaaucggaacgucgacgaaaaugcgaacgccaauuccgcugugaaaaacaauaacaaugaggaaccgucugauaagcacauuaaagaguaucucaacaagauccagaauagccuguccacagaauggucuccuugcagcguuacgugugggaacggcauucaggugcgcaucaaacccggauccgccaauaagccuaaggacgagcuugauuacgcuaacgacauugagaaaaagaucugcaaaauggaaaaguguagcucugucuuuaaugugguuaacuccagcaucgggcugauuauggugcucucuuuccuguuucugaacugaggacuaguuauaagacugacuagcccgaugggccucccaacgggcccuccuccccuccuugcaccgagauuaaucaaaggcucuuuucagagccaccaaaaaaaaaaaaaaaaaaaaaaaaaaaaaaaaaaaaaaaaaaaaaaaaaaaaaaaaaaaaaaaaagaauu

SEQ ID NO: 7216 - RNA, 539 nt, Artificial Sequence
  mRNA Design i-3 (hSL-A64-N5) comprising derived and/or modified sequence from Pf(3D7)__XP_001351122.1__HsALB_Pf-CSP(93-192) (opt5)
aggagaaagcuuaccaugaagugggugaccuucaucagccugcucuuucuguucuccucugccuacagcaaacuuaagcagcccgcugacggcaacccugauccgaaugccaaccccaaugucgacccuaacgcgaaucccaacguugauccuaaugcuaaccccaauguggacccuaacgccaauccgaacgccaaucccaacgcuaauccuaacgccaaccccaaugcuaacccuaaugccaaccccaaugcgaacccgaaugccaacccuaaugcuaaccccaaugccaacccuaaugcuaaccccaaugccaaccccaacgcgaauccuaacgccaauccgaacgcuaaucccaacgccaauccuugaggacuaguuauaagacugacuagcccgaugggccucccaacgggcccuccuccccuccuugcaccgagauuaaucaaaggcucuuuucagagccaccaaaaaaaaaaaaaaaaaaaaaaaaaaaaaaaaaaaaaaaaaaaaaaaaaaaaaaaaaaaaaaaaagaauu

SEQ ID NO: 7217 - RNA, 779 nt, Artificial Sequence
  mRNA Design i-3 (hSL-A64-N5) comprising derived and/or modified sequence from Pf(3D7)__XP_001351122.1__HsALB_Pf-CSP(93-272) (opt5)
aggagaaagcuuaccaugaagugggugaccuucaucagccugcucuuucuguucuccucugccuacagcaaacuuaagcagcccgcugacggcaacccugauccgaaugccaaccccaaugucgacccuaacgcgaaucccaacguugauccuaaugcuaaccccaauguggacccuaacgccaauccgaacgccaaucccaacgcuaauccuaacgccaaccccaaugcuaacccuaaugccaaccccaaugcgaacccgaaugccaacccuaaugcuaaccccaaugccaacccuaaugcuaaccccaaugccaaccccaacgcgaauccuaacgccaauccgaacgcuaaucccaacgccaauccuaacgcuaaucccaacguggauccuaaugccaaccccaaugccaacccgaaugcuaacccuaacgcgaaucccaacgccaauccuaacgcuaaucccaacgccaauccuaacgccaaucccaacgcuaauccgaacgccaauccuaacgcgaaucccaacgcuaaccccaaugccaacccuaaugccaacccgaaugcuaaccccaaugccaacccuaaugcuaaccccaaugccaacccuugaggacuaguuauaagacugacuagcccgaugggccucccaacgggcccuccuccccuccuugcaccgagauuaaucaaaggcucuuuucagagccaccaaaaaaaaaaaaaaaaaaaaaaaaaaaaaaaaaaaaaaaaaaaaaaaaaaaaaaaaaaaaaaaaagaauu

SEQ ID NO: 7218 - RNA, 1154 nt, Artificial Sequence
  mRNA Design i-3 (hSL-A64-N5) comprising derived and/or modified sequence from Pf(3D7)__XP_001351122.1__HsALB_Pf-CSP(93-397) (opt5)
aggagaaagcuuaccaugaagugggugaccuucaucagccugcucuuucuguucuccucugccuacagcaaacuuaagcagcccgcugacggcaacccugauccgaaugccaaccccaaugucgacccuaacgcgaaucccaacguugauccuaaugcuaaccccaauguggacccuaacgccaauccgaacgccaaucccaacgcuaauccuaacgccaaccccaaugcuaacccuaaugccaaccccaaugcgaacccgaaugccaacccuaaugcuaaccccaaugccaacccuaaugcuaaccccaaugccaaccccaacgcgaauccuaacgccaauccgaacgcuaaucccaacgccaauccuaacgcuaaucccaacguggauccuaaugccaaccccaaugccaacccgaaugcuaacccuaacgcgaaucccaacgccaauccuaacgcuaaucccaacgccaauccuaacgccaaucccaacgcuaauccgaacgccaauccuaacgcgaaucccaacgcuaaccccaaugccaacccuaaugccaacccgaaugcuaaccccaaugccaacccuaaugcuaaccccaaugccaacccuaauaaaaacaaucaagggaacggacagggccacaauaugcccaacgacccuaacagaaaugucgaugagaacgcgaaugccaacuccgcugugaagaauaacaauaacgaggaacccucugacaaacauauuaaggaauaucugaauaagauccagaacagccucuccacagaguggucuccgugcagcguuacgugugggaauggcauucaggugcggaucaaaccuggauccgccaacaagcccaaagaugaacuggacuacgcuaaugauauugagaagaaaaucugcaagauggagaaguguagcucugucuuuaacgugguuaauuccagcaucgggcuuauuauggugcugucuuuccucuuucugaacugaggacuaguuauaagacugacuagcccgaugggccucccaacgggcccuccuccccuccuugcaccgagauuaaucaaaggcucuuuucagagccaccaaaaaaaaaaaaaaaaaaaaaaaaaaaaaaaaaaaaaaaaaaaaaaaaaaaaaaaaaaaaaaaaagaauu

SEQ ID NO: 7219 - RNA, 524 nt, Artificial Sequence
  mRNA Design i-3 (hSL-A64-N5) comprising derived and/or modified sequence from Pf(3D7)__XP_001351122.1__HsALB_Pf-CSP(98-192) (opt5)
aggagaaagcuuaccaugaagugggugaccuucaucagccugcucuuucuguucuccucugccuacagcgcugacggcaaccccgauccuaaugccaacccgaaugucgaccccaacgcgaauccuaacguugaucccaaugcuaacccuaauguggaccccaacgccaauccuaacgccaauccgaacgcuaaucccaacgccaacccuaaugcuaaccccaaugccaacccuaaugcgaaccccaaugccaacccgaaugcuaacccuaaugccaaccccaaugcuaacccuaaugccaaccccaacgcgaaucccaacgccaauccuaacgcuaauccgaacgccaaucccugaggacuaguuauaagacugacuagcccgaugggccucccaacgggcccuccuccccuccuugcaccgagauuaaucaaaggcucuuuucagagccaccaaaaaaaaaaaaaaaaaaaaaaaaaaaaaaaaaaaaaaaaaaaaaaaaaaaaaaaaaaaaaaaaagaauu

SEQ ID NO: 7220 - RNA, 764 nt, Artificial Sequence
  mRNA Design i-3 (hSL-A64-N5) comprising derived and/or modified sequence from Pf(3D7)__XP_001351122.1__HsALB_Pf-CSP(98-272) (opt5)
aggagaaagcuuaccaugaagugggugaccuucaucagccugcucuuucuguucuccucugccuacagcgcugacggcaaccccgauccuaaugccaacccgaaugucgaccccaacgcgaauccuaacguugaucccaaugcuaacccuaauguggaccccaacgccaauccuaacgccaauccgaacgcuaaucccaacgccaacccuaaugcuaaccccaaugccaacccuaaugcgaaccccaaugccaacccgaaugcuaacccuaaugccaaccccaaugcuaacccuaaugccaaccccaacgcgaaucccaacgccaauccuaacgcuaauccgaacgccaaucccaacgcuaauccuaacguggaucccaaugccaacccuaaugccaaccccaaugcuaacccgaacgcgaauccuaacgccaaucccaacgcuaauccuaacgccaaucccaacgccaauccuaacgcuaaucccaacgccaauccgaacgcgaauccuaacgcuaaccccaaugccaaccccaaugccaacccuaaugcuaacccgaaugccaaccccaaugcuaacccuaaugccaaccccugaggacuaguuauaagacugacuagcccgaugggccucccaacgggcccuccuccccuccuugcaccgagauuaaucaaaggcucuuuucagagccaccaaaaaaaaaaaaaaaaaaaaaaaaaaaaaaaaaaaaaaaaaaaaaaaaaaaaaaaaaaaaaaaaagaauu

SEQ ID NO: 7221 - RNA, 1070 nt, Artificial Sequence
  mRNA Design i-3 (hSL-A64-N5) comprising derived and/or modified sequence from Pf(3D7)__XP_001351122.1__HsALB_Pf-CSP(98-374) (opt5)
aggagaaagcuuaccaugaagugggugaccuucaucagccugcucuuucuguucuccucugccuacagcgcugacggcaaccccgauccuaaugccaacccgaaugucgaccccaacgcgaauccuaacguugaucccaaugcuaacccuaauguggaccccaacgccaauccuaacgccaauccgaacgcuaaucccaacgccaacccuaaugcuaaccccaaugccaacccuaaugcgaaccccaaugccaacccgaaugcuaacccuaaugccaaccccaaugcuaacccuaaugccaaccccaacgcgaaucccaacgccaauccuaacgcuaauccgaacgccaaucccaacgcuaauccuaacguggaucccaaugccaacccuaaugccaaccccaaugcuaacccgaacgcgaauccuaacgccaaucccaacgcuaauccuaacgccaaucccaacgccaauccuaacgcuaaucccaacgccaauccgaacgcgaauccuaacgcuaaccccaaugccaaccccaaugccaacccuaaugcuaacccgaaugccaaccccaaugcuaacccuaaugccaaccccaauaaaaacaaucaggggaacggacaaggccacaauaugccuaacgaccccaacagaaaugucgaugagaacgcgaaugccaacuccgcugugaagaauaacaauaacgaggaaccuucugacaaacauauuaaggaauaucuuaauaaaauccagaacagccuguccacagaguggucucccugcagcguuacgugugggaauggcauucaggugcggaucaagccgggauccgccaacaagccuaaagaugaacucgacuacgcuaaugauauugagaagaaaaucugcaagauggagaaauguugaggacuaguuauaagacugacuagcccgaugggccucccaacgggcccuccuccccuccuugcaccgagauuaaucaaaggcucuuuucagagccaccaaaaaaaaaaaaaaaaaaaaaaaaaaaaaaaaaaaaaaaaaaaaaaaaaaaaaaaaaaaaaaaaagaauu

SEQ ID NO: 7222 - RNA, 1139 nt, Artificial Sequence
  mRNA Design i-3 (hSL-A64-N5) comprising derived and/or modified sequence from Pf(3D7)__XP_001351122.1__HsALB_Pf-CSP(98-397) (opt5)
aggagaaagcuuaccaugaagugggugaccuucaucagccugcucuuucuguucuccucugccuacagcgcugacggcaaccccgauccuaaugccaacccgaaugucgaccccaacgcgaauccuaacguugaucccaaugcuaacccuaauguggaccccaacgccaauccuaacgccaauccgaacgcuaaucccaacgccaacccuaaugcuaaccccaaugccaacccuaaugcgaaccccaaugccaacccgaaugcuaacccuaaugccaaccccaaugcuaacccuaaugccaaccccaacgcgaaucccaacgccaauccuaacgcuaauccgaacgccaaucccaacgcuaauccuaacguggaucccaaugccaacccuaaugccaaccccaaugcuaacccgaacgcgaauccuaacgccaaucccaacgcuaauccuaacgccaaucccaacgccaauccuaacgcuaaucccaacgccaauccgaacgcgaauccuaacgcuaaccccaaugccaaccccaaugccaacccuaaugcuaacccgaaugccaaccccaaugcuaacccuaaugccaaccccaauaaaaacaaucaggggaacggacaaggccacaauaugccuaacgaccccaacagaaaugucgaugagaacgcgaaugccaacuccgcugugaagaauaacaauaacgaggaaccuucugacaaacauauuaaggaauaucuuaauaaaauccagaacagccuguccacagaguggucucccugcagcguuacgugugggaauggcauucaggugcggaucaagccgggauccgccaacaagccuaaagaugaacucgacuacgcuaaugauauugagaagaaaaucugcaagauggagaaauguagcucugucuuuaacgugguuaauuccagcaucgggcugauuauggugcuuucuuuccuguuucucaacugaggacuaguuauaagacugacuagcccgaugggccucccaacgggcccuccuccccuccuugcaccgagauuaaucaaaggcucuuuucagagccaccaaaaaaaaaaaaaaaaaaaaaaaaaaaaaaaaaaaaaaaaaaaaaaaaaaaaaaaaaaaaaaaaagaauu

SEQ ID NO: 7223 - RNA, 1466 nt, Artificial Sequence
  mRNA Design i-3 (hSL-A64-N5) comprising derived and/or modified sequence from Pf(3D7)__XP_001351122.1__HsALB_Pf-CSP(199-377)_L(PVTN)_HBsAg (opt5)
aggagaaagcuuaccaugaagugggugaccuucaucagccugcucuuucuguucuccucugccuacagcgaccccaacgcuaauccuaacgccaauccgaacgcgaaucccaacgcuaauccuaacgccaaucccaacgccaauccuaacgcuaaucccaacgccaauccuaacgcuaacccgaaugccaaccccaaugcgaacccuaaugccaaccccaaugcuaacccuaaugccaaccccaaugcuaacccgaaugccaacccuaaugcgaaccccaacgccaauccuaacaaaaauaaccagggcaaugggcaaggacacaacaugcccaaugaucccaacagaaaugucgacgagaacgcuaaugccaacuccgcuguuaagaauaacaauaacgaggaaccuucugauaaacauauuaaggaauaucuuaacaaaauccagaauagccuguccacagaguggucuccgugcagcgugacguguggcaacgggauucaggugcggaucaagcccggauccgccaauaagccuaaagacgaacucgauuacgccaacgacauugagaagaaaaucugcaagauggagaaauguagcucuguccccgugaccaauauggaaaacaucacauccggcuuucuggggccucuucugguucuccaggcuggauucuuucugcugacccgcauucucacaaucccccaaagccuggauucuugguggaccucccuuaauuuccugggcggcagcccggugugccucgggcagaacucucaguccccuacaagcaaucacucccccaccucuuguccucccauuugcccuggauauagauggaugugucugcggcgcuuuaucauuuuccuuuuuauccugcuccugugccugauuuuccuccugguccuucuggacuaccagggcaugcuccccguguguccgcugaucccugggagcacgaccacaaacaccggacccugcaagacauguaccacgcccgcgcaaggcaauuccauguuuccuagcugcugcuguacaaagccgaccgaugggaacugcacauguauccccauuccuucuuccugggccuucgcuaaauaucuuugggagugggccagcguuagauuuucuuggcugagccuccuggugcccuucguccagugguucgugggacuguccccuaccguguggcucucugccaucuggaugaugugguacuggggccccagccuguauuccauugucagcccuuuuaucccccuucugccgauuuucuuuugccucuggguuuacaucugaggacuaguuauaagacugacuagcccgaugggccucccaacgggcccuccuccccuccuugcaccgagauuaaucaaaggcucuuuucagagccaccaaaaaaaaaaaaaaaaaaaaaaaaaaaaaaaaaaaaaaaaaaaaaaaaaaaaaaaaaaaaaaaaagaauu

SEQ ID NO: 7224 - RNA, 1376 nt, Artificial Sequence
  mRNA Design i-3 (hSL-A64-N5) comprising derived and/or modified sequence from Pf(3D7)__XP_001351122.1__Pf-CSP (opt6)
aggagaaagcuuaccaugaugagaaaacuugcaauacuaagcguaucuucauuccuauucguagaagcacuauuccaagaauaucaaugcuauggaucaagcuccaacacaagaguacuuaacgaacuaaauuacgacaaugcaggaacaaaccuauacaaugaacuugaaaugaauuacuacggcaaacaagaaaacugguacucccuaaaaaaaaacucaaggucauuaggagaaaacgacgacggaaacaacgaagacaacgaaaaacuacgaaaacccaaacacaaaaaauuaaaacaaccagcagacggaaaccccgacccaaacgcaaacccaaacgucgacccaaacgcaaacccgaacguagacccaaacgcgaacccaaacguagacccaaacgcaaacccaaacgcaaacccaaacgcaaacccaaacgcaaacccaaaugcaaacccaaacgcaaacccaaacgccaauccaaacgccaacccaaacgcaaacccaaacgcaaacccaaacgcaaacccaaacgcaaaccccaacgcaaacccaaacgcuaacccaaacgcaaacccuaaugcaaacccuaacgcaaacccaaacgucgacccgaacgcaaacccaaaugcaaacccaaacgcaaacccaaacgcaaaccccaacgccaacccaaaugcaaacccaaaugcaaauccaaacgcaaacccaaacgcaaacccuaacgcaaacccaaacgcaaaccccaacgcaaacccaaacgcaaacccaaacgccaacccaaacgcaaaccccaaugcaaacccaaacgcaaacccaaacgcaaacccaaacaaaaacaaucaaggcaacggacaaggacacaacaugcccaacgacccaaaccgaaacgucgacgaaaacgccaacgcaaacagcgcaguaaaaaacaacaacaacgaagaacccucagacaaacacauaaaagaauacuuaaacaaaauacaaaacucacuaucuacagaauggucacccuguagcguaaccugcggcaacggaauacaaguaagaauaaaaccaggcucagcaaacaaaccaaaagaugaacuagacuacgccaaugauauagaaaaaaaaauauguaaaauggaaaaauguagcucagucuucaacguagucaacucaucaauaggacuaauaaugguacucuccuuccucuuccuaaauuaaggacuaguuauaagacugacuagcccgaugggccucccaacgggcccuccuccccuccuugcaccgagauuaaucaaaggcucuuuucagagccaccaaaaaaaaaaaaaaaaaaaaaaaaaaaaaaaaaaaaaaaaaaaaaaaaaaaaaaaaaaaaaaaaagaauu

SEQ ID NO: 7225 - RNA, 1307 nt, Artificial Sequence
  mRNA Design i-3 (hSL-A64-N5) comprising derived and/or modified sequence from Pf(3D7)__XP_001351122.1__Pf-CSP(1-374) (opt6)
aggagaaagcuuaccaugaugagaaaacuagcaauauuaagcguaagcucauuccuauucguugaagcauuauuccaagaauaccaaugcuacggcucaagcucaaacacaagaguauuaaacgaauuaaacuacgacaaugcaggaaccaaccucuacaacgaacuagaaaugaauuauuacggcaaacaagaaaacugguacucacucaaaaaaaacucacgaucccuaggagaaaacgaugacggaaacaaugaagauaacgaaaaauuaagaaaaccaaaacacaaaaaauuaaaacaaccugcagacggaaacccagacccaaacgcaaauccaaauguagacccaaacgcaaaccccaacguagacccaaaugcaaacccaaacguagacccaaacgcaaacccaaaugcaaacccaaacgcaaacccaaacgcaaacccaaacgcaaaccccaacgcaaacccaaacgcaaacccaaacgccaaccccaacgcaaacccaaacgcaaacccgaaugcaaacccaaacgcaaacccaaacgcaaacccaaacgcaaacccaaacgcaaacccaaacgcaaacccaaaugcaaacccaaacguggauccaaacgcaaauccaaacgcaaacccaaacgcaaacccaaacgcaaaccccaacgcaaauccaaacgcaaaccccaaugcaaauccaaacgcaaacccaaacgccaacccaaacgcaaacccgaacgccaauccaaacgcaaacccaaacgcaaacccaaacgcaaacccaaacgccaacccaaacgcaaacccaaacgcaaacccaaacgcaaaccccaacaaaaacaaccaaggaaacggacaaggacacaacaugccaaacgauccaaacagaaacgucgacgaaaacgccaacgcuaacagcgcaguaaaaaacaauaacaacgaagaaccaucagacaaacauauaaaagaauacuuaaacaaaauccaaaacucacuaucaacagaauggucccccuguuccguaacaugcggaaacggaauacaaguacgaaucaaaccaggaucagccaacaaaccgaaagacgaacuagacuaugccaacgauauagaaaaaaaaauaugcaaaauggaaaaaugcugaggacuaguuauaagacugacuagcccgaugggccucccaacgggcccuccuccccuccuugcaccgagauuaaucaaaggcucuuuucagagccaccaaaaaaaaaaaaaaaaaaaaaaaaaaaaaaaaaaaaaaaaaaaaaaaaaaaaaaaaaaaaaaaaagaauu

SEQ ID NO: 7226 - RNA, 1160 nt, Artificial Sequence
  mRNA Design i-3 (hSL-A64-N5) comprising derived and/or modified sequence from Pf(3D7)__XP_001351122.1__Pf-CSP(1-325) (opt6)
aggagaaagcuuaccaugaugcgaaaauuagcaauacuaagcguaagcucauucuuauucguagaagcacucuuccaagaauaccaaugcuacggaucaagcucaaacacaagaguccuaaacgaauuaaacuaugacaacgcaggaacaaaccuauacaacgaacuagaaaugaacuacuacggaaaacaagaaaacugguacucacucaaaaaaaacagcagaagucuaggagaaaacgacgacggaaacaacgaagacaacgaaaaacuacgaaaaccaaaacacaaaaaacuaaaacaaccagcagacgggaacccagacccaaacgcaaacccaaacguagauccaaacgcaaacccaaauguagacccuaacgcaaacccaaauguagacccaaacgcaaacccuaacgcaaacccaaaugcaaacccaaacgcaaauccaaacgcaaacccaaacgcaaacccaaacgcgaacccaaacgcaaacccaaacgcaaacccaaaugcaaaccccaacgcaaauccaaaugcaaacccaaaugcaaauccaaacgcaaacccaaacgcaaacccaaaugcaaauccaaacgcaaauccaaacguggauccaaacgcaaacccaaacgcaaacccaaacgcaaacccaaacgcaaacccaaacgcaaacccaaacgcaaauccaaacgccaauccaaacgcaaauccaaaugcaaacccaaacgcaaacccaaacgcaaacccaaacgcaaacccaaacgcaaacccaaacgcaaacccaaacgcaaacccaaacgcaaacccaaacgcaaacccaaacgcaaacccaaacaaaaacaaccaaggaaacggacaaggacacaacaugccaaacgacccaaacagaaacguagacgaaaacgccaacgcaaauagcgcagucaaaaacaacaauaacgaagaaccaucggacaaacacauaaaagaauacuuaaacaaaauacaaaacugaggacuaguuauaagacugacuagcccgaugggccucccaacgggcccuccuccccuccuugcaccgagauuaaucaaaggcucuuuucagagccaccaaaaaaaaaaaaaaaaaaaaaaaaaaaaaaaaaaaaaaaaaaaaaaaaaaaaaaaaaaaaaaaaagaauu

SEQ ID NO: 7227 - RNA, 1376 nt, Artificial Sequence
  mRNA Design i-3 (hSL-A64-N5) comprising derived and/or modified sequence from Pf(3D7)__XP_001351122.1__HsALB_Pf-CSP(19-397) (opt6)
aggagaaagcuuaccaugaaaugggucacauuuauuucacuacuauucuuauucucaagcgcauacucacuauuucaagaauaccaaugcuacggcucauccucaaauacacgaguacuaaaugaacucaacuacgacaacgcaggaaccaaucucuacaacgaauuagaaaugaacuacuacggcaaacaagaaaacugguauucacuaaaaaaaaacaguagaucacuaggagaaaaugacgacggaaacaaugaagacaacgaaaaacuaagaaaaccaaaacacaaaaaauuaaaacaaccagcagacggaaacccagacccaaacgcaaacccuaacguagaucccaaugccaacccaaauguagacccaaacgcaaaccccaacgucgauccaaacgcaaacccaaacgcaaacccaaacgcaaacccaaacgcaaacccaaacgcaaacccaaaugcaaaccccaacgcaaacccaaacgcuaacccaaacgcaaacccaaacgcaaacccaaacgcaaacccaaacgcaaacccaaacgccaacccaaacgccaacccaaacgcaaauccaaacgcaaacccaaaugccaauccaaacguugacccaaacgcaaacccaaacgcaaaccccaacgcaaacccaaacgcaaauccaaacgcgaaccccaacgcaaacccaaacgcaaacccaaaugcaaacccaaacgcuaacccaaaugcaaacccaaacgccaacccaaacgccaacccaaacgcaaaccccaacgcaaacccaaacgcaaacccaaacgccaauccaaacgcaaacccaaaugcaaacccaaacaaaaacaaccaaggaaacggacaaggacacaacaugccaaacgaccccaacagaaacguagaugaaaaugcaaaugcuaacucagccguaaaaaacaauaacaacgaagaaccaucagacaaacacauaaaagaauaccuaaauaaaauacaaaauuccuuaucaacagaaugguccccaugcucaguaacuugcgguaacggcauacaaguaagaauaaaaccaggaucagcaaacaaaccaaaagacgaauuagacuaugcaaacgacauagaaaaaaaaauauguaaaauggaaaaaugcagcucaguauucaacguaguaaauuccucaaucggacucaucaugguauuaucauuccuauuuuuaaauuaaggacuaguuauaagacugacuagcccgaugggccucccaacgggcccuccuccccuccuugcaccgagauuaaucaaaggcucuuuucagagccaccaaaaaaaaaaaaaaaaaaaaaaaaaaaaaaaaaaaaaaaaaaaaaaaaaaaaaaaaaaaaaaaaagaauu

SEQ ID NO: 7228 - RNA, 1394 nt, Artificial Sequence
  mRNA Design i-3 (hSL-A64-N5) comprising derived and/or modified sequence from Pf(3D7)__XP_001351122.1__HsIns-iso1_Pf-CSP(19-397) (opt6)
aggagaaagcuuaccauggcacuauggaugagacuacuaccacuacuagcacuccuagccuuauggggacccgauccagccgcagcacucuuccaagaauaccaaugcuauggaucauccuccaacacaagaguccuaaacgaauuaaauuacgacaacgcuggaacaaaccuauacaaugaacuagaaaugaauuauuacggaaaacaagaaaauugguacucacuaaaaaaaaacucuagaagccuaggagaaaacgacgacggaaacaacgaagauaacgaaaaacuaagaaaaccaaaacacaaaaaauuaaaacaacccgcagacggcaacccagacccaaaugcaaauccaaacguagacccaaacgcaaauccaaacguagacccaaacgcaaacccaaauguagacccaaacgcaaauccaaacgcaaacccaaaugcaaacccaaaugcaaacccaaacgcaaauccaaacgcaaaucccaacgccaacccaaacgcaaacccaaacgcaaauccaaacgcaaacccaaacgcaaacccaaacgcaaacccaaacgcaaacccaaaugcaaacccaaaugccaauccaaacgccaacccaaacgcaaacccaaacguagacccaaacgcaaacccaaacgccaacccaaacgcaaaccccaaugcaaacccaaacgcaaacccaaacgcaaaccccaacgcaaauccaaacgcaaacccaaacgcaaauccaaacgcaaauccaaacgccaacccaaacgcaaacccaaacgcaaauccaaacgcaaaccccaacgcaaacccaaacgccaacccaaaugcaaacccaaacgcaaaucccaauaaaaacaaccaaggaaacggacaaggacacaacaugccaaacgauccaaacagaaacguagacgaaaacgcaaacgcaaacucagcagucaaaaacaauaacaacgaagaaccaucagacaaacacauaaaagaauaccuaaacaaaauacaaaacucacuauccacagaauggucaccaugcucaguaaccugcggaaacggaauacaaguaagaauaaaaccaggaucagccaacaaaccaaaagacgaacuagacuaugcuaaugacauagaaaaaaaaauaugcaaaauggaaaaaugcuccucaguauucaacgucguaaacucuucaauaggacuaauaaugguacuauccuucuuauuucuaaacuaaggacuaguuauaagacugacuagcccgaugggccucccaacgggcccuccuccccuccuugcaccgagauuaaucaaaggcucuuuucagagccaccaaaaaaaaaaaaaaaaaaaaaaaaaaaaaaaaaaaaaaaaaaaaaaaaaaaaaaaaaaaaaaaaagaauu

SEQ ID NO: 7229 - RNA, 1373 nt, Artificial Sequence
  mRNA Design i-3 (hSL-A64-N5) comprising derived and/or modified sequence from Pf(3D7)__XP_001351122.1__HsSPARC_Pf-CSP(19-397) (opt6)
aggagaaagcuuaccaugcgcgcauggauauucuuccuccuaugucuagcaggucgagcacuugcacucuuccaagaauaccaauguuacggauccucaagcaacacacgaguacuaaacgaacuaaacuacgauaacgcaggaaccaacuuauacaacgaacuagaaaugaacuacuacggcaaacaagaaaacugguacucacucaaaaaaaacagcagaagccuaggagaaaaugacgacggaaacaacgaagauaacgaaaaauuacgaaaacccaaacacaaaaaauuaaaacaacccgcagauggaaauccagacccgaacgcaaacccaaacguagacccaaacgcaaacccaaacguugacccaaacgcaaacccaaacguagacccaaacgcaaacccuaacgccaacccaaacgcaaacccaaacgcaaacccaaaugcgaacccaaaugcaaacccaaacgccaacccaaaugcaaaccccaacgcaaauccaaacgcaaacccaaaugcaaacccaaacgcaaacccaaacgcaaacccaaacgcaaacccaaacgccaaccccaaugcaaacccaaacgcaaacccaaacgucgacccaaacgcaaacccaaacgcaaacccaaacgcaaauccaaacgcaaauccaaacgcaaacccuaacgcaaacccaaacgcaaacccaaaugcaaauccaaacgcaaacccaaacgcaaacccaaacgcaaauccaaacgcaaacccaaacgcaaacccaaacgcaaacccuaaugcaaacccaaaugcaaauccaaacgcaaacccaaaugcaaaccccaacaaaaacaaccaaggaaacggacaaggacacaauaugccaaacgacccaaacagaaacguagacgaaaacgcaaacgccaacagcgcaguaaaaaacaacaacaacgaagaaccaucagacaaacacauaaaagaauaccuaaacaaaauacaaaacucacuaucaacagaauggucucccugcuccguaacaugcggaaacggcauacaaguacgaauaaaaccuggaucagccaacaaaccaaaagacgaacuagacuaugcaaaugacauagaaaaaaaaauaugcaaaauggaaaaaugcaguucagucuucaacguagucaacagcucaauaggccuaauaaugguacucucauuccuauucuuaaacuaaggacuaguuauaagacugacuagcccgaugggccucccaacgggcccuccuccccuccuugcaccgagauuaaucaaaggcucuuuucagagccaccaaaaaaaaaaaaaaaaaaaaaaaaaaaaaaaaaaaaaaaaaaaaaaaaaaaaaaaaaaaaaaaaagaauu

SEQ ID NO: 7230 - RNA, 1376 nt, Artificial Sequence
  mRNA Design i-3 (hSL-A64-N5) comprising derived and/or modified sequence from Pf(3D7)__XP_001351122.1__IgE_Pf-CSP(19-397) (opt6)
aggagaaagcuuaccauggauuggacauggauucucuuccucguagcagcagccacaagaguacacucuuuauuucaagaauaccaaugcuacggaucaagcucaaacacacgcguacuaaacgaacuaaacuacgacaacgcaggaacaaacuuauacaacgaacuagaaaugaacuauuauggcaaacaagaaaacugguacucacuaaaaaaaaacuccagaagcuuaggagaaaacgacgacggaaacaacgaagacaacgaaaaacuacgcaaaccuaaacacaaaaaacuaaaacaaccugcagacggaaacccagacccaaacgcgaacccaaacguagauccaaacgcaaacccaaacguagaucccaacgcaaacccgaacguagacccuaacgcaaauccaaacgcaaaccccaacgcaaacccgaacgcaaacccaaacgcaaacccaaacgcaaacccaaacgcaaacccaaacgcaaacccaaacgccaacccaaacgcaaauccaaacgcuaacccaaaugcaaacccuaacgcaaacccaaacgccaacccaaacgcaaacccaaacgcaaacccaaacgcaaaucccaauguagacccaaacgcaaacccaaacgcaaacccaaacgcuaacccaaaugcaaacccaaacgcaaacccaaacgcaaacccaaacgcuaaccccaacgcaaacccgaacgcaaacccaaaugcaaacccaaacgcaaacccaaaugcaaacccaaacgcaaacccaaacgcaaaccccaaugccaacccaaacgcaaauccaaaugccaauccaaacgcaaacccaaacaaaaacaaccaaggaaauggacaaggacauaacaugccaaacgaccccaaccgaaauguagacgaaaacgccaacgcaaauagugcagucaaaaacaauaacaaugaagaacccucagauaaacauauaaaagaauacuuaaacaaaauacaaaacucacuaucaaccgaguggucuccuugcucaguaacauguggaaacggaauacaaguacgaauaaaaccaggaucagcaaacaaaccgaaagacgaacuagacuacgccaacgacauagaaaagaaaauauguaaaauggagaaauguaguucaguauucaacgugguaaacagcucaauaggccuaauaaugguacucucuuuccuauuccuaaacuaaggacuaguuauaagacugacuagcccgaugggccucccaacgggcccuccuccccuccuugcaccgagauuaaucaaaggcucuuuucagagccaccaaaaaaaaaaaaaaaaaaaaaaaaaaaaaaaaaaaaaaaaaaaaaaaaaaaaaaaaaaaaaaaaagaauu

SEQ ID NO: 7231 - RNA, 1541 nt, Artificial Sequence
  mRNA Design i-3 (hSL-A64-N5) comprising derived and/or modified sequence from Pf(3D7)__XP_001351122.1__Pf-CSP_L(G4SG4)_TM domain HA (opt6)
aggagaaagcuuaccaugaugcguaaacuagcaauacuaucugucaguucauucuuauucguagaagcacuauuccaagaauaccaauguuacggaucuucaucaaacacaagaguacucaacgaauuaaacuacgauaacgcuggaaccaauuuauacaacgaacuagaaaugaacuacuauggaaaacaagaaaacugguauucacuaaaaaaaaacagcagaaguuuaggagaaaaugacgacggaaacaaugaagacaaugaaaaauuacgaaaaccaaaacacaaaaaauuaaaacaacccgccgacggaaauccagacccaaacgcaaacccaaauguagacccaaacgcaaacccaaauguagaucccaacgcaaacccaaacguagaucccaaugcaaacccaaacgcaaacccaaaugcaaaccccaacgcaaacccaaaugcaaacccuaacgcaaacccgaacgcaaacccaaacgcaaaucccaaugcaaaccccaacgcaaauccaaaugcaaacccuaacgcaaauccgaacgcaaauccaaacgcaaacccaaacgcaaacccaaacgcaaacccaaacgcaaacccaaacgucgacccaaacgccaauccaaacgcaaaccccaaugcaaacccaaaugcaaacccaaacgcaaacccaaaugccaacccaaacgcaaacccaaacgcaaacccaaacgcaaacccaaacgcaaacccaaaugcaaacccaaaugcaaacccaaacgccaacccaaacgcaaacccaaacgcaaacccaaacgccaacccaaacgcaaacccuaacgcaaauccaaacaaaaacaaccaagggaacggacaaggacacaacaugccaaacgacccaaacagaaacguagacgaaaacgccaacgcaaacucagcugucaaaaacaauaacaacgaagaacccuccgauaaacacauaaaagaauaccuaaacaaaauccaaaacucccuuucuacagaauggucacccugcucaguaacaugcggcaacggcauacaaguuagaaucaaaccaggaucagcaaauaaaccaaaagacgaauuagacuaugccaacgacauagaaaaaaaaauauguaaaauggaaaaaugcucaucaguuuucaacguaguaaacagcucaaucggauuaauaaugguacuaucauucuuauuuuuaaacggaggaggaggcuccggcggagguggaaaacuagaaucaacuagaauauaccaaauauuagcaauauacucaacaguagcaucaucacucguauuaguaguaucgcuaggagcaauaaguuucuggaugugcucuaacggaagccuacaaugccgaauaugcauauaaggacuaguuauaagacugacuagcccgaugggccucccaacgggcccuccuccccuccuugcaccgagauuaaucaaaggcucuuuucagagccaccaaaaaaaaaaaaaaaaaaaaaaaaaaaaaaaaaaaaaaaaaaaaaaaaaaaaaaaaaaaaaaaaagaauu

SEQ ID NO: 7232 - RNA, 1415 nt, Artificial Sequence
  mRNA Design i-3 (hSL-A64-N5) comprising derived and/or modified sequence from Pf(3D7)__XP_001351122.1__Pf-CSP(199-377)_L(PVTN)_HBsAg (opt6)
aggagaaagcuuaccauggacccaaacgccaaccccaacgcaaacccaaaugcaaacccaaacgcuaaccccaacgcaaacccaaacgcuaacccuaacgcaaauccaaacgcaaaucccaacgcaaauccaaacgcaaacccaaacgcaaacccaaaugccaacccaaacgcaaacccuaacgcaaaucccaacgcaaauccaaaugcaaaccccaaugcaaacccaaacgcaaauccaaacaaaaauaaucaaggaaauggacaaggacauaacaugccaaacgacccuaaccgaaacgucgacgaaaaugcaaacgcaaacuccgcaguaaaaaacaacaacaacgaagaaccuuccgacaaacacauaaaagaauaccuaaacaaaauacaaaacucucuauccacugaauggucaccaugcucaguaaccugcggaaauggcauacaaguaagaauaaaaccaggaucugcaaauaaaccuaaagacgaacuagauuacgcaaaugacauagaaaaaaaaauaugcaaaauggaaaaaugcucaucagucccaguaacaaacauggaaaacaucacaucaggauucuuaggaccacuacucguauuacaagcaggauucuuucuuuuaacaagaauauuaacaauaccacaaucccuagacucaugguggacaucauuaaacuuccuagguggaucaccagucugccucggacaaaacucacaaucaccaacaucaaaccacucaccaacauccugcccaccaauuuguccaggauacagauggaugugccuacgaagauucauaauauucuuauuuauauuacuacuaugucucauauuuuuacucguacuauuagacuaucagggcauguuacccguauguccacuaauaccaggcucaaccaccacaaacacagguccaugcaaaaccugcaccacaccagcacaaggaaacuccauguuucccucauguugcugcaccaaacccaccgauggaaacugcaccugcauaccaaucccaucuucaugggcauucgcaaaauaucuaugggaaugggcauccguaagauuuucauggcuaucacuauuaguaccauucguacaaugguucguaggauuaucaccaacaguaugguuaucagcaauauggaugaugugguacuggggaccaucacuauacucaauaguauccccuuucauaccauuacucccaauauuuuucugccuuuggguauacauauaaggacuaguuauaagacugacuagcccgaugggccucccaacgggcccuccuccccuccuugcaccgagauuaaucaaaggcucuuuucagagccaccaaaaaaaaaaaaaaaaaaaaaaaaaaaaaaaaaaaaaaaaaaaaaaaaaaaaaaaaaaaaaaaaagaauu

SEQ ID NO: 7233 - RNA, 1457 nt, Artificial Sequence
  mRNA Design i-3 (hSL-A64-N5) comprising derived and/or modified sequence from Pf(3D7)__XP_001351122.1__Pf-CSP(199-387)_L(PVTN)_HBsAg (opt6)
aggagaaagcuuaccaugauggcaccagauccaaacgcaaacccaaacgcaaacccaaacgcaaauccaaaugcaaacccaaacgcaaaucccaaugcaaacccuaacgcaaacccaaacgccaacccaaaugccaacccaaacgcaaacccaaacgcaaauccaaacgcaaacccaaacgcuaacccaaaugcaaaccccaacgcaaauccaaacgcaaacccaaacgcaaauccaaacgcuaacccaaacaaaaauaaccaaggaaacggacaaggacacaauaugccaaaugacccaaauagaaacguagacgaaaacgcaaacgcaaauucagcagucaaaaacaauaacaacgaagaaccauccgauaaacacauaaaagaauacuuaaacaaaauccaaaacucacuaucaacugaauggucaccuuguucaguaacauguggcaacggaauacaaguaagaauaaaaccagguucagccaacaaaccuaaagacgaacuagacuacgcaaacgacauagaaaaaaaaaucugcaaaauggaaaaaugcucaucaguauuuaauguaguaaacucaucaauaggacuaggcccuguaacaaacauggaaaacauaaccucaggauucuuaggcccacuacuaguacuccaagcaggauucuuucuucuaacaagaauauuaaccauuccucaaucauuagacucaugguggacaucccuuaacuuucuaggaggaagccccguaugcuuaggacaaaacagccaauccccaacauccaaccacuccccaacaucaugccccccaauaugcccaggauacagauggaugugccuaagaagauucaucauauuccuauuuauucucuuacucugcuuaauauucuuacucguauuacucgacuaccaaggaauguuaccaguaugcccacuaauaccaggauccacaacaacaaacacgggaccaugcaaaacaugcacaacaccugcccaaggaaauuccauguucccaucaugcugcugcacaaaaccaaccgacggcaacugcacaugcauaccaauaccaucaagcugggccuucgcaaaauaccuaugggaaugggcaucagugagauucucauggcucucauuacuagucccauucguacaaugguuuguaggauuaucaccaacaguuuggcucagcgcaauauggaugaugugguacuggggccccucuuuauauucaauaguauccccauuuauaccacuacucccaauauucuucuguuuauggguauacauauaaggacuaguuauaagacugacuagcccgaugggccucccaacgggcccuccuccccuccuugcaccgagauuaaucaaaggcucuuuucagagccaccaaaaaaaaaaaaaaaaaaaaaaaaaaaaaaaaaaaaaaaaaaaaaaaaaaaaaaaaaaaaaaaaagaauu

SEQ ID NO: 7234 - RNA, 641 nt, Artificial Sequence
  mRNA Design i-3 (hSL-A64-N5) comprising derived and/or modified sequence from Pf(3D7)__XP_001351122.1__HsALB_Pf-CSP(19-152) (opt6)
aggagaaagcuuaccaugaaauggguaacauucauaucacuacuauuccuauucuccagcgcauacucacuauuccaagaauaccaaugcuacggaucaagcucaaacacacgaguacuaaacgaacuaaacuacgacaacgcaggaaccaaccuauacaacgaacuagaaaugaacuacuacggaaaacaagaaaacugguacucacuaaaaaaaaacagcagaucacuaggagaaaacgacgacggaaacaacgaagacaacgaaaaacuaagaaaaccaaaacacaaaaaacuaaaacaacccgcagacggaaacccagacccaaacgcaaacccaaacguagacccaaaugcaaacccaaacguagacccaaacgcaaacccaaacguagacccaaacgcaaacccaaacgcaaacccaaacgcaaacccaaacgcaaacccaaacgcaaacccaaacgcaaacccauaaggacuaguuauaagacugacuagcccgaugggccucccaacgggcccuccuccccuccuugcaccgagauuaaucaaaggcucuuuucagagccaccaaaaaaaaaaaaaaaaaaaaaaaaaaaaaaaaaaaaaaaaaaaaaaaaaaaaaaaaaaaaaaaaagaauu

SEQ ID NO: 7235 - RNA, 761 nt, Artificial Sequence
  mRNA Design i-3 (hSL-A64-N5) comprising derived and/or modified sequence from Pf(3D7)__XP_001351122.1__HsALB_Pf-CSP(19-192) (opt6)
aggagaaagcuuaccaugaaauggguaacauucaucucacuacuauucuuauucucaucagcauacucacuauuccaagaauaccaaugcuacggaucaucaucaaacacacgaguacucaacgaacuaaacuacgacaacgcaggaacaaaccuauacaacgaacuagaaaugaacuacuacggaaaacaagaaaacugguauucacuaaaaaaaaacucaagaucacuaggagaaaacgacgacggaaacaacgaagacaacgaaaaacuaagaaaaccaaaacacaaaaaacuaaaacaaccagcagacggaaacccagacccaaacgcaaacccaaacguagacccaaacgccaacccaaacguagacccaaacgcaaacccaaacguagacccaaacgcaaacccaaacgcaaacccaaacgcaaacccaaacgcaaacccaaacgcaaacccaaacgcaaacccaaacgcaaacccaaacgcaaacccaaacgcaaacccaaacgcaaacccaaacgcaaacccaaacgcaaauccaaacgcaaacccaaacgcaaacccaaacgcaaacccaaacgcaaaccccuaaggacuaguuauaagacugacuagcccgaugggccucccaacgggcccuccuccccuccuugcaccgagauuaaucaaaggcucuuuucagagccaccaaaaaaaaaaaaaaaaaaaaaaaaaaaaaaaaaaaaaaaaaaaaaaaaaaaaaaaaaaaaaaaaagaauu

SEQ ID NO: 7236 - RNA, 1001 nt, Artificial Sequence
  mRNA Design i-3 (hSL-A64-N5) comprising derived and/or modified sequence from Pf(3D7)__XP_001351122.1__HsALB_Pf-CSP(19-272) (opt6)
aggagaaagcuuaccaugaaauggguaacauucauaucacuacuauuccuauucucaagcgcauauucacuauuccaagaauaccaaugcuacggaucaagcucaaacacaagaguacuuaacgaacuaaacuacgacaacgcaggaacaaaccuauacaacgaacuugaaaugaacuacuacggaaaacaagaaaacugguacucacuaaaaaaaaauagcagaagcuuaggagaaaacgacgacggaaacaacgaagacaacgaaaaauuaagaaaaccuaaacacaaaaaacuaaaacaacccgcagacggaaacccagacccuaacgccaacccaaauguagacccaaacgcaaacccaaacguagacccaaacgcaaaccccaacguagacccaaacgcaaacccaaacgcaaacccaaacgcaaacccaaacgcaaaccccaacgcaaacccaaacgcaaacccaaacgcaaacccaaacgcaaacccaaacgcaaacccaaacgcaaacccaaacgcaaacccaaacgcaaacccaaacgcgaacccaaacgcaaacccaaacgcaaacccaaacgcaaacccaaacgcaaacccaaacguagacccaaaugcaaaccccaacgcaaacccaaacgcaaacccaaaugcaaaccccaacgcaaacccaaacgcaaacccaaacgcaaacccaaacgcaaacccaaaugcaaacccaaacgcaaacccaaacgccaacccaaacgcaaacccaaacgcaaacccaaacgcaaacccaaacgcaaacccgaacgcaaacccaaacgcaaacccaaacgcaaacccauaaggacuaguuauaagacugacuagcccgaugggccucccaacgggcccuccuccccuccuugcaccgagauuaaucaaaggcucuuuucagagccaccaaaaaaaaaaaaaaaaaaaaaaaaaaaaaaaaaaaaaaaaaaaaaaaaaaaaaaaaaaaaaaaaagaauu

SEQ ID NO: 7237 - RNA, 1163 nt, Artificial Sequence
  mRNA Design i-3 (hSL-A64-N5) comprising derived and/or modified sequence from Pf(3D7)__XP_001351122.1__HsALB_Pf-CSP(19-272)_L(AAY)_Pf-CSP(310-3 27)_L(AAY)_Pf-CSP(346-375) (opt6)
aggagaaagcuuaccaugaaauggguaacauuuauaucacuccuauuccuuuuuucgucagcauacucacuauuccaagaauaucaaugcuacggaucaagcuccaacacaagaguacuaaacgaacuaaacuacgacaacgcaggaacaaaccuauacaacgaacuagaaaugaacuacuacggaaaacaagaaaacugguacucacuaaaaaaaaacagccgaagcuuaggagaaaaugacgacggaaacaacgaagacaacgaaaaauuacgcaaacccaaacacaaaaaacugaaacaaccagcagacggaaacccagacccaaacgcaaacccaaacguagacccaaacgcaaacccaaacguagacccaaacgcaaacccaaacguagacccaaacgcaaacccaaacgcgaacccaaacgccaacccaaacgcaaacccaaacgcaaacccaaacgcaaacccaaacgcaaacccaaacgcaaacccaaacgccaacccgaacgcaaacccaaacgcaaacccaaacgcaaauccaaacgcaaacccaaacgcaaacccaaacgccaacccaaacgcaaacccaaacgcaaacccaaauguggacccaaacgcaaacccaaacgcaaacccaaacgcaaacccaaaugcaaacccaaacgcaaacccaaacgcaaacccaaacgcaaacccaaacgcaaacccaaaugcaaacccaaacgcaaauccaaacgcaaacccaaacgcaaacccaaacgcaaacccaaacgcaaacccuaacgcaaacccaaacgcaaacccaaacgccaaccccaaugcaaacccagcagcauacgaaccaucagacaaacacauaaaagaauaccuaaacaaaauacaaaacucacucgcagcauauauaaagccaggaagcgccaacaaaccaaaagacgaacuagauuacgcaaacgacauagaaaaaaaaaucuguaaaauggaaaaaugcucauaaggacuaguuauaagacugacuagcccgaugggccucccaacgggcccuccuccccuccuugcaccgagauuaaucaaaggcucuuuucagagccaccaaaaaaaaaaaaaaaaaaaaaaaaaaaaaaaaaaaaaaaaaaaaaaaaaaaaaaaaaaaaaaaaagaauu

SEQ ID NO: 7238 - RNA, 1124 nt, Artificial Sequence
  mRNA Design i-3 (hSL-A64-N5) comprising derived and/or modified sequence from Pf(3D7)__XP_001351122.1__HsALB_Pf-CSP(19-272)_L(AAY)_Pf-CSP(346-3 65)_L(AAY)_P2 (opt6)
aggagaaagcuuaccaugaaauggguaacauucauaucacuauuauuccuuuucucaucagcuuacucacuauuccaagaauaccaaugcuacggaucauccucaaacacaagaguacuaaacgaacuaaacuacgacaacgccggaaccaaccuauacaacgaacucgaaaugaacuacuacggaaaacaagaaaacugguacucacuaaaaaaaaacagccgaucccuaggagaaaacgacgacggaaauaacgaagacaaugaaaaauuaagaaaaccaaaacacaaaaaacuaaaacaaccagcagacggaaacccagacccaaacgcaaacccaaacguagauccaaacgcaaacccaaacguagacccaaacgcaaacccaaacguagacccaaacgcuaacccaaacgcaaacccaaacgcaaacccaaacgcaaacccaaacgcaaacccaaacgcaaacccgaacgcaaaccccaacgcaaacccaaacgcaaacccaaacgcaaaccccaacgcaaacccaaacgcaaacccgaacgcaaacccaaacgcaaacccaaacgcaaacccaaacgcaaacccaaacgcaaacccaaacguagacccaaacgccaacccaaacgcaaacccaaacgcaaacccaaacgcaaacccaaacgcaaacccaaacgcaaacccaaacgcaaacccaaacgcaaacccaaacgcaaacccaaacgcaaaccccaacgcaaacccaaaugcaaacccaaacgcaaacccaaaugcaaaccccaacgcaaacccaaaugccaauccaaacgcaaacccaaacgcaaacccagccgcauacauaaaaccaggauccgcaaacaaaccaaaagacgaacuagacuacgcaaacgacauagaagcagcauaccaauauauaaaagccaacuccaaauucauagguauaacagaacucuaaggacuaguuauaagacugacuagcccgaugggccucccaacgggcccuccuccccuccuugcaccgagauuaaucaaaggcucuuuucagagccaccaaaaaaaaaaaaaaaaaaaaaaaaaaaaaaaaaaaaaaaaaaaaaaaaaaaaaaaaaaaaaaaaagaauu

SEQ ID NO: 7239 - RNA, 1118 nt, Artificial Sequence
  mRNA Design i-3 (hSL-A64-N5) comprising derived and/or modified sequence from Pf(3D7)__XP_001351122.1__HsALB_Pf-CSP(19-272)_L(AAY)_Pf-CSP(346-3 65)_L(AAY)_PADRE (opt6)
aggagaaagcuuaccaugaaauggguaaccuucauaucacuacuauucuuauucucaucagcauacucacucuuccaagaauaccaaugcuacggcucaagcucaaacacaagaguacuaaacgaauuaaacuaugacaacgccggaacaaaccuauacaaugaauuagaaaugaacuacuacggcaaacaagaaaacugguacucacucaaaaaaaacuccagaaguuuaggagaaaaugacgacggaaacaaugaagacaaugaaaaauuacgaaaaccaaaacacaaaaaacuaaaacaacccgccgacggaaaccccgacccgaacgcaaacccaaacguagacccaaacgcaaacccaaacguagacccaaaugcaaacccaaacguagacccaaacgcaaacccaaacgcaaacccaaacgcaaauccaaacgcaaacccaaaugcaaacccaaaugcaaauccaaacgcaaaccccaacgcaaacccaaacgcaaacccaaaugcaaauccaaacgccaacccaaaugcaaacccaaacgcaaauccaaacgcaaacccaaacgcaaauccaaacgcaaacccaaaugcaaacccaaacguagauccaaacgcaaacccaaacgccaacccaaacgcaaacccgaacgcaaacccaaacgcaaacccaaacgccaacccaaacgccaacccaaacgccaacccaaacgcaaacccaaacgcaaacccaaacgcaaacccaaacgcaaacccaaaugcaaacccuaacgcaaacccaaacgcaaacccaaacgcaaacccaaacgccaacccaaacgcaaauccagcagcauacauaaaaccaggaucagcaaacaaaccaaaagaugaacuagacuacgcaaaugacaucgaagcagccuacgcuaaauucguagcagccuggacacuaaaagcagcagccuaaggacuaguuauaagacugacuagcccgaugggccucccaacgggcccuccuccccuccuugcaccgagauuaaucaaaggcucuuuucagagccaccaaaaaaaaaaaaaaaaaaaaaaaaaaaaaaaaaaaaaaaaaaaaaaaaaaaaaaaaaaaaaaaaagaauu

SEQ ID NO: 7240 - RNA, 1175 nt, Artificial Sequence
  mRNA Design i-3 (hSL-A64-N5) comprising derived and/or modified sequence from Pf(3D7)__XP_001351122.1__HsALB_Pf-CSP(19-272)_L(G4S)_Pf-CSP(310-3 27)_L(G4S)_Pf-CSP(346-375) (opt6)
aggagaaagcuuaccaugaaauggguaaccuucaucucacuacuauuccuauucucaagcgcauacucacucuuucaagaauaccaaugcuacggcucaagcucaaacacacgaguacuaaacgaacuaaacuacgacaacgcaggaacaaaccuauauaacgaacucgaaaugaacuacuacggcaaacaagaaaauugguacucacuaaaaaaaaacagcagaagcuuaggagaaaacgacgacggaaacaacgaagauaacgaaaaacuaagaaaaccaaaacacaaaaaacuaaaacaacccgcagacggaaacccagacccaaacgcaaauccaaauguagacccgaacgcaaacccaaacguagacccaaaugcgaacccaaacgucgacccaaacgcaaacccaaaugcaaacccaaaugcgaacccaaacgcaaacccaaacgcaaauccaaacgcaaauccaaaugcaaacccaaacgcgaauccaaacgcaaacccaaacgcaaacccaaacgcaaacccaaacgcaaacccaaacgcaaacccaaacgcaaacccgaacgcuaacccaaacgcaaacccaaacgcaaacccaaacguagauccaaacgcgaacccaaacgcaaacccaaaugcaaacccaaacgcaaacccaaacgcaaacccaaacgcaaacccaaacgcaaacccaaacgcaaacccaaacgcgaacccaaacgcaaauccaaaugcaaacccaaacgcaaacccaaacgcaaacccaaacgcaaacccaaaugcaaacccaaacgcaaacccaaaugcaaacccaaacgcaaacccaggaggaggaggaucagaacccucagacaaacacauaaaagaauaccuaaacaaaauacaaaacucacuaggaggaggaggaucgaucaaaccaggaagcgcaaacaaaccaaaagacgaacucgacuacgcaaacgauauagaaaaaaaaauaugcaaaauggaaaaaugcucguaaggacuaguuauaagacugacuagcccgaugggccucccaacgggcccuccuccccuccuugcaccgagauuaaucaaaggcucuuuucagagccaccaaaaaaaaaaaaaaaaaaaaaaaaaaaaaaaaaaaaaaaaaaaaaaaaaaaaaaaaaaaaaaaaagaauu

SEQ ID NO: 7241 - RNA, 1160 nt, Artificial Sequence
  mRNA Design i-3 (hSL-A64-N5) comprising derived and/or modified sequence from Pf(3D7)__XP_001351122.1__HsALB_Pf-CSP(19-272)_L(G4S)_Pf-CSP(310-3 27)_Pf-CSP(346-375) (opt6)
aggagaaagcuuaccaugaaauggguaacauucauaucacuccuauuccuauucuccucagcauacucccucuuccaagaauaccaaugcuacggcucaagcucaaacacacgaguacuaaacgaacuaaauuacgacaacgccggaacaaaccuauauaaugaacuagaaaugaauuacuacggaaaacaagaaaacugguacucacuuaaaaaaaacucaagaucauuaggagaaaacgacgacggcaacaacgaagacaacgaaaaacuaagaaaaccaaaacacaaaaaacuaaaacaacccgcagacggaaauccagauccaaacgcaaacccaaacguagacccaaacgcaaacccaaacguagacccaaacgcaaacccaaacgucgacccaaacgccaacccaaacgcaaacccaaacgcaaacccaaacgcaaacccaaacgccaacccaaacgcaaacccaaacgcaaacccaaacgcaaacccaaacgcaaacccaaacgcaaacccaaacgcaaacccgaacgcaaacccaaacgcaaauccuaacgcaaacccaaacgcaaacccaaacgcaaauccgaacgcaaacccaaacguagacccaaacgcaaacccaaacgcaaacccaaacgcaaacccaaacgcaaacccaaacgcaaacccuaacgcaaacccaaaugcaaacccaaacgcgaacccaaaugcaaacccaaaugcaaacccaaacgcaaacccaaacgcaaacccaaacgcaaauccaaacgcaaauccaaacgcaaacccaaacgcaaacccaaacgcaaacccaaacgccaacccaggaggagguggaagcgaaccauccgacaaacacauaaaagaauaccuaaacaaaauacaaaacucacuaauaaaacccggcucagcaaacaaaccaaaagacgaacuagacuacgccaacgacauagaaaaaaaaauauguaaaauggaaaaaugcucauaaggacuaguuauaagacugacuagcccgaugggccucccaacgggcccuccuccccuccuugcaccgagauuaaucaaaggcucuuuucagagccaccaaaaaaaaaaaaaaaaaaaaaaaaaaaaaaaaaaaaaaaaaaaaaaaaaaaaaaaaaaaaaaaaagaauu

SEQ ID NO: 7242 - RNA, 1160 nt, Artificial Sequence
  mRNA Design i-3 (hSL-A64-N5) comprising derived and/or modified sequence from Pf(3D7)__XP_001351122.1__HsALB_Pf-CSP(19-325) (opt6)
aggagaaagcuuaccaugaaauggguaacauucauaucacuccuauuccuauucucaagcgcauacucauuauuccaagaauaccaaugcuacggaucaucaucuaacacaagaguacucaacgaacuaaacuacgacaacgcaggaacuaaucucuacaacgaacuagaaaugaacuacuacggaaaacaagaaaacugguauucacuaaaaaaaaacagccgaucauuaggagaaaacgacgacggcaacaacgaagacaacgaaaaacuacgaaaaccaaaacacaaaaaauuaaaacagccagccgacggaaacccagacccaaacgcaaacccaaacguagacccaaacgcaaacccaaacguagacccaaacgcaaacccaaacguagacccaaacgcaaacccaaacgcaaacccaaacgcaaauccaaacgcaaacccaaacgccaacccaaacgcaaacccaaacgcaaaccccaacgcaaacccaaacgcaaacccaaacgcaaacccaaaugccaacccaaacgcaaacccaaacgcaaacccaaacgcaaacccaaacgcaaacccaaaugcaaacccaaacgcaaacccaaacguagacccaaacgcaaacccaaaugcaaacccaaacgcaaaccccaacgcaaacccaaacgcaaacccaaacgcaaacccaaacgcaaacccaaacgccaacccaaacgcaaacccaaacgcaaacccaaacgcaaacccaaacgcaaacccaaacgcaaauccaaacgcaaacccaaacgcaaacccaaacgcaaacccaaacgcaaacccaaacgcaaacccaaauaaaaacaaucaaggaaacggacaaggacacaacaugccaaacgauccaaaucgcaacguagacgaaaacgcaaacgcaaacagcgcagucaaaaacaacaacaacgaagaaccaucagacaaacacauaaaagaauaccuaaauaaaauacaaaacuagggacuaguuauaagacugacuagcccgaugggccucccaacgggcccuccuccccuccuugcaccgagauuaaucaaaggcucuuuucagagccaccaaaaaaaaaaaaaaaaaaaaaaaaaaaaaaaaaaaaaaaaaaaaaaaaaaaaaaaaaaaaaaaaagaauu

SEQ ID NO: 7243 - RNA, 1337 nt, Artificial Sequence
  mRNA Design i-3 (hSL-A64-N5) comprising derived and/or modified sequence from Pf(3D7)__XP_001351122.1__HsALB_Pf-CSP(19-384) (opt6)
aggagaaagcuuaccaugaaauggguaaccuuuauaucacucuuauuccuauuuucaucagcauacucacucuuccaagaauaucaaugcuacggaucaucaucaaacacaagaguccucaaugaauuaaacuaugacaaugcaggaaccaaccuauacaacgaauuagaaaugaacuacuacggcaaacaagaaaacugguacucacucaaaaaaaacucaagauccuuaggagaaaaugaugacggaaacaacgaagacaacgaaaaacuccgaaaaccaaaacacaaaaaacuaaaacaacccgccgacggaaacccagaccccaacgcaaacccaaauguagaccccaacgcaaacccaaacguagacccaaacgcaaacccaaacguagacccaaacgcaaauccaaacgccaacccaaacgcaaacccaaacgccaacccaaacgcaaacccaaacgcaaacccaaacgcaaacccaaacgcaaacccaaaugcaaacccaaaugcaaacccaaacgcaaacccaaacgcaaacccaaacgcaaacccaaacgcaaacccaaaugcaaacccaaacgcaaacccaaacgcaaacccaaacguagacccaaaugcaaacccaaacgcaaacccaaacgcaaauccaaaugcaaauccaaacgcaaauccaaacgcaaacccaaacgcaaacccaaacgcaaacccaaacgcaaauccaaaugcaaacccaaacgcaaacccaaacgcaaacccaaacgcuaacccaaacgccaauccaaacgcaaacccaaacgcaaacccuaaugcaaacccaaacgccaacccaaauaaaaauaaccaaggaaacggacaaggacacaacaugccaaacgacccaaacagaaacgucgaugaaaacgcaaacgcaaauuccgcagucaaaaacaacaacaacgaagaaccaucagacaaacacauaaaagaauaccucaacaaaauacaaaacucccuaucaacagaauggucacccugcuccguuacaugcgguaacggcauacaaguaagaauaaaaccaggaucagcuaacaaacccaaagacgaacuagacuacgccaacgacauagaaaaaaaaauaugcaaaauggaaaaaugcuccucaguauucaacguaguaaacucaucauaaggacuaguuauaagacugacuagcccgaugggccucccaacgggcccuccuccccuccuugcaccgagauuaaucaaaggcucuuuucagagccaccaaaaaaaaaaaaaaaaaaaaaaaaaaaaaaaaaaaaaaaaaaaaaaaaaaaaaaaaaaaaaaaaagaauu

SEQ ID NO: 7244 - RNA, 1475 nt, Artificial Sequence
  mRNA Design i-3 (hSL-A64-N5) comprising derived and/or modified sequence from Pf(3D7)__XP_001351122.1__HsALB_Pf-CSP(19-384)_TM domain HA (opt6)
aggagaaagcuuaccaugaaauggguaacauuuauaucacuacuuuuccuauucucaucagcauacucacucuuccaagaauaucaaugcuauggauccucaucaaacacaagaguacucaacgaauuaaacuacgauaaugccggaacaaaccuauauaacgaacuagaaaugaacuacuacggaaaacaagaaaauugguacucauuaaaaaaaaacuccagaucccuuggagaaaacgacgauggaaacaacgaagauaacgaaaaauuaagaaaaccaaaacacaaaaaauugaaacaaccagcagacgguaacccagacccaaacgccaacccaaacguagacccaaacgcgaauccaaacgucgacccaaacgcaaaucccaacguagacccaaaugcaaauccaaaugccaauccaaacgcaaacccaaacgcaaacccaaaugcaaacccaaacgccaacccaaacgcaaauccaaacgcaaacccaaacgcaaacccaaacgccaacccaaacgccaaccccaaugcaaacccaaaugcaaacccaaacgcaaacccaaacgcaaauccaaacgcaaacccaaacgccaacccaaacguagacccaaacgcaaauccaaacgcaaacccaaacgccaauccaaacgcaaacccaaacgccaacccaaaugcaaaucccaacgcaaacccaaacgcaaauccaaaugcaaaccccaacgcaaauccaaacgcaaacccaaacgcaaauccaaacgcaaauccaaaugcaaacccaaacgcaaacccuaaugcaaacccaaacgcaaacccaaacgccaacccaaacaaaaacaaccaaggaaacggacaaggucacaauaugccaaaugacccaaaccgaaacguagacgaaaacgcaaaugccaauagcgcaguaaaaaacaauaacaacgaagaaccuucagauaaacacauaaaagaauaccuaaacaaaauacaaaacucccuaucaacagaauggucaccuuguucagucacauguggaaacggaauacaaguaagaauaaaaccaggaucagcaaacaaaccaaaagacgaacuagauuacgcaaacgauauagaaaaaaaaauauguaaaauggaaaaaugcuccucagucuucaacguagucaacaguuccaaacuagaaucaaccagaaucuaccaaauacuagcaauauauuccacaguagcaagcucacucguauuaguagucucccuaggagcaauaucauucuggaugugcucaaacggaagcuuacaaugccgaauauguauauaaggacuaguuauaagacugacuagcccgaugggccucccaacgggcccuccuccccuccuugcaccgagauuaaucaaaggcucuuuucagagccaccaaaaaaaaaaaaaaaaaaaaaaaaaaaaaaaaaaaaaaaaaaaaaaaaaaaaaaaaaaaaaaaaagaauu

SEQ ID NO: 7245 - RNA, 1187 nt, Artificial Sequence
  mRNA Design i-3 (hSL-A64-N5) comprising derived and/or modified sequence from Pf(3D7)__XP_001351122.1__HsALB_Pf-CSP(82-397) (opt6)
aggagaaagcuuaccaugaaauggguaacauucauaucacuacuauuccucuucaguucagccuauagcgauaacgaaaaacuaagaaaaccaaaacacaaaaaacucaaacaaccagcagacggaaacccagacccaaacgcaaacccaaacguagacccaaacgcaaacccaaacguagacccaaacgcaaauccaaacguagacccaaaugcaaaccccaacgcaaacccaaacgcaaacccaaacgcaaacccaaacgcaaacccaaaugcgaacccaaaugcaaauccaaacgcaaacccaaacgcaaacccaaacgcaaacccaaacgcuaacccaaacgcaaacccaaacgcaaacccaaaugcaaacccaaacgcaaacccaaacgcaaaccccaacgcaaacccaaacguagacccaaacgcaaacccaaacgcaaacccaaacgcaaacccaaacgccaacccaaaugccaacccaaacgcaaacccaaaugcaaaccccaacgcaaacccaaacgccaacccaaacgcaaacccaaacgcaaacccaaacgcaaaccccaaugcaaacccaaacgcaaacccaaaugcaaauccaaacgcaaacccaaacgcaaacccaaacgcaaacccaaacaaaaacaaccaaggaaacggacaaggacacaacaugccaaacgacccaaaucgaaacgucgaugaaaacgccaacgcaaacucagcaguaaaaaacaacaacaacgaagaaccaucugacaaacacauaaaagaauaccuaaacaaaauacaaaacucauuauccaccgaauggucaccauguucaguaacaugcggcaacggaauacaagucagaauaaaaccaggcucagcaaauaaaccaaaagacgaacuagacuacgcaaacgacauagaaaaaaaaauaugcaaaauggaaaaauguucaucagucuucaacguaguaaacucaucaauaggacucauaaugguacuaucauuccuauucuuaaacuaaggacuaguuauaagacugacuagcccgaugggccucccaacgggcccuccuccccuccuugcaccgagauuaaucaaaggcucuuuucagagccaccaaaaaaaaaaaaaaaaaaaaaaaaaaaaaaaaaaaaaaaaaaaaaaaaaaaaaaaaaaaaaaaaagaauu

SEQ ID NO: 7246 - RNA, 539 nt, Artificial Sequence
  mRNA Design i-3 (hSL-A64-N5) comprising derived and/or modified sequence from Pf(3D7)__XP_001351122.1__HsALB_Pf-CSP(93-192) (opt6)
aggagaaagcuuaccaugaaauggguaacauucaucucacuacuauuccuauucucaagcgcauacucaaaacuaaaacaaccagcagacggaaacccagacccaaacgcaaacccaaacguagacccaaacgcaaacccaaacguagacccaaacgcaaacccaaacguagacccaaacgcaaacccaaacgcaaacccaaacgcaaacccaaacgcaaacccaaacgcaaacccaaacgcaaacccaaacgcaaacccaaacgcaaacccaaacgcaaacccaaacgcaaacccaaacgcaaacccaaacgcaaacccaaacgcaaacccaaacgcaaacccaaacgcaaacccaaacgcaaacccauaaggacuaguuauaagacugacuagcccgaugggccucccaacgggcccuccuccccuccuugcaccgagauuaaucaaaggcucuuuucagagccaccaaaaaaaaaaaaaaaaaaaaaaaaaaaaaaaaaaaaaaaaaaaaaaaaaaaaaaaaaaaaaaaaagaauu

SEQ ID NO: 7247 - RNA, 779 nt, Artificial Sequence
  mRNA Design i-3 (hSL-A64-N5) comprising derived and/or modified sequence from Pf(3D7)__XP_001351122.1__HsALB_Pf-CSP(93-272) (opt6)
aggagaaagcuuaccaugaaaugggucacauucauaucacuccuauuccuauucucaagcgcauacucaaaacuaaaacaaccagcagacggaaacccagacccaaacgcaaacccaaacguagacccaaacgcaaacccaaacguagacccaaacgcaaacccaaacguagacccaaacgcaaacccaaacgcaaacccaaacgccaacccaaacgcaaacccaaacgcaaacccaaacgcaaacccaaacgcaaacccaaacgcaaacccaaacgcaaacccaaacgcaaacccaaacgcaaacccaaacgcaaacccaaacgcaaauccaaacgcaaacccaaacgccaacccaaacgcaaacccaaacgcaaacccaaacguagacccaaacgcaaacccaaacgcaaacccaaacgcaaacccaaacgcaaacccaaacgcaaacccaaacgcaaacccaaacgcaaacccaaacgcaaacccaaacgcaaauccaaacgcaaacccaaacgcaaacccaaacgcaaacccaaacgcaaacccaaacgcaaacccaaacgcaaacccaaacgcaaacccaaacgcaaacccaaacgcaaacccauaaggacuaguuauaagacugacuagcccgaugggccucccaacgggcccuccuccccuccuugcaccgagauuaaucaaaggcucuuuucagagccaccaaaaaaaaaaaaaaaaaaaaaaaaaaaaaaaaaaaaaaaaaaaaaaaaaaaaaaaaaaaaaaaaagaauu

SEQ ID NO: 7248 - RNA, 1154 nt, Artificial Sequence
  mRNA Design i-3 (hSL-A64-N5) comprising derived and/or modified sequence from Pf(3D7)__XP_001351122.1__HsALB_Pf-CSP(93-397) (opt6)
aggagaaagcuuaccaugaaauggguaacauucauaucacuccuauuccuauucucaucagcauacucaaaacuaaaacaacccgcagacggaaacccagacccaaacgccaacccaaacguagacccaaacgcaaacccgaacguagacccaaacgcaaaccccaacguagacccaaacgcaaacccaaaugcaaacccaaacgcaaacccaaacgcaaacccaaacgcaaacccaaacgcaaacccaaacgcaaacccaaacgcaaacccaaacgcaaacccaaacgcgaaucccaacgcaaauccaaacgcaaacccaaacgcaaauccaaacgcaaacccgaacgcaaacccaaacgcaaacccaaacgcaaacccaaacguagauccaaacgcaaauccaaacgcaaacccaaacgcaaauccaaacgcaaacccaaacgcaaacccaaacgcaaaccccaacgcaaacccaaacgcaaacccaaacgcaaacccaaacgcaaauccaaacgccaacccaaacgcaaacccaaacgcaaacccaaacgcgaacccaaacgcgaacccaaacgcaaacccaaacgcaaacccaaacgcaaacccaaacaaaaacaaccaagggaacggacaaggacacaacaugccaaacgauccaaacagaaacguagacgaaaacgcaaacgcaaacucagcaguaaaaaacaacaacaacgaagaaccaucagacaaacacauaaaagaauaccuaaacaaaauacaaaacucacucucaacagaauggucaccaugcaguguaacaugcggaaauggaauacaaguacguauaaaaccaggaucagcaaacaaaccaaaagacgaauuagacuacgccaacgauauagaaaaaaaaauaugcaaaauggaaaaaugcagcucagucuucaacguagucaacagcucaauaggacuaauaaugguccucucauucuuauuucuaaacugaggacuaguuauaagacugacuagcccgaugggccucccaacgggcccuccuccccuccuugcaccgagauuaaucaaaggcucuuuucagagccaccaaaaaaaaaaaaaaaaaaaaaaaaaaaaaaaaaaaaaaaaaaaaaaaaaaaaaaaaaaaaaaaaagaauu

SEQ ID NO: 7249 - RNA, 524 nt, Artificial Sequence
  mRNA Design i-3 (hSL-A64-N5) comprising derived and/or modified sequence from Pf(3D7)__XP_001351122.1__HsALB_Pf-CSP(98-192) (opt6)
aggagaaagcuuaccaugaaauggguaacauucauaagccuacuauuccuauucagcucagcauacagcgcagacggaaacccagacccaaacgcaaacccaaacguagacccaaacgcaaacccaaacguagacccaaacgcaaacccaaacguagacccaaacgcaaacccaaacgcaaacccaaacgcaaacccaaacgcaaacccaaacgcaaacccaaacgcaaacccaaacgcaaacccaaacgcaaacccaaacgcaaacccaaacgcaaacccaaacgcaaacccaaacgcaaacccaaacgcaaacccaaacgcaaacccaaacgcaaacccaaacgcaaacccauaaggacuaguuauaagacugacuagcccgaugggccucccaacgggcccuccuccccuccuugcaccgagauuaaucaaaggcucuuuucagagccaccaaaaaaaaaaaaaaaaaaaaaaaaaaaaaaaaaaaaaaaaaaaaaaaaaaaaaaaaaaaaaaaaagaauu

SEQ ID NO: 7250 - RNA, 764 nt, Artificial Sequence
  mRNA Design i-3 (hSL-A64-N5) comprising derived and/or modified sequence from Pf(3D7)__XP_001351122.1__HsALB_Pf-CSP(98-272) (opt6)
aggagaaagcuuaccaugaaauggguaacauucauaucacuacuauuccuauucagcucagccuacagcgcagacggaaacccagacccaaacgcaaacccaaacguagacccaaacgcaaacccaaacgucgacccaaacgcaaacccaaacguagacccaaacgcaaacccaaacgcaaacccaaacgcaaacccaaacgcaaacccaaacgcaaacccaaacgcaaacccaaacgcaaacccaaacgcaaacccaaacgcaaacccaaacgcaaacccaaacgcaaacccaaacgcaaacccaaacgcaaacccaaacgcaaacccaaacgcaaacccaaacgcaaacccaaacgcaaacccaaacguagacccaaaugcaaacccaaacgcaaacccaaacgcaaacccaaacgcaaacccaaacgcaaacccaaacgcaaacccaaacgcaaacccaaacgcaaacccaaacgcaaacccaaacgcaaacccaaacgcaaacccaaacgcgaacccaaacgcaaacccaaacgcaaacccaaacgcaaacccaaacgcaaacccaaaugcaaacccaaacgcaaacccauaaggacuaguuauaagacugacuagcccgaugggccucccaacgggcccuccuccccuccuugcaccgagauuaaucaaaggcucuuuucagagccaccaaaaaaaaaaaaaaaaaaaaaaaaaaaaaaaaaaaaaaaaaaaaaaaaaaaaaaaaaaaaaaaaagaauu

SEQ ID NO: 7251 - RNA, 1070 nt, Artificial Sequence
  mRNA Design i-3 (hSL-A64-N5) comprising derived and/or modified sequence from Pf(3D7)__XP_001351122.1__HsALB_Pf-CSP(98-374) (opt6)
aggagaaagcuuaccaugaaaugggucacauucauaucccuacuauuccuauucucaucagcauauucagcagauggaaacccagacccaaacgccaacccaaacguagacccaaacgcaaacccaaacguagacccaaacgcaaacccaaacguagacccaaacgcaaacccaaacgcaaacccaaacgcaaacccaaacgcaaacccaaacgcaaacccaaacgcaaacccaaacgcaaacccaaacgcaaacccaaacgcaaacccaaacgcaaacccaaacgcaaacccaaaugcaaauccaaacgcaaauccaaacgcaaacccaaacgccaacccaaacgcaaauccaaacgcaaacccaaacguagacccgaacgcaaacccgaacgcaaacccaaacgcaaacccaaaugcaaacccaaacgcaaacccaaacgccaacccaaacgcaaacccaaacgcaaacccaaaugcaaacccaaacgcaaacccaaacgccaacccaaacgcaaacccaaacgcaaacccaaacgcaaacccaaacgcaaacccaaaugcaaacccaaacgcaaacccaaacgcaaacccaaacaaaaacaaccaaggaaauggacaaggccacaacaugccaaacgacccaaacagaaacguagacgaaaacgcaaacgcaaacuccgcagucaaaaacaacaacaacgaagaaccauccgacaaacacauaaaagaauaccucaauaaaauacaaaacucacuaucaacagaaugguccccaugcucaguaacaugcggaaacggaauacaaguaagaauaaaaccaggauccgcaaacaaaccaaaagacgaacuagacuacgcaaacgauauagaaaaaaaaauaugcaaaauggaaaaaugcuaaggacuaguuauaagacugacuagcccgaugggccucccaacgggcccuccuccccuccuugcaccgagauuaaucaaaggcucuuuucagagccaccaaaaaaaaaaaaaaaaaaaaaaaaaaaaaaaaaaaaaaaaaaaaaaaaaaaaaaaaaaaaaaaaagaauu

SEQ ID NO: 7252 - RNA, 1139 nt, Artificial Sequence
  mRNA Design i-3 (hSL-A64-N5) comprising derived and/or modified sequence from Pf(3D7)__XP_001351122.1__HsALB_Pf-CSP(98-397) (opt6)
aggagaaagcuuaccaugaaauggguaaccuucauaucauuacuauuccuuuucagcucggcauacucagcagacggcaacccagacccaaacgcaaacccaaacgucgacccaaaugcgaacccaaacguagacccaaacgcaaacccaaacguagauccaaacgcaaacccaaacgcaaacccaaacgcaaacccaaacgcaaacccaaacgccaacccaaaugcaaacccaaacgcaaaccccaacgcaaacccaaacgcaaacccaaacgcaaacccaaacgcaaaucccaacgcaaauccaaacgcaaacccaaaugcaaacccaaacgccaacccaaacgcaaacccaaacgcaaaccccaaugucgacccaaacgcaaacccaaacgcaaacccaaacgcaaacccaaacgcaaauccaaacgcaaaccccaacgcaaacccaaacgcaaacccaaacgcaaacccaaacgcaaacccaaacgcaaacccaaacgcaaacccaaacgcaaacccaaacgcaaacccaaacgcaaacccaaacgcaaauccaaacgcaaacccaaacgcaaacccaaacgcaaacccaaacaaaaacaaccaaggaaauggacaaggacacaacaugccaaaugaccccaacagaaacgucgacgaaaacgccaacgcaaacagcgcaguaaaaaacaacaacaaugaagaaccaucagacaaacacauaaaagaauaccuaaacaaaauucaaaacucacuaucaaccgaaugguccccaugcucaguaacaugcggaaacgguauacaaguacgaauaaaaccaggaucagcaaacaaaccaaaagacgaacuagacuacgcaaacgacauagaaaaaaaaauaugcaaaauggaaaaaugcucaucaguuuuuaacguagucaauagcucaaucggacucauaaugguacuaucauuucucuuccuaaauuaaggacuaguuauaagacugacuagcccgaugggccucccaacgggcccuccuccccuccuugcaccgagauuaaucaaaggcucuuuucagagccaccaaaaaaaaaaaaaaaaaaaaaaaaaaaaaaaaaaaaaaaaaaaaaaaaaaaaaaaaaaaaaaaaagaauu

SEQ ID NO: 7253 - RNA, 1466 nt, Artificial Sequence
  mRNA Design i-3 (hSL-A64-N5) comprising derived and/or modified sequence from Pf(3D7)__XP_001351122.1__HsALB_Pf-CSP(199-377)_L(PVTN)_HBsAg (opt6)
aggagaaagcuuaccaugaaauggguaacauuuauauccuuacuauuucucuucuccucagcuuacucugacccaaacgcaaaucccaacgcaaacccaaaugcaaacccaaacgcaaauccaaacgcaaacccaaaugcuaaucccaacgcaaacccaaacgcaaaccccaaugccaacccaaacgcuaacccaaacgcaaacccaaacgccaacccaaaugcaaacccaaacgcaaacccaaacgcaaauccaaaugcaaacccaaacgcaaauccaaacgcaaacccaaacaaaaacaaccaaggaaacggacaaggccauaauaugccuaaugaccccaacagaaacguagacgaaaaugcuaacgccaacucagcaguaaaaaacaacaauaacgaagaaccaucagauaaacacauaaaagaauacuuaaacaaaauacaaaauucauuaucaacagaauggucaccaugcucagucaccugcggaaacgguauacaaguacgcauaaaaccaggcucagcaaauaaaccaaaagacgaacuagauuacgcuaacgacauagaaaaaaaaauaugcaaaauggaaaaaugcucaucaguaccaguaacaaauauggaaaacauaacaucaggauuccuaggcccacucuuaguacuacaagcaggauuuuuucuucuaacaagaaucuuaacuauaccccaaucacucgacucaugguggaccucacuaaauuuccucggaggaucuccaguaugccucggacaaaauucacaaucaccaacauccaaucacucacccaccuccugcccaccaaucugcccaggauacagauggaugugcuuacgaagauucauaauauuccuauucauacuacuucuaugcuuaauauuccuucucguccuacucgacuaucaaggaaugcucccuguaugcccacucauaccaggauccacaacaacuaacacaggacccuguaaaacaugcacaacacccgcccaaggaaauucaauguuccccucuugcugcugcacaaaaccaacagacggaaauugcacaugcauuccaauuccaucaucuugggcauuugcaaaauacuuaugggaaugggcaucaguccgauucucgugguuaucuuuacuaguaccauucguucaaugguuuguaggacuuucaccuacaguaugguuaucugcaauauggaugaugugguacuggggaccaucauuauacucaaucguaucaccauuuauaccacuacuacccauauuuuucugccuauggguauacauauaaggacuaguuauaagacugacuagcccgaugggccucccaacgggcccuccuccccuccuugcaccgagauuaaucaaaggcucuuuucagagccaccaaaaaaaaaaaaaaaaaaaaaaaaaaaaaaaaaaaaaaaaaaaaaaaaaaaaaaaaaaaaaaaaagaauu

SEQ ID NO: 7254 - RNA, 1376 nt, Artificial Sequence
  mRNA Design i-3 (hSL-A64-N5) comprising derived and/or modified sequence from Pf(3D7)__XP_001351122.1__Pf-CSP (opt11)
aggagaaagcuuaccaugaugcgaaagcuugcgauccucagcgucuccucauuccuauucguagaagcacuauuccaagaauaccaaugcuacggcucauccucaaacacacgcguacucaacgaacucaacuacgacaacgcaggaacaaaccucuacaacgaacuagagaugaacuacuacggcaaacaagaaaacugguacucucucaaaaaaaacucacgaagccucggcgagaacgacgacggaaacaacgaagacaacgaaaaacuccgcaaaccaaaacacaaaaaacucaaacaacccgccgacggaaacccagacccaaacgcaaacccaaacguagacccaaacgccaaccccaacguagaccccaacgccaacccuaacgucgaccccaaugcaaaccccaacgcgaacccaaacgcaaaccccaacgcaaaccccaacgcaaacccaaacgccaaccccaacgcaaacccaaacgcaaacccuaacgccaacccaaacgccaacccaaacgccaacccaaacgcaaacccgaacgccaaccccaacgccaacccaaacgcaaacccaaacgcaaaccccaacgccaaccccaacguagaccccaacgcaaaccccaacgcaaacccaaacgccaaccccaacgccaaccccaacgccaaccccaacgccaaccccaaugccaacccaaacgcgaaccccaacgcaaacccgaacgcaaacccaaacgcgaacccaaacgcgaacccaaacgccaaccccaacgccaaccccaacgcaaacccaaacgcgaacccaaacgcaaaccccaacgccaacccaaacaaaaacaaccaaggaaacggacaaggccacaacaugccaaacgaccccaaccgcaacguagacgaaaacgccaacgccaacuccgcugucaagaacaacaacaacgaagaaccauccgacaaacacauaaaagaauaccuaaacaaaauccaaaacucccucucaaccgaauggucccccugcuccgucacaugcggaaacggcauccaaguccgaaucaaaccaggcuccgccaacaaacccaaagacgaacuggacuacgccaacgacaucgaaaaaaaaaucugcaaaauggaaaaaugcucauccgucuucaacguggucaacuccuccaucggacuaauaaugguccucuccuuccuauuccuaaacuaaggacuaguuauaagacugacuagcccgaugggccucccaacgggcccuccuccccuccuugcaccgagauuaaucaaaggcucuuuucagagccaccaaaaaaaaaaaaaaaaaaaaaaaaaaaaaaaaaaaaaaaaaaaaaaaaaaaaaaaaaaaaaaaaagaauu

SEQ ID NO: 7255 - RNA, 1307 nt, Artificial Sequence
  mRNA Design i-3 (hSL-A64-N5) comprising derived and/or modified sequence from Pf(3D7)__XP_001351122.1__Pf-CSP(1-374) (opt11)
aggagaaagcuuaccaugaugcgcaaacucgcaauccucuccgucucaucguuccuauucguagaagcacucuuccaagaauaccaaugcuacggcucaagcuccaacacaagaguacucaacgaacucaacuacgacaaugccggaacaaaccuauacaacgagcuagaaaugaacuacuacggcaaacaagaaaacugguacucgcuaaaaaaaaacagcagaagccuaggugaaaacgacgacggaaacaacgaagacaacgaaaaacugcgcaaaccaaaacacaaaaaacuaaaacaacccgcagacggcaacccagacccaaacgcaaacccaaacguagaccccaacgccaacccaaacguagacccaaacgccaacccaaacguagacccaaacgcaaacccgaacgcaaacccaaacgcaaacccaaacgcaaacccaaacgcaaacccaaacgccaaccccaacgcaaauccaaacgcaaaccccaacgcaaaccccaacgccaacccaaacgcaaaccccaacgcgaacccaaacgccaaccccaacgccaacccaaacgcaaacccaaacgcaaacccaaacgccaaccccaacgucgacccaaacgccaacccaaacgcaaaccccaacgccaaccccaacgcaaacccaaacgccaacccgaacgcaaacccgaacgcaaacccaaacgcaaaccccaacgcaaaccccaacgcaaacccaaacgcaaaccccaacgccaaccccaacgccaaccccaacgcaaacccaaacgcaaacccgaacgcaaaccccaacgcaaaccccaacgccaaucccaacaaaaacaaccaaggcaacggacaaggacacaacaugccaaacgaccccaaccgcaacgucgacgaaaacgccaacgccaacuccgcggucaaaaacaacaacaacgaagagcccucagacaaacacauaaaagaauaccuaaacaaaauccaaaacucccucucgacagaauggucccccugcagcgucaccugcggaaacggcauacaaguacgaauaaaacccggcucagccaacaaaccaaaagacgaacuagacuacgccaacgacauagaaaaaaaaauaugcaaaauggaaaaaugcugaggacuaguuauaagacugacuagcccgaugggccucccaacgggcccuccuccccuccuugcaccgagauuaaucaaaggcucuuuucagagccaccaaaaaaaaaaaaaaaaaaaaaaaaaaaaaaaaaaaaaaaaaaaaaaaaaaaaaaaaaaaaaaaaagaauu

SEQ ID NO: 7256 - RNA, 1160 nt, Artificial Sequence
  mRNA Design i-3 (hSL-A64-N5) comprising derived and/or modified sequence from Pf(3D7)__XP_001351122.1__Pf-CSP(1-325) (opt11)
aggagaaagcuuaccaugaugcgcaaacucgcaauccuaucaguaagcucauuccuguucguagaagcacuauuccaagaauaccaaugcuacggcucauccucaaacacaagaguacuaaacgaacuaaacuacgacaacgccggaaccaaccuauacaacgaacucgaaaugaacuacuacggcaaacaagaaaacugguacucacuaaagaaaaacagcagaagccucggcgaaaacgacgacggcaacaacgaagacaacgagaaacugagaaaaccaaaacacaagaaacuaaaacaacccgcggacgggaacccagacccaaaugcaaacccaaacgucgacccaaacgcaaacccaaacguagacccaaacgcaaaccccaacguagaccccaacgcaaacccaaacgcaaacccaaacgcaaacccaaacgcaaacccaaacgcaaaccccaacgcaaacccaaacgcaaacccaaacgcaaaccccaacgccaacccaaacgccaaccccaacgcaaacccaaacgcaaacccaaacgcaaaccccaacgccaacccgaacgcaaacccaaacgcaaacccaaacgcaaaccccaacguagacccaaacgcaaacccaaacgccaaccccaacgcaaacccaaacgcaaacccgaacgcaaaccccaacgcaaaccccaacgcaaacccaaacgcaaaccccaacgcaaauccaaacgcaaacccaaacgcaaacccaaacgccaacccaaacgcaaaucccaacgcaaacccaaacgcaaaccccaacgcaaacccaaacgcaaacccaaacgcaaacccaaacaaaaacaaccaaggaaacggccaaggacacaacaugccaaacgacccaaaccgaaacguagacgaaaacgccaacgccaacagcgcagucaaaaacaacaauaaugaagaacccuccgacaaacacauaaaagaauaccuaaacaaaauccaaaacugaggacuaguuauaagacugacuagcccgaugggccucccaacgggcccuccuccccuccuugcaccgagauuaaucaaaggcucuuuucagagccaccaaaaaaaaaaaaaaaaaaaaaaaaaaaaaaaaaaaaaaaaaaaaaaaaaaaaaaaaaaaaaaaaagaauu

SEQ ID NO: 7257 - RNA, 1376 nt, Artificial Sequence
  mRNA Design i-3 (hSL-A64-N5) comprising derived and/or modified sequence from Pf(3D7)__XP_001351122.1__HsALB_Pf-CSP(19-397) (opt11)
aggagaaagcuuaccaugaaaugggucaccuucauaucccuccuauuccucuucucaucagccuacucccucuuccaggaauaccaaugcuacggaucguccucaaacacuagaguacucaaugaauuaaacuacgacaacgccggcaccaaccucuacaacgaacucgaaaugaacuacuacggaaaacaagaaaacugguacucacucaaaaaaaacucucgaucccucggcgaaaacgacgacggcaacaacgaagacaacgagaaacuacgcaaaccaaaacacaaaaaauuaaaacaacccgccgacggcaaccccgaccccaacgccaaccccaacguagaccccaacgcgaaccccaacgucgacccaaacgccaaccccaacguggaccccaacgccaacccaaacgccaaccccaacgccaacccaaacgcaaaccccaacgccaacccaaacgccaaccccaacgcaaacccaaacgcgaacccaaacgcaaacccaaacgccaacccaaacgcaaacccaaacgcgaacccaaacgccaacccaaacgccaaccccaacgcaaacccaaacgccaacccaaacgccaacccaaacguagacccaaacgcgaaccccaacgcuaacccaaacgcaaacccaaacgccaacccaaacgccaacccuaacgcaaacccaaacgccaaccccaacgccaaccccaacgccaaccccaacgcaaacccaaacgccaacccaaacgccaaccccaacgccaacccaaacgcaaacccaaacgcaaacccaaacgcaaaccccaacgccaacccaaacgccaacccaaacaaaaauaaccaaggcaaugggcaaggccacaacaugccaaacgaccccaaccgcaaugucgacgaaaacgccaacgccaacucugcaguaaaaaacaauaacaacgaagaacccucagacaaacacaucaaagaauaccucaacaagauccaaaauucccucuccacagaauggucccccugcagcguaaccugcggcaacggcauccaaguccgcaucaaacccggcuccgccaacaaaccgaaagacgaacuagacuacgccaacgacauagaaaaaaaaaucugcaaaauggaaaaaugcagcuccgucuucaacgucgucaacagcuccaucggccucaucaugguccucuccuuccuguuccucaacuaaggacuaguuauaagacugacuagcccgaugggccucccaacgggcccuccuccccuccuugcaccgagauuaaucaaaggcucuuuucagagccaccaaaaaaaaaaaaaaaaaaaaaaaaaaaaaaaaaaaaaaaaaaaaaaaaaaaaaaaaaaaaaaaaagaauu

SEQ ID NO: 7258 - RNA, 1394 nt, Artificial Sequence
  mRNA Design i-3 (hSL-A64-N5) comprising derived and/or modified sequence from Pf(3D7)__XP_001351122.1__HsIns-iso1_Pf-CSP(19-397) (opt11)
aggagaaagcuuaccauggcacucuggaugagacuccucccccuccucgcacuccucgcccuauggggcccagacccagcggcagcccucuuccaagaauaccaaugcuacggcucauccuccaacacccgaguccucaaugaacuaaacuacgacaacgccggcaccaaccuauacaacgaacuagaaaugaacuacuacggcaaacaagaaaacugguacucccucaaaaaaaauucacgcucccuaggugagaacgacgacggaaacaacgaagacaacgaaaaacuccgaaaacccaaacacaaaaaacuaaaacaaccagcagacggcaaccccgaccccaacgcaaaccccaacguagacccaaacgcgaaccccaacgucgauccaaacgccaacccaaacguugaccccaacgcgaaccccaacgcaaacccaaacgcaaacccuaacgcgaaccccaacgcaaaccccaacgccaaccccaacgccaaccccaacgccaacccaaacgcaaaccccaacgccaaccccaacgcaaacccaaacgcaaacccgaacgcaaaccccaacgccaacccaaacgcaaacccaaacgccaacccaaacgcaaaccccaacguagacccaaacgccaaucccaacgcgaaccccaacgcaaacccaaacgcgaacccaaacgccaacccaaacgcaaacccgaacgccaacccaaacgccaaccccaacgcaaaccccaacgcaaacccaaacgccaacccaaacgcaaacccaaacgcaaaccccaacgccaaccccaacgcaaacccaaaugccaaccccaacgccaaccccaacgcaaacccaaacaaaaacaaccaaggaaacggccaaggccacaacaugccgaacgaccccaaccgaaacgucgacgaaaacgcaaacgccaacucagcggucaaaaacaacaacaacgaagaacccucagacaaacacaucaaagaauaccuaaacaagauccagaacucucucucaacagaauggucccccugcuccguaacaugcggcaacggcauccaaguacgaaucaaaccgggaucagccaauaaacccaaagacgaacucgacuacgccaacgacaucgaaaaaaaaauaugcaaaauggaaaaaugcagcucagucuucaacguagucaacagcuccauaggccucaucaugguacucuccuuccuguuccuaaacuaaggacuaguuauaagacugacuagcccgaugggccucccaacgggcccuccuccccuccuugcaccgagauuaaucaaaggcucuuuucagagccaccaaaaaaaaaaaaaaaaaaaaaaaaaaaaaaaaaaaaaaaaaaaaaaaaaaaaaaaaaaaaaaaaagaauu

SEQ ID NO: 7259 - RNA, 1373 nt, Artificial Sequence
  mRNA Design i-3 (hSL-A64-N5) comprising derived and/or modified sequence from Pf(3D7)__XP_001351122.1__HsSPARC_Pf-CSP(19-397) (opt11)
aggagaaagcuuaccaugcgcgccuggauauucuuccuccuaugccuagcaggacgcgcccucgcacucuuccaagaauaccaaugcuacggcucauccucaaacacccgcguacuuaacgaacuaaacuacgacaacgccggaaccaaccuauacaacgaacucgaaaugaacuacuacgguaaacaagaaaacugguacucccucaaaaaaaacagccgaagccuaggagaaaacgacgacggaaacaacgaagacaacgaaaaacugcgcaaacccaaacacaaaaaacucaaacaacccgcagacgggaacccagacccaaacgcaaacccaaacguggacccaaacgccaacccuaacguagaccccaacgcaaaccccaacgucgacccuaaugcaaacccaaacgccaaccccaacgcgaacccaaacgcaaaccccaacgcuaacccgaacgccaaccccaacgccaacccgaacgcaaacccaaacgcaaacccaaacgcgaacccaaacgcaaacccaaacgccaaccccaacgcgaacccaaacgccaauccaaacgccaacccaaacgcaaacccaaacgccaaccccaacguagacccaaacgccaacccaaacgcgaacccaaacgcaaaccccaacgcaaacccaaacgcaaacccaaacgccaacccuaacgcaaacccaaacgccaaccccaacgccaacccaaacgcaaacccaaacgccaacccaaacgccaaccccaacgcaaacccgaacgcaaaccccaacgcaaacccaaacgcaaacccaaacgcgaacccgaacgccaacccaaauaagaacaaccaaggaaacggacaaggccacaacaugccaaacgaccccaaccgcaacgucgacgaaaacgcaaaugccaacuccgcagucaaaaacaacaauaacgaagaacccucggacaaacacaucaaagaauaccucaacaagauccaaaacucacucuccaccgaauggucacccugcagcguaacuugcggcaacggcauccaaguccgcauaaaaccaggcuccgcaaacaaacccaaagacgaacucgacuaugccaacgacaucgaaaaaaaaauaugcaaaauggaaaaaugcagcucagucuucaacguagucaacagcucuaucggacuaauaaugguacucuccuuccuauucuuaaacuaaggacuaguuauaagacugacuagcccgaugggccucccaacgggcccuccuccccuccuugcaccgagauuaaucaaaggcucuuuucagagccaccaaaaaaaaaaaaaaaaaaaaaaaaaaaaaaaaaaaaaaaaaaaaaaaaaaaaaaaaaaaaaaaaagaauu

SEQ ID NO: 7260 - RNA, 1376 nt, Artificial Sequence
  mRNA Design i-3 (hSL-A64-N5) comprising derived and/or modified sequence from Pf(3D7)__XP_001351122.1__IgE_Pf-CSP(19-397) (opt11)
aggagaaagcuuaccauggacuggacauggauccucuuccucgucgccgcggccacacgcguacacucacucuuccaagaauaucaaugcuacggcucaagcucgaacacgcgcguacucaacgaacuaaacuacgacaacgccggcaccaaccuauacaacgaacucgaaaugaacuacuacggcaaacaagaaaacugguacucacuuaagaaaaauucacgaucccucggagaaaacgacgaugggaacaacgaagacaacgaaaaacuacgcaaacccaaacacaagaaacuuaaacaacccgcagacggcaacccagacccaaacgcaaaccccaacguagaccccaacgcaaacccaaacguagacccaaacgccaacccaaacguagacccaaacgcgaacccaaacgccaacccaaacgccaaccccaacgcaaacccaaacgcaaauccaaacgcaaacccaaaugcaaacccgaacgccaauccaaacgcaaaccccaacgcaaacccaaacgcaaaccccaaugccaacccaaacgcaaaccccaacgcaaaccccaacgcaaaccccaacgcaaacccaaacgcgaacccaaacguagaccccaacgccaaccccaacgccaacccaaacgcaaacccaaacgccaacccaaacgccaaccccaacgcaaaccccaacgcaaacccgaacgcaaacccaaacgcaaacccaaacgcaaacccgaacgcaaacccuaacgcgaaccccaacgccaaccccaacgcaaacccaaacgcaaacccaaacgccaacccaaacgcaaacccaaacgcaaacccaaacaaaaacaaccaaggaaacgggcaaggacauaacaugccgaacgaccccaaccgcaacguagacgaaaacgccaacgccaacagcgcagucaaaaacaacaacaacgaagaacccuccgacaaacacaucaaagaauaccuaaacaaaauccagaacucacuauccaccgaauggucccccugcagcgugaccugcggcaacggcauacaaguccgcauaaaaccaggcuccgccaacaaacccaaagacgaacuagacuacgccaacgacauagaaaagaaaauaugcaaaauggaaaaaugcagcucagucuucaauguagucaacuccuccaucggacucauaaugguccuaucauuccucuuccuaaacuaaggacuaguuauaagacugacuagcccgaugggccucccaacgggcccuccuccccuccuugcaccgagauuaaucaaaggcucuuuucagagccaccaaaaaaaaaaaaaaaaaaaaaaaaaaaaaaaaaaaaaaaaaaaaaaaaaaaaaaaaaaaaaaaaagaauu

SEQ ID NO: 7261 - RNA, 1541 nt, Artificial Sequence
  mRNA Design i-3 (hSL-A64-N5) comprising derived and/or modified sequence from Pf(3D7)__XP_001351122.1__Pf-CSP_L(G4SG4)_TM domain HA (opt11)
aggagaaagcuuaccaugaugcgcaaacucgccauccucagcgucagcucguuccucuucgucgaagcacuauuccaagaauaccaguguuacggcucauccucaaacacacgcgugcucaacgaacuaaacuacgacaacgccggcaccaaccucuacaacgaacuagaaaugaacuauuacggcaagcaagaaaacugguacucacucaaaaaaaacagccgaagccuaggcgagaacgacgacgggaacaacgaagacaacgaaaaacuacgcaaacccaagcacaaaaaacugaaacaaccagccgacggaaauccagaccccaacgcaaacccgaacguagaccccaacgcgaaccccaacguggacccgaacgcaaacccgaacguagacccaaacgcaaacccaaacgcgaacccaaacgcaaacccaaacgcuaacccaaacgcaaaccccaacgccaaccccaacgcgaacccaaacgcaaacccaaacgcaaacccaaacgcaaacccgaacgcaaacccaaacgccaacccaaacgcgaacccaaacgccaacccaaacgcaaacccaaacgcaaacccaaacgcaaacccaaacguagacccgaacgccaacccgaaugcaaacccaaacgcaaacccgaacgcaaacccaaacgcgaacccgaacgccaacccaaacgcaaacccgaacgcaaaccccaacgccaacccaaacgcaaaccccaacgcaaaccccaacgcaaacccgaacgcaaacccaaacgcaaacccaaacgccaaccccaacgccaaccccaacgcaaacccgaacgccaacccaaacaaaaacaaccaaggcaacgggcaaggacacaacaugccaaacgaccccaaccgaaacgucgacgaaaacgccaacgccaacuccgcagucaaaaacaacaacaacgaagaacccucagacaaacacauaaaagaauaccucaacaaaauccaaaacucacucucaaccgaguggucacccugcagugugaccuguggcaacggaauacaaguacgcauaaaacccggaucagccaacaaaccgaaagacgaacuagacuacgccaacgacauagaaaaaaaaauaugcaaaauggagaaaugcagcucugucuucaacgucgucaacagcucaaucggacucauaaugguccucuccuuccuauuccucaacggcggagggggcucaggcggcggaggaaaauuagaauccaccagaaucuaucagauucucgccauauacagcacagucgcaagcucgcuuguccuugucguaucacuaggcgcaaucucauucuggaugugcuccaacggaagccugcaaugccgcauuugcauauaaggacuaguuauaagacugacuagcccgaugggccucccaacgggcccuccuccccuccuugcaccgagauuaaucaaaggcucuuuucagagccaccaaaaaaaaaaaaaaaaaaaaaaaaaaaaaaaaaaaaaaaaaaaaaaaaaaaaaaaaaaaaaaaaagaauu

SEQ ID NO: 7262 - RNA, 1415 nt, Artificial Sequence
  mRNA Design i-3 (hSL-A64-N5) comprising derived and/or modified sequence from Pf(3D7)__XP_001351122.1__Pf-CSP(199-377)_L(PVTN)_HBsAg (opt11)
aggagaaagcuuaccauggaccccaacgccaaccccaacgccaaccccaacgccaaucccaacgcuaaccccaacgccaaccccaacgcaaaccccaacgccaacccaaacgccaaccccaacgcaaaccccaacgccaaucccaaugccaaccccaacgccaaccccaacgcgaaccccaacgccaaccccaacgcaaacccaaacgccaaccccaacgccaaccccaacgccaaccccaacaaaaacaaccaaggcaacggccaaggccacaacaugcccaacgaccccaaccgcaacguagacgagaacgccaacgccaacagcgcugucaaaaacaacaacaacgaggaacccuccgacaaacacaucaaagaauaccuuaacaaaauccaaaacucucucuccaccgaguggucccccugcucagucacaugcggcaacggcauacaaguucguaucaaacccggcucagcaaacaaacccaaagacgaacucgacuacgcaaacgacauagaaaagaaaaucugcaaaauggaaaaauguucauccguccccgucaccaacauggaaaacaucacuuccggauuccucgguccccuacucguacuccaagccggcuucuuccuccucacccgcauccucaccaucccccaaucacuugacuccugguggaccucccucaacuuccucggcggcucccccgucugccuaggccaaaacagccaaucccccacuagcaaccacucccccacauccugcccacccaucugccccggauaucgauggaugugccuucgccgauucauaaucuuccucuucauccuccuacucugccucaucuuccuccucguccuucuagauuaccaaggcaugcuccccgucugcccccuuauccccggcuccaccaccacaaacaccggccccugcaaaaccugcacaacccccgcccaaggcaauagcauguuccccuccugcugcugcacuaaaccaacagacggcaacuguaccugcaucccaaucccaucaucaugggccuucgccaaauaccucugggaaugggcaucuguacgauucuccuggcucucccuucucguacccuucguccagugguucgucggccucucccccaccguauggcuauccgccaucuggaugaugugguacuggggccccucccuauacuccaucgucuccccauucauaccacuccuacccaucuucuucugccucugggucuacaucugaggacuaguuauaagacugacuagcccgaugggccucccaacgggcccuccuccccuccuugcaccgagauuaaucaaaggcucuuuucagagccaccaaaaaaaaaaaaaaaaaaaaaaaaaaaaaaaaaaaaaaaaaaaaaaaaaaaaaaaaaaaaaaaaagaauu

SEQ ID NO: 7263 - RNA, 1457 nt, Artificial Sequence
  mRNA Design i-3 (hSL-A64-N5) comprising derived and/or modified sequence from Pf(3D7)__XP_001351122.1__Pf-CSP(199-387)_L(PVTN)_HBsAg (opt11)
aggagaaagcuuaccaugauggcccccgaccccaacgcaaauccaaacgcaaaccccaacgccaacccuaacgcaaaccccaacgccaacccaaacgccaaucccaacgccaacccuaacgccaaccccaacgcaaaccccaacgccaaccccaacgccaacccuaacgcaaaccccaacgccaacccaaacgcaaaccccaacgccaaccccaacgccaaccccaacgcaaacccaaacgcaaaccccaacaaaaacaaccaaggaaacggacaaggccacaacaugccuaacgaccccaaucgcaacgucgacgaaaacgcaaacgccaacuccgccgucaaaaacaacaacaacgaagaacccucugacaaacacaucaaagaauaccucaacaagauccaaaacucccuauccaccgaauggucccccugcuccgucacuugcgguaauggcauccaaguccgcauaaaaccaggauccgcaaacaaacccaaagacgaacuagacuacgccaacgacauagaaaagaaaaucugcaaaauggaaaaaugcuccucagucuucaaugucguaaacuccuccauuggccuaggccccgucaccaacauggaaaacauuaccuccggauuccucgguccucuccucguccuccaagccggauucuuucuccucacacgaauccucacuaucccucaaucccuggacucaugguggaccucccucaacuuccugggcggcucccccgucugccucggccaaaacagccaauccccaaccuccaaucacucccccacaagcugcccucccauaugccccggcuaccgcuggaugugccuccgucgcuucaucauauuccucuucauacuucuccucugccucaucuuccuccuuguccugcuagacuaccaaggcaugcuccccgucugcccacucauccccgguuccaccacaacaaacaccggccccugcaaaacaugcaccacacccgcccaagguaacuccauguuccccuccugcugcugcaccaaaccaaccgacggcaacugcacuugcauucccauccccucauccugggccuucgccaaauaccucugggaaugggcauccguccguuucucauggcuaucucuccuaguaccauucguacaaugguucguuggccucucccccaccguauggcucuccgccauauggaugaugugguacuggggcccuucacuuuacuccaucgucucacccuucaucccacuccuacccaucuucuucugccuuuggguauacaucuaaggacuaguuauaagacugacuagcccgaugggccucccaacgggcccuccuccccuccuugcaccgagauuaaucaaaggcucuuuucagagccaccaaaaaaaaaaaaaaaaaaaaaaaaaaaaaaaaaaaaaaaaaaaaaaaaaaaaaaaaaaaaaaaaagaauu

SEQ ID NO: 7264 - RNA, 641 nt, Artificial Sequence
  mRNA Design i-3 (hSL-A64-N5) comprising derived and/or modified sequence from Pf(3D7)__XP_001351122.1__HsALB_Pf-CSP(19-152) (opt11)
aggagaaagcuuaccaugaaaugggucaccuucaucucccuccucuuccucuucuccagcgcauacucccucuuccaagaauaccaaugcuacggcuccuccuccaacacccgcguccucaacgaacucaacuacgacaacgccggcaccaaccucuacaacgaacucgaaaugaacuacuacggcaaacaagaaaacugguacucccucaaaaaaaacucccgcucccuaggcgaaaacgacgacggaaacaacgaagacaacgaaaaacuccgcaaacccaaacacaaaaaacucaaacaacccgccgacggaaaccccgaccccaacgccaacccaaacgucgaccccaacgccaaccccaacgucgaccccaacgccaaccccaacgucgaccccaacgccaaccccaacgcaaacccaaacgcaaacccaaacgccaaccccaacgccaaccccaacgccaaccccuaaggacuaguuauaagacugacuagcccgaugggccucccaacgggcccuccuccccuccuugcaccgagauuaaucaaaggcucuuuucagagccaccaaaaaaaaaaaaaaaaaaaaaaaaaaaaaaaaaaaaaaaaaaaaaaaaaaaaaaaaaaaaaaaaagaauu

SEQ ID NO: 7265 - RNA, 761 nt, Artificial Sequence
  mRNA Design i-3 (hSL-A64-N5) comprising derived and/or modified sequence from Pf(3D7)__XP_001351122.1__HsALB_Pf-CSP(19-192) (opt11)
aggagaaagcuuaccaugaaauggguaaccuucauaucccuccucuuccuauucucgagcgccuacucccucuuccaagaauaccaaugcuacggcucauccuccaacacccgcguccucaacgaacucaacuacgacaacgccggcaccaaccucuacaacgaacuagagaugaacuacuacggcaaacaagaaaacugguacucacucaaaaaaaacucccgaucccuaggagaaaacgacgacggcaacaacgaagacaacgaaaaacuacgaaaacccaaacacaaaaaacucaaacaacccgccgacggcaaccccgaccccaacgccaaccccaacgucgaccccaacgccaacccaaacguagaccccaacgccaaccccaacgucgacccaaacgccaaccccaacgccaaccccaacgccaacccaaacgcaaacccaaacgcaaacccaaacgccaacccaaacgccaaccccaacgccaaccccaacgcaaaccccaacgcaaaccccaacgccaacccaaacgcaaaccccaacgccaacccaaacgccaacccaaacgccaaccccaacgcaaaccccuaaggacuaguuauaagacugacuagcccgaugggccucccaacgggcccuccuccccuccuugcaccgagauuaaucaaaggcucuuuucagagccaccaaaaaaaaaaaaaaaaaaaaaaaaaaaaaaaaaaaaaaaaaaaaaaaaaaaaaaaaaaaaaaaaagaauu

SEQ ID NO: 7266 - RNA, 1001 nt, Artificial Sequence
  mRNA Design i-3 (hSL-A64-N5) comprising derived and/or modified sequence from Pf(3D7)__XP_001351122.1__HsALB_Pf-CSP(19-272) (opt11)
aggagaaagcuuaccaugaaauggguaaccuucaucucccuccucuuccuauucucaucagcauacucacucuuccaagaauaccaaugcuacggcucgagcucaaacacacgcguacucaacgaacugaacuacgacaacgccggaaccaaccucuacaaugaacucgaaaugaacuacuacggcaaacaagagaacugguacucacucaaaaaaaacagcagaagccucggagaaaacgacgacggaaacaacgaagacaacgaaaaacuccgcaaacccaagcacaaaaaacuaaaacaacccgcagacggaaaccccgaccccaacgcaaacccgaacgucgacccaaacgccaacccaaacguagaccccaacgcgaacccaaacguagacccaaacgccaacccaaacgcaaaccccaacgccaaccccaacgcaaacccaaacgccaacccaaacgcaaaccccaaugcaaaccccaacgcaaacccaaacgccaaccccaacgcaaacccaaacgcaaacccaaacgcaaacccaaacgcaaacccaaacgcgaacccaaacgcaaacccaaacgcaaacccgaacgcaaacccaaacguagacccaaacgcaaaccccaacgccaacccaaacgcaaacccaaacgcaaacccaaacgcaaacccaaacgcgaacccaaacgccaacccaaacgcaaacccaaacgcaaacccaaacgcaaacccaaacgcaaacccaaacgcaaacccaaacgcaaacccgaacgcgaacccaaacgcaaacccaaacgcgaacccgaacgcaaaccccaacgcaaacccauaaggacuaguuauaagacugacuagcccgaugggccucccaacgggcccuccuccccuccuugcaccgagauuaaucaaaggcucuuuucagagccaccaaaaaaaaaaaaaaaaaaaaaaaaaaaaaaaaaaaaaaaaaaaaaaaaaaaaaaaaaaaaaaaaagaauu

SEQ ID NO: 7267 - RNA, 1163 nt, Artificial Sequence
  mRNA Design i-3 (hSL-A64-N5) comprising derived and/or modified sequence from Pf(3D7)__XP_001351122.1__HsALB_Pf-CSP(19-272)_L(AAY)_Pf-CSP(310-3 27)_L(AAY)_Pf-CSP(346-375) (opt11)
aggagaaagcuuaccaugaaaugggucaccuucaucucacuccuauuccuauucuccuccgcauacucacucuuccaagaauaccagugcuacggaucaagcuccaacacacgcguacuaaacgaacugaacuacgacaacgccggaaccaaccucuacaacgaacucgaaaugaauuacuacggcaaacaagagaacugguacucacucaaaaaaaacagcagaucccuaggcgaaaacgacgacggaaacaacgaagacaacgaaaaacuacgcaaacccaaacacaaaaaacuaaaacaacccgcagacggaaacccagauccaaacgcaaacccaaacguagacccaaacgccaacccaaacguagacccaaacgcaaacccaaacguagaccccaacgcaaacccaaacgcaaacccgaacgccaacccaaacgcaaaccccaacgccaacccaaacgcaaacccaaacgcaaacccaaacgcaaacccaaacgccaaccccaacgcgaacccaaacgcaaacccuaacgccaacccaaacgcaaacccaaacgcaaacccgaacgcaaacccaaacgcaaacccaaacgcaaacccgaacguagacccaaacgcaaacccaaacgcaaacccaaacgcaaacccaaacgccaacccaaacgccaacccaaacgcaaaccccaacgcaaaccccaacgcgaacccaaacgccaaccccaacgcaaacccaaacgccaacccaaacgccaacccgaacgcaaacccaaacgccaacccaaacgccaacccgaacgcaaacccaaacgccaacccaaacgccaacccagccgcguacgaacccucagauaaacacauaaaagaauaccucaacaaaauccaaaacucacuagcagccuacaucaaaccaggauccgccaacaaacccaaggacgaacucgacuacgcaaacgacaucgaaaaaaaaaucugcaaaauggaaaaaugcucaugaggacuaguuauaagacugacuagcccgaugggccucccaacgggcccuccuccccuccuugcaccgagauuaaucaaaggcucuuuucagagccaccaaaaaaaaaaaaaaaaaaaaaaaaaaaaaaaaaaaaaaaaaaaaaaaaaaaaaaaaaaaaaaaaagaauu

SEQ ID NO: 7268 - RNA, 1124 nt, Artificial Sequence
  mRNA Design i-3 (hSL-A64-N5) comprising derived and/or modified sequence from Pf(3D7)__XP_001351122.1__HsALB_Pf-CSP(19-272)_L(AAY)_Pf-CSP(346-3 65)_L(AAY)_P2 (opt11)
aggagaaagcuuaccaugaaaugggucaccuucaucucacuccuauuccuauucucgagcgcauacucacucuuccaagaauaccaaugcuauggcuccagcucaaacacacgcguccuaaacgaacucaacuacgacaacgccggaacaaaccucuacaacgaacucgaaaugaacuacuacggcaaacaagaaaacugguacucgcucaaaaaaaacucccgaagucuaggcgaaaacgacgacggaaacaacgaagacaacgaaaaacuacgcaaacccaaacacaaaaaacuaaaacaacccgcagacggaaaccccgacccaaacgcaaaccccaacguagacccaaacgcaaaccccaacguagacccaaacgcaaacccgaacguagacccaaacgccaacccaaacgccaaccccaacgcaaacccaaacgccaaccccaacgcaaacccaaacgcaaacccaaacgcaaacccaaacgcaaacccaaacgccaaccccaacgccaacccaaacgccaaccccaacgcgaaccccaacgcgaacccaaacgccaacccaaacgcaaaccccaacgcaaacccaaacgcaaacccaaacgucgacccaaacgcaaacccaaacgcaaacccgaacgcaaacccaaacgcaaaccccaacgccaacccaaacgcgaacccaaacgccaacccaaacgccaacccaaacgcaaacccaaacgccaacccaaacgcaaacccaaacgcaaaccccaacgcaaaccccaacgcaaacccaaacgccaaccccaacgcaaaccccaacgcaaacccaaacgccaacccagccgcauacauaaaacccggcuccgccaacaaaccaaaagacgaacuagacuacgccaacgacauagaagcagccuaccaauacaucaaagccaacagcaaauucauaggaauaaccgagcuauaaggacuaguuauaagacugacuagcccgaugggccucccaacgggcccuccuccccuccuugcaccgagauuaaucaaaggcucuuuucagagccaccaaaaaaaaaaaaaaaaaaaaaaaaaaaaaaaaaaaaaaaaaaaaaaaaaaaaaaaaaaaaaaaaagaauu

SEQ ID NO: 7269 - RNA, 1118 nt, Artificial Sequence
  mRNA Design i-3 (hSL-A64-N5) comprising derived and/or modified sequence from Pf(3D7)__XP_001351122.1__HsALB_Pf-CSP(19-272)_L(AAY)_Pf-CSP(346-3 65)_L(AAY)_PADRE (opt11)
aggagaaagcuuaccaugaaauggguaaccuucaucucgcuacuguuccucuucucauccgcauacucccucuuccaagaauaccaaugcuacggcucauccucaaacacacgaguacuaaacgaacucaacuacgacaacgccggaaccaaccuauacaacgaacucgaaaugaacuacuacggcaaacaagaaaacugguacucacucaaaaaaaacucccgaucccucggcgaaaacgacgacggaaacaacgaagacaacgaaaaacugagaaaacccaaacacaaaaaacuaaaacaaccagccgacggcaacccagaccccaacgcaaaccccaacguagacccaaacgccaaccccaacguagacccaaacgcaaacccaaacguagaccccaacgccaacccaaacgccaacccaaacgccaaccccaacgcaaacccaaacgcaaacccaaacgcaaacccaaacgccaacccaaacgcaaacccaaacgccaacccgaacgcaaaccccaacgcaaacccaaacgcaaaccccaacgccaacccaaacgcaaacccaaacgcaaaccccaacgcaaacccaaaugcgaacccaaacguggacccgaacgcaaaccccaacgccaacccaaacgcaaaccccaacgccaaccccaacgccaaccccaacgcaaaccccaacgccaaccccaacgccaacccaaacgccaacccaaacgcgaacccaaacgcaaaccccaacgcaaacccaaacgcaaacccaaacgcaaacccaaacgcaaaccccaacgcaaacccaaacgcaaacccaaacgcaaaccccgcagccuacauuaaaccaggcuccgccaacaaacccaaagacgaacucgacuacgccaacgacauagaagcagccuacgccaaauucguagccgcauggacacucaaagccgcagccuaaggacuaguuauaagacugacuagcccgaugggccucccaacgggcccuccuccccuccuugcaccgagauuaaucaaaggcucuuuucagagccaccaaaaaaaaaaaaaaaaaaaaaaaaaaaaaaaaaaaaaaaaaaaaaaaaaaaaaaaaaaaaaaaaagaauu

SEQ ID NO: 7270 - RNA, 1175 nt, Artificial Sequence
  mRNA Design i-3 (hSL-A64-N5) comprising derived and/or modified sequence from Pf(3D7)__XP_001351122.1__HsALB_Pf-CSP(19-272)_L(G4S)_Pf-CSP(310-3 27)_L(G4S)_Pf-CSP(346-375) (opt11)
aggagaaagcuuaccaugaaaugggucaccuucaucucccuacuauuccucuucucaucagccuacucacucuuccaagaguaccaaugcuacggcucaagcucaaacacacgcguacucaacgaacuaaacuacgacaacgcaggcaccaaccucuacaacgaacucgagaugaacuacuacggcaaacaagaaaacugguacucacucaaaaaaaacucccgcagccucggcgaaaacgacgacggcaacaacgaagauaacgagaaacuacgcaaacccaaacacaaaaaacuaaaacaacccgccgacggaaacccagacccaaacgccaacccaaacguagacccaaacgcaaacccaaacguagacccaaacgccaaccccaacguagacccaaacgccaacccaaacgccaacccaaacgcaaacccaaacgcaaacccaaacgcgaacccaaacgcaaaccccaacgccaacccaaacgcaaacccaaacgccaaccccaacgcaaacccaaacgcaaaccccaacgcaaacccaaacgccaaccccaacgcaaaccccaacgcaaacccaaacgcaaacccaaacgcaaacccaaacgucgacccaaacgcaaaccccaacgcaaacccaaacgcaaacccaaacgccaacccaaacgcaaacccaaacgccaacccaaacgcaaaccccaacgcaaaccccaacgccaacccaaacgcaaaccccaacgcgaacccaaacgcaaacccaaacgcaaacccaaacgcaaaccccaacgcaaaccccaacgcaaacccaaacgcaaacccaaacgcaaacccaggcggcggcggaagcgaacccucggacaaacacauaaaagaauaccucaacaaaauccaaaacucccucggaggcggaggcuccaucaaacccggaagcgcaaacaaacccaaagacgaacucgacuacgcaaacgacaucgagaaaaaaauaugcaaaauggaaaaaugcucauaaggacuaguuauaagacugacuagcccgaugggccucccaacgggcccuccuccccuccuugcaccgagauuaaucaaaggcucuuuucagagccaccaaaaaaaaaaaaaaaaaaaaaaaaaaaaaaaaaaaaaaaaaaaaaaaaaaaaaaaaaaaaaaaaagaauu

SEQ ID NO: 7271 - RNA, 1160 nt, Artificial Sequence
  mRNA Design i-3 (hSL-A64-N5) comprising derived and/or modified sequence from Pf(3D7)__XP_001351122.1__HsALB_Pf-CSP(19-272)_L(G4S)_Pf-CSP(310-3 27)_Pf-CSP(346-375) (opt11)
aggagaaagcuuaccaugaaauggguaaccuucaucucacuccuauuccucuucuccuccgcauacucgcucuuccaagaauaccaaugcuacggcucaagcucaaacacccgcguccucaacgaacucaacuacgacaacgccgguaccaaccuauacaacgaacucgaaaugaacuacuacggcaaacaagaaaacugguacucacucaaaaaaaacuccaggucccuaggagaaaacgacgauggcaacaacgaagacaacgaaaaacuccgaaagccaaaacacaaaaaacuaaaacagcccgcagacggcaacccagacccaaacgcaaacccaaacguagacccaaacgcgaaccccaacguagacccaaacgcaaacccaaacguagacccaaacgcaaaccccaacgcaaacccaaacgcaaaccccaacgcaaaccccaacgcaaacccaaacgcaaacccaaacgcaaacccaaacgcaaacccaaacgcaaaccccaacgccaaccccaacgcaaacccaaacgcaaacccaaacgcaaacccaaacgcaaacccaaacgcaaaccccaacgccaacccaaacgcaaacccaaacguagacccaaacgcaaacccaaacgcaaacccaaacgcaaaccccaacgccaacccaaacgcaaacccaaacgcaaacccaaacgcaaacccaaacgcaaauccaaacgcuaacccaaacgcaaacccgaacgcaaaccccaaugcaaaccccaacgcaaacccaaacgccaacccaaacgcaaacccaaacgcgaacccaaacgcaaacccaaacgcaaacccaggcggaggcggauccgaacccuccgacaaacacauaaaagaauaccuaaacaaaauccaaaacucucucauaaaacccggaucagccaacaaaccaaaagacgaacuagacuacgccaaugacauagaaaaaaaaauaugcaagauggaaaaaugcagcuaaggacuaguuauaagacugacuagcccgaugggccucccaacgggcccuccuccccuccuugcaccgagauuaaucaaaggcucuuuucagagccaccaaaaaaaaaaaaaaaaaaaaaaaaaaaaaaaaaaaaaaaaaaaaaaaaaaaaaaaaaaaaaaaaagaauu

SEQ ID NO: 7272 - RNA, 1160 nt, Artificial Sequence
  mRNA Design i-3 (hSL-A64-N5) comprising derived and/or modified sequence from Pf(3D7)__XP_001351122.1__HsALB_Pf-CSP(19-325) (opt11)
aggagaaagcuuaccaugaaauggguaaccuucaucucacuccuguuccuauucucauccgcauacucacucuuccaagaauaccaaugcuacggcucgucuucaaacacccgcguacucaacgaacucaacuacgacaacgccggaaccaaccucuacaacgaacucgaaaugaacuacuacggcaaacaagaaaacugguacucacucaaaaaaaacagccgaagccuaggcgaaaacgacgacggaaacaaugaagacaacgaaaaacuccgcaaacccaaacacaaaaaacucaaacaaccagcagacggaaaccccgacccgaacgcaaacccaaacguagacccaaacgcaaacccaaacguagacccaaacgcgaacccaaacguagaccccaacgcaaacccaaacgcaaacccaaacgcaaacccaaacgccaaccccaacgccaacccaaacgccaacccaaacgcaaacccgaacgcgaacccaaacgcaaaccccaacgcaaacccaaacgcaaacccaaacgcgaacccaaacgccaacccaaacgccaacccaaacgcaaacccaaacgccaacccaaacgcaaaccccaacguggaccccaacgcaaacccaaacgcaaacccaaacgccaaccccaacgcaaacccaaacgcaaacccuaacgcaaacccaaacgcaaaccccaacgcgaacccaaacgcaaacccaaacgcaaacccaaacgcaaaccccaacgcaaacccaaacgccaacccaaacgccaacccaaacgcgaauccaaacgcaaaccccaacgcaaacccaaacgcaaacccgaacaaaaacaaccaagggaacggacaaggacacaacaugccaaacgaccccaaccgcaacgucgacgaaaacgccaacgccaacuccgcaguaaaaaacaacaacaacgaagaacccuccgacaaacacauaaaagaauaccucaacaagauacaaaacuagggacuaguuauaagacugacuagcccgaugggccucccaacgggcccuccuccccuccuugcaccgagauuaaucaaaggcucuuuucagagccaccaaaaaaaaaaaaaaaaaaaaaaaaaaaaaaaaaaaaaaaaaaaaaaaaaaaaaaaaaaaaaaaaagaauu

SEQ ID NO: 7273 - RNA, 1337 nt, Artificial Sequence
  mRNA Design i-3 (hSL-A64-N5) comprising derived and/or modified sequence from Pf(3D7)__XP_001351122.1__HsALB_Pf-CSP(19-384) (opt11)
aggagaaagcuuaccaugaaauggguaaccuucaucucacuacucuuccuauucucaagcgcguacucacucuuccaagaauaccaaugcuacggcucgagcucaaacacccgcguucucaacgaacuaaacuacgacaacgccggaaccaaccuauacaacgaacuugaaaugaacuacuacggcaaacaagaaaacugguacucgcucaaaaaaaacuccaggagccuaggcgaaaacgacgacggaaacaacgaagacaacgagaaacuaagaaaacccaaacacaaaaaacucaaacagcccgcggacggaaaccccgacccaaacgcaaaccccaacguagacccgaacgccaacccaaacguagacccaaacgcaaacccaaacguagaccccaacgcaaacccgaacgccaacccaaacgcaaacccaaaugcgaaccccaacgcgaacccaaacgcaaacccgaacgcaaaccccaacgccaacccaaacgcaaacccaaacgcaaaccccaacgcaaacccaaacgcgaacccaaacgcaaacccaaacgcgaacccgaacgcaaacccaaacgcaaacccgaacgcaaacccaaacguagacccaaacgccaacccaaacgcaaacccaaacgcaaaccccaacgcaaacccaaacgcaaacccgaacgcaaacccaaacgcaaacccaaacgcgaacccaaacgcaaaccccaacgcaaacccaaacgcaaacccuaacgcaaacccgaacgcaaacccaaacgccaacccaaacgcgaaccccaacgcaaacccaaacgccaacccaaacgccaacccgaacaaaaacaaccaaggaaacggacaaggacacaacaugccaaacgaccccaaccgaaacgucgacgaaaacgcaaacgccaacagugccgucaaaaacaacaacaaugaagaacccucagacaaacacauaaaagaauaccuaaacaaaauccagaacucgcucucaaccgaauggucacccugcagcgucaccugcggcaacggaauacaaguacgcaucaaaccaggcucggccaacaaaccaaaagacgaauuagacuacgcaaacgacaucgaaaaaaaaauaugcaaaauggaaaaaugcagcucagucuucaacguagucaauagcucauaaggacuaguuauaagacugacuagcccgaugggccucccaacgggcccuccuccccuccuugcaccgagauuaaucaaaggcucuuuucagagccaccaaaaaaaaaaaaaaaaaaaaaaaaaaaaaaaaaaaaaaaaaaaaaaaaaaaaaaaaaaaaaaaaagaauu

SEQ ID NO: 7274 - RNA, 1475 nt, Artificial Sequence
  mRNA Design i-3 (hSL-A64-N5) comprising derived and/or modified sequence from Pf(3D7)__XP_001351122.1__HsALB_Pf-CSP(19-384)_TM domain HA (opt11)
aggagaaagcuuaccaugaagugggucaccuucaucucccuccuauuccucuucucuagcgcguacucacucuuccaagaauaccaaugcuacggauccagcucaaacacacgcguccucaaugaacugaacuacgauaacgccggaaccaaccucuacaacgaacucgaaaugaacuacuacggcaaacaagaaaacugguacucacuaaagaaaaauagcaggucccucggcgaaaacgacgacgggaacaacgaagauaacgaaaaacuacgcaaacccaagcacaagaaacuaaaacagccagcagacggaaacccagaccccaacgccaacccaaacgucgaccccaacgcaaacccaaacguagauccgaacgcaaacccaaacgucgauccaaacgcaaacccaaacgcaaacccaaacgcuaaccccaacgccaacccaaacgcaaacccgaacgcaaaccccaacgcgaacccgaacgcaaacccaaacgcaaacccaaacgccaacccaaacgcaaacccaaacgcaaacccaaacgccaacccaaacgcaaaccccaacgcgaaccccaacgcaaaccccaacgcaaacccaaacgucgacccaaacgcaaaccccaacgcaaaccccaacgcaaaccccaaugcaaacccaaacgcgaaccccaacgcaaacccaaacgcgaacccaaaugcaaaccccaacgccaaccccaacgccaacccgaacgcaaacccaaacgccaacccaaacgccaacccaaacgcaaaucccaacgccaacccaaacgcgaacccgaacgcaaacccaaacgcaaacccgaacaaaaacaaccaaggaaacggucaaggacacaacaugccaaacgaccccaaccgcaacgucgacgaaaacgccaaugccaacagcgccgucaaaaacaacaacaacgaagaacccucagacaaacacaucaaagaguaccuaaacaagauccaaaacucccucuccaccgaauggucccccugcagcguaaccugcggaaacggcauccaaguccgcauaaaaccaggcucagccaacaaaccaaaagaugaacucgacuacgcaaacgacauagaaaagaaaaucugcaaaauggaaaaaugcagcuccguauucaacgugguuaacuccucaaaacuagaauccacccgcaucuaccaaauacucgcaauauacagcacaguagccagcucacucguccuagucgucucccucggagccaucagcuucuggaugugcuccaacggaaguuuacaaugucgcauaugcauauaaggacuaguuauaagacugacuagcccgaugggccucccaacgggcccuccuccccuccuugcaccgagauuaaucaaaggcucuuuucagagccaccaaaaaaaaaaaaaaaaaaaaaaaaaaaaaaaaaaaaaaaaaaaaaaaaaaaaaaaaaaaaaaaaagaauu

SEQ ID NO: 7275 - RNA, 1187 nt, Artificial Sequence
  mRNA Design i-3 (hSL-A64-N5) comprising derived and/or modified sequence from Pf(3D7)__XP_001351122.1__HsALB_Pf-CSP(82-397) (opt11)
aggagaaagcuuaccaugaaaugggucaccuucaucucacuccuguuccucuucucauccgccuacagcgacaacgaaaaacugcgcaaacccaaacacaagaaacucaaacaaccagccgacggcaaccccgaccccaacgccaacccaaacguagaccccaacgccaaccccaacguagacccaaacgccaacccaaacguggaccccaacgcaaacccaaacgccaacccaaacgccaauccaaacgccaacccaaacgcaaacccaaacgcaaaccccaacgccaacccuaacgccaaccccaacgcaaacccaaacgccaaccccaacgccaaccccaacgcaaaccccaacgcaaacccuaacgccaaccccaacgccaaccccaacgcaaacccaaacgccaaccccaacguagacccaaacgccaaccccaacgcaaaccccaacgccaacccaaacgcaaacccaaacgccaaccccaacgccaaccccaacgcaaacccaaacgcaaacccaaaugcaaaccccaacgccaaccccaacgccaaccccaacgcaaaccccaacgcaaaccccaacgcaaacccgaacgccaacccaaacgccaacccaaacgccaaccccaacgcaaaccccaacaaaaacaaccaaggcaacggacaaggacacaacaugcccaacgaccccaaccgcaacgucgacgaaaacgccaacgccaacuccgccgucaaaaacaacaacaacgaagaacccuccgacaaacacaucaaagaauaccucaacaaaauccaaaacucccucucaaccgaauggucacccugcuccguaaccugcggcaacggcauccaaguccgcaucaaacccggcucagccaacaaacccaaagacgaacucgacuacgccaaugacaucgaaaagaaaauaugcaaaauggaaaaaugcuccuccgucuucaacgucgucaacuccuccaucggccucaucaugguccucucguuccuauuccuaaacuaaggacuaguuauaagacugacuagcccgaugggccucccaacgggcccuccuccccuccuugcaccgagauuaaucaaaggcucuuuucagagccaccaaaaaaaaaaaaaaaaaaaaaaaaaaaaaaaaaaaaaaaaaaaaaaaaaaaaaaaaaaaaaaaaagaauu

SEQ ID NO: 7276 - RNA, 539 nt, Artificial Sequence
  mRNA Design i-3 (hSL-A64-N5) comprising derived and/or modified sequence from Pf(3D7)__XP_001351122.1__HsALB_Pf-CSP(93-192) (opt11)
aggagaaagcuuaccaugaaauggguaaccuucaucucacuccuauuccuauucucaagcgcauacucaaaacuaaaacaacccgcagacggaaacccagacccaaacgcaaacccaaacguagacccaaacgcaaacccaaacguagacccaaacgcaaacccaaacguagacccaaacgcaaacccaaacgcaaacccaaacgcaaacccaaacgcaaacccaaacgcaaaccccaacgcaaacccaaacgcaaacccaaacgcaaacccaaacgcaaacccaaacgcaaacccaaacgcaaacccaaacgcaaacccaaacgcaaacccaaacgcaaacccaaacgccaacccaaacgcaaacccauaaggacuaguuauaagacugacuagcccgaugggccucccaacgggcccuccuccccuccuugcaccgagauuaaucaaaggcucuuuucagagccaccaaaaaaaaaaaaaaaaaaaaaaaaaaaaaaaaaaaaaaaaaaaaaaaaaaaaaaaaaaaaaaaaagaauu

SEQ ID NO: 7277 - RNA, 779 nt, Artificial Sequence
  mRNA Design i-3 (hSL-A64-N5) comprising derived and/or modified sequence from Pf(3D7)__XP_001351122.1__HsALB_Pf-CSP(93-272) (opt11)
aggagaaagcuuaccaugaaaugggucaccuucaucucacuccuauuccuauucucauccgcauacucaaaacuaaaacaacccgccgacggaaacccagacccaaacgcaaacccaaacguagacccaaacgcaaacccaaacguagacccaaacgcaaacccaaacguagacccaaacgcaaacccaaacgccaacccaaacgcaaauccaaacgcaaacccaaacgcaaacccaaacgcaaacccaaacgcaaacccaaacgccaacccaaacgccaacccaaacgcaaacccaaacgcaaacccaaacgcaaacccaaacgcaaacccaaacgcaaacccaaacgccaaccccaacgcaaacccaaacgcaaaccccaacguagacccaaacgcaaacccaaacgccaaccccaacgcaaaccccaacgccaaccccaacgccaacccaaacgccaacccaaacgcaaacccaaacgcaaacccaaacgcaaacccaaacgcaaacccaaacgcaaacccaaacgcaaacccaaacgcaaacccaaacgcaaacccaaacgccaacccaaacgcaaacccaaacgcaaacccgaacgcaaacccauaaggacuaguuauaagacugacuagcccgaugggccucccaacgggcccuccuccccuccuugcaccgagauuaaucaaaggcucuuuucagagccaccaaaaaaaaaaaaaaaaaaaaaaaaaaaaaaaaaaaaaaaaaaaaaaaaaaaaaaaaaaaaaaaaagaauu

SEQ ID NO: 7278 - RNA, 1154 nt, Artificial Sequence
  mRNA Design i-3 (hSL-A64-N5) comprising derived and/or modified sequence from Pf(3D7)__XP_001351122.1__HsALB_Pf-CSP(93-397) (opt11)
aggagaaagcuuaccaugaaaugggucacauucaucucacuccuauuccuauucucaagcgccuacuccaaacucaaacaacccgccgacggcaacccagacccaaacgccaaccccaacgucgacccaaacgccaacccaaacgucgacccaaacgcaaacccaaacgucgaccccaacgccaaccccaacgccaaccccaacgccaacccaaacgccaaucccaacgccaaccccaacgccaacccaaacgcaaaccccaacgccaauccaaacgccaaccccaacgcaaaccccaacgccaaccccaacgcaaacccaaacgcaaacccaaacgcaaaccccaacgccaaccccaacgcaaaccccaacgccaaccccaacgucgaccccaacgccaacccaaacgccaacccaaacgccaaccccaacgccaaccccaacgcaaacccaaacgcgaaccccaacgcaaaccccaacgccaacccgaacgccaacccgaacgcaaacccaaacgccaaccccaacgcaaaccccaacgcaaacccaaacgcgaaccccaacgccaacccaaacgccaacccaaacgcgaacccaaacgccaaccccaacaaaaacaaccaagggaacggacaaggccacaacaugcccaacgaccccaaccgcaacgucgacgaaaacgccaacgccaacuccgccgucaaaaacaacaacaacgaagaacccuccgacaaacacauaaaagaauaccuaaacaaaauccaaaacucacucucuacugaauggucccccugcucagucaccugcggcaacggcauacaaguccgcauaaaacccggcucggccaacaaaccaaaagacgaacuagacuacgcaaacgacaucgaaaaaaaaauaugcaaaauggaaaaaugcuccucagucuucaacguaguaaacuccuccaucggccucauaaugguccucuccuuccuauuccucaacuaaggacuaguuauaagacugacuagcccgaugggccucccaacgggcccuccuccccuccuugcaccgagauuaaucaaaggcucuuuucagagccaccaaaaaaaaaaaaaaaaaaaaaaaaaaaaaaaaaaaaaaaaaaaaaaaaaaaaaaaaaaaaaaaaagaauu

SEQ ID NO: 7279 - RNA, 524 nt, Artificial Sequence
  mRNA Design i-3 (hSL-A64-N5) comprising derived and/or modified sequence from Pf(3D7)__XP_001351122.1__HsALB_Pf-CSP(98-192) (opt11)
aggagaaagcuuaccaugaaaugggucacauucauaagccuacucuuccucuucagcucagccuacuccgcagacggaaacccagacccaaacgcaaacccaaacguagacccaaacgcaaacccaaacguagacccaaacgcaaacccaaacguagacccaaacgcaaacccaaacgcaaacccaaacgcaaacccaaacgcaaacccaaacgcaaacccaaacgcaaacccaaacgcaaacccaaacgcaaacccaaacgcaaacccaaacgcaaaccccaacgcaaacccaaacgcaaacccaaacgcaaacccaaacgcaaacccaaacgcaaacccaaacgcaaacccauaaggacuaguuauaagacugacuagcccgaugggccucccaacgggcccuccuccccuccuugcaccgagauuaaucaaaggcucuuuucagagccaccaaaaaaaaaaaaaaaaaaaaaaaaaaaaaaaaaaaaaaaaaaaaaaaaaaaaaaaaaaaaaaaaagaauu

SEQ ID NO: 7280 - RNA, 764 nt, Artificial Sequence
  mRNA Design i-3 (hSL-A64-N5) comprising derived and/or modified sequence from Pf(3D7)__XP_001351122.1__HsALB_Pf-CSP(98-272) (opt11)
aggagaaagcuuaccaugaaauggguaaccuucauaagccuacucuuccuauucucaucagccuacagcgcagacggaaacccagaccccaacgcaaacccaaacguagacccaaacgcaaacccaaacguagaccccaacgcaaacccaaacguagacccaaacgccaacccaaacgcaaacccaaacgcaaacccaaacgccaacccaaacgcaaacccaaacgccaacccaaacgcaaacccaaacgcaaacccaaacgcaaacccaaacgcaaacccaaacgcaaacccaaacgcaaacccaaacgccaacccaaacgcaaacccaaacgcaaacccaaacgcaaacccaaacgccaaccccaacguagacccaaacgccaaccccaacgcaaacccaaacgcaaacccaaacgcaaacccaaacgcaaacccaaacgcaaacccaaacgcaaacccaaacgcaaacccaaacgcaaacccgaacgccaacccaaacgcaaacccaaacgcaaacccaaacgcaaacccaaacgcaaacccaaacgcaaaccccaacgcaaacccaaacgcaaacccaaacgcaaacccauaaggacuaguuauaagacugacuagcccgaugggccucccaacgggcccuccuccccuccuugcaccgagauuaaucaaaggcucuuuucagagccaccaaaaaaaaaaaaaaaaaaaaaaaaaaaaaaaaaaaaaaaaaaaaaaaaaaaaaaaaaaaaaaaaagaauu

SEQ ID NO: 7281 - RNA, 1070 nt, Artificial Sequence
  mRNA Design i-3 (hSL-A64-N5) comprising derived and/or modified sequence from Pf(3D7)__XP_001351122.1__HsALB_Pf-CSP(98-374) (opt11)
aggagaaagcuuaccaugaaauggguaaccuucauaucccuacucuuccuuuucuccucggccuacuccgcagacggaaacccagacccaaacgcaaaccccaacguagacccaaacgcaaacccaaauguagacccaaacgcaaacccaaacguggacccaaacgcgaaccccaacgcaaaccccaacgcaaacccaaacgccaacccaaacgcaaacccaaacgccaacccaaacgcaaaccccaacgccaaccccaacgccaacccaaacgcaaacccaaacgcaaaccccaacgcaaacccaaacgccaacccaaacgccaacccaaacgccaaccccaacgcaaacccaaacgccaacccaaacguagacccaaacgcaaacccaaacgcaaacccaaacgcaaaccccaacgcaaaccccaacgcaaacccaaacgcaaacccaaacgcaaacccaaacgcaaacccaaacgccaacccaaacgcgaaccccaacgccaacccaaacgcaaacccaaacgccaacccaaacgccaacccaaacgcaaaccccaacgcaaacccaaacgcaaacccaaacgccaacccgaacaaaaacaaccaaggcaacggccaaggacacaacaugccaaacgaccccaaccgcaacguagacgaaaacgccaacgcaaacuccgcagucaaaaacaacaacaacgaagaacccuccgacaaacacauaaaagaauaccuaaacaaaauccaaaacucgcucucaaccgaauggucccccugcuccgucaccugcggcaacggcauccaaguacgcaucaaaccaggcucagcaaacaaaccaaaagacgaacucgacuacgccaacgacauagaaaaaaaaauaugcaaaauggagaaaugcuaaggacuaguuauaagacugacuagcccgaugggccucccaacgggcccuccuccccuccuugcaccgagauuaaucaaaggcucuuuucagagccaccaaaaaaaaaaaaaaaaaaaaaaaaaaaaaaaaaaaaaaaaaaaaaaaaaaaaaaaaaaaaaaaaagaauu

SEQ ID NO: 7282 - RNA, 1139 nt, Artificial Sequence
  mRNA Design i-3 (hSL-A64-N5) comprising derived and/or modified sequence from Pf(3D7)__XP_001351122.1__HsALB_Pf-CSP(98-397) (opt11)
aggagaaagcuuaccaugaaauggguaaccuucaucagccuacuauuccuauucagcuccgccuacagcgccgacggaaacccagacccaaacgccaaccccaacgucgacccaaacgccaaccccaacguagacccaaacgccaaccccaacgucgaccccaacgccaaccccaacgccaacccaaacgccaacccuaacgccaacccaaacgccaacccgaacgccaaccccaacgcgaacccaaacgccaacccaaacgcaaaccccaacgccaaccccaacgccaaccccaacgcaaaccccaacgcaaacccaaacgccaacccaaacgccaaccccaacgccaaccccaaugcaaacccaaacgucgaccccaacgccaacccaaacgccaaccccaacgccaaccccaacgccaaccccaacgcaaaccccaacgccaaccccaacgcgaaccccaacgccaaccccaacgccaacccaaacgccaaccccaacgccaaccccaacgccaaccccaacgcuaaccccaacgcaaacccaaacgccaacccaaacgccaacccaaacgccaaccccaacgccaacccaaacaaaaacaaccaaggcaacggacaaggacacaacaugccaaacgaccccaaccgcaacgucgacgaaaaugccaacgccaacuccgccgucaaaaacaacaacaacgaagaacccuccgacaaacacaucaaagaauaccuaaacaaaauacaaaacucucucucaaccgaauggucccccugcuccgucacaugcggcaacggcauccaaguccgcaucaaaccaggaucagccaauaaacccaaagacgaacucgacuacgccaacgacauagaaaaaaaaaucugcaaaauggaaaaaugcagcucagucuucaacgucgucaacuccucaaucggacuuauaaugguccuauccuuccucuuccuuaacuaaggacuaguuauaagacugacuagcccgaugggccucccaacgggcccuccuccccuccuugcaccgagauuaaucaaaggcucuuuucagagccaccaaaaaaaaaaaaaaaaaaaaaaaaaaaaaaaaaaaaaaaaaaaaaaaaaaaaaaaaaaaaaaaaagaauu

SEQ ID NO: 7283 - RNA, 1466 nt, Artificial Sequence
  mRNA Design i-3 (hSL-A64-N5) comprising derived and/or modified sequence from Pf(3D7)__XP_001351122.1__HsALB_Pf-CSP(199-377)_L(PVTN)_HBsAg (opt11)
aggagaaagcuuaccaugaaaugggucacauucaucucgcuccucuuccuauucuccuccgccuacuccgacccuaacgccaaucccaacgccaaccccaacgccaaccccaacgccaaccccaacgccaaccccaaugcaaacccaaacgcaaaccccaacgccaaccccaacgcaaacccaaaugcaaaccccaacgcaaaccccaacgccaaccccaaugccaaccccaacgcuaaccccaacgccaauccaaacgccaaccccaacgcaaaccccaacgccaacccuaacaaaaauaaccaaggcaacggccaaggacacaacaugcccaacgaccccaaccgaaaugucgacgaaaacgcuaacgcuaacagcgccgucaaaaacaacaacaacgaagaacccuccgacaaacacauuaaagaauaccucaacaaaauccaaaacucccucuccaccgaauggucccccugcucuguaacuugcggcaacggcauccaaguccgcauaaaacccggaucagcaaacaaacccaaagacgaacucgacuacgcaaacgacauugagaagaaaaucugcaaaauggaaaaaugcucaucaguacccgucacuaacauggaaaacaucaccuccggcuuccucggcccccuccuaguccuacaagccgguuucuuccuucuuacacgcauccuaaccaucccacaaucccuagacuccugguggacaucuuuaaacuuccuuggaggauccccugucugccucggccaaaacucccaauccccaaccucuaaccacucucccacauccugcccucccauaugccccgguuaccgcuggaugugccuccgccgcuucaucaucuuccucuucauacuccucuuaugccucaucuuccuccucguacuacucgacuaccaagguaugcuacccguaugcccucucauccccggcuccaccacaaccaacaccggccccugcaaaacaugcaccacccccgcacagggcaauuccauguuccccuccugcuguugcaccaaacccacagacggcaacuguaccugcauccccauccccuccucuugggcauuugccaaauaccucugggaaugggccuccguccgauucucuuggcuuucacuccucguucccuucguacaaugguucgucggccuaucacccaccgucuggcucuccgccaucuggaugaugugguacuggggcccuucacuuuacuccauagucagccccuucauaccacuccuccccaucuucuucugccuauggguauacaucuaaggacuaguuauaagacugacuagcccgaugggccucccaacgggcccuccuccccuccuugcaccgagauuaaucaaaggcucuuuucagagccaccaaaaaaaaaaaaaaaaaaaaaaaaaaaaaaaaaaaaaaaaaaaaaaaaaaaaaaaaaaaaaaaaagaauu

SEQ ID NO: 7284 - RNA, 1471 nt, Artificial Sequence
  mRNA Design a-1 (hSL-A100-N5) comprising derived and/or modified sequence from Pf(3D7)__XP_001351122.1__Pf-CSP (wt)
aggagagucccgcagucggcguccagcggcucugcuuguucgugugugugucguugcaggccuuauucaagcuuaccaugaugagaaaauuagcuauuuuaucuguuucuuccuuuuuauuuguugaggccuuauuccaggaauaccagugcuauggaaguucgucaaacacaaggguucuaaaugaauuaaauuaugauaaugcaggcacuaauuuauauaaugaauuagaaaugaauuauuaugggaaacaggaaaauugguauagucuuaaaaaaaauaguagaucacuuggagaaaaugaugauggaaauaacgaagacaacgagaaauuaaggaaaccaaaacauaaaaaauuaaagcaaccagcggaugguaauccugauccaaaugcaaacccaaauguagaucccaaugccaacccaaauguagauccaaaugcaaacccaaauguagauccaaaugcaaacccaaaugcaaacccaaaugcaaacccaaaugcaaacccaaaugcaaacccaaaugcaaacccaaaugcaaacccaaaugcaaacccaaaugcaaacccaaaugcaaacccaaaugcaaacccaaaugcaaacccaaaugcaaacccaaaugcaaaccccaaugcaaauccuaaugcaaacccaaaugcaaacccaaacguagauccuaaugcaaauccaaaugcaaacccaaacgcaaaccccaaugcaaauccuaaugcaaaccccaaugcaaauccuaaugcaaauccuaaugccaauccaaaugcaaauccaaaugcaaacccaaacgcaaaccccaaugcaaauccuaaugccaauccaaaugcaaauccaaaugcaaacccaaaugcaaacccaaaugcaaaccccaaugcaaauccuaauaaaaacaaucaagguaauggacaaggucacaauaugccaaaugacccaaaccgaaauguagaugaaaaugcuaaugccaacagugcuguaaaaaauaauaauaacgaagaaccaagugauaagcacauaaaagaauauuuaaacaaaauacaaaauucucuuucaacugaaugguccccauguaguguaacuuguggaaaugguauucaaguuagaauaaagccuggcucugcuaauaaaccuaaagacgaauuagauuaugcaaaugauauugaaaaaaaaauuuguaaaauggaaaaauguuccaguguguuuaaugucguaaauaguucaauaggauuaauaaugguauuauccuucuuguuccuuaauuagggacuagucccuguucccagagcccacuuuuuuuucuuuuuuugaaauaaaauagccugucuuucagaucucaaaggcucuuuucagagccaccaaaaaaaaaaaaaaaaaaaaaaaaaaaaaaaaaaaaaaaaaaaaaaaaaaaaaaaaaaaaaaaaaaaaaaaaaaaaaaaaaaaaaaaaaaaaaaaaaaaaagaauu

SEQ ID NO: 7285 - RNA, 1402 nt, Artificial Sequence
  mRNA Design a-1 (hSL-A100-N5) comprising derived and/or modified sequence from Pf(3D7)__XP_001351122.1__Pf-CSP(1-374) (wt)
aggagagucccgcagucggcguccagcggcucugcuuguucgugugugugucguugcaggccuuauucaagcuuaccaugaugagaaaauuagcuauuuuaucuguuucuuccuuuuuauuuguugaggccuuauuccaggaauaccagugcuauggaaguucgucaaacacaaggguucuaaaugaauuaaauuaugauaaugcaggcacuaauuuauauaaugaauuagaaaugaauuauuaugggaaacaggaaaauugguauagucuuaaaaaaaauaguagaucacuuggagaaaaugaugauggaaauaacgaagacaacgagaaauuaaggaaaccaaaacauaaaaaauuaaagcaaccagcggaugguaauccugauccaaaugcaaacccaaauguagaucccaaugccaacccaaauguagauccaaaugcaaacccaaauguagauccaaaugcaaacccaaaugcaaacccaaaugcaaacccaaaugcaaacccaaaugcaaacccaaaugcaaacccaaaugcaaacccaaaugcaaacccaaaugcaaacccaaaugcaaacccaaaugcaaacccaaaugcaaacccaaaugcaaacccaaaugcaaaccccaaugcaaauccuaaugcaaacccaaaugcaaacccaaacguagauccuaaugcaaauccaaaugcaaacccaaacgcaaaccccaaugcaaauccuaaugcaaaccccaaugcaaauccuaaugcaaauccuaaugccaauccaaaugcaaauccaaaugcaaacccaaacgcaaaccccaaugcaaauccuaaugccaauccaaaugcaaauccaaaugcaaacccaaaugcaaacccaaaugcaaaccccaaugcaaauccuaauaaaaacaaucaagguaauggacaaggucacaauaugccaaaugacccaaaccgaaauguagaugaaaaugcuaaugccaacagugcuguaaaaaauaauaauaacgaagaaccaagugauaagcacauaaaagaauauuuaaacaaaauacaaaauucucuuucaacugaaugguccccauguaguguaacuuguggaaaugguauucaaguuagaauaaagccuggcucugcuaauaaaccuaaagacgaauuagauuaugcaaaugauauugaaaaaaaaauuuguaaaauggaaaaauguugaggacuagucccuguucccagagcccacuuuuuuuucuuuuuuugaaauaaaauagccugucuuucagaucucaaaggcucuuuucagagccaccaaaaaaaaaaaaaaaaaaaaaaaaaaaaaaaaaaaaaaaaaaaaaaaaaaaaaaaaaaaaaaaaaaaaaaaaaaaaaaaaaaaaaaaaaaaaaaaaaaaaagaauu

SEQ ID NO: 7286 - RNA, 1255 nt, Artificial Sequence
  mRNA Design a-1 (hSL-A100-N5) comprising derived and/or modified sequence from Pf(3D7)__XP_001351122.1__Pf-CSP(1-325) (wt)
aggagagucccgcagucggcguccagcggcucugcuuguucgugugugugucguugcaggccuuauucaagcuuaccaugaugagaaaauuagcuauuuuaucuguuucuuccuuuuuauuuguugaggccuuauuccaggaauaccagugcuauggaaguucgucaaacacaaggguucuaaaugaauuaaauuaugauaaugcaggcacuaauuuauauaaugaauuagaaaugaauuauuaugggaaacaggaaaauugguauagucuuaaaaaaaauaguagaucacuuggagaaaaugaugauggaaauaacgaagacaacgagaaauuaaggaaaccaaaacauaaaaaauuaaagcaaccagcggaugguaauccugauccaaaugcaaacccaaauguagaucccaaugccaacccaaauguagauccaaaugcaaacccaaauguagauccaaaugcaaacccaaaugcaaacccaaaugcaaacccaaaugcaaacccaaaugcaaacccaaaugcaaacccaaaugcaaacccaaaugcaaacccaaaugcaaacccaaaugcaaacccaaaugcaaacccaaaugcaaacccaaaugcaaacccaaaugcaaaccccaaugcaaauccuaaugcaaacccaaaugcaaacccaaacguagauccuaaugcaaauccaaaugcaaacccaaacgcaaaccccaaugcaaauccuaaugcaaaccccaaugcaaauccuaaugcaaauccuaaugccaauccaaaugcaaauccaaaugcaaacccaaacgcaaaccccaaugcaaauccuaaugccaauccaaaugcaaauccaaaugcaaacccaaaugcaaacccaaaugcaaaccccaaugcaaauccuaauaaaaacaaucaagguaauggacaaggucacaauaugccaaaugacccaaaccgaaauguagaugaaaaugcuaaugccaacagugcuguaaaaaauaauaauaacgaagaaccaagugauaagcacauaaaagaauauuuaaacaaaauacaaaauugaggacuagucccuguucccagagcccacuuuuuuuucuuuuuuugaaauaaaauagccugucuuucagaucucaaaggcucuuuucagagccaccaaaaaaaaaaaaaaaaaaaaaaaaaaaaaaaaaaaaaaaaaaaaaaaaaaaaaaaaaaaaaaaaaaaaaaaaaaaaaaaaaaaaaaaaaaaaaaaaaaaaagaauu

SEQ ID NO: 7287 - RNA, 1471 nt, Artificial Sequence
  mRNA Design a-1 (hSL-A100-N5) comprising derived and/or modified sequence from Pf(3D7)__XP_001351122.1__Pf-CSP (opt1)
aggagagucccgcagucggcguccagcggcucugcuuguucgugugugugucguugcaggccuuauucaagcuuaccaugaugcgcaagcuggccauccucagcguguccagcuuccuguucgucgaggcccuguuccaggaguaccagugcuacggcuccagcuccaacacccgggugcucaacgagcugaacuacgacaacgcggggaccaaccuguacaacgagcucgagaugaacuacuacggcaagcaggagaacugguacagccugaagaagaacucccgcagccugggggagaacgacgacggcaacaacgaggacaacgagaagcuccggaagcccaagcacaagaagcugaagcagccggccgacgggaaccccgaccccaacgccaaccccaacguggacccgaacgccaaccccaacgucgaccccaacgccaaccccaacguggacccgaacgcgaaccccaacgccaaccccaacgccaaccccaacgccaacccgaacgcgaaccccaacgccaaccccaacgccaaccccaacgccaacccgaacgccaaccccaacgcgaaccccaacgccaaccccaacgccaacccgaacgccaaccccaacgccaaccccaacgcgaaccccaacgccaacccgaacgccaaccccaacguggaccccaacgccaaccccaacgccaacccgaacgcgaaccccaacgccaaccccaacgccaacccgaacgccaaccccaacgccaaccccaacgcgaaccccaacgccaacccgaacgccaaccccaacgccaaccccaacgcgaaccccaacgccaacccgaacgccaaccccaacgccaaccccaacgccaaccccaacgcgaacccgaacgccaaccccaacaagaacaaccagggcaacggccaggggcacaacaugcccaacgaccccaaccgcaacgucgacgagaacgccaacgccaacuccgccgugaagaacaacaacaacgaggagccgagcgacaagcacaucaaggaguaccugaacaagauccagaacucccucagcacggaguggucccccugcagcgugaccugcggcaacgggauccagguccggaucaagcccggcuccgcgaacaagcccaaggacgagcuggacuacgccaacgacaucgagaagaagaucugcaagauggagaagugcagcuccguguucaacguggucaacagcuccaucgggcugaucauggugcucagcuuccuguuccugaacugaggacuagucccuguucccagagcccacuuuuuuuucuuuuuuugaaauaaaauagccugucuuucagaucucaaaggcucuuuucagagccaccaaaaaaaaaaaaaaaaaaaaaaaaaaaaaaaaaaaaaaaaaaaaaaaaaaaaaaaaaaaaaaaaaaaaaaaaaaaaaaaaaaaaaaaaaaaaaaaaaaaaagaauu

SEQ ID NO: 7288 - RNA, 1402 nt, Artificial Sequence
  mRNA Design a-1 (hSL-A100-N5) comprising derived and/or modified sequence from Pf(3D7)__XP_001351122.1__Pf-CSP(1-374) (opt1)
aggagagucccgcagucggcguccagcggcucugcuuguucgugugugugucguugcaggccuuauucaagcuuaccaugaugcgcaagcuggccauccucagcguguccagcuuccuguucgucgaggcccuguuccaggaguaccagugcuacggcuccagcuccaacacccgggugcucaacgagcugaacuacgacaacgcggggaccaaccuguacaacgagcucgagaugaacuacuacggcaagcaggagaacugguacagccugaagaagaacucccgcagccugggggagaacgacgacggcaacaacgaggacaacgagaagcuccggaagcccaagcacaagaagcugaagcagccggccgacgggaaccccgaccccaacgccaaccccaacguggacccgaacgccaaccccaacgucgaccccaacgccaaccccaacguggacccgaacgcgaaccccaacgccaaccccaacgccaaccccaacgccaacccgaacgcgaaccccaacgccaaccccaacgccaaccccaacgccaacccgaacgccaaccccaacgcgaaccccaacgccaaccccaacgccaacccgaacgccaaccccaacgccaaccccaacgcgaaccccaacgccaacccgaacgccaaccccaacguggaccccaacgccaaccccaacgccaacccgaacgcgaaccccaacgccaaccccaacgccaacccgaacgccaaccccaacgccaaccccaacgcgaaccccaacgccaacccgaacgccaaccccaacgccaaccccaacgcgaaccccaacgccaacccgaacgccaaccccaacgccaaccccaacgccaaccccaacgcgaacccgaacgccaaccccaacaagaacaaccagggcaacggccaggggcacaacaugcccaacgaccccaaccgcaacgucgacgagaacgccaacgccaacuccgccgugaagaacaacaacaacgaggagccgagcgacaagcacaucaaggaguaccugaacaagauccagaacucccucagcacggaguggucccccugcagcgugaccugcggcaacgggauccagguccggaucaagcccggcuccgcgaacaagcccaaggacgagcuggacuacgccaacgacaucgagaagaagaucugcaagauggagaagugcugaggacuagucccuguucccagagcccacuuuuuuuucuuuuuuugaaauaaaauagccugucuuucagaucucaaaggcucuuuucagagccaccaaaaaaaaaaaaaaaaaaaaaaaaaaaaaaaaaaaaaaaaaaaaaaaaaaaaaaaaaaaaaaaaaaaaaaaaaaaaaaaaaaaaaaaaaaaaaaaaaaaaagaauu

SEQ ID NO: 7289 - RNA, 1255 nt, Artificial Sequence
  mRNA Design a-1 (hSL-A100-N5) comprising derived and/or modified sequence from Pf(3D7)__XP_001351122.1__Pf-CSP(1-325) (opt1)
aggagagucccgcagucggcguccagcggcucugcuuguucgugugugugucguugcaggccuuauucaagcuuaccaugaugcgcaagcuggccauccucagcguguccagcuuccuguucgucgaggcccuguuccaggaguaccagugcuacggcuccagcuccaacacccgggugcucaacgagcugaacuacgacaacgcggggaccaaccuguacaacgagcucgagaugaacuacuacggcaagcaggagaacugguacagccugaagaagaacucccgcagccugggggagaacgacgacggcaacaacgaggacaacgagaagcuccggaagcccaagcacaagaagcugaagcagccggccgacgggaaccccgaccccaacgccaaccccaacguggacccgaacgccaaccccaacgucgaccccaacgccaaccccaacguggacccgaacgcgaaccccaacgccaaccccaacgccaaccccaacgccaacccgaacgcgaaccccaacgccaaccccaacgccaaccccaacgccaacccgaacgccaaccccaacgcgaaccccaacgccaaccccaacgccaacccgaacgccaaccccaacgccaaccccaacgcgaaccccaacgccaacccgaacgccaaccccaacguggaccccaacgccaaccccaacgccaacccgaacgcgaaccccaacgccaaccccaacgccaacccgaacgccaaccccaacgccaaccccaacgcgaaccccaacgccaacccgaacgccaaccccaacgccaaccccaacgcgaaccccaacgccaacccgaacgccaaccccaacgccaaccccaacgccaaccccaacgcgaacccgaacgccaaccccaacaagaacaaccagggcaacggccaggggcacaacaugcccaacgaccccaaccgcaacgucgacgagaacgccaacgccaacuccgccgugaagaacaacaacaacgaggagccgagcgacaagcacaucaaggaguaccugaacaagauccagaacugaggacuagucccuguucccagagcccacuuuuuuuucuuuuuuugaaauaaaauagccugucuuucagaucucaaaggcucuuuucagagccaccaaaaaaaaaaaaaaaaaaaaaaaaaaaaaaaaaaaaaaaaaaaaaaaaaaaaaaaaaaaaaaaaaaaaaaaaaaaaaaaaaaaaaaaaaaaaaaaaaaaaagaauu

SEQ ID NO: 7290 - RNA, 1471 nt, Artificial Sequence
  mRNA Design a-1 (hSL-A100-N5) comprising derived and/or modified sequence from Pf(3D7)__XP_001351122.1__HsALB_Pf-CSP(19-397) (opt1) R8987
aggagagucccgcagucggcguccagcggcucugcuuguucgugugugugucguugcaggccuuauucaagcuuaccaugaagugggugaccuucaucagccugcucuuccuguucuccagcgccuacucccuguuccaggaguaccagugcuacggcuccagcuccaacacccgggugcucaacgagcugaacuacgacaacgcggggaccaaccuguacaacgagcucgagaugaacuacuacggcaagcaggagaacugguacagccugaagaagaacucccgcagccugggggagaacgacgacggcaacaacgaggacaacgagaagcuccggaagcccaagcacaagaagcugaagcagccggccgacgggaaccccgaccccaacgccaaccccaacguggacccgaacgccaaccccaacgucgaccccaacgccaaccccaacguggacccgaacgcgaaccccaacgccaaccccaacgccaaccccaacgccaacccgaacgcgaaccccaacgccaaccccaacgccaaccccaacgccaacccgaacgccaaccccaacgcgaaccccaacgccaaccccaacgccaacccgaacgccaaccccaacgccaaccccaacgcgaaccccaacgccaacccgaacgccaaccccaacguggaccccaacgccaaccccaacgccaacccgaacgcgaaccccaacgccaaccccaacgccaacccgaacgccaaccccaacgccaaccccaacgcgaaccccaacgccaacccgaacgccaaccccaacgccaaccccaacgcgaaccccaacgccaacccgaacgccaaccccaacgccaaccccaacgccaaccccaacgcgaacccgaacgccaaccccaacaagaacaaccagggcaacggccaggggcacaacaugcccaacgaccccaaccgcaacgucgacgagaacgccaacgccaacuccgccgugaagaacaacaacaacgaggagccgagcgacaagcacaucaaggaguaccugaacaagauccagaacucccucagcacggaguggucccccugcagcgugaccugcggcaacgggauccagguccggaucaagcccggcuccgcgaacaagcccaaggacgagcuggacuacgccaacgacaucgagaagaagaucugcaagauggagaagugcagcuccguguucaacguggucaacagcuccaucgggcugaucauggugcucagcuuccuguuccugaacugaggacuagucccuguucccagagcccacuuuuuuuucuuuuuuugaaauaaaauagccugucuuucagaucucaaaggcucuuuucagagccaccaaaaaaaaaaaaaaaaaaaaaaaaaaaaaaaaaaaaaaaaaaaaaaaaaaaaaaaaaaaaaaaaaaaaaaaaaaaaaaaaaaaaaaaaaaaaaaaaaaaaagaauu

SEQ ID NO: 7291 - RNA, 1489 nt, Artificial Sequence
  mRNA Design a-1 (hSL-A100-N5) comprising derived and/or modified sequence from Pf(3D7)__XP_001351122.1__HsIns-iso1_Pf-CSP(19-397) (opt1)
aggagagucccgcagucggcguccagcggcucugcuuguucgugugugugucguugcaggccuuauucaagcuuaccauggcccuguggaugcgccuccugccccugcucgcccugcuggcgcucuggggcccggaccccgccgccgcccuguuccaggaguaccagugcuacggcuccagcuccaacacccgggugcucaacgagcugaacuacgacaacgcggggaccaaccuguacaacgagcucgagaugaacuacuacggcaagcaggagaacugguacagccugaagaagaacucccgcagccugggggagaacgacgacggcaacaacgaggacaacgagaagcuccggaagcccaagcacaagaagcugaagcagccggccgacgggaaccccgaccccaacgccaaccccaacguggacccgaacgccaaccccaacgucgaccccaacgccaaccccaacguggacccgaacgcgaaccccaacgccaaccccaacgccaaccccaacgccaacccgaacgcgaaccccaacgccaaccccaacgccaaccccaacgccaacccgaacgccaaccccaacgcgaaccccaacgccaaccccaacgccaacccgaacgccaaccccaacgccaaccccaacgcgaaccccaacgccaacccgaacgccaaccccaacguggaccccaacgccaaccccaacgccaacccgaacgcgaaccccaacgccaaccccaacgccaacccgaacgccaaccccaacgccaaccccaacgcgaaccccaacgccaacccgaacgccaaccccaacgccaaccccaacgcgaaccccaacgccaacccgaacgccaaccccaacgccaaccccaacgccaaccccaacgcgaacccgaacgccaaccccaacaagaacaaccagggcaacggccaggggcacaacaugcccaacgaccccaaccgcaacgucgacgagaacgccaacgccaacuccgccgugaagaacaacaacaacgaggagccgagcgacaagcacaucaaggaguaccugaacaagauccagaacucccucagcacggaguggucccccugcagcgugaccugcggcaacgggauccagguccggaucaagcccggcuccgcgaacaagcccaaggacgagcuggacuacgccaacgacaucgagaagaagaucugcaagauggagaagugcagcuccguguucaacguggucaacagcuccaucgggcugaucauggugcucagcuuccuguuccugaacugaggacuagucccuguucccagagcccacuuuuuuuucuuuuuuugaaauaaaauagccugucuuucagaucucaaaggcucuuuucagagccaccaaaaaaaaaaaaaaaaaaaaaaaaaaaaaaaaaaaaaaaaaaaaaaaaaaaaaaaaaaaaaaaaaaaaaaaaaaaaaaaaaaaaaaaaaaaaaaaaaaaaagaauu

SEQ ID NO: 7292 - RNA, 1468 nt, Artificial Sequence
  mRNA Design a-1 (hSL-A100-N5) comprising derived and/or modified sequence from Pf(3D7)__XP_001351122.1__HsSPARC_Pf-CSP(19-397) (opt1)
aggagagucccgcagucggcguccagcggcucugcuuguucgugugugugucguugcaggccuuauucaagcuuaccaugcgcgccuggaucuucuuccugcucugccuggccggccgggcccuggcccuguuccaggaguaccagugcuacggcuccagcuccaacacccgggugcucaacgagcugaacuacgacaacgcggggaccaaccuguacaacgagcucgagaugaacuacuacggcaagcaggagaacugguacagccugaagaagaacucccgcagccugggggagaacgacgacggcaacaacgaggacaacgagaagcuccggaagcccaagcacaagaagcugaagcagccggccgacgggaaccccgaccccaacgccaaccccaacguggacccgaacgccaaccccaacgucgaccccaacgccaaccccaacguggacccgaacgcgaaccccaacgccaaccccaacgccaaccccaacgccaacccgaacgcgaaccccaacgccaaccccaacgccaaccccaacgccaacccgaacgccaaccccaacgcgaaccccaacgccaaccccaacgccaacccgaacgccaaccccaacgccaaccccaacgcgaaccccaacgccaacccgaacgccaaccccaacguggaccccaacgccaaccccaacgccaacccgaacgcgaaccccaacgccaaccccaacgccaacccgaacgccaaccccaacgccaaccccaacgcgaaccccaacgccaacccgaacgccaaccccaacgccaaccccaacgcgaaccccaacgccaacccgaacgccaaccccaacgccaaccccaacgccaaccccaacgcgaacccgaacgccaaccccaacaagaacaaccagggcaacggccaggggcacaacaugcccaacgaccccaaccgcaacgucgacgagaacgccaacgccaacuccgccgugaagaacaacaacaacgaggagccgagcgacaagcacaucaaggaguaccugaacaagauccagaacucccucagcacggaguggucccccugcagcgugaccugcggcaacgggauccagguccggaucaagcccggcuccgcgaacaagcccaaggacgagcuggacuacgccaacgacaucgagaagaagaucugcaagauggagaagugcagcuccguguucaacguggucaacagcuccaucgggcugaucauggugcucagcuuccuguuccugaacugaggacuagucccuguucccagagcccacuuuuuuuucuuuuuuugaaauaaaauagccugucuuucagaucucaaaggcucuuuucagagccaccaaaaaaaaaaaaaaaaaaaaaaaaaaaaaaaaaaaaaaaaaaaaaaaaaaaaaaaaaaaaaaaaaaaaaaaaaaaaaaaaaaaaaaaaaaaaaaaaaaaaagaauu

SEQ ID NO: 7293 - RNA, 1471 nt, Artificial Sequence
  mRNA Design a-1 (hSL-A100-N5) comprising derived and/or modified sequence from Pf(3D7)__XP_001351122.1__IgE_Pf-CSP(19-397) (opt1)
aggagagucccgcagucggcguccagcggcucugcuuguucgugugugugucguugcaggccuuauucaagcuuaccauggacuggaccuggauccuguuccucguggccgccgcgacccgcguccacagccuguuccaggaguaccagugcuacggcuccagcuccaacacccgggugcucaacgagcugaacuacgacaacgcggggaccaaccuguacaacgagcucgagaugaacuacuacggcaagcaggagaacugguacagccugaagaagaacucccgcagccugggggagaacgacgacggcaacaacgaggacaacgagaagcuccggaagcccaagcacaagaagcugaagcagccggccgacgggaaccccgaccccaacgccaaccccaacguggacccgaacgccaaccccaacgucgaccccaacgccaaccccaacguggacccgaacgcgaaccccaacgccaaccccaacgccaaccccaacgccaacccgaacgcgaaccccaacgccaaccccaacgccaaccccaacgccaacccgaacgccaaccccaacgcgaaccccaacgccaaccccaacgccaacccgaacgccaaccccaacgccaaccccaacgcgaaccccaacgccaacccgaacgccaaccccaacguggaccccaacgccaaccccaacgccaacccgaacgcgaaccccaacgccaaccccaacgccaacccgaacgccaaccccaacgccaaccccaacgcgaaccccaacgccaacccgaacgccaaccccaacgccaaccccaacgcgaaccccaacgccaacccgaacgccaaccccaacgccaaccccaacgccaaccccaacgcgaacccgaacgccaaccccaacaagaacaaccagggcaacggccaggggcacaacaugcccaacgaccccaaccgcaacgucgacgagaacgccaacgccaacuccgccgugaagaacaacaacaacgaggagccgagcgacaagcacaucaaggaguaccugaacaagauccagaacucccucagcacggaguggucccccugcagcgugaccugcggcaacgggauccagguccggaucaagcccggcuccgcgaacaagcccaaggacgagcuggacuacgccaacgacaucgagaagaagaucugcaagauggagaagugcagcuccguguucaacguggucaacagcuccaucgggcugaucauggugcucagcuuccuguuccugaacugaggacuagucccuguucccagagcccacuuuuuuuucuuuuuuugaaauaaaauagccugucuuucagaucucaaaggcucuuuucagagccaccaaaaaaaaaaaaaaaaaaaaaaaaaaaaaaaaaaaaaaaaaaaaaaaaaaaaaaaaaaaaaaaaaaaaaaaaaaaaaaaaaaaaaaaaaaaaaaaaaaaaagaauu

SEQ ID NO: 7294 - RNA, 1636 nt, Artificial Sequence
  mRNA Design a-1 (hSL-A100-N5) comprising derived and/or modified sequence from Pf(3D7)__XP_001351122.1__Pf-CSP_L(G4SG4)_TM domain HA (opt1)
aggagagucccgcagucggcguccagcggcucugcuuguucgugugugugucguugcaggccuuauucaagcuuaccaugaugcgcaagcuggccauccucagcguguccagcuuccuguucgucgaggcccuguuccaggaguaccagugcuacggcuccagcuccaacacccgggugcucaacgagcugaacuacgacaacgcggggaccaaccuguacaacgagcucgagaugaacuacuacggcaagcaggagaacugguacagccugaagaagaacucccgcagccugggggagaacgacgacggcaacaacgaggacaacgagaagcuccggaagcccaagcacaagaagcugaagcagccggccgacgggaaccccgaccccaacgccaaccccaacguggacccgaacgccaaccccaacgucgaccccaacgccaaccccaacguggacccgaacgcgaaccccaacgccaaccccaacgccaaccccaacgccaacccgaacgcgaaccccaacgccaaccccaacgccaaccccaacgccaacccgaacgccaaccccaacgcgaaccccaacgccaaccccaacgccaacccgaacgccaaccccaacgccaaccccaacgcgaaccccaacgccaacccgaacgccaaccccaacguggaccccaacgccaaccccaacgccaacccgaacgcgaaccccaacgccaaccccaacgccaacccgaacgccaaccccaacgccaaccccaacgcgaaccccaacgccaacccgaacgccaaccccaacgccaaccccaacgcgaaccccaacgccaacccgaacgccaaccccaacgccaaccccaacgccaaccccaacgcgaacccgaacgccaaccccaacaagaacaaccagggcaacggccaggggcacaacaugcccaacgaccccaaccgcaacgucgacgagaacgccaacgccaacuccgccgugaagaacaacaacaacgaggagccgagcgacaagcacaucaaggaguaccugaacaagauccagaacucccucagcacggaguggucccccugcagcgugaccugcggcaacgggauccagguccggaucaagcccggcuccgcgaacaagcccaaggacgagcuggacuacgccaacgacaucgagaagaagaucugcaagauggagaagugcagcuccguguucaacguggucaacagcuccaucgggcugaucauggugcucagcuuccuguuccugaacggcgggggcgggagcggcgggggcggcaagcucgaguccacgcggaucuaccagauccuggcgaucuacagcaccgucgccagcucccuggugcucguggucagccugggggccaucuccuucuggaugugcagcaacggcucccugcagugccgcaucugcaucugaggacuagucccuguucccagagcccacuuuuuuuucuuuuuuugaaauaaaauagccugucuuucagaucucaaaggcucuuuucagagccaccaaaaaaaaaaaaaaaaaaaaaaaaaaaaaaaaaaaaaaaaaaaaaaaaaaaaaaaaaaaaaaaaaaaaaaaaaaaaaaaaaaaaaaaaaaaaaaaaaaaaagaauu

SEQ ID NO: 7295 - RNA, 1510 nt, Artificial Sequence
  mRNA Design a-1 (hSL-A100-N5) comprising derived and/or modified sequence from Pf(3D7)__XP_001351122.1__Pf-CSP(199-377)_L(PVTN)_HBsAg (opt1)
aggagagucccgcagucggcguccagcggcucugcuuguucgugugugugucguugcaggccuuauucaagcuuaccauggaccccaacgccaaccccaacgccaacccgaacgcgaaccccaacgccaaccccaacgccaacccgaacgccaaccccaacgccaaccccaacgcgaaccccaacgccaacccgaacgccaaccccaacgccaaccccaacgcgaaccccaacgccaacccgaacgccaaccccaacgccaaccccaacgccaaccccaacgcgaacccgaacgccaaccccaacaagaacaaccagggcaacggccaggggcacaacaugcccaacgaccccaaccgcaacgucgacgagaacgccaacgccaacuccgccgugaagaacaacaacaacgaggagccgagcgacaagcacaucaaggaguaccugaacaagauccagaacucccucagcacggaguggucccccugcagcgugaccugcggcaacgggauccagguccggaucaagcccggcuccgcgaacaagcccaaggacgagcuggacuacgccaacgacaucgagaagaagaucugcaagauggagaagugcagcuccgugccggugacgaacauggagaacaucaccagcggcuuccuggggccccuccuggugcugcaggccggcuucuuccuccugacccgcauccugaccaucccgcagucccucgacagcugguggaccucccugaacuuccucgggggcagccccgucugccuggggcagaacucccagagccccaccuccaaccacagccccaccuccugcccgcccaucugccccggcuaccgguggaugugccugcgccgguucaucaucuuccuguucauccuccugcugugccucaucuuccugcuggugcuccuggacuaccagggcaugcugcccgugugcccgcucauccccgggagcacgaccaccaacaccggccccugcaagacgugcaccacccccgcccaggggaacuccauguucccgagcugcugcugcaccaagcccacggacggcaacugcacgugcauccccauccccuccagcugggcguucgccaaguaccugugggagugggccuccguccgcuucagcuggcugucccuccuggugccguucgugcagugguucgucgggcugagccccaccguguggcucuccgccaucuggaugaugugguacuggggccccagccuguacagcaucgugucccccuucaucccgcugcuccccaucuucuucugccugugggucuacaucugaggacuagucccuguucccagagcccacuuuuuuuucuuuuuuugaaauaaaauagccugucuuucagaucucaaaggcucuuuucagagccaccaaaaaaaaaaaaaaaaaaaaaaaaaaaaaaaaaaaaaaaaaaaaaaaaaaaaaaaaaaaaaaaaaaaaaaaaaaaaaaaaaaaaaaaaaaaaaaaaaaaaagaauu

SEQ ID NO: 7296 - RNA, 1552 nt, Artificial Sequence
  mRNA Design a-1 (hSL-A100-N5) comprising derived and/or modified sequence from Pf(3D7)__XP_001351122.1__Pf-CSP(199-387)_L(PVTN)_HBsAg (opt1)
aggagagucccgcagucggcguccagcggcucugcuuguucgugugugugucguugcaggccuuauucaagcuuaccaugauggccccggaccccaacgccaaccccaacgccaacccgaacgcgaaccccaacgccaaccccaacgccaacccgaacgccaaccccaacgccaaccccaacgcgaaccccaacgccaacccgaacgccaaccccaacgccaaccccaacgcgaaccccaacgccaacccgaacgccaaccccaacgccaaccccaacgccaaccccaacgcgaacccgaacgccaaccccaacaagaacaaccagggcaacggccaggggcacaacaugcccaacgaccccaaccgcaacgucgacgagaacgccaacgccaacuccgccgugaagaacaacaacaacgaggagccgagcgacaagcacaucaaggaguaccugaacaagauccagaacucccucagcacggaguggucccccugcagcgugaccugcggcaacgggauccagguccggaucaagcccggcuccgcgaacaagcccaaggacgagcuggacuacgccaacgacaucgagaagaagaucugcaagauggagaagugcagcuccguguucaacguggucaacagcuccaucgggcuggggccggugacgaacauggagaacaucaccagcggcuuccuggggccccuccuggugcugcaggccggcuucuuccuccugacccgcauccugaccaucccgcagucccucgacagcugguggaccucccugaacuuccucgggggcagccccgucugccuggggcagaacucccagagccccaccuccaaccacagccccaccuccugcccgcccaucugccccggcuaccgguggaugugccugcgccgguucaucaucuuccuguucauccuccugcugugccucaucuuccugcuggugcuccuggacuaccagggcaugcugcccgugugcccgcucauccccgggagcacgaccaccaacaccggccccugcaagacgugcaccacccccgcccaggggaacuccauguucccgagcugcugcugcaccaagcccacggacggcaacugcacgugcauccccauccccuccagcugggcguucgccaaguaccugugggagugggccuccguccgcuucagcuggcugucccuccuggugccguucgugcagugguucgucgggcugagccccaccguguggcucuccgccaucuggaugaugugguacuggggccccagccuguacagcaucgugucccccuucaucccgcugcuccccaucuucuucugccugugggucuacaucugaggacuagucccuguucccagagcccacuuuuuuuucuuuuuuugaaauaaaauagccugucuuucagaucucaaaggcucuuuucagagccaccaaaaaaaaaaaaaaaaaaaaaaaaaaaaaaaaaaaaaaaaaaaaaaaaaaaaaaaaaaaaaaaaaaaaaaaaaaaaaaaaaaaaaaaaaaaaaaaaaaaaagaauu

SEQ ID NO: 7297 - RNA, 736 nt, Artificial Sequence
  mRNA Design a-1 (hSL-A100-N5) comprising derived and/or modified sequence from Pf(3D7)__XP_001351122.1__HsALB_Pf-CSP(19-152) (opt1)
aggagagucccgcagucggcguccagcggcucugcuuguucgugugugugucguugcaggccuuauucaagcuuaccaugaagugggugaccuucaucagccugcucuuccuguucuccagcgccuacucccuguuccaggaguaccagugcuacggcuccagcuccaacacccgggugcucaacgagcugaacuacgacaacgcggggaccaaccuguacaacgagcucgagaugaacuacuacggcaagcaggagaacugguacagccugaagaagaacucccgcagccugggggagaacgacgacggcaacaacgaggacaacgagaagcuccggaagcccaagcacaagaagcugaagcagccggccgacgggaaccccgaccccaacgccaaccccaacguggacccgaacgccaaccccaacgucgaccccaacgccaaccccaacguggacccgaacgcgaaccccaacgccaaccccaacgccaaccccaacgccaacccgaacgcgaaccccaacgccaaccccugaggacuagucccuguucccagagcccacuuuuuuuucuuuuuuugaaauaaaauagccugucuuucagaucucaaaggcucuuuucagagccaccaaaaaaaaaaaaaaaaaaaaaaaaaaaaaaaaaaaaaaaaaaaaaaaaaaaaaaaaaaaaaaaaaaaaaaaaaaaaaaaaaaaaaaaaaaaaaaaaaaaaagaauu

SEQ ID NO: 7298 - RNA, 856 nt, Artificial Sequence
  mRNA Design a-1 (hSL-A100-N5) comprising derived and/or modified sequence from Pf(3D7)__XP_001351122.1__HsALB_Pf-CSP(19-192) (opt1)
aggagagucccgcagucggcguccagcggcucugcuuguucgugugugugucguugcaggccuuauucaagcuuaccaugaagugggugaccuucaucagccugcucuuccuguucuccagcgccuacucccuguuccaggaguaccagugcuacggcuccagcuccaacacccgggugcucaacgagcugaacuacgacaacgcggggaccaaccuguacaacgagcucgagaugaacuacuacggcaagcaggagaacugguacagccugaagaagaacucccgcagccugggggagaacgacgacggcaacaacgaggacaacgagaagcuccggaagcccaagcacaagaagcugaagcagccggccgacgggaaccccgaccccaacgccaaccccaacguggacccgaacgccaaccccaacgucgaccccaacgccaaccccaacguggacccgaacgcgaaccccaacgccaaccccaacgccaaccccaacgccaacccgaacgcgaaccccaacgccaaccccaacgccaaccccaacgccaacccgaacgccaaccccaacgcgaaccccaacgccaaccccaacgccaacccgaacgccaaccccaacgccaaccccaacgcgaaccccaacgccaacccgugaggacuagucccuguucccagagcccacuuuuuuuucuuuuuuugaaauaaaauagccugucuuucagaucucaaaggcucuuuucagagccaccaaaaaaaaaaaaaaaaaaaaaaaaaaaaaaaaaaaaaaaaaaaaaaaaaaaaaaaaaaaaaaaaaaaaaaaaaaaaaaaaaaaaaaaaaaaaaaaaaaaaagaauu

SEQ ID NO: 7299 - RNA, 1096 nt, Artificial Sequence
  mRNA Design a-1 (hSL-A100-N5) comprising derived and/or modified sequence from Pf(3D7)__XP_001351122.1__HsALB_Pf-CSP(19-272) (opt1)
aggagagucccgcagucggcguccagcggcucugcuuguucgugugugugucguugcaggccuuauucaagcuuaccaugaagugggugaccuucaucagccugcucuuccuguucuccagcgccuacucccuguuccaggaguaccagugcuacggcuccagcuccaacacccgggugcucaacgagcugaacuacgacaacgcggggaccaaccuguacaacgagcucgagaugaacuacuacggcaagcaggagaacugguacagccugaagaagaacucccgcagccugggggagaacgacgacggcaacaacgaggacaacgagaagcuccggaagcccaagcacaagaagcugaagcagccggccgacgggaaccccgaccccaacgccaaccccaacguggacccgaacgccaaccccaacgucgaccccaacgccaaccccaacguggacccgaacgcgaaccccaacgccaaccccaacgccaaccccaacgccaacccgaacgcgaaccccaacgccaaccccaacgccaaccccaacgccaacccgaacgccaaccccaacgcgaaccccaacgccaaccccaacgccaacccgaacgccaaccccaacgccaaccccaacgcgaaccccaacgccaacccgaacgccaaccccaacguggaccccaacgccaaccccaacgccaacccgaacgcgaaccccaacgccaaccccaacgccaacccgaacgccaaccccaacgccaaccccaacgcgaaccccaacgccaacccgaacgccaaccccaacgccaaccccaacgcgaaccccaacgccaacccgaacgccaaccccaacgccaaccccaacgccaaccccaacgcgaacccgaacgccaaccccugaggacuagucccuguucccagagcccacuuuuuuuucuuuuuuugaaauaaaauagccugucuuucagaucucaaaggcucuuuucagagccaccaaaaaaaaaaaaaaaaaaaaaaaaaaaaaaaaaaaaaaaaaaaaaaaaaaaaaaaaaaaaaaaaaaaaaaaaaaaaaaaaaaaaaaaaaaaaaaaaaaaaagaauu

SEQ ID NO: 7300 - RNA, 1258 nt, Artificial Sequence
  mRNA Design a-1 (hSL-A100-N5) comprising derived and/or modified sequence from Pf(3D7)__XP_001351122.1__HsALB_Pf-CSP(19-272)_L(AAY)_Pf-CSP(310-3 27)_L(AAY)_Pf-CSP(346-375) (opt1)
aggagagucccgcagucggcguccagcggcucugcuuguucgugugugugucguugcaggccuuauucaagcuuaccaugaagugggugaccuucaucagccugcucuuccuguucuccagcgccuacucccuguuccaggaguaccagugcuacggcuccagcuccaacacccgggugcucaacgagcugaacuacgacaacgcggggaccaaccuguacaacgagcucgagaugaacuacuacggcaagcaggagaacugguacagccugaagaagaacucccgcagccugggggagaacgacgacggcaacaacgaggacaacgagaagcuccggaagcccaagcacaagaagcugaagcagccggccgacgggaaccccgaccccaacgccaaccccaacguggacccgaacgccaaccccaacgucgaccccaacgccaaccccaacguggacccgaacgcgaaccccaacgccaaccccaacgccaaccccaacgccaacccgaacgcgaaccccaacgccaaccccaacgccaaccccaacgccaacccgaacgccaaccccaacgcgaaccccaacgccaaccccaacgccaacccgaacgccaaccccaacgccaaccccaacgcgaaccccaacgccaacccgaacgccaaccccaacguggaccccaacgccaaccccaacgccaacccgaacgcgaaccccaacgccaaccccaacgccaacccgaacgccaaccccaacgccaaccccaacgcgaaccccaacgccaacccgaacgccaaccccaacgccaaccccaacgcgaaccccaacgccaacccgaacgccaaccccaacgccaaccccaacgccaaccccaacgcgaacccgaacgccaaccccgccgcguaugagccgagcgacaagcacaucaaggaguaccugaacaagauccagaacucccucgcggccuacaucaagcccggcuccgcgaacaagcccaaggacgagcuggacuacgccaacgacaucgagaagaagaucugcaagauggagaagugcagcugaggacuagucccuguucccagagcccacuuuuuuuucuuuuuuugaaauaaaauagccugucuuucagaucucaaaggcucuuuucagagccaccaaaaaaaaaaaaaaaaaaaaaaaaaaaaaaaaaaaaaaaaaaaaaaaaaaaaaaaaaaaaaaaaaaaaaaaaaaaaaaaaaaaaaaaaaaaaaaaaaaaaagaauu

SEQ ID NO: 7301 - RNA, 1219 nt, Artificial Sequence
  mRNA Design a-1 (hSL-A100-N5) comprising derived and/or modified sequence from Pf(3D7)__XP_001351122.1__HsALB_Pf-CSP(19-272)_L(AAY)_Pf-CSP(346-3 65)_L(AAY)_P2 (opt1)
aggagagucccgcagucggcguccagcggcucugcuuguucgugugugugucguugcaggccuuauucaagcuuaccaugaagugggugaccuucaucagccugcucuuccuguucuccagcgccuacucccuguuccaggaguaccagugcuacggcuccagcuccaacacccgggugcucaacgagcugaacuacgacaacgcggggaccaaccuguacaacgagcucgagaugaacuacuacggcaagcaggagaacugguacagccugaagaagaacucccgcagccugggggagaacgacgacggcaacaacgaggacaacgagaagcuccggaagcccaagcacaagaagcugaagcagccggccgacgggaaccccgaccccaacgccaaccccaacguggacccgaacgccaaccccaacgucgaccccaacgccaaccccaacguggacccgaacgcgaaccccaacgccaaccccaacgccaaccccaacgccaacccgaacgcgaaccccaacgccaaccccaacgccaaccccaacgccaacccgaacgccaaccccaacgcgaaccccaacgccaaccccaacgccaacccgaacgccaaccccaacgccaaccccaacgcgaaccccaacgccaacccgaacgccaaccccaacguggaccccaacgccaaccccaacgccaacccgaacgcgaaccccaacgccaaccccaacgccaacccgaacgccaaccccaacgccaaccccaacgcgaaccccaacgccaacccgaacgccaaccccaacgccaaccccaacgcgaaccccaacgccaacccgaacgccaaccccaacgccaaccccaacgccaaccccaacgcgaacccgaacgccaaccccgccgcguauaucaagcccggcuccgcgaacaagcccaaggacgagcuggacuacgccaacgacaucgaggcggccuaccaguacaucaaggccaacagcaaguucaucggcaucaccgagcugugaggacuagucccuguucccagagcccacuuuuuuuucuuuuuuugaaauaaaauagccugucuuucagaucucaaaggcucuuuucagagccaccaaaaaaaaaaaaaaaaaaaaaaaaaaaaaaaaaaaaaaaaaaaaaaaaaaaaaaaaaaaaaaaaaaaaaaaaaaaaaaaaaaaaaaaaaaaaaaaaaaaaagaauu

SEQ ID NO: 7302 - RNA, 1213 nt, Artificial Sequence
  mRNA Design a-1 (hSL-A100-N5) comprising derived and/or modified sequence from Pf(3D7)__XP_001351122.1__HsALB_Pf-CSP(19-272)_L(AAY)_Pf-CSP(346-3 65)_L(AAY)_PADRE (opt1)
aggagagucccgcagucggcguccagcggcucugcuuguucgugugugugucguugcaggccuuauucaagcuuaccaugaagugggugaccuucaucagccugcucuuccuguucuccagcgccuacucccuguuccaggaguaccagugcuacggcuccagcuccaacacccgggugcucaacgagcugaacuacgacaacgcggggaccaaccuguacaacgagcucgagaugaacuacuacggcaagcaggagaacugguacagccugaagaagaacucccgcagccugggggagaacgacgacggcaacaacgaggacaacgagaagcuccggaagcccaagcacaagaagcugaagcagccggccgacgggaaccccgaccccaacgccaaccccaacguggacccgaacgccaaccccaacgucgaccccaacgccaaccccaacguggacccgaacgcgaaccccaacgccaaccccaacgccaaccccaacgccaacccgaacgcgaaccccaacgccaaccccaacgccaaccccaacgccaacccgaacgccaaccccaacgcgaaccccaacgccaaccccaacgccaacccgaacgccaaccccaacgccaaccccaacgcgaaccccaacgccaacccgaacgccaaccccaacguggaccccaacgccaaccccaacgccaacccgaacgcgaaccccaacgccaaccccaacgccaacccgaacgccaaccccaacgccaaccccaacgcgaaccccaacgccaacccgaacgccaaccccaacgccaaccccaacgcgaaccccaacgccaacccgaacgccaaccccaacgccaaccccaacgccaaccccaacgcgaacccgaacgccaaccccgccgcguauaucaagcccggcuccgcgaacaagcccaaggacgagcuggacuacgccaacgacaucgaggcggccuacgccaaguucguggccgccuggacccugaaggcggccgccugaggacuagucccuguucccagagcccacuuuuuuuucuuuuuuugaaauaaaauagccugucuuucagaucucaaaggcucuuuucagagccaccaaaaaaaaaaaaaaaaaaaaaaaaaaaaaaaaaaaaaaaaaaaaaaaaaaaaaaaaaaaaaaaaaaaaaaaaaaaaaaaaaaaaaaaaaaaaaaaaaaaaagaauu

SEQ ID NO: 7303 - RNA, 1270 nt, Artificial Sequence
  mRNA Design a-1 (hSL-A100-N5) comprising derived and/or modified sequence from Pf(3D7)__XP_001351122.1__HsALB_Pf-CSP(19-272)_L(G4S)_Pf-CSP(310-3 27)_L(G4S)_Pf-CSP(346-375) (opt1)
aggagagucccgcagucggcguccagcggcucugcuuguucgugugugugucguugcaggccuuauucaagcuuaccaugaagugggugaccuucaucagccugcucuuccuguucuccagcgccuacucccuguuccaggaguaccagugcuacggcuccagcuccaacacccgggugcucaacgagcugaacuacgacaacgcggggaccaaccuguacaacgagcucgagaugaacuacuacggcaagcaggagaacugguacagccugaagaagaacucccgcagccugggggagaacgacgacggcaacaacgaggacaacgagaagcuccggaagcccaagcacaagaagcugaagcagccggccgacgggaaccccgaccccaacgccaaccccaacguggacccgaacgccaaccccaacgucgaccccaacgccaaccccaacguggacccgaacgcgaaccccaacgccaaccccaacgccaaccccaacgccaacccgaacgcgaaccccaacgccaaccccaacgccaaccccaacgccaacccgaacgccaaccccaacgcgaaccccaacgccaaccccaacgccaacccgaacgccaaccccaacgccaaccccaacgcgaaccccaacgccaacccgaacgccaaccccaacguggaccccaacgccaaccccaacgccaacccgaacgcgaaccccaacgccaaccccaacgccaacccgaacgccaaccccaacgccaaccccaacgcgaaccccaacgccaacccgaacgccaaccccaacgccaaccccaacgcgaaccccaacgccaacccgaacgccaaccccaacgccaaccccaacgccaaccccaacgcgaacccgaacgccaaccccggaggcggaggaucugagccgagcgacaagcacaucaaggaguaccugaacaagauccagaacucccucggcggagguggaaguaucaagcccggcuccgcgaacaagcccaaggacgagcuggacuacgccaacgacaucgagaagaagaucugcaagauggagaagugcagcugaggacuagucccuguucccagagcccacuuuuuuuucuuuuuuugaaauaaaauagccugucuuucagaucucaaaggcucuuuucagagccaccaaaaaaaaaaaaaaaaaaaaaaaaaaaaaaaaaaaaaaaaaaaaaaaaaaaaaaaaaaaaaaaaaaaaaaaaaaaaaaaaaaaaaaaaaaaaaaaaaaaaagaauu

SEQ ID NO: 7304 - RNA, 1255 nt, Artificial Sequence
  mRNA Design a-1 (hSL-A100-N5) comprising derived and/or modified sequence from Pf(3D7)__XP_001351122.1__HsALB_Pf-CSP(19-272)_L(G4S)_Pf-CSP(310-3 27)_Pf-CSP(346-375) (opt1)
aggagagucccgcagucggcguccagcggcucugcuuguucgugugugugucguugcaggccuuauucaagcuuaccaugaagugggugaccuucaucagccugcucuuccuguucuccagcgccuacucccuguuccaggaguaccagugcuacggcuccagcuccaacacccgggugcucaacgagcugaacuacgacaacgcggggaccaaccuguacaacgagcucgagaugaacuacuacggcaagcaggagaacugguacagccugaagaagaacucccgcagccugggggagaacgacgacggcaacaacgaggacaacgagaagcuccggaagcccaagcacaagaagcugaagcagccggccgacgggaaccccgaccccaacgccaaccccaacguggacccgaacgccaaccccaacgucgaccccaacgccaaccccaacguggacccgaacgcgaaccccaacgccaaccccaacgccaaccccaacgccaacccgaacgcgaaccccaacgccaaccccaacgccaaccccaacgccaacccgaacgccaaccccaacgcgaaccccaacgccaaccccaacgccaacccgaacgccaaccccaacgccaaccccaacgcgaaccccaacgccaacccgaacgccaaccccaacguggaccccaacgccaaccccaacgccaacccgaacgcgaaccccaacgccaaccccaacgccaacccgaacgccaaccccaacgccaaccccaacgcgaaccccaacgccaacccgaacgccaaccccaacgccaaccccaacgcgaaccccaacgccaacccgaacgccaaccccaacgccaaccccaacgccaaccccaacgcgaacccgaacgccaaccccggaggcggaggaucugagccgagcgacaagcacaucaaggaguaccugaacaagauccagaacucccucaucaagcccggcuccgcgaacaagcccaaggacgagcuggacuacgccaacgacaucgagaagaagaucugcaagauggagaagugcagcugaggacuagucccuguucccagagcccacuuuuuuuucuuuuuuugaaauaaaauagccugucuuucagaucucaaaggcucuuuucagagccaccaaaaaaaaaaaaaaaaaaaaaaaaaaaaaaaaaaaaaaaaaaaaaaaaaaaaaaaaaaaaaaaaaaaaaaaaaaaaaaaaaaaaaaaaaaaaaaaaaaaaagaauu

SEQ ID NO: 7305 - RNA, 1255 nt, Artificial Sequence
  mRNA Design a-1 (hSL-A100-N5) comprising derived and/or modified sequence from Pf(3D7)__XP_001351122.1__HsALB_Pf-CSP(19-325) (opt1)
aggagagucccgcagucggcguccagcggcucugcuuguucgugugugugucguugcaggccuuauucaagcuuaccaugaagugggugaccuucaucagccugcucuuccuguucuccagcgccuacucccuguuccaggaguaccagugcuacggcuccagcuccaacacccgggugcucaacgagcugaacuacgacaacgcggggaccaaccuguacaacgagcucgagaugaacuacuacggcaagcaggagaacugguacagccugaagaagaacucccgcagccugggggagaacgacgacggcaacaacgaggacaacgagaagcuccggaagcccaagcacaagaagcugaagcagccggccgacgggaaccccgaccccaacgccaaccccaacguggacccgaacgccaaccccaacgucgaccccaacgccaaccccaacguggacccgaacgcgaaccccaacgccaaccccaacgccaaccccaacgccaacccgaacgcgaaccccaacgccaaccccaacgccaaccccaacgccaacccgaacgccaaccccaacgcgaaccccaacgccaaccccaacgccaacccgaacgccaaccccaacgccaaccccaacgcgaaccccaacgccaacccgaacgccaaccccaacguggaccccaacgccaaccccaacgccaacccgaacgcgaaccccaacgccaaccccaacgccaacccgaacgccaaccccaacgccaaccccaacgcgaaccccaacgccaacccgaacgccaaccccaacgccaaccccaacgcgaaccccaacgccaacccgaacgccaaccccaacgccaaccccaacgccaaccccaacgcgaacccgaacgccaaccccaacaagaacaaccagggcaacggccaggggcacaacaugcccaacgaccccaaccgcaacgucgacgagaacgccaacgccaacuccgccgugaagaacaacaacaacgaggagccgagcgacaagcacaucaaggaguaccugaacaagauccagaacugaggacuagucccuguucccagagcccacuuuuuuuucuuuuuuugaaauaaaauagccugucuuucagaucucaaaggcucuuuucagagccaccaaaaaaaaaaaaaaaaaaaaaaaaaaaaaaaaaaaaaaaaaaaaaaaaaaaaaaaaaaaaaaaaaaaaaaaaaaaaaaaaaaaaaaaaaaaaaaaaaaaaagaauu

SEQ ID NO: 7306 - RNA, 1432 nt, Artificial Sequence
  mRNA Design a-1 (hSL-A100-N5) comprising derived and/or modified sequence from Pf(3D7)__XP_001351122.1__HsALB_Pf-CSP(19-384) (opt1)
aggagagucccgcagucggcguccagcggcucugcuuguucgugugugugucguugcaggccuuauucaagcuuaccaugaagugggugaccuucaucagccugcucuuccuguucuccagcgccuacucccuguuccaggaguaccagugcuacggcuccagcuccaacacccgggugcucaacgagcugaacuacgacaacgcggggaccaaccuguacaacgagcucgagaugaacuacuacggcaagcaggagaacugguacagccugaagaagaacucccgcagccugggggagaacgacgacggcaacaacgaggacaacgagaagcuccggaagcccaagcacaagaagcugaagcagccggccgacgggaaccccgaccccaacgccaaccccaacguggacccgaacgccaaccccaacgucgaccccaacgccaaccccaacguggacccgaacgcgaaccccaacgccaaccccaacgccaaccccaacgccaacccgaacgcgaaccccaacgccaaccccaacgccaaccccaacgccaacccgaacgccaaccccaacgcgaaccccaacgccaaccccaacgccaacccgaacgccaaccccaacgccaaccccaacgcgaaccccaacgccaacccgaacgccaaccccaacguggaccccaacgccaaccccaacgccaacccgaacgcgaaccccaacgccaaccccaacgccaacccgaacgccaaccccaacgccaaccccaacgcgaaccccaacgccaacccgaacgccaaccccaacgccaaccccaacgcgaaccccaacgccaacccgaacgccaaccccaacgccaaccccaacgccaaccccaacgcgaacccgaacgccaaccccaacaagaacaaccagggcaacggccaggggcacaacaugcccaacgaccccaaccgcaacgucgacgagaacgccaacgccaacuccgccgugaagaacaacaacaacgaggagccgagcgacaagcacaucaaggaguaccugaacaagauccagaacucccucagcacggaguggucccccugcagcgugaccugcggcaacgggauccagguccggaucaagcccggcuccgcgaacaagcccaaggacgagcuggacuacgccaacgacaucgagaagaagaucugcaagauggagaagugcagcuccguguucaacguggucaacagcuccugaggacuagucccuguucccagagcccacuuuuuuuucuuuuuuugaaauaaaauagccugucuuucagaucucaaaggcucuuuucagagccaccaaaaaaaaaaaaaaaaaaaaaaaaaaaaaaaaaaaaaaaaaaaaaaaaaaaaaaaaaaaaaaaaaaaaaaaaaaaaaaaaaaaaaaaaaaaaaaaaaaaaagaauu

SEQ ID NO: 7307 - RNA, 1570 nt, Artificial Sequence
  mRNA Design a-1 (hSL-A100-N5) comprising derived and/or modified sequence from Pf(3D7)__XP_001351122.1__HsALB_Pf-CSP(19-384)_TM domain HA (opt1)
aggagagucccgcagucggcguccagcggcucugcuuguucgugugugugucguugcaggccuuauucaagcuuaccaugaagugggugaccuucaucagccugcucuuccuguucuccagcgccuacucccuguuccaggaguaccagugcuacggcuccagcuccaacacccgggugcucaacgagcugaacuacgacaacgcggggaccaaccuguacaacgagcucgagaugaacuacuacggcaagcaggagaacugguacagccugaagaagaacucccgcagccugggggagaacgacgacggcaacaacgaggacaacgagaagcuccggaagcccaagcacaagaagcugaagcagccggccgacgggaaccccgaccccaacgccaaccccaacguggacccgaacgccaaccccaacgucgaccccaacgccaaccccaacguggacccgaacgcgaaccccaacgccaaccccaacgccaaccccaacgccaacccgaacgcgaaccccaacgccaaccccaacgccaaccccaacgccaacccgaacgccaaccccaacgcgaaccccaacgccaaccccaacgccaacccgaacgccaaccccaacgccaaccccaacgcgaaccccaacgccaacccgaacgccaaccccaacguggaccccaacgccaaccccaacgccaacccgaacgcgaaccccaacgccaaccccaacgccaacccgaacgccaaccccaacgccaaccccaacgcgaaccccaacgccaacccgaacgccaaccccaacgccaaccccaacgcgaaccccaacgccaacccgaacgccaaccccaacgccaaccccaacgccaaccccaacgcgaacccgaacgccaaccccaacaagaacaaccagggcaacggccaggggcacaacaugcccaacgaccccaaccgcaacgucgacgagaacgccaacgccaacuccgccgugaagaacaacaacaacgaggagccgagcgacaagcacaucaaggaguaccugaacaagauccagaacucccucagcacggaguggucccccugcagcgugaccugcggcaacgggauccagguccggaucaagcccggcuccgcgaacaagcccaaggacgagcuggacuacgccaacgacaucgagaagaagaucugcaagauggagaagugcagcuccguguucaacguggucaacagcuccaagcucgaguccacgcggaucuaccagauccuggcgaucuacagcaccgucgccagcucccuggugcucguggucagccugggggccaucuccuucuggaugugcagcaacggcucccugcagugccgcaucugcaucugaggacuagucccuguucccagagcccacuuuuuuuucuuuuuuugaaauaaaauagccugucuuucagaucucaaaggcucuuuucagagccaccaaaaaaaaaaaaaaaaaaaaaaaaaaaaaaaaaaaaaaaaaaaaaaaaaaaaaaaaaaaaaaaaaaaaaaaaaaaaaaaaaaaaaaaaaaaaaaaaaaaaagaauu

SEQ ID NO: 7308 - RNA, 1282 nt, Artificial Sequence
  mRNA Design a-1 (hSL-A100-N5) comprising derived and/or modified sequence from Pf(3D7)__XP_001351122.1__HsALB_Pf-CSP(82-397) (opt1)
aggagagucccgcagucggcguccagcggcucugcuuguucgugugugugucguugcaggccuuauucaagcuuaccaugaagugggugaccuucaucagccugcucuuccuguucuccagcgccuacuccgacaacgagaagcuccggaagcccaagcacaagaagcugaagcagccggccgacgggaaccccgaccccaacgccaaccccaacguggacccgaacgccaaccccaacgucgaccccaacgccaaccccaacguggacccgaacgcgaaccccaacgccaaccccaacgccaaccccaacgccaacccgaacgcgaaccccaacgccaaccccaacgccaaccccaacgccaacccgaacgccaaccccaacgcgaaccccaacgccaaccccaacgccaacccgaacgccaaccccaacgccaaccccaacgcgaaccccaacgccaacccgaacgccaaccccaacguggaccccaacgccaaccccaacgccaacccgaacgcgaaccccaacgccaaccccaacgccaacccgaacgccaaccccaacgccaaccccaacgcgaaccccaacgccaacccgaacgccaaccccaacgccaaccccaacgcgaaccccaacgccaacccgaacgccaaccccaacgccaaccccaacgccaaccccaacgcgaacccgaacgccaaccccaacaagaacaaccagggcaacggccaggggcacaacaugcccaacgaccccaaccgcaacgucgacgagaacgccaacgccaacuccgccgugaagaacaacaacaacgaggagccgagcgacaagcacaucaaggaguaccugaacaagauccagaacucccucagcacggaguggucccccugcagcgugaccugcggcaacgggauccagguccggaucaagcccggcuccgcgaacaagcccaaggacgagcuggacuacgccaacgacaucgagaagaagaucugcaagauggagaagugcagcuccguguucaacguggucaacagcuccaucgggcugaucauggugcucagcuuccuguuccugaacugaggacuagucccuguucccagagcccacuuuuuuuucuuuuuuugaaauaaaauagccugucuuucagaucucaaaggcucuuuucagagccaccaaaaaaaaaaaaaaaaaaaaaaaaaaaaaaaaaaaaaaaaaaaaaaaaaaaaaaaaaaaaaaaaaaaaaaaaaaaaaaaaaaaaaaaaaaaaaaaaaaaaagaauu

SEQ ID NO: 7309 - RNA, 634 nt, Artificial Sequence
  mRNA Design a-1 (hSL-A100-N5) comprising derived and/or modified sequence from Pf(3D7)__XP_001351122.1__HsALB_Pf-CSP(93-192) (opt1)
aggagagucccgcagucggcguccagcggcucugcuuguucgugugugugucguugcaggccuuauucaagcuuaccaugaagugggugaccuucaucagccugcucuuccuguucuccagcgccuacuccaagcugaagcagccggccgacgggaaccccgaccccaacgccaaccccaacguggacccgaacgccaaccccaacgucgaccccaacgccaaccccaacguggacccgaacgcgaaccccaacgccaaccccaacgccaaccccaacgccaacccgaacgcgaaccccaacgccaaccccaacgccaaccccaacgccaacccgaacgccaaccccaacgcgaaccccaacgccaaccccaacgccaacccgaacgccaaccccaacgccaaccccaacgcgaaccccaacgccaacccgugaggacuagucccuguucccagagcccacuuuuuuuucuuuuuuugaaauaaaauagccugucuuucagaucucaaaggcucuuuucagagccaccaaaaaaaaaaaaaaaaaaaaaaaaaaaaaaaaaaaaaaaaaaaaaaaaaaaaaaaaaaaaaaaaaaaaaaaaaaaaaaaaaaaaaaaaaaaaaaaaaaaaagaauu

SEQ ID NO: 7310 - RNA, 874 nt, Artificial Sequence
  mRNA Design a-1 (hSL-A100-N5) comprising derived and/or modified sequence from Pf(3D7)__XP_001351122.1__HsALB_Pf-CSP(93-272) (opt1)
aggagagucccgcagucggcguccagcggcucugcuuguucgugugugugucguugcaggccuuauucaagcuuaccaugaagugggugaccuucaucagccugcucuuccuguucuccagcgccuacuccaagcugaagcagccggccgacgggaaccccgaccccaacgccaaccccaacguggacccgaacgccaaccccaacgucgaccccaacgccaaccccaacguggacccgaacgcgaaccccaacgccaaccccaacgccaaccccaacgccaacccgaacgcgaaccccaacgccaaccccaacgccaaccccaacgccaacccgaacgccaaccccaacgcgaaccccaacgccaaccccaacgccaacccgaacgccaaccccaacgccaaccccaacgcgaaccccaacgccaacccgaacgccaaccccaacguggaccccaacgccaaccccaacgccaacccgaacgcgaaccccaacgccaaccccaacgccaacccgaacgccaaccccaacgccaaccccaacgcgaaccccaacgccaacccgaacgccaaccccaacgccaaccccaacgcgaaccccaacgccaacccgaacgccaaccccaacgccaaccccaacgccaaccccaacgcgaacccgaacgccaaccccugaggacuagucccuguucccagagcccacuuuuuuuucuuuuuuugaaauaaaauagccugucuuucagaucucaaaggcucuuuucagagccaccaaaaaaaaaaaaaaaaaaaaaaaaaaaaaaaaaaaaaaaaaaaaaaaaaaaaaaaaaaaaaaaaaaaaaaaaaaaaaaaaaaaaaaaaaaaaaaaaaaaaagaauu

SEQ ID NO: 7311 - RNA, 1249 nt, Artificial Sequence
  mRNA Design a-1 (hSL-A100-N5) comprising derived and/or modified sequence from Pf(3D7)__XP_001351122.1__HsALB_Pf-CSP(93-397) (opt1)
aggagagucccgcagucggcguccagcggcucugcuuguucgugugugugucguugcaggccuuauucaagcuuaccaugaagugggugaccuucaucagccugcucuuccuguucuccagcgccuacuccaagcugaagcagccggccgacgggaaccccgaccccaacgccaaccccaacguggacccgaacgccaaccccaacgucgaccccaacgccaaccccaacguggacccgaacgcgaaccccaacgccaaccccaacgccaaccccaacgccaacccgaacgcgaaccccaacgccaaccccaacgccaaccccaacgccaacccgaacgccaaccccaacgcgaaccccaacgccaaccccaacgccaacccgaacgccaaccccaacgccaaccccaacgcgaaccccaacgccaacccgaacgccaaccccaacguggaccccaacgccaaccccaacgccaacccgaacgcgaaccccaacgccaaccccaacgccaacccgaacgccaaccccaacgccaaccccaacgcgaaccccaacgccaacccgaacgccaaccccaacgccaaccccaacgcgaaccccaacgccaacccgaacgccaaccccaacgccaaccccaacgccaaccccaacgcgaacccgaacgccaaccccaacaagaacaaccagggcaacggccaggggcacaacaugcccaacgaccccaaccgcaacgucgacgagaacgccaacgccaacuccgccgugaagaacaacaacaacgaggagccgagcgacaagcacaucaaggaguaccugaacaagauccagaacucccucagcacggaguggucccccugcagcgugaccugcggcaacgggauccagguccggaucaagcccggcuccgcgaacaagcccaaggacgagcuggacuacgccaacgacaucgagaagaagaucugcaagauggagaagugcagcuccguguucaacguggucaacagcuccaucgggcugaucauggugcucagcuuccuguuccugaacugaggacuagucccuguucccagagcccacuuuuuuuucuuuuuuugaaauaaaauagccugucuuucagaucucaaaggcucuuuucagagccaccaaaaaaaaaaaaaaaaaaaaaaaaaaaaaaaaaaaaaaaaaaaaaaaaaaaaaaaaaaaaaaaaaaaaaaaaaaaaaaaaaaaaaaaaaaaaaaaaaaaaagaauu

SEQ ID NO: 7312 - RNA, 619 nt, Artificial Sequence
  mRNA Design a-1 (hSL-A100-N5) comprising derived and/or modified sequence from Pf(3D7)__XP_001351122.1__HsALB_Pf-CSP(98-192) (opt1)
aggagagucccgcagucggcguccagcggcucugcuuguucgugugugugucguugcaggccuuauucaagcuuaccaugaagugggugaccuucaucagccugcucuuccuguucuccagcgccuacuccgccgacgggaaccccgaccccaacgccaaccccaacguggacccgaacgccaaccccaacgucgaccccaacgccaaccccaacguggacccgaacgcgaaccccaacgccaaccccaacgccaaccccaacgccaacccgaacgcgaaccccaacgccaaccccaacgccaaccccaacgccaacccgaacgccaaccccaacgcgaaccccaacgccaaccccaacgccaacccgaacgccaaccccaacgccaaccccaacgcgaaccccaacgccaacccgugaggacuagucccuguucccagagcccacuuuuuuuucuuuuuuugaaauaaaauagccugucuuucagaucucaaaggcucuuuucagagccaccaaaaaaaaaaaaaaaaaaaaaaaaaaaaaaaaaaaaaaaaaaaaaaaaaaaaaaaaaaaaaaaaaaaaaaaaaaaaaaaaaaaaaaaaaaaaaaaaaaaaagaauu

SEQ ID NO: 7313 - RNA, 859 nt, Artificial Sequence
  mRNA Design a-1 (hSL-A100-N5) comprising derived and/or modified sequence from Pf(3D7)__XP_001351122.1__HsALB_Pf-CSP(98-272) (opt1)
aggagagucccgcagucggcguccagcggcucugcuuguucgugugugugucguugcaggccuuauucaagcuuaccaugaagugggugaccuucaucagccugcucuuccuguucuccagcgccuacuccgccgacgggaaccccgaccccaacgccaaccccaacguggacccgaacgccaaccccaacgucgaccccaacgccaaccccaacguggacccgaacgcgaaccccaacgccaaccccaacgccaaccccaacgccaacccgaacgcgaaccccaacgccaaccccaacgccaaccccaacgccaacccgaacgccaaccccaacgcgaaccccaacgccaaccccaacgccaacccgaacgccaaccccaacgccaaccccaacgcgaaccccaacgccaacccgaacgccaaccccaacguggaccccaacgccaaccccaacgccaacccgaacgcgaaccccaacgccaaccccaacgccaacccgaacgccaaccccaacgccaaccccaacgcgaaccccaacgccaacccgaacgccaaccccaacgccaaccccaacgcgaaccccaacgccaacccgaacgccaaccccaacgccaaccccaacgccaaccccaacgcgaacccgaacgccaaccccugaggacuagucccuguucccagagcccacuuuuuuuucuuuuuuugaaauaaaauagccugucuuucagaucucaaaggcucuuuucagagccaccaaaaaaaaaaaaaaaaaaaaaaaaaaaaaaaaaaaaaaaaaaaaaaaaaaaaaaaaaaaaaaaaaaaaaaaaaaaaaaaaaaaaaaaaaaaaaaaaaaaaagaauu

SEQ ID NO: 7314 - RNA, 1165 nt, Artificial Sequence
  mRNA Design a-1 (hSL-A100-N5) comprising derived and/or modified sequence from Pf(3D7)__XP_001351122.1__HsALB_Pf-CSP(98-374) (opt1)
aggagagucccgcagucggcguccagcggcucugcuuguucgugugugugucguugcaggccuuauucaagcuuaccaugaagugggugaccuucaucagccugcucuuccuguucuccagcgccuacuccgccgacgggaaccccgaccccaacgccaaccccaacguggacccgaacgccaaccccaacgucgaccccaacgccaaccccaacguggacccgaacgcgaaccccaacgccaaccccaacgccaaccccaacgccaacccgaacgcgaaccccaacgccaaccccaacgccaaccccaacgccaacccgaacgccaaccccaacgcgaaccccaacgccaaccccaacgccaacccgaacgccaaccccaacgccaaccccaacgcgaaccccaacgccaacccgaacgccaaccccaacguggaccccaacgccaaccccaacgccaacccgaacgcgaaccccaacgccaaccccaacgccaacccgaacgccaaccccaacgccaaccccaacgcgaaccccaacgccaacccgaacgccaaccccaacgccaaccccaacgcgaaccccaacgccaacccgaacgccaaccccaacgccaaccccaacgccaaccccaacgcgaacccgaacgccaaccccaacaagaacaaccagggcaacggccaggggcacaacaugcccaacgaccccaaccgcaacgucgacgagaacgccaacgccaacuccgccgugaagaacaacaacaacgaggagccgagcgacaagcacaucaaggaguaccugaacaagauccagaacucccucagcacggaguggucccccugcagcgugaccugcggcaacgggauccagguccggaucaagcccggcuccgcgaacaagcccaaggacgagcuggacuacgccaacgacaucgagaagaagaucugcaagauggagaagugcugaggacuagucccuguucccagagcccacuuuuuuuucuuuuuuugaaauaaaauagccugucuuucagaucucaaaggcucuuuucagagccaccaaaaaaaaaaaaaaaaaaaaaaaaaaaaaaaaaaaaaaaaaaaaaaaaaaaaaaaaaaaaaaaaaaaaaaaaaaaaaaaaaaaaaaaaaaaaaaaaaaaaagaauu

SEQ ID NO: 7315 - RNA, 1234 nt, Artificial Sequence
  mRNA Design a-1 (hSL-A100-N5) comprising derived and/or modified sequence from Pf(3D7)__XP_001351122.1__HsALB_Pf-CSP(98-397) (opt1)
aggagagucccgcagucggcguccagcggcucugcuuguucgugugugugucguugcaggccuuauucaagcuuaccaugaagugggugaccuucaucagccugcucuuccuguucuccagcgccuacuccgccgacgggaaccccgaccccaacgccaaccccaacguggacccgaacgccaaccccaacgucgaccccaacgccaaccccaacguggacccgaacgcgaaccccaacgccaaccccaacgccaaccccaacgccaacccgaacgcgaaccccaacgccaaccccaacgccaaccccaacgccaacccgaacgccaaccccaacgcgaaccccaacgccaaccccaacgccaacccgaacgccaaccccaacgccaaccccaacgcgaaccccaacgccaacccgaacgccaaccccaacguggaccccaacgccaaccccaacgccaacccgaacgcgaaccccaacgccaaccccaacgccaacccgaacgccaaccccaacgccaaccccaacgcgaaccccaacgccaacccgaacgccaaccccaacgccaaccccaacgcgaaccccaacgccaacccgaacgccaaccccaacgccaaccccaacgccaaccccaacgcgaacccgaacgccaaccccaacaagaacaaccagggcaacggccaggggcacaacaugcccaacgaccccaaccgcaacgucgacgagaacgccaacgccaacuccgccgugaagaacaacaacaacgaggagccgagcgacaagcacaucaaggaguaccugaacaagauccagaacucccucagcacggaguggucccccugcagcgugaccugcggcaacgggauccagguccggaucaagcccggcuccgcgaacaagcccaaggacgagcuggacuacgccaacgacaucgagaagaagaucugcaagauggagaagugcagcuccguguucaacguggucaacagcuccaucgggcugaucauggugcucagcuuccuguuccugaacugaggacuagucccuguucccagagcccacuuuuuuuucuuuuuuugaaauaaaauagccugucuuucagaucucaaaggcucuuuucagagccaccaaaaaaaaaaaaaaaaaaaaaaaaaaaaaaaaaaaaaaaaaaaaaaaaaaaaaaaaaaaaaaaaaaaaaaaaaaaaaaaaaaaaaaaaaaaaaaaaaaaaagaauu

SEQ ID NO: 7316 - RNA, 1561 nt, Artificial Sequence
  mRNA Design a-1 (hSL-A100-N5) comprising derived and/or modified sequence from Pf(3D7)__XP_001351122.1__HsALB_Pf-CSP(199-377)_L(PVTN)_HBsAg (opt1)
aggagagucccgcagucggcguccagcggcucugcuuguucgugugugugucguugcaggccuuauucaagcuuaccaugaaguggguaaccuuuauuucccuucuuuuucucuuuagcucggcuuauuccgaccccaacgccaaccccaacgccaacccgaacgcgaaccccaacgccaaccccaacgccaacccgaacgccaaccccaacgccaaccccaacgcgaaccccaacgccaacccgaacgccaaccccaacgccaaccccaacgcgaaccccaacgccaacccgaacgccaaccccaacgccaaccccaacgccaaccccaacgcgaacccgaacgccaaccccaacaagaacaaccagggcaacggccaggggcacaacaugcccaacgaccccaaccgcaacgucgacgagaacgccaacgccaacuccgccgugaagaacaacaacaacgaggagccgagcgacaagcacaucaaggaguaccugaacaagauccagaacucccucagcacggaguggucccccugcagcgugaccugcggcaacgggauccagguccggaucaagcccggcuccgcgaacaagcccaaggacgagcuggacuacgccaacgacaucgagaagaagaucugcaagauggagaagugcagcuccgugccggugacgaacauggagaacaucaccagcggcuuccuggggccccuccuggugcugcaggccggcuucuuccuccugacccgcauccugaccaucccgcagucccucgacagcugguggaccucccugaacuuccucgggggcagccccgucugccuggggcagaacucccagagccccaccuccaaccacagccccaccuccugcccgcccaucugccccggcuaccgguggaugugccugcgccgguucaucaucuuccuguucauccuccugcugugccucaucuuccugcuggugcuccuggacuaccagggcaugcugcccgugugcccgcucauccccgggagcacgaccaccaacaccggccccugcaagacgugcaccacccccgcccaggggaacuccauguucccgagcugcugcugcaccaagcccacggacggcaacugcacgugcauccccauccccuccagcugggcguucgccaaguaccugugggagugggccuccguccgcuucagcuggcugucccuccuggugccguucgugcagugguucgucgggcugagccccaccguguggcucuccgccaucuggaugaugugguacuggggccccagccuguacagcaucgugucccccuucaucccgcugcuccccaucuucuucugccugugggucuacaucugaggacuagucccuguucccagagcccacuuuuuuuucuuuuuuugaaauaaaauagccugucuuucagaucucaaaggcucuuuucagagccaccaaaaaaaaaaaaaaaaaaaaaaaaaaaaaaaaaaaaaaaaaaaaaaaaaaaaaaaaaaaaaaaaaaaaaaaaaaaaaaaaaaaaaaaaaaaaaaaaaaaaagaauu

SEQ ID NO: 7317 - RNA, 1471 nt, Artificial Sequence; identical to SEQ ID NO: 7287
  mRNA Design a-1 (hSL-A100-N5) comprising derived and/or modified sequence from Pf(3D7)__XP_001351122.1__Pf-CSP (opt1)

SEQ ID NO: 7318 - RNA, 1402 nt, Artificial Sequence; identical to SEQ ID NO: 7288
  mRNA Design a-1 (hSL-A100-N5) comprising derived and/or modified sequence from Pf(3D7)__XP_001351122.1__Pf-CSP(1-374) (opt1)

SEQ ID NO: 7319 - RNA, 1255 nt, Artificial Sequence; identical to SEQ ID NO: 7289
  mRNA Design a-1 (hSL-A100-N5) comprising derived and/or modified sequence from Pf(3D7)__XP_001351122.1__Pf-CSP(1-325) (opt1)

SEQ ID NO: 7320 - RNA, 1471 nt, Artificial Sequence
  mRNA Design a-1 (hSL-A100-N5) comprising derived and/or modified sequence from Pf(3D7)__XP_001351122.1__HsALB_Pf-CSP(19-397) (opt1)
aggagagucccgcagucggcguccagcggcucugcuuguucgugugugugucguugcaggccuuauucaagcuuaccaugaagugggugaccuucaucagccuccuguuccuguucuccagcgccuacucccuguuccaggaguaccagugcuacggcagcuccagcaacacccgcguccucaacgagcugaacuacgacaacgccgggacgaaccuguacaacgagcucgagaugaacuacuacggcaagcaggagaacugguacucccugaagaagaacagccggucccugggggagaacgacgacggcaacaacgaggacaacgagaagcuccgcaagcccaagcacaagaagcugaagcagccggcggacgggaaccccgaccccaacgccaaccccaacguggacccgaacgccaaccccaacguggaccccaacgccaaccccaacgucgacccgaacgccaaccccaacgcgaaccccaacgccaaccccaacgccaacccgaacgccaaccccaacgcgaaccccaacgccaaccccaacgccaacccgaacgccaaccccaacgccaaccccaacgcgaaccccaacgccaacccgaacgccaaccccaacgccaaccccaacgccaaccccaacgcgaacccgaacgccaaccccaacguggaccccaacgccaaccccaacgccaacccgaacgccaaccccaacgcgaaccccaacgccaacccgaacgccaaccccaacgccaaccccaacgccaaccccaacgcgaacccgaacgccaaccccaacgccaaccccaacgccaaccccaacgcgaacccgaacgccaaccccaacgccaaccccaacgccaaccccaacgccaacccgaacgcgaaccccaacaagaacaaccagggcaacggccaggggcacaacaugcccaacgaccccaaccggaacguggacgagaacgccaacgccaacagcgccgucaagaacaacaacaacgaggagccguccgacaagcacaucaaggaguaccugaacaagauccagaacagccucuccaccgaguggagccccugcuccgugaccugcggcaacgggauccaggugcgcaucaagcccggcagcgccaacaagcccaaggacgagcuggacuacgcgaacgacaucgagaagaagaucugcaagauggagaagugcuccagcgucuucaacguggugaacuccagcaucgggcugaucaugguccucagcuuccuguuccugaacugaggacuagucccuguucccagagcccacuuuuuuuucuuuuuuugaaauaaaauagccugucuuucagaucucaaaggcucuuuucagagccaccaaaaaaaaaaaaaaaaaaaaaaaaaaaaaaaaaaaaaaaaaaaaaaaaaaaaaaaaaaaaaaaaaaaaaaaaaaaaaaaaaaaaaaaaaaaaaaaaaaaaagaauu

SEQ ID NO: 7321 - RNA, 1489 nt, Artificial Sequence
  mRNA Design a-1 (hSL-A100-N5) comprising derived and/or modified sequence from Pf(3D7)__XP_001351122.1__HsIns-iso1_Pf-CSP(19-397) (opt1)
aggagagucccgcagucggcguccagcggcucugcuuguucgugugugugucguugcaggccuuauucaagcuuaccauggcccuguggaugcgccuccugccccugcucgcccugcuggcgcucuggggcccggaccccgccgccgcccuguuccaggaguaccagugcuacgggagcuccagcaacacccgggugcugaacgagcucaacuacgacaacgccggcaccaaccuguacaacgagcuggagaugaacuacuacgggaagcaggagaacugguacucccucaagaagaacagccgcucccugggcgagaacgacgacgggaacaacgaggacaacgagaagcugcggaagcccaagcacaagaagcucaagcagcccgcggacggcaacccggaccccaacgccaaccccaacgucgaccccaacgccaacccgaacguggaccccaacgccaaccccaacguggaccccaacgcgaacccgaacgccaaccccaacgccaaccccaacgccaaccccaacgccaacccgaacgcgaaccccaacgccaaccccaacgccaaccccaacgccaacccgaacgccaaccccaacgcgaaccccaacgccaaccccaacgccaacccgaacgccaaccccaacgccaaccccaacgcgaaccccaacgccaacccgaacgucgaccccaacgccaaccccaacgccaacccgaacgccaaccccaacgcgaaccccaacgccaaccccaacgccaacccgaacgccaaccccaacgcgaaccccaacgccaaccccaacgccaacccgaacgccaaccccaacgccaaccccaacgcgaaccccaacgccaacccgaacgccaaccccaacgccaaccccaacgccaaccccaacgcgaacccgaacaagaacaaccagggcaacgggcagggccacaacaugcccaacgaccccaaccgcaacguggacgagaacgccaacgccaacagcgccgugaagaacaacaacaacgaggagcccuccgacaagcacaucaaggaguaccugaacaagauccagaacagccuguccacggaguggagcccgugcuccgugaccugcgggaacggcauccagguccggaucaagcccgggagcgccaacaagcccaaggacgagcucgacuacgcgaacgacaucgagaagaagaucugcaagauggagaagugcuccagcguguucaacgucgugaacuccagcaucggccugaucauggugcuguccuuccucuuccugaacugaggacuagucccuguucccagagcccacuuuuuuuucuuuuuuugaaauaaaauagccugucuuucagaucucaaaggcucuuuucagagccaccaaaaaaaaaaaaaaaaaaaaaaaaaaaaaaaaaaaaaaaaaaaaaaaaaaaaaaaaaaaaaaaaaaaaaaaaaaaaaaaaaaaaaaaaaaaaaaaaaaaaagaauu

SEQ ID NO: 7322 - RNA, 1468 nt, Artificial Sequence
  mRNA Design a-1 (hSL-A100-N5) comprising derived and/or modified sequence from Pf(3D7)__XP_001351122.1__HsSPARC_Pf-CSP(19-397) (opt1)
aggagagucccgcagucggcguccagcggcucugcuuguucgugugugugucguugcaggccuuauucaagcuuaccaugcgcgccuggaucuucuuccugcucugccuggccggccgggcgcuggcccucuuccaggaguaccagugcuacgggagcuccagcaacacccgcgugcugaacgagcugaacuacgacaacgccggcaccaaccucuacaacgagcuggagaugaacuacuacgggaagcaggagaacugguacucccugaagaagaacagccggucccucggcgagaacgacgacgggaacaacgaggacaacgagaagcugcgcaagcccaagcacaagaagcugaagcagccggccgacggcaaccccgaccccaacgccaaccccaacgucgacccgaacgcgaaccccaacguggaccccaacgccaaccccaacguggacccgaacgccaaccccaacgccaaccccaacgcgaaccccaacgccaacccgaacgccaaccccaacgccaaccccaacgccaaccccaacgcgaacccgaacgccaaccccaacgccaaccccaacgccaaccccaacgccaacccgaacgcgaaccccaacgccaaccccaacgccaaccccaacgccaacccgaacgccaaccccaacgucgaccccaacgcgaaccccaacgccaacccgaacgccaaccccaacgccaaccccaacgccaacccgaacgcgaaccccaacgccaaccccaacgccaaccccaacgccaacccgaacgcgaaccccaacgccaaccccaacgccaaccccaacgccaacccgaacgccaaccccaacgcgaaccccaacgccaaccccaacgccaacccgaacgccaaccccaacaagaacaaccagggcaacgggcagggccacaacaugcccaacgaccccaaccggaacguggacgagaacgccaacgcgaacagcgccgugaagaacaacaacaacgaggagccguccgacaagcacaucaaggaguaccucaacaagauccagaacagccuguccacggaguggagccccugcuccgugaccugcgggaacggcauccagguccgcaucaagcccgggagcgccaacaagcccaaggacgagcuggacuacgccaacgacaucgagaagaagaucugcaagauggagaagugcuccagcguguucaacgucgugaacuccagcaucggccucaucauggugcuguccuuccuguuccucaacugaggacuagucccuguucccagagcccacuuuuuuuucuuuuuuugaaauaaaauagccugucuuucagaucucaaaggcucuuuucagagccaccaaaaaaaaaaaaaaaaaaaaaaaaaaaaaaaaaaaaaaaaaaaaaaaaaaaaaaaaaaaaaaaaaaaaaaaaaaaaaaaaaaaaaaaaaaaaaaaaaaaaagaauu

SEQ ID NO: 7323 - RNA, 1471 nt, Artificial Sequence
  mRNA Design a-1 (hSL-A100-N5) comprising derived and/or modified sequence from Pf(3D7)__XP_001351122.1__IgE_Pf-CSP(19-397) (opt1)
aggagagucccgcagucggcguccagcggcucugcuuguucgugugugugucguugcaggccuuauucaagcuuaccauggacuggaccuggauccuguuccucguggccgccgcgacccgcguccacagccuguuccaggaguaccagugcuacggcuccagcuccaacacgcgggugcugaacgagcucaacuacgacaacgccgggaccaaccuguacaacgagcuggagaugaacuacuacggcaagcaggagaacugguacagccucaagaagaacucccgcagccugggggagaacgacgacggcaacaacgaggacaacgagaagcugcggaagcccaagcacaagaagcucaagcagccggccgacgggaaccccgaccccaacgccaaccccaacguggacccgaacgccaaccccaacgucgaccccaacgcgaaccccaacguggacccgaacgccaaccccaacgccaaccccaacgccaaccccaacgcgaacccgaacgccaaccccaacgccaaccccaacgccaaccccaacgccaacccgaacgcgaaccccaacgccaaccccaacgccaaccccaacgccaacccgaacgccaaccccaacgcgaaccccaacgccaaccccaacgccaacccgaacgccaaccccaacguggaccccaacgccaaccccaacgcgaacccgaacgccaaccccaacgccaaccccaacgccaacccgaacgccaaccccaacgcgaaccccaacgccaaccccaacgccaacccgaacgccaaccccaacgcgaaccccaacgccaaccccaacgccaacccgaacgccaaccccaacgccaaccccaacgcgaaccccaacgccaacccgaacgccaaccccaacaagaacaaccagggcaacggccaggggcacaacaugcccaacgaccccaaccgcaacgucgacgagaacgccaacgccaacuccgcggugaagaacaacaacaacgaggagccgagcgacaagcacaucaaggaguaccugaacaagauccagaacucccugagcaccgaguggucccccugcagcgugaccugcggcaacgggauccagguccggaucaagcccggcuccgccaacaagcccaaggacgagcucgacuacgccaacgacaucgagaagaagaucugcaagauggagaagugcagcuccguguucaacguggucaacagcuccaucgggcugaucauggugcugagcuuccucuuccugaacugaggacuagucccuguucccagagcccacuuuuuuuucuuuuuuugaaauaaaauagccugucuuucagaucucaaaggcucuuuucagagccaccaaaaaaaaaaaaaaaaaaaaaaaaaaaaaaaaaaaaaaaaaaaaaaaaaaaaaaaaaaaaaaaaaaaaaaaaaaaaaaaaaaaaaaaaaaaaaaaaaaaaagaauu

SEQ ID NO: 7324 - RNA, 1636 nt, Artificial Sequence
  mRNA Design a-1 (hSL-A100-N5) comprising derived and/or modified sequence from Pf(3D7)__XP_001351122.1__Pf-CSP_L(G4SG4)_TM domain HA (opt1)
aggagagucccgcagucggcguccagcggcucugcuuguucgugugugugucguugcaggccuuauucaagcuuaccaugaugcgcaagcuggccauccucagcguguccagcuuccuguucgucgaggcccuguuccaggaguaccagugcuacggcuccagcuccaacacccgggugcucaacgagcugaacuacgacaacgcggggaccaaccuguacaacgagcucgagaugaacuacuacggcaagcaggagaacugguacagccugaagaagaacucccgcagccugggggagaacgacgacggcaacaacgaggacaacgagaagcuccggaagcccaagcacaagaagcugaagcagccggccgacgggaaccccgaccccaacgccaaccccaacguggacccgaacgccaaccccaacgucgaccccaacgccaaccccaacguggacccgaacgcgaaccccaacgccaaccccaacgccaaccccaacgccaacccgaacgcgaaccccaacgccaaccccaacgccaaccccaacgccaacccgaacgccaaccccaacgcgaaccccaacgccaaccccaacgccaacccgaacgccaaccccaacgccaaccccaacgcgaaccccaacgccaacccgaacgccaaccccaacguggaccccaacgccaaccccaacgccaacccgaacgcgaaccccaacgccaaccccaacgccaacccgaacgccaaccccaacgccaaccccaacgcgaaccccaacgccaacccgaacgccaaccccaacgccaaccccaacgcgaaccccaacgccaacccgaacgccaaccccaacgccaaccccaacgccaaccccaacgcgaacccgaacgccaaccccaacaagaacaaccagggcaacggccaggggcacaacaugcccaacgaccccaaccgcaacgucgacgagaacgccaacgccaacuccgccgugaagaacaacaacaacgaggagccgagcgacaagcacaucaaggaguaccugaacaagauccagaacucccucagcacggaguggucccccugcagcgugaccugcggcaacgggauccagguccggaucaagcccggcuccgcgaacaagcccaaggacgagcuggacuacgccaacgacaucgagaagaagaucugcaagauggagaagugcagcuccguguucaacguggucaacagcuccaucgggcugaucauggugcucagcuuccuguuccugaacggcggcgggggcagcgggggcggcgggaagcucgaguccacccgcaucuaccagauccuggccaucuacagcaccguggccuccagccugguccucguggugucccugggcgccaucagcuucuggaugugcuccaacgggagccugcagugccggaucugcaucugaggacuagucccuguucccagagcccacuuuuuuuucuuuuuuugaaauaaaauagccugucuuucagaucucaaaggcucuuuucagagccaccaaaaaaaaaaaaaaaaaaaaaaaaaaaaaaaaaaaaaaaaaaaaaaaaaaaaaaaaaaaaaaaaaaaaaaaaaaaaaaaaaaaaaaaaaaaaaaaaaaaaagaauu

SEQ ID NO: 7325 - RNA, 1510 nt, Artificial Sequence
  mRNA Design a-1 (hSL-A100-N5) comprising derived and/or modified sequence from Pf(3D7)__XP_001351122.1__Pf-CSP(199-377)_L(PVTN)_HBsAg (opt1)
aggagagucccgcagucggcguccagcggcucugcuuguucgugugugugucguugcaggccuuauucaagcuuaccauggaccccaacgccaacccgaacgccaaccccaacgcgaaccccaacgccaaccccaacgccaacccgaacgccaaccccaacgccaaccccaacgcgaaccccaacgccaacccgaacgccaaccccaacgccaaccccaacgcgaaccccaacgccaacccgaacgccaaccccaacgccaaccccaacgccaaccccaacgcgaacccgaacgccaaccccaacaagaacaaccagggcaacgggcagggccacaacaugcccaacgaccccaaccgcaacguggacgagaacgccaacgccaacagcgccgucaagaacaacaacaacgaggagccguccgacaagcacaucaaggaguaccugaacaagauccagaacagccucuccaccgaguggagccccugcuccgugaccugcgggaacggcauccaggugcggaucaagcccgggagcgcgaacaagcccaaggacgagcuggacuacgccaacgacaucgagaagaagaucugcaagauggagaagugcuccagcgucccggugacgaacauggagaacaucaccuccggcuuccugggcccccuccuggugcugcaggccggguucuuccuccugacccgcauccugaccaucccccagagccucgacuccugguggacgagccugaacuuccugggcgggucccccgucugccucggccagaacagccaguccccgaccagcaaccacucccccaccagcugcccgcccaucugccccggguaccgguggaugugccugcgccgguucaucaucuuccuguucauccuccugcugugccucaucuuccugcuggugcuccuggacuaccagggcaugcugcccgugugcccccucaucccgggcuccaccacgaccaacaccgggcccugcaagaccugcacgacccccgcccagggcaacagcauguuccccagcugcugcugcaccaagccgaccgacgggaacugcacgugcauccccauccccuccagcugggccuucgcgaaguaccugugggagugggccuccguccgcuucagcuggcugucccuccuggugcccuucgugcagugguucgucggccugagcccgaccguguggcucuccgccaucuggaugaugugguacuggggccccagccuguacuccaucgugagccccuucaucccccugcucccgaucuucuucugccugugggucuacaucugaggacuagucccuguucccagagcccacuuuuuuuucuuuuuuugaaauaaaauagccugucuuucagaucucaaaggcucuuuucagagccaccaaaaaaaaaaaaaaaaaaaaaaaaaaaaaaaaaaaaaaaaaaaaaaaaaaaaaaaaaaaaaaaaaaaaaaaaaaaaaaaaaaaaaaaaaaaaaaaaaaaaagaauu

SEQ ID NO: 7326 - RNA, 1552 nt, Artificial Sequence
  mRNA Design a-1 (hSL-A100-N5) comprising derived and/or modified sequence from Pf(3D7)__XP_001351122.1__Pf-CSP(199-387)_L(PVTN)_HBsAg (opt1)
aggagagucccgcagucggcguccagcggcucugcuuguucgugugugugucguugcaggccuuauucaagcuuaccaugauggcccccgacccgaacgccaaccccaacgcgaaccccaacgccaaccccaacgccaacccgaacgccaaccccaacgccaaccccaacgcgaaccccaacgccaacccgaacgccaaccccaacgccaaccccaacgcgaaccccaacgccaacccgaacgccaaccccaacgccaaccccaacgccaaccccaacgcgaacccgaacgccaaccccaacgccaaccccaacaagaacaaccagggcaacgggcagggccacaacaugcccaacgacccgaaccgcaacguggacgagaacgccaacgccaacagcgcggucaagaacaacaacaacgaggagcccuccgacaagcacaucaaggaguaccugaacaagauccagaacagccucuccaccgaguggagccccugcuccgugaccugcgggaacggcauccaggugcggaucaagcccgggagcgccaacaagccgaaggacgagcuggacuacgccaacgacaucgagaagaagaucugcaagauggagaagugcuccagcgucuucaacguggugaacuccagcaucggccugggccccgucacgaacauggagaacaucaccuccggguuccucggcccccugcuggugcuccaggccggguucuuccugcugacccgcauccucaccaucccccagagccuggacuccugguggacgagccugaacuuccucggcggguccccggugugccugggccagaacagccagucccccaccagcaaccacucccccaccagcugcccgcccaucugccccggcuaccgguggaugugccugcgccgguucaucaucuuccucuucauccugcugcucugccugaucuuccugcucguccugcuggacuaccaggggaugcuccccgugugcccgcugauccccggcagcaccacgaccaacaccgggcccugcaagaccugcacgacccccgcccagggcaacuccauguucccgagcugcugcugcaccaagcccaccgacggcaacugcacgugcauccccauccccuccagcugggcguucgccaaguaccugugggagugggccuccgugcgcuucagcuggcucucccugcuggucccguucgugcagugguucguggggcucagccccaccgucuggcuguccgccaucuggaugaugugguacuggggccccagccuguacuccaucgugagccccuucaucccgcuccugcccaucuucuucugccuguggguguacaucugaggacuagucccuguucccagagcccacuuuuuuuucuuuuuuugaaauaaaauagccugucuuucagaucucaaaggcucuuuucagagccaccaaaaaaaaaaaaaaaaaaaaaaaaaaaaaaaaaaaaaaaaaaaaaaaaaaaaaaaaaaaaaaaaaaaaaaaaaaaaaaaaaaaaaaaaaaaaaaaaaaaaagaauu

SEQ ID NO: 7327 - RNA, 736 nt, Artificial Sequence
  mRNA Design a-1 (hSL-A100-N5) comprising derived and/or modified sequence from Pf(3D7)__XP_001351122.1__HsALB_Pf-CSP(19-152) (opt1)
aggagagucccgcagucggcguccagcggcucugcuuguucgugugugugucguugcaggccuuauucaagcuuaccaugaagugggugaccuucaucagccuccuguuccuguucuccagcgccuacucccuguuccaggaguaccagugcuacggcagcuccagcaacacccgcguccucaacgagcugaacuacgacaacgccgggacgaaccuguacaacgagcucgagaugaacuacuacggcaagcaggagaacugguacucccugaagaagaacagccggucccugggggagaacgacgacggcaacaacgaggacaacgagaagcuccgcaagcccaagcacaagaagcugaagcagccggcggacgggaaccccgaccccaacgccaaccccaacguggacccgaacgccaaccccaacguggaccccaacgccaaccccaacgucgacccgaacgccaaccccaacgcgaaccccaacgccaaccccaacgccaacccgaacgccaaccccaacgcgaaccccugaggacuagucccuguucccagagcccacuuuuuuuucuuuuuuugaaauaaaauagccugucuuucagaucucaaaggcucuuuucagagccaccaaaaaaaaaaaaaaaaaaaaaaaaaaaaaaaaaaaaaaaaaaaaaaaaaaaaaaaaaaaaaaaaaaaaaaaaaaaaaaaaaaaaaaaaaaaaaaaaaaaaagaauu

SEQ ID NO: 7328 - RNA, 856 nt, Artificial Sequence
  mRNA Design a-1 (hSL-A100-N5) comprising derived and/or modified sequence from Pf(3D7)__XP_001351122.1__HsALB_Pf-CSP(19-192) (opt1)
aggagagucccgcagucggcguccagcggcucugcuuguucgugugugugucguugcaggccuuauucaagcuuaccaugaagugggugaccuucaucagccuccuguuccuguucuccagcgccuacucccuguuccaggaguaccagugcuacggcagcuccagcaacacccgcguccucaacgagcugaacuacgacaacgccgggacgaaccuguacaacgagcucgagaugaacuacuacggcaagcaggagaacugguacucccugaagaagaacagccggucccugggggagaacgacgacggcaacaacgaggacaacgagaagcuccgcaagcccaagcacaagaagcugaagcagccggcggacgggaaccccgaccccaacgccaaccccaacguggacccgaacgccaaccccaacguggaccccaacgccaaccccaacgucgacccgaacgccaaccccaacgcgaaccccaacgccaaccccaacgccaacccgaacgccaaccccaacgcgaaccccaacgccaaccccaacgccaacccgaacgccaaccccaacgccaaccccaacgcgaaccccaacgccaacccgaacgccaaccccaacgccaaccccaacgccaaccccaacgcgaacccgugaggacuagucccuguucccagagcccacuuuuuuuucuuuuuuugaaauaaaauagccugucuuucagaucucaaaggcucuuuucagagccaccaaaaaaaaaaaaaaaaaaaaaaaaaaaaaaaaaaaaaaaaaaaaaaaaaaaaaaaaaaaaaaaaaaaaaaaaaaaaaaaaaaaaaaaaaaaaaaaaaaaaagaauu

SEQ ID NO: 7329 - RNA, 1096 nt, Artificial Sequence
  mRNA Design a-1 (hSL-A100-N5) comprising derived and/or modified sequence from Pf(3D7)__XP_001351122.1__HsALB_Pf-CSP(19-272) (opt1)
aggagagucccgcagucggcguccagcggcucugcuuguucgugugugugucguugcaggccuuauucaagcuuaccaugaagugggugaccuucaucagccuccuguuccuguucuccagcgccuacucccuguuccaggaguaccagugcuacggcagcuccagcaacacccgcguccucaacgagcugaacuacgacaacgccgggacgaaccuguacaacgagcucgagaugaacuacuacggcaagcaggagaacugguacucccugaagaagaacagccggucccugggggagaacgacgacggcaacaacgaggacaacgagaagcuccgcaagcccaagcacaagaagcugaagcagccggcggacgggaaccccgaccccaacgccaaccccaacguggacccgaacgccaaccccaacguggaccccaacgccaaccccaacgucgacccgaacgccaaccccaacgcgaaccccaacgccaaccccaacgccaacccgaacgccaaccccaacgcgaaccccaacgccaaccccaacgccaacccgaacgccaaccccaacgccaaccccaacgcgaaccccaacgccaacccgaacgccaaccccaacgccaaccccaacgccaaccccaacgcgaacccgaacgccaaccccaacguggaccccaacgccaaccccaacgccaacccgaacgccaaccccaacgcgaaccccaacgccaacccgaacgccaaccccaacgccaaccccaacgccaaccccaacgcgaacccgaacgccaaccccaacgccaaccccaacgccaaccccaacgcgaacccgaacgccaaccccaacgccaaccccaacgccaaccccaacgccaacccgaacgcgaaccccugaggacuagucccuguucccagagcccacuuuuuuuucuuuuuuugaaauaaaauagccugucuuucagaucucaaaggcucuuuucagagccaccaaaaaaaaaaaaaaaaaaaaaaaaaaaaaaaaaaaaaaaaaaaaaaaaaaaaaaaaaaaaaaaaaaaaaaaaaaaaaaaaaaaaaaaaaaaaaaaaaaaaagaauu

SEQ ID NO: 7330 - RNA, 1258 nt, Artificial Sequence
  mRNA Design a-1 (hSL-A100-N5) comprising derived and/or modified sequence from Pf(3D7)__XP_001351122.1__HsALB_Pf-CSP(19-272)_L(AAY)_Pf-CSP(310-3 27)_L(AAY)_Pf-CSP(346-375) (opt1)
aggagagucccgcagucggcguccagcggcucugcuuguucgugugugugucguugcaggccuuauucaagcuuaccaugaagugggugaccuucaucagccuccuguuccuguucuccagcgccuacucccuguuccaggaguaccagugcuacggcagcuccagcaacacccgcguccucaacgagcugaacuacgacaacgccgggacgaaccuguacaacgagcucgagaugaacuacuacggcaagcaggagaacugguacucccugaagaagaacagccggucccugggggagaacgacgacggcaacaacgaggacaacgagaagcuccgcaagcccaagcacaagaagcugaagcagccggcggacgggaaccccgaccccaacgccaaccccaacguggacccgaacgccaaccccaacguggaccccaacgccaaccccaacgucgacccgaacgccaaccccaacgcgaaccccaacgccaaccccaacgccaacccgaacgccaaccccaacgcgaaccccaacgccaaccccaacgccaacccgaacgccaaccccaacgccaaccccaacgcgaaccccaacgccaacccgaacgccaaccccaacgccaaccccaacgccaaccccaacgcgaacccgaacgccaaccccaacguggaccccaacgccaaccccaacgccaacccgaacgccaaccccaacgcgaaccccaacgccaacccgaacgccaaccccaacgccaaccccaacgccaaccccaacgcgaacccgaacgccaaccccaacgccaaccccaacgccaaccccaacgcgaacccgaacgccaaccccaacgccaaccccaacgccaaccccaacgccaacccgaacgcgaaccccgccgccuacgagcccagcgacaagcacaucaaggaguaccugaacaagauccagaacucccucgccgccuacaucaagcccggcagcgcgaacaagccgaaggacgagcuggacuacgccaacgacaucgagaagaagaucugcaagauggagaagugcuccugaggacuagucccuguucccagagcccacuuuuuuuucuuuuuuugaaauaaaauagccugucuuucagaucucaaaggcucuuuucagagccaccaaaaaaaaaaaaaaaaaaaaaaaaaaaaaaaaaaaaaaaaaaaaaaaaaaaaaaaaaaaaaaaaaaaaaaaaaaaaaaaaaaaaaaaaaaaaaaaaaaaaagaauu

SEQ ID NO: 7331 - RNA, 1219 nt, Artificial Sequence
  mRNA Design a-1 (hSL-A100-N5) comprising derived and/or modified sequence from Pf(3D7)__XP_001351122.1__HsALB_Pf-CSP(19-272)_L(AAY)_Pf-CSP(346-3 65)_L(AAY)_P2 (opt1)
aggagagucccgcagucggcguccagcggcucugcuuguucgugugugugucguugcaggccuuauucaagcuuaccaugaagugggugaccuucaucagccuccuguuccuguucuccagcgccuacucccuguuccaggaguaccagugcuacggcagcuccagcaacacccgcguccucaacgagcugaacuacgacaacgccgggacgaaccuguacaacgagcucgagaugaacuacuacggcaagcaggagaacugguacucccugaagaagaacagccggucccugggggagaacgacgacggcaacaacgaggacaacgagaagcuccgcaagcccaagcacaagaagcugaagcagccggcggacgggaaccccgaccccaacgccaaccccaacguggacccgaacgccaaccccaacguggaccccaacgccaaccccaacgucgacccgaacgccaaccccaacgcgaaccccaacgccaaccccaacgccaacccgaacgccaaccccaacgcgaaccccaacgccaaccccaacgccaacccgaacgccaaccccaacgccaaccccaacgcgaaccccaacgccaacccgaacgccaaccccaacgccaaccccaacgccaaccccaacgcgaacccgaacgccaaccccaacguggaccccaacgccaaccccaacgccaacccgaacgccaaccccaacgcgaaccccaacgccaacccgaacgccaaccccaacgccaaccccaacgccaaccccaacgcgaacccgaacgccaaccccaacgccaaccccaacgccaaccccaacgcgaacccgaacgccaaccccaacgccaaccccaacgccaaccccaacgccaacccgaacgcgaaccccgccgccuacaucaagcccggcagcgccaacaagcccaaggacgagcuggacuacgccaacgacaucgaggcggccuaccaguacaucaaggccaacuccaaguucaucggcaucaccgagcucugaggacuagucccuguucccagagcccacuuuuuuuucuuuuuuugaaauaaaauagccugucuuucagaucucaaaggcucuuuucagagccaccaaaaaaaaaaaaaaaaaaaaaaaaaaaaaaaaaaaaaaaaaaaaaaaaaaaaaaaaaaaaaaaaaaaaaaaaaaaaaaaaaaaaaaaaaaaaaaaaaaaaagaauu

SEQ ID NO: 7332 - RNA, 1213 nt, Artificial Sequence
  mRNA Design a-1 (hSL-A100-N5) comprising derived and/or modified sequence from Pf(3D7)__XP_001351122.1__HsALB_Pf-CSP(19-272)_L(AAY)_Pf-CSP(346-3 65)_L(AAY)_PADRE (opt1)
aggagagucccgcagucggcguccagcggcucugcuuguucgugugugugucguugcaggccuuauucaagcuuaccaugaagugggugaccuucaucagccuccuguuccuguucuccagcgccuacucccuguuccaggaguaccagugcuacggcagcuccagcaacacccgcguccucaacgagcugaacuacgacaacgccgggacgaaccuguacaacgagcucgagaugaacuacuacggcaagcaggagaacugguacucccugaagaagaacagccggucccugggggagaacgacgacggcaacaacgaggacaacgagaagcuccgcaagcccaagcacaagaagcugaagcagccggcggacgggaaccccgaccccaacgccaaccccaacguggacccgaacgccaaccccaacguggaccccaacgccaaccccaacgucgacccgaacgccaaccccaacgcgaaccccaacgccaaccccaacgccaacccgaacgccaaccccaacgcgaaccccaacgccaaccccaacgccaacccgaacgccaaccccaacgccaaccccaacgcgaaccccaacgccaacccgaacgccaaccccaacgccaaccccaacgccaaccccaacgcgaacccgaacgccaaccccaacguggaccccaacgccaaccccaacgccaacccgaacgccaaccccaacgcgaaccccaacgccaacccgaacgccaaccccaacgccaaccccaacgccaaccccaacgcgaacccgaacgccaaccccaacgccaaccccaacgccaaccccaacgcgaacccgaacgccaaccccaacgccaaccccaacgccaaccccaacgccaacccgaacgcgaaccccgccgccuacaucaagcccggcagcgccaacaagcccaaggacgagcuggacuacgccaacgacaucgaggcggccuacgccaaguucguggccgccuggacccucaaggcggccgccugaggacuagucccuguucccagagcccacuuuuuuuucuuuuuuugaaauaaaauagccugucuuucagaucucaaaggcucuuuucagagccaccaaaaaaaaaaaaaaaaaaaaaaaaaaaaaaaaaaaaaaaaaaaaaaaaaaaaaaaaaaaaaaaaaaaaaaaaaaaaaaaaaaaaaaaaaaaaaaaaaaaaagaauu

SEQ ID NO: 7333 - RNA, 1270 nt, Artificial Sequence
  mRNA Design a-1 (hSL-A100-N5) comprising derived and/or modified sequence from Pf(3D7)__XP_001351122.1__HsALB_Pf-CSP(19-272)_L(G4S)_Pf-CSP(310-3 27)_L(G4S)_Pf-CSP(346-375) (opt1)
aggagagucccgcagucggcguccagcggcucugcuuguucgugugugugucguugcaggccuuauucaagcuuaccaugaagugggugaccuucaucagccuccuguuccuguucuccagcgccuacucccuguuccaggaguaccagugcuacggcagcuccagcaacacccgcguccucaacgagcugaacuacgacaacgccgggacgaaccuguacaacgagcucgagaugaacuacuacggcaagcaggagaacugguacucccugaagaagaacagccggucccugggggagaacgacgacggcaacaacgaggacaacgagaagcuccgcaagcccaagcacaagaagcugaagcagccggcggacgggaaccccgaccccaacgccaaccccaacguggacccgaacgccaaccccaacguggaccccaacgccaaccccaacgucgacccgaacgccaaccccaacgcgaaccccaacgccaaccccaacgccaacccgaacgccaaccccaacgcgaaccccaacgccaaccccaacgccaacccgaacgccaaccccaacgccaaccccaacgcgaaccccaacgccaacccgaacgccaaccccaacgccaaccccaacgccaaccccaacgcgaacccgaacgccaaccccaacguggaccccaacgccaaccccaacgccaacccgaacgccaaccccaacgcgaaccccaacgccaacccgaacgccaaccccaacgccaaccccaacgccaaccccaacgcgaacccgaacgccaaccccaacgccaaccccaacgccaaccccaacgcgaacccgaacgccaaccccaacgccaaccccaacgccaaccccaacgccaacccgaacgcgaaccccggcggcgggggcagcgagcccuccgacaagcacaucaaggaguaccugaacaagauccagaacagccucgggggcgggggcuccaucaagcccggcagcgccaacaagccgaaggacgagcuggacuacgccaacgacaucgagaagaagaucugcaagauggagaagugcuccugaggacuagucccuguucccagagcccacuuuuuuuucuuuuuuugaaauaaaauagccugucuuucagaucucaaaggcucuuuucagagccaccaaaaaaaaaaaaaaaaaaaaaaaaaaaaaaaaaaaaaaaaaaaaaaaaaaaaaaaaaaaaaaaaaaaaaaaaaaaaaaaaaaaaaaaaaaaaaaaaaaaaagaauu

SEQ ID NO: 7334 - RNA, 1255 nt, Artificial Sequence
  mRNA Design a-1 (hSL-A100-N5) comprising derived and/or modified sequence from Pf(3D7)__XP_001351122.1__HsALB_Pf-CSP(19-272)_L(G4S)_Pf-CSP(310-3 27)_Pf-CSP(346-375) (opt1)
aggagagucccgcagucggcguccagcggcucugcuuguucgugugugugucguugcaggccuuauucaagcuuaccaugaagugggugaccuucaucagccuccuguuccuguucuccagcgccuacucccuguuccaggaguaccagugcuacggcagcuccagcaacacccgcguccucaacgagcugaacuacgacaacgccgggacgaaccuguacaacgagcucgagaugaacuacuacggcaagcaggagaacugguacucccugaagaagaacagccggucccugggggagaacgacgacggcaacaacgaggacaacgagaagcuccgcaagcccaagcacaagaagcugaagcagccggcggacgggaaccccgaccccaacgccaaccccaacguggacccgaacgccaaccccaacguggaccccaacgccaaccccaacgucgacccgaacgccaaccccaacgcgaaccccaacgccaaccccaacgccaacccgaacgccaaccccaacgcgaaccccaacgccaaccccaacgccaacccgaacgccaaccccaacgccaaccccaacgcgaaccccaacgccaacccgaacgccaaccccaacgccaaccccaacgccaaccccaacgcgaacccgaacgccaaccccaacguggaccccaacgccaaccccaacgccaacccgaacgccaaccccaacgcgaaccccaacgccaacccgaacgccaaccccaacgccaaccccaacgccaaccccaacgcgaacccgaacgccaaccccaacgccaaccccaacgccaaccccaacgcgaacccgaacgccaaccccaacgccaaccccaacgccaaccccaacgccaacccgaacgcgaaccccggcggcgggggcagcgagcccuccgacaagcacaucaaggaguaccugaacaagauccagaacagccucaucaagcccggguccgccaacaagccgaaggacgagcuggacuacgccaacgacaucgagaagaagaucugcaagauggagaagugcagcugaggacuagucccuguucccagagcccacuuuuuuuucuuuuuuugaaauaaaauagccugucuuucagaucucaaaggcucuuuucagagccaccaaaaaaaaaaaaaaaaaaaaaaaaaaaaaaaaaaaaaaaaaaaaaaaaaaaaaaaaaaaaaaaaaaaaaaaaaaaaaaaaaaaaaaaaaaaaaaaaaaaaagaauu

SEQ ID NO: 7335 - RNA, 1255 nt, Artificial Sequence
  mRNA Design a-1 (hSL-A100-N5) comprising derived and/or modified sequence from Pf(3D7)__XP_001351122.1__HsALB_Pf-CSP(19-325) (opt1)
aggagagucccgcagucggcguccagcggcucugcuuguucgugugugugucguugcaggccuuauucaagcuuaccaugaagugggugaccuucaucagccuccuguuccuguucuccagcgccuacucccuguuccaggaguaccagugcuacggcagcuccagcaacacccgcguccucaacgagcugaacuacgacaacgccgggacgaaccuguacaacgagcucgagaugaacuacuacggcaagcaggagaacugguacucccugaagaagaacagccggucccugggggagaacgacgacggcaacaacgaggacaacgagaagcuccgcaagcccaagcacaagaagcugaagcagccggcggacgggaaccccgaccccaacgccaaccccaacguggacccgaacgccaaccccaacguggaccccaacgccaaccccaacgucgacccgaacgccaaccccaacgcgaaccccaacgccaaccccaacgccaacccgaacgccaaccccaacgcgaaccccaacgccaaccccaacgccaacccgaacgccaaccccaacgccaaccccaacgcgaaccccaacgccaacccgaacgccaaccccaacgccaaccccaacgccaaccccaacgcgaacccgaacgccaaccccaacguggaccccaacgccaaccccaacgccaacccgaacgccaaccccaacgcgaaccccaacgccaacccgaacgccaaccccaacgccaaccccaacgccaaccccaacgcgaacccgaacgccaaccccaacgccaaccccaacgccaaccccaacgcgaacccgaacgccaaccccaacgccaaccccaacgccaaccccaacgccaacccgaacgcgaaccccaacaagaacaaccagggcaacggccaggggcacaacaugcccaacgaccccaaccggaacguggacgagaacgccaacgccaacagcgccgucaagaacaacaacaacgaggagccguccgacaagcacaucaaggaguaccugaacaagauccagaacugaggacuagucccuguucccagagcccacuuuuuuuucuuuuuuugaaauaaaauagccugucuuucagaucucaaaggcucuuuucagagccaccaaaaaaaaaaaaaaaaaaaaaaaaaaaaaaaaaaaaaaaaaaaaaaaaaaaaaaaaaaaaaaaaaaaaaaaaaaaaaaaaaaaaaaaaaaaaaaaaaaaaagaauu

SEQ ID NO: 7336 - RNA, 1432 nt, Artificial Sequence
  mRNA Design a-1 (hSL-A100-N5) comprising derived and/or modified sequence from Pf(3D7)__XP_001351122.1__HsALB_Pf-CSP(19-384) (opt1)
aggagagucccgcagucggcguccagcggcucugcuuguucgugugugugucguugcaggccuuauucaagcuuaccaugaagugggugaccuucaucagccuccuguuccuguucuccagcgccuacucccuguuccaggaguaccagugcuacggcagcuccagcaacacccgcguccucaacgagcugaacuacgacaacgccgggacgaaccuguacaacgagcucgagaugaacuacuacggcaagcaggagaacugguacucccugaagaagaacagccggucccugggggagaacgacgacggcaacaacgaggacaacgagaagcuccgcaagcccaagcacaagaagcugaagcagccggcggacgggaaccccgaccccaacgccaaccccaacguggacccgaacgccaaccccaacguggaccccaacgccaaccccaacgucgacccgaacgccaaccccaacgcgaaccccaacgccaaccccaacgccaacccgaacgccaaccccaacgcgaaccccaacgccaaccccaacgccaacccgaacgccaaccccaacgccaaccccaacgcgaaccccaacgccaacccgaacgccaaccccaacgccaaccccaacgccaaccccaacgcgaacccgaacgccaaccccaacguggaccccaacgccaaccccaacgccaacccgaacgccaaccccaacgcgaaccccaacgccaacccgaacgccaaccccaacgccaaccccaacgccaaccccaacgcgaacccgaacgccaaccccaacgccaaccccaacgccaaccccaacgcgaacccgaacgccaaccccaacgccaaccccaacgccaaccccaacgccaacccgaacgcgaaccccaacaagaacaaccagggcaacggccaggggcacaacaugcccaacgaccccaaccggaacguggacgagaacgccaacgccaacagcgccgucaagaacaacaacaacgaggagccguccgacaagcacaucaaggaguaccugaacaagauccagaacagccucuccaccgaguggagccccugcuccgugaccugcggcaacgggauccaggugcgcaucaagcccggcagcgccaacaagcccaaggacgagcuggacuacgcgaacgacaucgagaagaagaucugcaagauggagaagugcuccagcgucuucaacguggugaacuccagcugaggacuagucccuguucccagagcccacuuuuuuuucuuuuuuugaaauaaaauagccugucuuucagaucucaaaggcucuuuucagagccaccaaaaaaaaaaaaaaaaaaaaaaaaaaaaaaaaaaaaaaaaaaaaaaaaaaaaaaaaaaaaaaaaaaaaaaaaaaaaaaaaaaaaaaaaaaaaaaaaaaaaagaauu

SEQ ID NO: 7337 - RNA, 1570 nt, Artificial Sequence
  mRNA Design a-1 (hSL-A100-N5) comprising derived and/or modified sequence from Pf(3D7)__XP_001351122.1__HsALB_Pf-CSP(19-384)_TM domain HA (opt1)
aggagagucccgcagucggcguccagcggcucugcuuguucgugugugugucguugcaggccuuauucaagcuuaccaugaagugggugaccuucaucagccuccuguuccuguucuccagcgccuacucccuguuccaggaguaccagugcuacggcagcuccagcaacacccgcguccucaacgagcugaacuacgacaacgccgggacgaaccuguacaacgagcucgagaugaacuacuacggcaagcaggagaacugguacucccugaagaagaacagccggucccugggggagaacgacgacggcaacaacgaggacaacgagaagcuccgcaagcccaagcacaagaagcugaagcagccggcggacgggaaccccgaccccaacgccaaccccaacguggacccgaacgccaaccccaacguggaccccaacgccaaccccaacgucgacccgaacgccaaccccaacgcgaaccccaacgccaaccccaacgccaacccgaacgccaaccccaacgcgaaccccaacgccaaccccaacgccaacccgaacgccaaccccaacgccaaccccaacgcgaaccccaacgccaacccgaacgccaaccccaacgccaaccccaacgccaaccccaacgcgaacccgaacgccaaccccaacguggaccccaacgccaaccccaacgccaacccgaacgccaaccccaacgcgaaccccaacgccaacccgaacgccaaccccaacgccaaccccaacgccaaccccaacgcgaacccgaacgccaaccccaacgccaaccccaacgccaaccccaacgcgaacccgaacgccaaccccaacgccaaccccaacgccaaccccaacgccaacccgaacgcgaaccccaacaagaacaaccagggcaacggccaggggcacaacaugcccaacgaccccaaccggaacguggacgagaacgccaacgccaacagcgccgucaagaacaacaacaacgaggagccguccgacaagcacaucaaggaguaccugaacaagauccagaacagccucuccaccgaguggagccccugcuccgugaccugcggcaacgggauccaggugcgcaucaagcccggcagcgccaacaagcccaaggacgagcuggacuacgcgaacgacaucgagaagaagaucugcaagauggagaagugcuccagcgucuucaacguggugaacuccagcaagcuggagagcacccggaucuaccagauccucgccaucuacuccacggucgccagcucccuggugcugguggucagccucggggccaucuccuucuggaugugcagcaacggcucccugcagugccgcaucugcaucugaggacuagucccuguucccagagcccacuuuuuuuucuuuuuuugaaauaaaauagccugucuuucagaucucaaaggcucuuuucagagccaccaaaaaaaaaaaaaaaaaaaaaaaaaaaaaaaaaaaaaaaaaaaaaaaaaaaaaaaaaaaaaaaaaaaaaaaaaaaaaaaaaaaaaaaaaaaaaaaaaaaaagaauu

SEQ ID NO: 7338 - RNA, 1282 nt, Artificial Sequence
  mRNA Design a-1 (hSL-A100-N5) comprising derived and/or modified sequence from Pf(3D7)__XP_001351122.1__HsALB_Pf-CSP(82-397) (opt1)
aggagagucccgcagucggcguccagcggcucugcuuguucgugugugugucguugcaggccuuauucaagcuuaccaugaagugggugaccuucaucagccuccuguuccuguucuccagcgccuacuccgacaacgagaagcugcgcaagcccaagcacaagaagcucaagcagccggccgacggcaaccccgaccccaacgcgaaccccaacgucgacccgaacgccaaccccaacguggaccccaacgccaaccccaacguggacccgaacgccaaccccaacgccaaccccaacgcgaaccccaacgccaacccgaacgccaaccccaacgccaaccccaacgcgaaccccaacgccaacccgaacgccaaccccaacgccaaccccaacgccaaccccaacgcgaacccgaacgccaaccccaacgccaaccccaacgccaaccccaacgccaacccgaacgcgaaccccaacgucgaccccaacgccaaccccaacgccaacccgaacgccaaccccaacgccaaccccaacgcgaacccgaacgccaaccccaacgccaaccccaacgccaaccccaacgccaacccgaacgcgaaccccaacgccaaccccaacgccaaccccaacgccaacccgaacgcgaaccccaacgccaaccccaacgccaaccccaacgccaacccgaacgccaaccccaacaagaacaaccaggggaacggccaggggcacaacaugcccaacgaccccaaccggaacguggacgagaacgcgaacgccaacagcgccgugaagaacaacaacaacgaggagccguccgacaagcacaucaaggaguaccugaacaagauccagaacagccuguccaccgaguggagccccugcuccgucacgugcggcaacgggauccaggugcgcaucaagcccggcagcgccaacaagcccaaggacgagcucgacuacgccaacgacaucgagaagaagaucugcaagauggagaagugcuccagcguguucaacgucgugaacuccagcaucggccugaucauggugcuguccuuccucuuccugaacugaggacuagucccuguucccagagcccacuuuuuuuucuuuuuuugaaauaaaauagccugucuuucagaucucaaaggcucuuuucagagccaccaaaaaaaaaaaaaaaaaaaaaaaaaaaaaaaaaaaaaaaaaaaaaaaaaaaaaaaaaaaaaaaaaaaaaaaaaaaaaaaaaaaaaaaaaaaaaaaaaaaaagaauu

SEQ ID NO: 7339 - RNA, 634 nt, Artificial Sequence
  mRNA Design a-1 (hSL-A100-N5) comprising derived and/or modified sequence from Pf(3D7)__XP_001351122.1__HsALB_Pf-CSP(93-192) (opt1)
aggagagucccgcagucggcguccagcggcucugcuuguucgugugugugucguugcaggccuuauucaagcuuaccaugaagugggugaccuucaucagccuccuguuccuguucuccagcgccuacuccaagcugaagcagcccgccgacggcaacccggaccccaacgcgaaccccaacgucgaccccaacgccaacccgaacguggaccccaacgccaaccccaacguggaccccaacgccaacccgaacgccaaccccaacgcgaaccccaacgccaaccccaacgccaacccgaacgccaaccccaacgcgaaccccaacgccaaccccaacgccaacccgaacgccaaccccaacgccaaccccaacgcgaaccccaacgccaacccgaacgccaaccccaacgccaaccccaacgccaaccccugaggacuagucccuguucccagagcccacuuuuuuuucuuuuuuugaaauaaaauagccugucuuucagaucucaaaggcucuuuucagagccaccaaaaaaaaaaaaaaaaaaaaaaaaaaaaaaaaaaaaaaaaaaaaaaaaaaaaaaaaaaaaaaaaaaaaaaaaaaaaaaaaaaaaaaaaaaaaaaaaaaaaagaauu

SEQ ID NO: 7340 - RNA, 874 nt, Artificial Sequence
  mRNA Design a-1 (hSL-A100-N5) comprising derived and/or modified sequence from Pf(3D7)__XP_001351122.1__HsALB_Pf-CSP(93-272) (opt1)
aggagagucccgcagucggcguccagcggcucugcuuguucgugugugugucguugcaggccuuauucaagcuuaccaugaagugggugaccuucaucagccuccuguuccuguucuccagcgccuacuccaagcugaagcagcccgccgacggcaacccggaccccaacgcgaaccccaacgucgaccccaacgccaacccgaacguggaccccaacgccaaccccaacguggaccccaacgccaacccgaacgccaaccccaacgcgaaccccaacgccaaccccaacgccaacccgaacgccaaccccaacgcgaaccccaacgccaaccccaacgccaacccgaacgccaaccccaacgccaaccccaacgcgaaccccaacgccaacccgaacgccaaccccaacgccaaccccaacgccaaccccaacgcgaacccgaacgucgaccccaacgccaaccccaacgccaaccccaacgccaacccgaacgccaaccccaacgcgaaccccaacgccaacccgaacgccaaccccaacgccaaccccaacgccaaccccaacgcgaacccgaacgccaaccccaacgccaaccccaacgccaaccccaacgcgaacccgaacgccaaccccaacgccaaccccaacgccaaccccaacgccaacccgugaggacuagucccuguucccagagcccacuuuuuuuucuuuuuuugaaauaaaauagccugucuuucagaucucaaaggcucuuuucagagccaccaaaaaaaaaaaaaaaaaaaaaaaaaaaaaaaaaaaaaaaaaaaaaaaaaaaaaaaaaaaaaaaaaaaaaaaaaaaaaaaaaaaaaaaaaaaaaaaaaaaaagaauu

SEQ ID NO: 7341 - RNA, 1249 nt, Artificial Sequence
  mRNA Design a-1 (hSL-A100-N5) comprising derived and/or modified sequence from Pf(3D7)__XP_001351122.1__HsALB_Pf-CSP(93-397) (opt1)
aggagagucccgcagucggcguccagcggcucugcuuguucgugugugugucguugcaggccuuauucaagcuuaccaugaagugggugaccuucaucagccuccuguuccuguucuccagcgccuacuccaagcugaagcagcccgccgacggcaacccggaccccaacgcgaaccccaacgucgaccccaacgccaacccgaacguggaccccaacgccaaccccaacguggaccccaacgccaacccgaacgccaaccccaacgcgaaccccaacgccaaccccaacgccaacccgaacgccaaccccaacgcgaaccccaacgccaaccccaacgccaacccgaacgccaaccccaacgccaaccccaacgcgaaccccaacgccaacccgaacgccaaccccaacgccaaccccaacgccaaccccaacgcgaacccgaacgucgaccccaacgccaaccccaacgccaaccccaacgccaacccgaacgccaaccccaacgcgaaccccaacgccaacccgaacgccaaccccaacgccaaccccaacgccaaccccaacgcgaacccgaacgccaaccccaacgccaaccccaacgccaaccccaacgcgaacccgaacgccaaccccaacgccaaccccaacgccaaccccaacgccaacccgaacaagaacaaccaggggaacggccaggggcacaacaugcccaacgaccccaaccgcaacguggacgagaacgcgaacgccaacagcgccgugaagaacaacaacaacgaggagcccuccgacaagcacaucaaggaguaccucaacaagauccagaacagccuguccaccgaguggagcccgugcuccgucacgugcggcaacgggauccaggugcggaucaagcccggcagcgccaacaagcccaaggacgagcuggacuacgccaacgacaucgagaagaagaucugcaagauggagaagugcuccagcguguucaacgucgugaacuccagcaucggccucaucauggugcuguccuuccuguuccucaacugaggacuagucccuguucccagagcccacuuuuuuuucuuuuuuugaaauaaaauagccugucuuucagaucucaaaggcucuuuucagagccaccaaaaaaaaaaaaaaaaaaaaaaaaaaaaaaaaaaaaaaaaaaaaaaaaaaaaaaaaaaaaaaaaaaaaaaaaaaaaaaaaaaaaaaaaaaaaaaaaaaaaagaauu

SEQ ID NO: 7342 - RNA, 619 nt, Artificial Sequence
  mRNA Design a-1 (hSL-A100-N5) comprising derived and/or modified sequence from Pf(3D7)__XP_001351122.1__HsALB_Pf-CSP(98-192) (opt1)
aggagagucccgcagucggcguccagcggcucugcuuguucgugugugugucguugcaggccuuauucaagcuuaccaugaagugggugaccuucaucagccuccuguuccuguucuccagcgccuacuccgccgacggcaaccccgacccgaacgcgaaccccaacgucgaccccaacgccaaccccaacguggacccgaacgccaaccccaacguggaccccaacgccaaccccaacgccaacccgaacgcgaaccccaacgccaaccccaacgccaaccccaacgccaacccgaacgcgaaccccaacgccaaccccaacgccaaccccaacgccaacccgaacgccaaccccaacgcgaaccccaacgccaaccccaacgccaacccgaacgccaaccccaacgccaaccccugaggacuagucccuguucccagagcccacuuuuuuuucuuuuuuugaaauaaaauagccugucuuucagaucucaaaggcucuuuucagagccaccaaaaaaaaaaaaaaaaaaaaaaaaaaaaaaaaaaaaaaaaaaaaaaaaaaaaaaaaaaaaaaaaaaaaaaaaaaaaaaaaaaaaaaaaaaaaaaaaaaaaagaauu

SEQ ID NO: 7343 - RNA, 859 nt, Artificial Sequence
  mRNA Design a-1 (hSL-A100-N5) comprising derived and/or modified sequence from Pf(3D7)__XP_001351122.1__HsALB_Pf-CSP(98-272) (opt1)
aggagagucccgcagucggcguccagcggcucugcuuguucgugugugugucguugcaggccuuauucaagcuuaccaugaagugggugaccuucaucagccuccuguuccuguucuccagcgccuacuccgccgacggcaaccccgacccgaacgcgaaccccaacgucgaccccaacgccaaccccaacguggacccgaacgccaaccccaacguggaccccaacgccaaccccaacgccaacccgaacgcgaaccccaacgccaaccccaacgccaaccccaacgccaacccgaacgcgaaccccaacgccaaccccaacgccaaccccaacgccaacccgaacgccaaccccaacgcgaaccccaacgccaaccccaacgccaacccgaacgccaaccccaacgccaaccccaacgcgaaccccaacgucgacccgaacgccaaccccaacgccaaccccaacgccaaccccaacgccaacccgaacgcgaaccccaacgccaaccccaacgccaacccgaacgccaaccccaacgccaaccccaacgcgaaccccaacgccaacccgaacgccaaccccaacgccaaccccaacgcgaaccccaacgccaacccgaacgccaaccccaacgccaaccccaacgccaaccccugaggacuagucccuguucccagagcccacuuuuuuuucuuuuuuugaaauaaaauagccugucuuucagaucucaaaggcucuuuucagagccaccaaaaaaaaaaaaaaaaaaaaaaaaaaaaaaaaaaaaaaaaaaaaaaaaaaaaaaaaaaaaaaaaaaaaaaaaaaaaaaaaaaaaaaaaaaaaaaaaaaaaagaauu

SEQ ID NO: 7344 - RNA, 1165 nt, Artificial Sequence
  mRNA Design a-1 (hSL-A100-N5) comprising derived and/or modified sequence from Pf(3D7)__XP_001351122.1__HsALB_Pf-CSP(98-374) (opt1)
aggagagucccgcagucggcguccagcggcucugcuuguucgugugugugucguugcaggccuuauucaagcuuaccaugaagugggugaccuucaucagccuccuguuccuguucuccagcgccuacuccgccgacggcaaccccgacccgaacgcgaaccccaacgucgaccccaacgccaaccccaacguggacccgaacgccaaccccaacguggaccccaacgccaaccccaacgccaacccgaacgcgaaccccaacgccaaccccaacgccaaccccaacgccaacccgaacgcgaaccccaacgccaaccccaacgccaaccccaacgccaacccgaacgccaaccccaacgcgaaccccaacgccaaccccaacgccaacccgaacgccaaccccaacgccaaccccaacgcgaaccccaacgucgacccgaacgccaaccccaacgccaaccccaacgccaaccccaacgccaacccgaacgcgaaccccaacgccaaccccaacgccaacccgaacgccaaccccaacgccaaccccaacgcgaaccccaacgccaacccgaacgccaaccccaacgccaaccccaacgcgaaccccaacgccaacccgaacgccaaccccaacgccaaccccaacgccaaccccaacaagaacaaccaggggaacggccaggggcacaacaugccgaacgaccccaaccgcaacguggacgagaacgcgaacgccaacagcgccgugaagaacaacaacaacgaggagcccuccgacaagcacaucaaggaguaccugaacaagauccagaacagccucuccaccgaguggagccccugcuccgucacgugcggcaacgggauccaggugcggaucaagccgggcagcgccaacaagcccaaggacgagcuggacuacgccaacgacaucgagaagaagaucugcaagauggagaagugcugaggacuagucccuguucccagagcccacuuuuuuuucuuuuuuugaaauaaaauagccugucuuucagaucucaaaggcucuuuucagagccaccaaaaaaaaaaaaaaaaaaaaaaaaaaaaaaaaaaaaaaaaaaaaaaaaaaaaaaaaaaaaaaaaaaaaaaaaaaaaaaaaaaaaaaaaaaaaaaaaaaaaagaauu

SEQ ID NO: 7345 - RNA, 1234 nt, Artificial Sequence
  mRNA Design a-1 (hSL-A100-N5) comprising derived and/or modified sequence from Pf(3D7)__XP_001351122.1__HsALB_Pf-CSP(98-397) (opt1)
aggagagucccgcagucggcguccagcggcucugcuuguucgugugugugucguugcaggccuuauucaagcuuaccaugaagugggugaccuucaucagccuccuguuccuguucuccagcgccuacuccgccgacggcaaccccgacccgaacgcgaaccccaacgucgaccccaacgccaaccccaacguggacccgaacgccaaccccaacguggaccccaacgccaaccccaacgccaacccgaacgcgaaccccaacgccaaccccaacgccaaccccaacgccaacccgaacgcgaaccccaacgccaaccccaacgccaaccccaacgccaacccgaacgccaaccccaacgcgaaccccaacgccaaccccaacgccaacccgaacgccaaccccaacgccaaccccaacgcgaaccccaacgucgacccgaacgccaaccccaacgccaaccccaacgccaaccccaacgccaacccgaacgcgaaccccaacgccaaccccaacgccaacccgaacgccaaccccaacgccaaccccaacgcgaaccccaacgccaacccgaacgccaaccccaacgccaaccccaacgcgaaccccaacgccaacccgaacgccaaccccaacgccaaccccaacgccaaccccaacaagaacaaccaggggaacggccaggggcacaacaugccgaacgaccccaaccgcaacguggacgagaacgcgaacgccaacagcgccgugaagaacaacaacaacgaggagcccuccgacaagcacaucaaggaguaccugaacaagauccagaacagccucuccaccgaguggagccccugcuccgucacgugcggcaacgggauccaggugcggaucaagccgggcagcgccaacaagcccaaggacgagcuggacuacgccaacgacaucgagaagaagaucugcaagauggagaagugcuccagcguguucaacgucgugaacuccagcaucggccugaucauggugcucuccuuccuguuccugaacugaggacuagucccuguucccagagcccacuuuuuuuucuuuuuuugaaauaaaauagccugucuuucagaucucaaaggcucuuuucagagccaccaaaaaaaaaaaaaaaaaaaaaaaaaaaaaaaaaaaaaaaaaaaaaaaaaaaaaaaaaaaaaaaaaaaaaaaaaaaaaaaaaaaaaaaaaaaaaaaaaaaaagaauu

SEQ ID NO: 7346 - RNA, 1561 nt, Artificial Sequence
  mRNA Design a-1 (hSL-A100-N5) comprising derived and/or modified sequence from Pf(3D7)__XP_001351122.1__HsALB_Pf-CSP(199-377)_L(PVTN)_HBsAg (opt1)
aggagagucccgcagucggcguccagcggcucugcuuguucgugugugugucguugcaggccuuauucaagcuuaccaugaagugggugaccuucaucagccuccuguuccuguucuccagcgccuacuccgaccccaacgccaacccgaacgcgaaccccaacgccaaccccaacgccaaccccaacgccaacccgaacgccaaccccaacgcgaaccccaacgccaaccccaacgccaacccgaacgccaaccccaacgcgaaccccaacgccaaccccaacgccaacccgaacgccaaccccaacgccaaccccaacgcgaaccccaacgccaacccgaacgccaaccccaacaagaacaaccagggcaacgggcagggccacaacaugcccaacgaccccaaccgcaacgucgacgagaacgccaacgccaacagcgcggugaagaacaacaacaacgaggagccguccgacaagcacaucaaggaguaccugaacaagauccagaacagccucuccaccgaguggagccccugcuccgugaccugcgggaacggcauccagguccggaucaagcccgggagcgccaacaagcccaaggacgagcuggacuacgccaacgacaucgagaagaagaucugcaagauggagaagugcuccagcgugccggugaccaacauggagaacaucaccuccggcuuccugggcccccuccugguccugcaggccggguucuuccuccugacccgcauccugacgaucccccagagccucgacuccugguggaccagccugaacuuccugggcgggucccccgugugccucggccagaacagccaguccccgaccagcaaccacagccccaccuccugcccgcccaucugccccggguaccgguggaugugccugcgccgguucaucaucuuccuguucauccuccugcugugccucaucuuccugcuggugcuccuggacuaccagggcaugcugcccgucugcccccucaucccgggcagcacgaccaccaacaccgggcccugcaagacgugcaccacccccgcccagggcaacuccauguuccccagcugcugcugcaccaagccgacggacgggaacugcacgugcauccccauccccuccagcugggcguucgccaaguaccugugggagugggccuccgugcgcuucagcuggcugucccuccuggugcccuucguccagugguucgugggccugagcccgaccguguggcucuccgccaucuggaugaugugguacuggggccccagccuguacuccaucgucagccccuucaucccccugcucccgaucuucuucugccuguggguguacaucugaggacuagucccuguucccagagcccacuuuuuuuucuuuuuuugaaauaaaauagccugucuuucagaucucaaaggcucuuuucagagccaccaaaaaaaaaaaaaaaaaaaaaaaaaaaaaaaaaaaaaaaaaaaaaaaaaaaaaaaaaaaaaaaaaaaaaaaaaaaaaaaaaaaaaaaaaaaaaaaaaaaaagaauu

SEQ ID NO: 7347 - RNA, 1471 nt, Artificial Sequence
  mRNA Design a-1 (hSL-A100-N5) comprising derived and/or modified sequence from Pf(3D7)__XP_001351122.1__Pf-CSP (opt2)
aggagagucccgcagucggcguccagcggcucugcuuguucgugugugugucguugcaggccuuauucaagcuuaccaugaugcgcaagcucgccauccucuccgucuccuccuuccucuucgucgaggcccucuuccaggaguaccagugcuacggcuccuccuccaacacccgcguccucaacgagcucaacuacgacaacgccggcaccaaccucuacaacgagcucgagaugaacuacuacggcaagcaggagaacugguacucccucaagaagaacucccgcucccucggcgagaacgacgacggcaacaacgaggacaacgagaagcuccgcaagcccaagcacaagaagcucaagcagcccgccgacggcaaccccgaccccaacgccaaccccaacgucgaccccaacgccaaccccaacgucgaccccaacgccaaccccaacgucgaccccaacgccaaccccaacgccaaccccaacgccaaccccaacgccaaccccaacgccaaccccaacgccaaccccaacgccaaccccaacgccaaccccaacgccaaccccaacgccaaccccaacgccaaccccaacgccaaccccaacgccaaccccaacgccaaccccaacgccaaccccaacgccaaccccaacgccaaccccaacgucgaccccaacgccaaccccaacgccaaccccaacgccaaccccaacgccaaccccaacgccaaccccaacgccaaccccaacgccaaccccaacgccaaccccaacgccaaccccaacgccaaccccaacgccaaccccaacgccaaccccaacgccaaccccaacgccaaccccaacgccaaccccaacgccaaccccaacgccaaccccaacgccaaccccaacaagaacaaccagggcaacggccagggccacaacaugcccaacgaccccaaccgcaacgucgacgagaacgccaacgccaacuccgccgucaagaacaacaacaacgaggagcccuccgacaagcacaucaaggaguaccucaacaagauccagaacucccucuccaccgaguggucccccugcuccgucaccugcggcaacggcauccagguccgcaucaagcccggcuccgccaacaagcccaaggacgagcucgacuacgccaacgacaucgagaagaagaucugcaagauggagaagugcuccuccgucuucaacgucgucaacuccuccaucggccucaucaugguccucuccuuccucuuccucaacugaggacuagucccuguucccagagcccacuuuuuuuucuuuuuuugaaauaaaauagccugucuuucagaucucaaaggcucuuuucagagccaccaaaaaaaaaaaaaaaaaaaaaaaaaaaaaaaaaaaaaaaaaaaaaaaaaaaaaaaaaaaaaaaaaaaaaaaaaaaaaaaaaaaaaaaaaaaaaaaaaaaaagaauu

SEQ ID NO: 7348 - RNA, 1402 nt, Artificial Sequence
  mRNA Design a-1 (hSL-A100-N5) comprising derived and/or modified sequence from Pf(3D7)__XP_001351122.1__Pf-CSP(1-374) (opt2)
aggagagucccgcagucggcguccagcggcucugcuuguucgugugugugucguugcaggccuuauucaagcuuaccaugaugcgcaagcucgccauccucuccgucuccuccuuccucuucgucgaggcccucuuccaggaguaccagugcuacggcuccuccuccaacacccgcguccucaacgagcucaacuacgacaacgccggcaccaaccucuacaacgagcucgagaugaacuacuacggcaagcaggagaacugguacucccucaagaagaacucccgcucccucggcgagaacgacgacggcaacaacgaggacaacgagaagcuccgcaagcccaagcacaagaagcucaagcagcccgccgacggcaaccccgaccccaacgccaaccccaacgucgaccccaacgccaaccccaacgucgaccccaacgccaaccccaacgucgaccccaacgccaaccccaacgccaaccccaacgccaaccccaacgccaaccccaacgccaaccccaacgccaaccccaacgccaaccccaacgccaaccccaacgccaaccccaacgccaaccccaacgccaaccccaacgccaaccccaacgccaaccccaacgccaaccccaacgccaaccccaacgccaaccccaacgccaaccccaacgucgaccccaacgccaaccccaacgccaaccccaacgccaaccccaacgccaaccccaacgccaaccccaacgccaaccccaacgccaaccccaacgccaaccccaacgccaaccccaacgccaaccccaacgccaaccccaacgccaaccccaacgccaaccccaacgccaaccccaacgccaaccccaacgccaaccccaacgccaaccccaacgccaaccccaacaagaacaaccagggcaacggccagggccacaacaugcccaacgaccccaaccgcaacgucgacgagaacgccaacgccaacuccgccgucaagaacaacaacaacgaggagcccuccgacaagcacaucaaggaguaccucaacaagauccagaacucccucuccaccgaguggucccccugcuccgucaccugcggcaacggcauccagguccgcaucaagcccggcuccgccaacaagcccaaggacgagcucgacuacgccaacgacaucgagaagaagaucugcaagauggagaagugcugaggacuagucccuguucccagagcccacuuuuuuuucuuuuuuugaaauaaaauagccugucuuucagaucucaaaggcucuuuucagagccaccaaaaaaaaaaaaaaaaaaaaaaaaaaaaaaaaaaaaaaaaaaaaaaaaaaaaaaaaaaaaaaaaaaaaaaaaaaaaaaaaaaaaaaaaaaaaaaaaaaaaagaauu

SEQ ID NO: 7349 - RNA, 1255 nt, Artificial Sequence
  mRNA Design a-1 (hSL-A100-N5) comprising derived and/or modified sequence from Pf(3D7)__XP_001351122.1__Pf-CSP(1-325) (opt2)
aggagagucccgcagucggcguccagcggcucugcuuguucgugugugugucguugcaggccuuauucaagcuuaccaugaugcgcaagcucgccauccucuccgucuccuccuuccucuucgucgaggcccucuuccaggaguaccagugcuacggcuccuccuccaacacccgcguccucaacgagcucaacuacgacaacgccggcaccaaccucuacaacgagcucgagaugaacuacuacggcaagcaggagaacugguacucccucaagaagaacucccgcucccucggcgagaacgacgacggcaacaacgaggacaacgagaagcuccgcaagcccaagcacaagaagcucaagcagcccgccgacggcaaccccgaccccaacgccaaccccaacgucgaccccaacgccaaccccaacgucgaccccaacgccaaccccaacgucgaccccaacgccaaccccaacgccaaccccaacgccaaccccaacgccaaccccaacgccaaccccaacgccaaccccaacgccaaccccaacgccaaccccaacgccaaccccaacgccaaccccaacgccaaccccaacgccaaccccaacgccaaccccaacgccaaccccaacgccaaccccaacgccaaccccaacgccaaccccaacgucgaccccaacgccaaccccaacgccaaccccaacgccaaccccaacgccaaccccaacgccaaccccaacgccaaccccaacgccaaccccaacgccaaccccaacgccaaccccaacgccaaccccaacgccaaccccaacgccaaccccaacgccaaccccaacgccaaccccaacgccaaccccaacgccaaccccaacgccaaccccaacgccaaccccaacaagaacaaccagggcaacggccagggccacaacaugcccaacgaccccaaccgcaacgucgacgagaacgccaacgccaacuccgccgucaagaacaacaacaacgaggagcccuccgacaagcacaucaaggaguaccucaacaagauccagaacugaggacuagucccuguucccagagcccacuuuuuuuucuuuuuuugaaauaaaauagccugucuuucagaucucaaaggcucuuuucagagccaccaaaaaaaaaaaaaaaaaaaaaaaaaaaaaaaaaaaaaaaaaaaaaaaaaaaaaaaaaaaaaaaaaaaaaaaaaaaaaaaaaaaaaaaaaaaaaaaaaaaaagaauu

SEQ ID NO: 7350 - RNA, 1471 nt, Artificial Sequence
  mRNA Design a-1 (hSL-A100-N5) comprising derived and/or modified sequence from Pf(3D7)__XP_001351122.1__HsALB_Pf-CSP(19-397) (opt2)
aggagagucccgcagucggcguccagcggcucugcuuguucgugugugugucguugcaggccuuauucaagcuuaccaugaagugggucaccuucaucucccuccucuuccucuucuccuccgccuacucccucuuccaggaguaccagugcuacggcuccuccuccaacacccgcguccucaacgagcucaacuacgacaacgccggcaccaaccucuacaacgagcucgagaugaacuacuacggcaagcaggagaacugguacucccucaagaagaacucccgcucccucggcgagaacgacgacggcaacaacgaggacaacgagaagcuccgcaagcccaagcacaagaagcucaagcagcccgccgacggcaaccccgaccccaacgccaaccccaacgucgaccccaacgccaaccccaacgucgaccccaacgccaaccccaacgucgaccccaacgccaaccccaacgccaaccccaacgccaaccccaacgccaaccccaacgccaaccccaacgccaaccccaacgccaaccccaacgccaaccccaacgccaaccccaacgccaaccccaacgccaaccccaacgccaaccccaacgccaaccccaacgccaaccccaacgccaaccccaacgccaaccccaacgccaaccccaacgucgaccccaacgccaaccccaacgccaaccccaacgccaaccccaacgccaaccccaacgccaaccccaacgccaaccccaacgccaaccccaacgccaaccccaacgccaaccccaacgccaaccccaacgccaaccccaacgccaaccccaacgccaaccccaacgccaaccccaacgccaaccccaacgccaaccccaacgccaaccccaacgccaaccccaacaagaacaaccagggcaacggccagggccacaacaugcccaacgaccccaaccgcaacgucgacgagaacgccaacgccaacuccgccgucaagaacaacaacaacgaggagcccuccgacaagcacaucaaggaguaccucaacaagauccagaacucccucuccaccgaguggucccccugcuccgucaccugcggcaacggcauccagguccgcaucaagcccggcuccgccaacaagcccaaggacgagcucgacuacgccaacgacaucgagaagaagaucugcaagauggagaagugcuccuccgucuucaacgucgucaacuccuccaucggccucaucaugguccucuccuuccucuuccucaacugaggacuagucccuguucccagagcccacuuuuuuuucuuuuuuugaaauaaaauagccugucuuucagaucucaaaggcucuuuucagagccaccaaaaaaaaaaaaaaaaaaaaaaaaaaaaaaaaaaaaaaaaaaaaaaaaaaaaaaaaaaaaaaaaaaaaaaaaaaaaaaaaaaaaaaaaaaaaaaaaaaaaagaauu

SEQ ID NO: 7351 - RNA, 1489 nt, Artificial Sequence
  mRNA Design a-1 (hSL-A100-N5) comprising derived and/or modified sequence from Pf(3D7)__XP_001351122.1__HsIns-iso1_Pf-CSP(19-397) (opt2)
aggagagucccgcagucggcguccagcggcucugcuuguucgugugugugucguugcaggccuuauucaagcuuaccauggcccucuggaugcgccuccucccccuccucgcccuccucgcccucuggggccccgaccccgccgccgcccucuuccaggaguaccagugcuacggcuccuccuccaacacccgcguccucaacgagcucaacuacgacaacgccggcaccaaccucuacaacgagcucgagaugaacuacuacggcaagcaggagaacugguacucccucaagaagaacucccgcucccucggcgagaacgacgacggcaacaacgaggacaacgagaagcuccgcaagcccaagcacaagaagcucaagcagcccgccgacggcaaccccgaccccaacgccaaccccaacgucgaccccaacgccaaccccaacgucgaccccaacgccaaccccaacgucgaccccaacgccaaccccaacgccaaccccaacgccaaccccaacgccaaccccaacgccaaccccaacgccaaccccaacgccaaccccaacgccaaccccaacgccaaccccaacgccaaccccaacgccaaccccaacgccaaccccaacgccaaccccaacgccaaccccaacgccaaccccaacgccaaccccaacgccaaccccaacgucgaccccaacgccaaccccaacgccaaccccaacgccaaccccaacgccaaccccaacgccaaccccaacgccaaccccaacgccaaccccaacgccaaccccaacgccaaccccaacgccaaccccaacgccaaccccaacgccaaccccaacgccaaccccaacgccaaccccaacgccaaccccaacgccaaccccaacgccaaccccaacgccaaccccaacaagaacaaccagggcaacggccagggccacaacaugcccaacgaccccaaccgcaacgucgacgagaacgccaacgccaacuccgccgucaagaacaacaacaacgaggagcccuccgacaagcacaucaaggaguaccucaacaagauccagaacucccucuccaccgaguggucccccugcuccgucaccugcggcaacggcauccagguccgcaucaagcccggcuccgccaacaagcccaaggacgagcucgacuacgccaacgacaucgagaagaagaucugcaagauggagaagugcuccuccgucuucaacgucgucaacuccuccaucggccucaucaugguccucuccuuccucuuccucaacugaggacuagucccuguucccagagcccacuuuuuuuucuuuuuuugaaauaaaauagccugucuuucagaucucaaaggcucuuuucagagccaccaaaaaaaaaaaaaaaaaaaaaaaaaaaaaaaaaaaaaaaaaaaaaaaaaaaaaaaaaaaaaaaaaaaaaaaaaaaaaaaaaaaaaaaaaaaaaaaaaaaaagaauu

SEQ ID NO: 7352 - RNA, 1468 nt, Artificial Sequence
  mRNA Design a-1 (hSL-A100-N5) comprising derived and/or modified sequence from Pf(3D7)__XP_001351122.1__HsSPARC_Pf-CSP(19-397) (opt2)
aggagagucccgcagucggcguccagcggcucugcuuguucgugugugugucguugcaggccuuauucaagcuuaccaugcgcgccuggaucuucuuccuccucugccucgccggccgcgcccucgcccucuuccaggaguaccagugcuacggcuccuccuccaacacccgcguccucaacgagcucaacuacgacaacgccggcaccaaccucuacaacgagcucgagaugaacuacuacggcaagcaggagaacugguacucccucaagaagaacucccgcucccucggcgagaacgacgacggcaacaacgaggacaacgagaagcuccgcaagcccaagcacaagaagcucaagcagcccgccgacggcaaccccgaccccaacgccaaccccaacgucgaccccaacgccaaccccaacgucgaccccaacgccaaccccaacgucgaccccaacgccaaccccaacgccaaccccaacgccaaccccaacgccaaccccaacgccaaccccaacgccaaccccaacgccaaccccaacgccaaccccaacgccaaccccaacgccaaccccaacgccaaccccaacgccaaccccaacgccaaccccaacgccaaccccaacgccaaccccaacgccaaccccaacgccaaccccaacgucgaccccaacgccaaccccaacgccaaccccaacgccaaccccaacgccaaccccaacgccaaccccaacgccaaccccaacgccaaccccaacgccaaccccaacgccaaccccaacgccaaccccaacgccaaccccaacgccaaccccaacgccaaccccaacgccaaccccaacgccaaccccaacgccaaccccaacgccaaccccaacgccaaccccaacaagaacaaccagggcaacggccagggccacaacaugcccaacgaccccaaccgcaacgucgacgagaacgccaacgccaacuccgccgucaagaacaacaacaacgaggagcccuccgacaagcacaucaaggaguaccucaacaagauccagaacucccucuccaccgaguggucccccugcuccgucaccugcggcaacggcauccagguccgcaucaagcccggcuccgccaacaagcccaaggacgagcucgacuacgccaacgacaucgagaagaagaucugcaagauggagaagugcuccuccgucuucaacgucgucaacuccuccaucggccucaucaugguccucuccuuccucuuccucaacugaggacuagucccuguucccagagcccacuuuuuuuucuuuuuuugaaauaaaauagccugucuuucagaucucaaaggcucuuuucagagccaccaaaaaaaaaaaaaaaaaaaaaaaaaaaaaaaaaaaaaaaaaaaaaaaaaaaaaaaaaaaaaaaaaaaaaaaaaaaaaaaaaaaaaaaaaaaaaaaaaaaaagaauu

SEQ ID NO: 7353 - RNA, 1471 nt, Artificial Sequence
  mRNA Design a-1 (hSL-A100-N5) comprising derived and/or modified sequence from Pf(3D7)__XP_001351122.1__IgE_Pf-CSP(19-397) (opt2)
aggagagucccgcagucggcguccagcggcucugcuuguucgugugugugucguugcaggccuuauucaagcuuaccauggacuggaccuggauccucuuccucgucgccgccgccacccgcguccacucccucuuccaggaguaccagugcuacggcuccuccuccaacacccgcguccucaacgagcucaacuacgacaacgccggcaccaaccucuacaacgagcucgagaugaacuacuacggcaagcaggagaacugguacucccucaagaagaacucccgcucccucggcgagaacgacgacggcaacaacgaggacaacgagaagcuccgcaagcccaagcacaagaagcucaagcagcccgccgacggcaaccccgaccccaacgccaaccccaacgucgaccccaacgccaaccccaacgucgaccccaacgccaaccccaacgucgaccccaacgccaaccccaacgccaaccccaacgccaaccccaacgccaaccccaacgccaaccccaacgccaaccccaacgccaaccccaacgccaaccccaacgccaaccccaacgccaaccccaacgccaaccccaacgccaaccccaacgccaaccccaacgccaaccccaacgccaaccccaacgccaaccccaacgccaaccccaacgucgaccccaacgccaaccccaacgccaaccccaacgccaaccccaacgccaaccccaacgccaaccccaacgccaaccccaacgccaaccccaacgccaaccccaacgccaaccccaacgccaaccccaacgccaaccccaacgccaaccccaacgccaaccccaacgccaaccccaacgccaaccccaacgccaaccccaacgccaaccccaacgccaaccccaacaagaacaaccagggcaacggccagggccacaacaugcccaacgaccccaaccgcaacgucgacgagaacgccaacgccaacuccgccgucaagaacaacaacaacgaggagcccuccgacaagcacaucaaggaguaccucaacaagauccagaacucccucuccaccgaguggucccccugcuccgucaccugcggcaacggcauccagguccgcaucaagcccggcuccgccaacaagcccaaggacgagcucgacuacgccaacgacaucgagaagaagaucugcaagauggagaagugcuccuccgucuucaacgucgucaacuccuccaucggccucaucaugguccucuccuuccucuuccucaacugaggacuagucccuguucccagagcccacuuuuuuuucuuuuuuugaaauaaaauagccugucuuucagaucucaaaggcucuuuucagagccaccaaaaaaaaaaaaaaaaaaaaaaaaaaaaaaaaaaaaaaaaaaaaaaaaaaaaaaaaaaaaaaaaaaaaaaaaaaaaaaaaaaaaaaaaaaaaaaaaaaaaagaauu

SEQ ID NO: 7354 - RNA, 1636 nt, Artificial Sequence
  mRNA Design a-1 (hSL-A100-N5) comprising derived and/or modified sequence from Pf(3D7)__XP_001351122.1__Pf-CSP_L(G4SG4)_TM domain HA (opt2)
aggagagucccgcagucggcguccagcggcucugcuuguucgugugugugucguugcaggccuuauucaagcuuaccaugaugcgcaagcucgccauccucuccgucuccuccuuccucuucgucgaggcccucuuccaggaguaccagugcuacggcuccuccuccaacacccgcguccucaacgagcucaacuacgacaacgccggcaccaaccucuacaacgagcucgagaugaacuacuacggcaagcaggagaacugguacucccucaagaagaacucccgcucccucggcgagaacgacgacggcaacaacgaggacaacgagaagcuccgcaagcccaagcacaagaagcucaagcagcccgccgacggcaaccccgaccccaacgccaaccccaacgucgaccccaacgccaaccccaacgucgaccccaacgccaaccccaacgucgaccccaacgccaaccccaacgccaaccccaacgccaaccccaacgccaaccccaacgccaaccccaacgccaaccccaacgccaaccccaacgccaaccccaacgccaaccccaacgccaaccccaacgccaaccccaacgccaaccccaacgccaaccccaacgccaaccccaacgccaaccccaacgccaaccccaacgccaaccccaacgucgaccccaacgccaaccccaacgccaaccccaacgccaaccccaacgccaaccccaacgccaaccccaacgccaaccccaacgccaaccccaacgccaaccccaacgccaaccccaacgccaaccccaacgccaaccccaacgccaaccccaacgccaaccccaacgccaaccccaacgccaaccccaacgccaaccccaacgccaaccccaacgccaaccccaacaagaacaaccagggcaacggccagggccacaacaugcccaacgaccccaaccgcaacgucgacgagaacgccaacgccaacuccgccgucaagaacaacaacaacgaggagcccuccgacaagcacaucaaggaguaccucaacaagauccagaacucccucuccaccgaguggucccccugcuccgucaccugcggcaacggcauccagguccgcaucaagcccggcuccgccaacaagcccaaggacgagcucgacuacgccaacgacaucgagaagaagaucugcaagauggagaagugcuccuccgucuucaacgucgucaacuccuccaucggccucaucaugguccucuccuuccucuuccucaacggcggcggcggcuccggcggcggcggcaagcucgaguccacccgcaucuaccagauccucgccaucuacuccaccgucgccuccucccucguccucgucgucucccucggcgccaucuccuucuggaugugcuccaacggcucccuccagugccgcaucugcaucugaggacuagucccuguucccagagcccacuuuuuuuucuuuuuuugaaauaaaauagccugucuuucagaucucaaaggcucuuuucagagccaccaaaaaaaaaaaaaaaaaaaaaaaaaaaaaaaaaaaaaaaaaaaaaaaaaaaaaaaaaaaaaaaaaaaaaaaaaaaaaaaaaaaaaaaaaaaaaaaaaaaaagaauu

SEQ ID NO: 7355 - RNA, 1510 nt, Artificial Sequence
  mRNA Design a-1 (hSL-A100-N5) comprising derived and/or modified sequence from Pf(3D7)__XP_001351122.1__Pf-CSP(199-377)_L(PVTN)_HBsAg (opt2)
aggagagucccgcagucggcguccagcggcucugcuuguucgugugugugucguugcaggccuuauucaagcuuaccauggaccccaacgccaaccccaacgccaaccccaacgccaaccccaacgccaaccccaacgccaaccccaacgccaaccccaacgccaaccccaacgccaaccccaacgccaaccccaacgccaaccccaacgccaaccccaacgccaaccccaacgccaaccccaacgccaaccccaacgccaaccccaacgccaaccccaacgccaaccccaacgccaaccccaacaagaacaaccagggcaacggccagggccacaacaugcccaacgaccccaaccgcaacgucgacgagaacgccaacgccaacuccgccgucaagaacaacaacaacgaggagcccuccgacaagcacaucaaggaguaccucaacaagauccagaacucccucuccaccgaguggucccccugcuccgucaccugcggcaacggcauccagguccgcaucaagcccggcuccgccaacaagcccaaggacgagcucgacuacgccaacgacaucgagaagaagaucugcaagauggagaagugcuccuccguccccgucaccaacauggagaacaucaccuccggcuuccucggcccccuccucguccuccaggccggcuucuuccuccucacccgcauccucaccaucccccagucccucgacuccugguggaccucccucaacuuccucggcggcucccccgucugccucggccagaacucccagucccccaccuccaaccacucccccaccuccugcccccccaucugccccggcuaccgcuggaugugccuccgccgcuucaucaucuuccucuucauccuccuccucugccucaucuuccuccucguccuccucgacuaccagggcaugcuccccgucugcccccucauccccggcuccaccaccaccaacaccggccccugcaagaccugcaccacccccgcccagggcaacuccauguuccccuccugcugcugcaccaagcccaccgacggcaacugcaccugcauccccauccccuccuccugggccuucgccaaguaccucugggagugggccuccguccgcuucuccuggcucucccuccucguccccuucguccagugguucgucggccucucccccaccgucuggcucuccgccaucuggaugaugugguacuggggccccucccucuacuccaucgucucccccuucaucccccuccuccccaucuucuucugccucugggucuacaucugaggacuagucccuguucccagagcccacuuuuuuuucuuuuuuugaaauaaaauagccugucuuucagaucucaaaggcucuuuucagagccaccaaaaaaaaaaaaaaaaaaaaaaaaaaaaaaaaaaaaaaaaaaaaaaaaaaaaaaaaaaaaaaaaaaaaaaaaaaaaaaaaaaaaaaaaaaaaaaaaaaaaagaauu

SEQ ID NO: 7356 - RNA, 1552 nt, Artificial Sequence
  mRNA Design a-1 (hSL-A100-N5) comprising derived and/or modified sequence from Pf(3D7)__XP_001351122.1__Pf-CSP(199-387)_L(PVTN)_HBsAg (opt2)
aggagagucccgcagucggcguccagcggcucugcuuguucgugugugugucguugcaggccuuauucaagcuuaccaugauggcccccgaccccaacgccaaccccaacgccaaccccaacgccaaccccaacgccaaccccaacgccaaccccaacgccaaccccaacgccaaccccaacgccaaccccaacgccaaccccaacgccaaccccaacgccaaccccaacgccaaccccaacgccaaccccaacgccaaccccaacgccaaccccaacgccaaccccaacgccaaccccaacgccaaccccaacaagaacaaccagggcaacggccagggccacaacaugcccaacgaccccaaccgcaacgucgacgagaacgccaacgccaacuccgccgucaagaacaacaacaacgaggagcccuccgacaagcacaucaaggaguaccucaacaagauccagaacucccucuccaccgaguggucccccugcuccgucaccugcggcaacggcauccagguccgcaucaagcccggcuccgccaacaagcccaaggacgagcucgacuacgccaacgacaucgagaagaagaucugcaagauggagaagugcuccuccgucuucaacgucgucaacuccuccaucggccucggccccgucaccaacauggagaacaucaccuccggcuuccucggcccccuccucguccuccaggccggcuucuuccuccucacccgcauccucaccaucccccagucccucgacuccugguggaccucccucaacuuccucggcggcucccccgucugccucggccagaacucccagucccccaccuccaaccacucccccaccuccugcccccccaucugccccggcuaccgcuggaugugccuccgccgcuucaucaucuuccucuucauccuccuccucugccucaucuuccuccucguccuccucgacuaccagggcaugcuccccgucugcccccucauccccggcuccaccaccaccaacaccggccccugcaagaccugcaccacccccgcccagggcaacuccauguuccccuccugcugcugcaccaagcccaccgacggcaacugcaccugcauccccauccccuccuccugggccuucgccaaguaccucugggagugggccuccguccgcuucuccuggcucucccuccucguccccuucguccagugguucgucggccucucccccaccgucuggcucuccgccaucuggaugaugugguacuggggccccucccucuacuccaucgucucccccuucaucccccuccuccccaucuucuucugccucugggucuacaucugaggacuagucccuguucccagagcccacuuuuuuuucuuuuuuugaaauaaaauagccugucuuucagaucucaaaggcucuuuucagagccaccaaaaaaaaaaaaaaaaaaaaaaaaaaaaaaaaaaaaaaaaaaaaaaaaaaaaaaaaaaaaaaaaaaaaaaaaaaaaaaaaaaaaaaaaaaaaaaaaaaaaagaauu

SEQ ID NO: 7357 - RNA, 736 nt, Artificial Sequence
  mRNA Design a-1 (hSL-A100-N5) comprising derived and/or modified sequence from Pf(3D7)__XP_001351122.1__HsALB_Pf-CSP(19-152) (opt2)
aggagagucccgcagucggcguccagcggcucugcuuguucgugugugugucguugcaggccuuauucaagcuuaccaugaagugggucaccuucaucucccuccucuuccucuucuccuccgccuacucccucuuccaggaguaccagugcuacggcuccuccuccaacacccgcguccucaacgagcucaacuacgacaacgccggcaccaaccucuacaacgagcucgagaugaacuacuacggcaagcaggagaacugguacucccucaagaagaacucccgcucccucggcgagaacgacgacggcaacaacgaggacaacgagaagcuccgcaagcccaagcacaagaagcucaagcagcccgccgacggcaaccccgaccccaacgccaaccccaacgucgaccccaacgccaaccccaacgucgaccccaacgccaaccccaacgucgaccccaacgccaaccccaacgccaaccccaacgccaaccccaacgccaaccccaacgccaaccccaacgccaaccccugaggacuagucccuguucccagagcccacuuuuuuuucuuuuuuugaaauaaaauagccugucuuucagaucucaaaggcucuuuucagagccaccaaaaaaaaaaaaaaaaaaaaaaaaaaaaaaaaaaaaaaaaaaaaaaaaaaaaaaaaaaaaaaaaaaaaaaaaaaaaaaaaaaaaaaaaaaaaaaaaaaaaagaauu

SEQ ID NO: 7358 - RNA, 856 nt, Artificial Sequence
  mRNA Design a-1 (hSL-A100-N5) comprising derived and/or modified sequence from Pf(3D7)__XP_001351122.1__HsALB_Pf-CSP(19-192) (opt2)
aggagagucccgcagucggcguccagcggcucugcuuguucgugugugugucguugcaggccuuauucaagcuuaccaugaagugggucaccuucaucucccuccucuuccucuucuccuccgccuacucccucuuccaggaguaccagugcuacggcuccuccuccaacacccgcguccucaacgagcucaacuacgacaacgccggcaccaaccucuacaacgagcucgagaugaacuacuacggcaagcaggagaacugguacucccucaagaagaacucccgcucccucggcgagaacgacgacggcaacaacgaggacaacgagaagcuccgcaagcccaagcacaagaagcucaagcagcccgccgacggcaaccccgaccccaacgccaaccccaacgucgaccccaacgccaaccccaacgucgaccccaacgccaaccccaacgucgaccccaacgccaaccccaacgccaaccccaacgccaaccccaacgccaaccccaacgccaaccccaacgccaaccccaacgccaaccccaacgccaaccccaacgccaaccccaacgccaaccccaacgccaaccccaacgccaaccccaacgccaaccccaacgccaaccccaacgccaaccccaacgccaaccccugaggacuagucccuguucccagagcccacuuuuuuuucuuuuuuugaaauaaaauagccugucuuucagaucucaaaggcucuuuucagagccaccaaaaaaaaaaaaaaaaaaaaaaaaaaaaaaaaaaaaaaaaaaaaaaaaaaaaaaaaaaaaaaaaaaaaaaaaaaaaaaaaaaaaaaaaaaaaaaaaaaaaagaauu

SEQ ID NO: 7359 - RNA, 1096 nt, Artificial Sequence
  mRNA Design a-1 (hSL-A100-N5) comprising derived and/or modified sequence from Pf(3D7)__XP_001351122.1__HsALB_Pf-CSP(19-272) (opt2)
aggagagucccgcagucggcguccagcggcucugcuuguucgugugugugucguugcaggccuuauucaagcuuaccaugaagugggucaccuucaucucccuccucuuccucuucuccuccgccuacucccucuuccaggaguaccagugcuacggcuccuccuccaacacccgcguccucaacgagcucaacuacgacaacgccggcaccaaccucuacaacgagcucgagaugaacuacuacggcaagcaggagaacugguacucccucaagaagaacucccgcucccucggcgagaacgacgacggcaacaacgaggacaacgagaagcuccgcaagcccaagcacaagaagcucaagcagcccgccgacggcaaccccgaccccaacgccaaccccaacgucgaccccaacgccaaccccaacgucgaccccaacgccaaccccaacgucgaccccaacgccaaccccaacgccaaccccaacgccaaccccaacgccaaccccaacgccaaccccaacgccaaccccaacgccaaccccaacgccaaccccaacgccaaccccaacgccaaccccaacgccaaccccaacgccaaccccaacgccaaccccaacgccaaccccaacgccaaccccaacgccaaccccaacgccaaccccaacgucgaccccaacgccaaccccaacgccaaccccaacgccaaccccaacgccaaccccaacgccaaccccaacgccaaccccaacgccaaccccaacgccaaccccaacgccaaccccaacgccaaccccaacgccaaccccaacgccaaccccaacgccaaccccaacgccaaccccaacgccaaccccaacgccaaccccaacgccaaccccaacgccaaccccugaggacuagucccuguucccagagcccacuuuuuuuucuuuuuuugaaauaaaauagccugucuuucagaucucaaaggcucuuuucagagccaccaaaaaaaaaaaaaaaaaaaaaaaaaaaaaaaaaaaaaaaaaaaaaaaaaaaaaaaaaaaaaaaaaaaaaaaaaaaaaaaaaaaaaaaaaaaaaaaaaaaaagaauu

SEQ ID NO: 7360 - RNA, 1258 nt, Artificial Sequence
  mRNA Design a-1 (hSL-A100-N5) comprising derived and/or modified sequence from Pf(3D7)__XP_001351122.1__HsALB_Pf-CSP(19-272)_L(AAY)_Pf-CSP(310-3 27)_L(AAY)_Pf-CSP(346-375) (opt2)
aggagagucccgcagucggcguccagcggcucugcuuguucgugugugugucguugcaggccuuauucaagcuuaccaugaagugggucaccuucaucucccuccucuuccucuucuccuccgccuacucccucuuccaggaguaccagugcuacggcuccuccuccaacacccgcguccucaacgagcucaacuacgacaacgccggcaccaaccucuacaacgagcucgagaugaacuacuacggcaagcaggagaacugguacucccucaagaagaacucccgcucccucggcgagaacgacgacggcaacaacgaggacaacgagaagcuccgcaagcccaagcacaagaagcucaagcagcccgccgacggcaaccccgaccccaacgccaaccccaacgucgaccccaacgccaaccccaacgucgaccccaacgccaaccccaacgucgaccccaacgccaaccccaacgccaaccccaacgccaaccccaacgccaaccccaacgccaaccccaacgccaaccccaacgccaaccccaacgccaaccccaacgccaaccccaacgccaaccccaacgccaaccccaacgccaaccccaacgccaaccccaacgccaaccccaacgccaaccccaacgccaaccccaacgccaaccccaacgucgaccccaacgccaaccccaacgccaaccccaacgccaaccccaacgccaaccccaacgccaaccccaacgccaaccccaacgccaaccccaacgccaaccccaacgccaaccccaacgccaaccccaacgccaaccccaacgccaaccccaacgccaaccccaacgccaaccccaacgccaaccccaacgccaaccccaacgccaaccccaacgccaaccccgccgccuacgagcccuccgacaagcacaucaaggaguaccucaacaagauccagaacucccucgccgccuacaucaagcccggcuccgccaacaagcccaaggacgagcucgacuacgccaacgacaucgagaagaagaucugcaagauggagaagugcuccugaggacuagucccuguucccagagcccacuuuuuuuucuuuuuuugaaauaaaauagccugucuuucagaucucaaaggcucuuuucagagccaccaaaaaaaaaaaaaaaaaaaaaaaaaaaaaaaaaaaaaaaaaaaaaaaaaaaaaaaaaaaaaaaaaaaaaaaaaaaaaaaaaaaaaaaaaaaaaaaaaaaaagaauu

SEQ ID NO: 7361 - RNA, 1219 nt, Artificial Sequence
  mRNA Design a-1 (hSL-A100-N5) comprising derived and/or modified sequence from Pf(3D7)__XP_001351122.1__HsALB_Pf-CSP(19-272)_L(AAY)_Pf-CSP(346-3 65)_L(AAY)_P2 (opt2)
aggagagucccgcagucggcguccagcggcucugcuuguucgugugugugucguugcaggccuuauucaagcuuaccaugaagugggucaccuucaucucccuccucuuccucuucuccuccgccuacucccucuuccaggaguaccagugcuacggcuccuccuccaacacccgcguccucaacgagcucaacuacgacaacgccggcaccaaccucuacaacgagcucgagaugaacuacuacggcaagcaggagaacugguacucccucaagaagaacucccgcucccucggcgagaacgacgacggcaacaacgaggacaacgagaagcuccgcaagcccaagcacaagaagcucaagcagcccgccgacggcaaccccgaccccaacgccaaccccaacgucgaccccaacgccaaccccaacgucgaccccaacgccaaccccaacgucgaccccaacgccaaccccaacgccaaccccaacgccaaccccaacgccaaccccaacgccaaccccaacgccaaccccaacgccaaccccaacgccaaccccaacgccaaccccaacgccaaccccaacgccaaccccaacgccaaccccaacgccaaccccaacgccaaccccaacgccaaccccaacgccaaccccaacgccaaccccaacgucgaccccaacgccaaccccaacgccaaccccaacgccaaccccaacgccaaccccaacgccaaccccaacgccaaccccaacgccaaccccaacgccaaccccaacgccaaccccaacgccaaccccaacgccaaccccaacgccaaccccaacgccaaccccaacgccaaccccaacgccaaccccaacgccaaccccaacgccaaccccaacgccaaccccgccgccuacaucaagcccggcuccgccaacaagcccaaggacgagcucgacuacgccaacgacaucgaggccgccuaccaguacaucaaggccaacuccaaguucaucggcaucaccgagcucugaggacuagucccuguucccagagcccacuuuuuuuucuuuuuuugaaauaaaauagccugucuuucagaucucaaaggcucuuuucagagccaccaaaaaaaaaaaaaaaaaaaaaaaaaaaaaaaaaaaaaaaaaaaaaaaaaaaaaaaaaaaaaaaaaaaaaaaaaaaaaaaaaaaaaaaaaaaaaaaaaaaaagaauu

SEQ ID NO: 7362 - RNA, 1213 nt, Artificial Sequence
  mRNA Design a-1 (hSL-A100-N5) comprising derived and/or modified sequence from Pf(3D7)__XP_001351122.1__HsALB_Pf-CSP(19-272)_L(AAY)_Pf-CSP(346-3 65)_L(AAY)_PADRE (opt2)
aggagagucccgcagucggcguccagcggcucugcuuguucgugugugugucguugcaggccuuauucaagcuuaccaugaagugggucaccuucaucucccuccucuuccucuucuccuccgccuacucccucuuccaggaguaccagugcuacggcuccuccuccaacacccgcguccucaacgagcucaacuacgacaacgccggcaccaaccucuacaacgagcucgagaugaacuacuacggcaagcaggagaacugguacucccucaagaagaacucccgcucccucggcgagaacgacgacggcaacaacgaggacaacgagaagcuccgcaagcccaagcacaagaagcucaagcagcccgccgacggcaaccccgaccccaacgccaaccccaacgucgaccccaacgccaaccccaacgucgaccccaacgccaaccccaacgucgaccccaacgccaaccccaacgccaaccccaacgccaaccccaacgccaaccccaacgccaaccccaacgccaaccccaacgccaaccccaacgccaaccccaacgccaaccccaacgccaaccccaacgccaaccccaacgccaaccccaacgccaaccccaacgccaaccccaacgccaaccccaacgccaaccccaacgccaaccccaacgucgaccccaacgccaaccccaacgccaaccccaacgccaaccccaacgccaaccccaacgccaaccccaacgccaaccccaacgccaaccccaacgccaaccccaacgccaaccccaacgccaaccccaacgccaaccccaacgccaaccccaacgccaaccccaacgccaaccccaacgccaaccccaacgccaaccccaacgccaaccccaacgccaaccccgccgccuacaucaagcccggcuccgccaacaagcccaaggacgagcucgacuacgccaacgacaucgaggccgccuacgccaaguucgucgccgccuggacccucaaggccgccgccugaggacuagucccuguucccagagcccacuuuuuuuucuuuuuuugaaauaaaauagccugucuuucagaucucaaaggcucuuuucagagccaccaaaaaaaaaaaaaaaaaaaaaaaaaaaaaaaaaaaaaaaaaaaaaaaaaaaaaaaaaaaaaaaaaaaaaaaaaaaaaaaaaaaaaaaaaaaaaaaaaaaaagaauu

SEQ ID NO: 7363 - RNA, 1270 nt, Artificial Sequence
  mRNA Design a-1 (hSL-A100-N5) comprising derived and/or modified sequence from Pf(3D7)__XP_001351122.1__HsALB_Pf-CSP(19-272)_L(G4S)_Pf-CSP(310-3 27)_L(G4S)_Pf-CSP(346-375) (opt2)
aggagagucccgcagucggcguccagcggcucugcuuguucgugugugugucguugcaggccuuauucaagcuuaccaugaagugggucaccuucaucucccuccucuuccucuucuccuccgccuacucccucuuccaggaguaccagugcuacggcuccuccuccaacacccgcguccucaacgagcucaacuacgacaacgccggcaccaaccucuacaacgagcucgagaugaacuacuacggcaagcaggagaacugguacucccucaagaagaacucccgcucccucggcgagaacgacgacggcaacaacgaggacaacgagaagcuccgcaagcccaagcacaagaagcucaagcagcccgccgacggcaaccccgaccccaacgccaaccccaacgucgaccccaacgccaaccccaacgucgaccccaacgccaaccccaacgucgaccccaacgccaaccccaacgccaaccccaacgccaaccccaacgccaaccccaacgccaaccccaacgccaaccccaacgccaaccccaacgccaaccccaacgccaaccccaacgccaaccccaacgccaaccccaacgccaaccccaacgccaaccccaacgccaaccccaacgccaaccccaacgccaaccccaacgccaaccccaacgucgaccccaacgccaaccccaacgccaaccccaacgccaaccccaacgccaaccccaacgccaaccccaacgccaaccccaacgccaaccccaacgccaaccccaacgccaaccccaacgccaaccccaacgccaaccccaacgccaaccccaacgccaaccccaacgccaaccccaacgccaaccccaacgccaaccccaacgccaaccccaacgccaaccccggcggcggcggcuccgagcccuccgacaagcacaucaaggaguaccucaacaagauccagaacucccucggcggcggcggcuccaucaagcccggcuccgccaacaagcccaaggacgagcucgacuacgccaacgacaucgagaagaagaucugcaagauggagaagugcuccugaggacuagucccuguucccagagcccacuuuuuuuucuuuuuuugaaauaaaauagccugucuuucagaucucaaaggcucuuuucagagccaccaaaaaaaaaaaaaaaaaaaaaaaaaaaaaaaaaaaaaaaaaaaaaaaaaaaaaaaaaaaaaaaaaaaaaaaaaaaaaaaaaaaaaaaaaaaaaaaaaaaaagaauu

SEQ ID NO: 7364 - RNA, 1255 nt, Artificial Sequence
  mRNA Design a-1 (hSL-A100-N5) comprising derived and/or modified sequence from Pf(3D7)__XP_001351122.1__HsALB_Pf-CSP(19-272)_L(G4S)_Pf-CSP(310-3 27)_Pf-CSP(346-375) (opt2)
aggagagucccgcagucggcguccagcggcucugcuuguucgugugugugucguugcaggccuuauucaagcuuaccaugaagugggucaccuucaucucccuccucuuccucuucuccuccgccuacucccucuuccaggaguaccagugcuacggcuccuccuccaacacccgcguccucaacgagcucaacuacgacaacgccggcaccaaccucuacaacgagcucgagaugaacuacuacggcaagcaggagaacugguacucccucaagaagaacucccgcucccucggcgagaacgacgacggcaacaacgaggacaacgagaagcuccgcaagcccaagcacaagaagcucaagcagcccgccgacggcaaccccgaccccaacgccaaccccaacgucgaccccaacgccaaccccaacgucgaccccaacgccaaccccaacgucgaccccaacgccaaccccaacgccaaccccaacgccaaccccaacgccaaccccaacgccaaccccaacgccaaccccaacgccaaccccaacgccaaccccaacgccaaccccaacgccaaccccaacgccaaccccaacgccaaccccaacgccaaccccaacgccaaccccaacgccaaccccaacgccaaccccaacgccaaccccaacgucgaccccaacgccaaccccaacgccaaccccaacgccaaccccaacgccaaccccaacgccaaccccaacgccaaccccaacgccaaccccaacgccaaccccaacgccaaccccaacgccaaccccaacgccaaccccaacgccaaccccaacgccaaccccaacgccaaccccaacgccaaccccaacgccaaccccaacgccaaccccaacgccaaccccggcggcggcggcuccgagcccuccgacaagcacaucaaggaguaccucaacaagauccagaacucccucaucaagcccggcuccgccaacaagcccaaggacgagcucgacuacgccaacgacaucgagaagaagaucugcaagauggagaagugcuccugaggacuagucccuguucccagagcccacuuuuuuuucuuuuuuugaaauaaaauagccugucuuucagaucucaaaggcucuuuucagagccaccaaaaaaaaaaaaaaaaaaaaaaaaaaaaaaaaaaaaaaaaaaaaaaaaaaaaaaaaaaaaaaaaaaaaaaaaaaaaaaaaaaaaaaaaaaaaaaaaaaaaagaauu

SEQ ID NO: 7365 - RNA, 1255 nt, Artificial Sequence
  mRNA Design a-1 (hSL-A100-N5) comprising derived and/or modified sequence from Pf(3D7)__XP_001351122.1__HsALB_Pf-CSP(19-325) (opt2)
aggagagucccgcagucggcguccagcggcucugcuuguucgugugugugucguugcaggccuuauucaagcuuaccaugaagugggucaccuucaucucccuccucuuccucuucuccuccgccuacucccucuuccaggaguaccagugcuacggcuccuccuccaacacccgcguccucaacgagcucaacuacgacaacgccggcaccaaccucuacaacgagcucgagaugaacuacuacggcaagcaggagaacugguacucccucaagaagaacucccgcucccucggcgagaacgacgacggcaacaacgaggacaacgagaagcuccgcaagcccaagcacaagaagcucaagcagcccgccgacggcaaccccgaccccaacgccaaccccaacgucgaccccaacgccaaccccaacgucgaccccaacgccaaccccaacgucgaccccaacgccaaccccaacgccaaccccaacgccaaccccaacgccaaccccaacgccaaccccaacgccaaccccaacgccaaccccaacgccaaccccaacgccaaccccaacgccaaccccaacgccaaccccaacgccaaccccaacgccaaccccaacgccaaccccaacgccaaccccaacgccaaccccaacgccaaccccaacgucgaccccaacgccaaccccaacgccaaccccaacgccaaccccaacgccaaccccaacgccaaccccaacgccaaccccaacgccaaccccaacgccaaccccaacgccaaccccaacgccaaccccaacgccaaccccaacgccaaccccaacgccaaccccaacgccaaccccaacgccaaccccaacgccaaccccaacgccaaccccaacgccaaccccaacaagaacaaccagggcaacggccagggccacaacaugcccaacgaccccaaccgcaacgucgacgagaacgccaacgccaacuccgccgucaagaacaacaacaacgaggagcccuccgacaagcacaucaaggaguaccucaacaagauccagaacugaggacuagucccuguucccagagcccacuuuuuuuucuuuuuuugaaauaaaauagccugucuuucagaucucaaaggcucuuuucagagccaccaaaaaaaaaaaaaaaaaaaaaaaaaaaaaaaaaaaaaaaaaaaaaaaaaaaaaaaaaaaaaaaaaaaaaaaaaaaaaaaaaaaaaaaaaaaaaaaaaaaaagaauu

SEQ ID NO: 7366 - RNA, 1432 nt, Artificial Sequence
  mRNA Design a-1 (hSL-A100-N5) comprising derived and/or modified sequence from Pf(3D7)__XP_001351122.1__HsALB_Pf-CSP(19-384) (opt2)
aggagagucccgcagucggcguccagcggcucugcuuguucgugugugugucguugcaggccuuauucaagcuuaccaugaagugggucaccuucaucucccuccucuuccucuucuccuccgccuacucccucuuccaggaguaccagugcuacggcuccuccuccaacacccgcguccucaacgagcucaacuacgacaacgccggcaccaaccucuacaacgagcucgagaugaacuacuacggcaagcaggagaacugguacucccucaagaagaacucccgcucccucggcgagaacgacgacggcaacaacgaggacaacgagaagcuccgcaagcccaagcacaagaagcucaagcagcccgccgacggcaaccccgaccccaacgccaaccccaacgucgaccccaacgccaaccccaacgucgaccccaacgccaaccccaacgucgaccccaacgccaaccccaacgccaaccccaacgccaaccccaacgccaaccccaacgccaaccccaacgccaaccccaacgccaaccccaacgccaaccccaacgccaaccccaacgccaaccccaacgccaaccccaacgccaaccccaacgccaaccccaacgccaaccccaacgccaaccccaacgccaaccccaacgccaaccccaacgucgaccccaacgccaaccccaacgccaaccccaacgccaaccccaacgccaaccccaacgccaaccccaacgccaaccccaacgccaaccccaacgccaaccccaacgccaaccccaacgccaaccccaacgccaaccccaacgccaaccccaacgccaaccccaacgccaaccccaacgccaaccccaacgccaaccccaacgccaaccccaacgccaaccccaacaagaacaaccagggcaacggccagggccacaacaugcccaacgaccccaaccgcaacgucgacgagaacgccaacgccaacuccgccgucaagaacaacaacaacgaggagcccuccgacaagcacaucaaggaguaccucaacaagauccagaacucccucuccaccgaguggucccccugcuccgucaccugcggcaacggcauccagguccgcaucaagcccggcuccgccaacaagcccaaggacgagcucgacuacgccaacgacaucgagaagaagaucugcaagauggagaagugcuccuccgucuucaacgucgucaacuccuccugaggacuagucccuguucccagagcccacuuuuuuuucuuuuuuugaaauaaaauagccugucuuucagaucucaaaggcucuuuucagagccaccaaaaaaaaaaaaaaaaaaaaaaaaaaaaaaaaaaaaaaaaaaaaaaaaaaaaaaaaaaaaaaaaaaaaaaaaaaaaaaaaaaaaaaaaaaaaaaaaaaaaagaauu

SEQ ID NO: 7367 - RNA, 1570 nt, Artificial Sequence
  mRNA Design a-1 (hSL-A100-N5) comprising derived and/or modified sequence from Pf(3D7)__XP_001351122.1__HsALB_Pf-CSP(19-384)_TM domain HA (opt2)
aggagagucccgcagucggcguccagcggcucugcuuguucgugugugugucguugcaggccuuauucaagcuuaccaugaagugggucaccuucaucucccuccucuuccucuucuccuccgccuacucccucuuccaggaguaccagugcuacggcuccuccuccaacacccgcguccucaacgagcucaacuacgacaacgccggcaccaaccucuacaacgagcucgagaugaacuacuacggcaagcaggagaacugguacucccucaagaagaacucccgcucccucggcgagaacgacgacggcaacaacgaggacaacgagaagcuccgcaagcccaagcacaagaagcucaagcagcccgccgacggcaaccccgaccccaacgccaaccccaacgucgaccccaacgccaaccccaacgucgaccccaacgccaaccccaacgucgaccccaacgccaaccccaacgccaaccccaacgccaaccccaacgccaaccccaacgccaaccccaacgccaaccccaacgccaaccccaacgccaaccccaacgccaaccccaacgccaaccccaacgccaaccccaacgccaaccccaacgccaaccccaacgccaaccccaacgccaaccccaacgccaaccccaacgccaaccccaacgucgaccccaacgccaaccccaacgccaaccccaacgccaaccccaacgccaaccccaacgccaaccccaacgccaaccccaacgccaaccccaacgccaaccccaacgccaaccccaacgccaaccccaacgccaaccccaacgccaaccccaacgccaaccccaacgccaaccccaacgccaaccccaacgccaaccccaacgccaaccccaacgccaaccccaacaagaacaaccagggcaacggccagggccacaacaugcccaacgaccccaaccgcaacgucgacgagaacgccaacgccaacuccgccgucaagaacaacaacaacgaggagcccuccgacaagcacaucaaggaguaccucaacaagauccagaacucccucuccaccgaguggucccccugcuccgucaccugcggcaacggcauccagguccgcaucaagcccggcuccgccaacaagcccaaggacgagcucgacuacgccaacgacaucgagaagaagaucugcaagauggagaagugcuccuccgucuucaacgucgucaacuccuccaagcucgaguccacccgcaucuaccagauccucgccaucuacuccaccgucgccuccucccucguccucgucgucucccucggcgccaucuccuucuggaugugcuccaacggcucccuccagugccgcaucugcaucugaggacuagucccuguucccagagcccacuuuuuuuucuuuuuuugaaauaaaauagccugucuuucagaucucaaaggcucuuuucagagccaccaaaaaaaaaaaaaaaaaaaaaaaaaaaaaaaaaaaaaaaaaaaaaaaaaaaaaaaaaaaaaaaaaaaaaaaaaaaaaaaaaaaaaaaaaaaaaaaaaaaaagaauu

SEQ ID NO: 7368 - RNA, 1282 nt, Artificial Sequence
  mRNA Design a-1 (hSL-A100-N5) comprising derived and/or modified sequence from Pf(3D7)__XP_001351122.1__HsALB_Pf-CSP(82-397) (opt2)
aggagagucccgcagucggcguccagcggcucugcuuguucgugugugugucguugcaggccuuauucaagcuuaccaugaagugggucaccuucaucucccuccucuuccucuucuccuccgccuacuccgacaacgagaagcuccgcaagcccaagcacaagaagcucaagcagcccgccgacggcaaccccgaccccaacgccaaccccaacgucgaccccaacgccaaccccaacgucgaccccaacgccaaccccaacgucgaccccaacgccaaccccaacgccaaccccaacgccaaccccaacgccaaccccaacgccaaccccaacgccaaccccaacgccaaccccaacgccaaccccaacgccaaccccaacgccaaccccaacgccaaccccaacgccaaccccaacgccaaccccaacgccaaccccaacgccaaccccaacgccaaccccaacgccaaccccaacgucgaccccaacgccaaccccaacgccaaccccaacgccaaccccaacgccaaccccaacgccaaccccaacgccaaccccaacgccaaccccaacgccaaccccaacgccaaccccaacgccaaccccaacgccaaccccaacgccaaccccaacgccaaccccaacgccaaccccaacgccaaccccaacgccaaccccaacgccaaccccaacgccaaccccaacaagaacaaccagggcaacggccagggccacaacaugcccaacgaccccaaccgcaacgucgacgagaacgccaacgccaacuccgccgucaagaacaacaacaacgaggagcccuccgacaagcacaucaaggaguaccucaacaagauccagaacucccucuccaccgaguggucccccugcuccgucaccugcggcaacggcauccagguccgcaucaagcccggcuccgccaacaagcccaaggacgagcucgacuacgccaacgacaucgagaagaagaucugcaagauggagaagugcuccuccgucuucaacgucgucaacuccuccaucggccucaucaugguccucuccuuccucuuccucaacugaggacuagucccuguucccagagcccacuuuuuuuucuuuuuuugaaauaaaauagccugucuuucagaucucaaaggcucuuuucagagccaccaaaaaaaaaaaaaaaaaaaaaaaaaaaaaaaaaaaaaaaaaaaaaaaaaaaaaaaaaaaaaaaaaaaaaaaaaaaaaaaaaaaaaaaaaaaaaaaaaaaaagaauu

SEQ ID NO: 7369 - RNA, 634 nt, Artificial Sequence
  mRNA Design a-1 (hSL-A100-N5) comprising derived and/or modified sequence from Pf(3D7)__XP_001351122.1__HsALB_Pf-CSP(93-192) (opt2)
aggagagucccgcagucggcguccagcggcucugcuuguucgugugugugucguugcaggccuuauucaagcuuaccaugaagugggucaccuucaucucccuccucuuccucuucuccuccgccuacuccaagcucaagcagcccgccgacggcaaccccgaccccaacgccaaccccaacgucgaccccaacgccaaccccaacgucgaccccaacgccaaccccaacgucgaccccaacgccaaccccaacgccaaccccaacgccaaccccaacgccaaccccaacgccaaccccaacgccaaccccaacgccaaccccaacgccaaccccaacgccaaccccaacgccaaccccaacgccaaccccaacgccaaccccaacgccaaccccaacgccaaccccaacgccaaccccaacgccaaccccugaggacuagucccuguucccagagcccacuuuuuuuucuuuuuuugaaauaaaauagccugucuuucagaucucaaaggcucuuuucagagccaccaaaaaaaaaaaaaaaaaaaaaaaaaaaaaaaaaaaaaaaaaaaaaaaaaaaaaaaaaaaaaaaaaaaaaaaaaaaaaaaaaaaaaaaaaaaaaaaaaaaaagaauu

SEQ ID NO: 7370 - RNA, 874 nt, Artificial Sequence
  mRNA Design a-1 (hSL-A100-N5) comprising derived and/or modified sequence from Pf(3D7)__XP_001351122.1__HsALB_Pf-CSP(93-272) (opt2)
aggagagucccgcagucggcguccagcggcucugcuuguucgugugugugucguugcaggccuuauucaagcuuaccaugaagugggucaccuucaucucccuccucuuccucuucuccuccgccuacuccaagcucaagcagcccgccgacggcaaccccgaccccaacgccaaccccaacgucgaccccaacgccaaccccaacgucgaccccaacgccaaccccaacgucgaccccaacgccaaccccaacgccaaccccaacgccaaccccaacgccaaccccaacgccaaccccaacgccaaccccaacgccaaccccaacgccaaccccaacgccaaccccaacgccaaccccaacgccaaccccaacgccaaccccaacgccaaccccaacgccaaccccaacgccaaccccaacgccaaccccaacgccaaccccaacgucgaccccaacgccaaccccaacgccaaccccaacgccaaccccaacgccaaccccaacgccaaccccaacgccaaccccaacgccaaccccaacgccaaccccaacgccaaccccaacgccaaccccaacgccaaccccaacgccaaccccaacgccaaccccaacgccaaccccaacgccaaccccaacgccaaccccaacgccaaccccaacgccaaccccugaggacuagucccuguucccagagcccacuuuuuuuucuuuuuuugaaauaaaauagccugucuuucagaucucaaaggcucuuuucagagccaccaaaaaaaaaaaaaaaaaaaaaaaaaaaaaaaaaaaaaaaaaaaaaaaaaaaaaaaaaaaaaaaaaaaaaaaaaaaaaaaaaaaaaaaaaaaaaaaaaaaaagaauu

SEQ ID NO: 7371 - RNA, 1249 nt, Artificial Sequence
  mRNA Design a-1 (hSL-A100-N5) comprising derived and/or modified sequence from Pf(3D7)__XP_001351122.1__HsALB_Pf-CSP(93-397) (opt2)
aggagagucccgcagucggcguccagcggcucugcuuguucgugugugugucguugcaggccuuauucaagcuuaccaugaagugggucaccuucaucucccuccucuuccucuucuccuccgccuacuccaagcucaagcagcccgccgacggcaaccccgaccccaacgccaaccccaacgucgaccccaacgccaaccccaacgucgaccccaacgccaaccccaacgucgaccccaacgccaaccccaacgccaaccccaacgccaaccccaacgccaaccccaacgccaaccccaacgccaaccccaacgccaaccccaacgccaaccccaacgccaaccccaacgccaaccccaacgccaaccccaacgccaaccccaacgccaaccccaacgccaaccccaacgccaaccccaacgccaaccccaacgccaaccccaacgucgaccccaacgccaaccccaacgccaaccccaacgccaaccccaacgccaaccccaacgccaaccccaacgccaaccccaacgccaaccccaacgccaaccccaacgccaaccccaacgccaaccccaacgccaaccccaacgccaaccccaacgccaaccccaacgccaaccccaacgccaaccccaacgccaaccccaacgccaaccccaacgccaaccccaacaagaacaaccagggcaacggccagggccacaacaugcccaacgaccccaaccgcaacgucgacgagaacgccaacgccaacuccgccgucaagaacaacaacaacgaggagcccuccgacaagcacaucaaggaguaccucaacaagauccagaacucccucuccaccgaguggucccccugcuccgucaccugcggcaacggcauccagguccgcaucaagcccggcuccgccaacaagcccaaggacgagcucgacuacgccaacgacaucgagaagaagaucugcaagauggagaagugcuccuccgucuucaacgucgucaacuccuccaucggccucaucaugguccucuccuuccucuuccucaacugaggacuagucccuguucccagagcccacuuuuuuuucuuuuuuugaaauaaaauagccugucuuucagaucucaaaggcucuuuucagagccaccaaaaaaaaaaaaaaaaaaaaaaaaaaaaaaaaaaaaaaaaaaaaaaaaaaaaaaaaaaaaaaaaaaaaaaaaaaaaaaaaaaaaaaaaaaaaaaaaaaaaagaauu

SEQ ID NO: 7372 - RNA, 619 nt, Artificial Sequence
  mRNA Design a-1 (hSL-A100-N5) comprising derived and/or modified sequence from Pf(3D7)__XP_001351122.1__HsALB_Pf-CSP(98-192) (opt2)
aggagagucccgcagucggcguccagcggcucugcuuguucgugugugugucguugcaggccuuauucaagcuuaccaugaagugggucaccuucaucucccuccucuuccucuucuccuccgccuacuccgccgacggcaaccccgaccccaacgccaaccccaacgucgaccccaacgccaaccccaacgucgaccccaacgccaaccccaacgucgaccccaacgccaaccccaacgccaaccccaacgccaaccccaacgccaaccccaacgccaaccccaacgccaaccccaacgccaaccccaacgccaaccccaacgccaaccccaacgccaaccccaacgccaaccccaacgccaaccccaacgccaaccccaacgccaaccccaacgccaaccccaacgccaaccccugaggacuagucccuguucccagagcccacuuuuuuuucuuuuuuugaaauaaaauagccugucuuucagaucucaaaggcucuuuucagagccaccaaaaaaaaaaaaaaaaaaaaaaaaaaaaaaaaaaaaaaaaaaaaaaaaaaaaaaaaaaaaaaaaaaaaaaaaaaaaaaaaaaaaaaaaaaaaaaaaaaaaagaauu

SEQ ID NO: 7373 - RNA, 859 nt, Artificial Sequence
  mRNA Design a-1 (hSL-A100-N5) comprising derived and/or modified sequence from Pf(3D7)__XP_001351122.1__HsALB_Pf-CSP(98-272) (opt2)
aggagagucccgcagucggcguccagcggcucugcuuguucgugugugugucguugcaggccuuauucaagcuuaccaugaagugggucaccuucaucucccuccucuuccucuucuccuccgccuacuccgccgacggcaaccccgaccccaacgccaaccccaacgucgaccccaacgccaaccccaacgucgaccccaacgccaaccccaacgucgaccccaacgccaaccccaacgccaaccccaacgccaaccccaacgccaaccccaacgccaaccccaacgccaaccccaacgccaaccccaacgccaaccccaacgccaaccccaacgccaaccccaacgccaaccccaacgccaaccccaacgccaaccccaacgccaaccccaacgccaaccccaacgccaaccccaacgccaaccccaacgucgaccccaacgccaaccccaacgccaaccccaacgccaaccccaacgccaaccccaacgccaaccccaacgccaaccccaacgccaaccccaacgccaaccccaacgccaaccccaacgccaaccccaacgccaaccccaacgccaaccccaacgccaaccccaacgccaaccccaacgccaaccccaacgccaaccccaacgccaaccccaacgccaaccccugaggacuagucccuguucccagagcccacuuuuuuuucuuuuuuugaaauaaaauagccugucuuucagaucucaaaggcucuuuucagagccaccaaaaaaaaaaaaaaaaaaaaaaaaaaaaaaaaaaaaaaaaaaaaaaaaaaaaaaaaaaaaaaaaaaaaaaaaaaaaaaaaaaaaaaaaaaaaaaaaaaaaagaauu

SEQ ID NO: 7374 - RNA, 1165 nt, Artificial Sequence
  mRNA Design a-1 (hSL-A100-N5) comprising derived and/or modified sequence from Pf(3D7)__XP_001351122.1__HsALB_Pf-CSP(98-374) (opt2)
aggagagucccgcagucggcguccagcggcucugcuuguucgugugugugucguugcaggccuuauucaagcuuaccaugaagugggucaccuucaucucccuccucuuccucuucuccuccgccuacuccgccgacggcaaccccgaccccaacgccaaccccaacgucgaccccaacgccaaccccaacgucgaccccaacgccaaccccaacgucgaccccaacgccaaccccaacgccaaccccaacgccaaccccaacgccaaccccaacgccaaccccaacgccaaccccaacgccaaccccaacgccaaccccaacgccaaccccaacgccaaccccaacgccaaccccaacgccaaccccaacgccaaccccaacgccaaccccaacgccaaccccaacgccaaccccaacgccaaccccaacgucgaccccaacgccaaccccaacgccaaccccaacgccaaccccaacgccaaccccaacgccaaccccaacgccaaccccaacgccaaccccaacgccaaccccaacgccaaccccaacgccaaccccaacgccaaccccaacgccaaccccaacgccaaccccaacgccaaccccaacgccaaccccaacgccaaccccaacgccaaccccaacgccaaccccaacaagaacaaccagggcaacggccagggccacaacaugcccaacgaccccaaccgcaacgucgacgagaacgccaacgccaacuccgccgucaagaacaacaacaacgaggagcccuccgacaagcacaucaaggaguaccucaacaagauccagaacucccucuccaccgaguggucccccugcuccgucaccugcggcaacggcauccagguccgcaucaagcccggcuccgccaacaagcccaaggacgagcucgacuacgccaacgacaucgagaagaagaucugcaagauggagaagugcugaggacuagucccuguucccagagcccacuuuuuuuucuuuuuuugaaauaaaauagccugucuuucagaucucaaaggcucuuuucagagccaccaaaaaaaaaaaaaaaaaaaaaaaaaaaaaaaaaaaaaaaaaaaaaaaaaaaaaaaaaaaaaaaaaaaaaaaaaaaaaaaaaaaaaaaaaaaaaaaaaaaaagaauu

SEQ ID NO: 7375 - RNA, 1234 nt, Artificial Sequence
  mRNA Design a-1 (hSL-A100-N5) comprising derived and/or modified sequence from Pf(3D7)__XP_001351122.1__HsALB_Pf-CSP(98-397) (opt2)
aggagagucccgcagucggcguccagcggcucugcuuguucgugugugugucguugcaggccuuauucaagcuuaccaugaagugggucaccuucaucucccuccucuuccucuucuccuccgccuacuccgccgacggcaaccccgaccccaacgccaaccccaacgucgaccccaacgccaaccccaacgucgaccccaacgccaaccccaacgucgaccccaacgccaaccccaacgccaaccccaacgccaaccccaacgccaaccccaacgccaaccccaacgccaaccccaacgccaaccccaacgccaaccccaacgccaaccccaacgccaaccccaacgccaaccccaacgccaaccccaacgccaaccccaacgccaaccccaacgccaaccccaacgccaaccccaacgccaaccccaacgucgaccccaacgccaaccccaacgccaaccccaacgccaaccccaacgccaaccccaacgccaaccccaacgccaaccccaacgccaaccccaacgccaaccccaacgccaaccccaacgccaaccccaacgccaaccccaacgccaaccccaacgccaaccccaacgccaaccccaacgccaaccccaacgccaaccccaacgccaaccccaacgccaaccccaacaagaacaaccagggcaacggccagggccacaacaugcccaacgaccccaaccgcaacgucgacgagaacgccaacgccaacuccgccgucaagaacaacaacaacgaggagcccuccgacaagcacaucaaggaguaccucaacaagauccagaacucccucuccaccgaguggucccccugcuccgucaccugcggcaacggcauccagguccgcaucaagcccggcuccgccaacaagcccaaggacgagcucgacuacgccaacgacaucgagaagaagaucugcaagauggagaagugcuccuccgucuucaacgucgucaacuccuccaucggccucaucaugguccucuccuuccucuuccucaacugaggacuagucccuguucccagagcccacuuuuuuuucuuuuuuugaaauaaaauagccugucuuucagaucucaaaggcucuuuucagagccaccaaaaaaaaaaaaaaaaaaaaaaaaaaaaaaaaaaaaaaaaaaaaaaaaaaaaaaaaaaaaaaaaaaaaaaaaaaaaaaaaaaaaaaaaaaaaaaaaaaaaagaauu

SEQ ID NO: 7376 - RNA, 1561 nt, Artificial Sequence
  mRNA Design a-1 (hSL-A100-N5) comprising derived and/or modified sequence from Pf(3D7)__XP_001351122.1__HsALB_Pf-CSP(199-377)_L(PVTN)_HBsAg (opt2)
aggagagucccgcagucggcguccagcggcucugcuuguucgugugugugucguugcaggccuuauucaagcuuaccaugaagugggucaccuucaucucccuccucuuccucuucuccuccgccuacuccgaccccaacgccaaccccaacgccaaccccaacgccaaccccaacgccaaccccaacgccaaccccaacgccaaccccaacgccaaccccaacgccaaccccaacgccaaccccaacgccaaccccaacgccaaccccaacgccaaccccaacgccaaccccaacgccaaccccaacgccaaccccaacgccaaccccaacgccaaccccaacgccaaccccaacaagaacaaccagggcaacggccagggccacaacaugcccaacgaccccaaccgcaacgucgacgagaacgccaacgccaacuccgccgucaagaacaacaacaacgaggagcccuccgacaagcacaucaaggaguaccucaacaagauccagaacucccucuccaccgaguggucccccugcuccgucaccugcggcaacggcauccagguccgcaucaagcccggcuccgccaacaagcccaaggacgagcucgacuacgccaacgacaucgagaagaagaucugcaagauggagaagugcuccuccguccccgucaccaacauggagaacaucaccuccggcuuccucggcccccuccucguccuccaggccggcuucuuccuccucacccgcauccucaccaucccccagucccucgacuccugguggaccucccucaacuuccucggcggcucccccgucugccucggccagaacucccagucccccaccuccaaccacucccccaccuccugcccccccaucugccccggcuaccgcuggaugugccuccgccgcuucaucaucuuccucuucauccuccuccucugccucaucuuccuccucguccuccucgacuaccagggcaugcuccccgucugcccccucauccccggcuccaccaccaccaacaccggccccugcaagaccugcaccacccccgcccagggcaacuccauguuccccuccugcugcugcaccaagcccaccgacggcaacugcaccugcauccccauccccuccuccugggccuucgccaaguaccucugggagugggccuccguccgcuucuccuggcucucccuccucguccccuucguccagugguucgucggccucucccccaccgucuggcucuccgccaucuggaugaugugguacuggggccccucccucuacuccaucgucucccccuucaucccccuccuccccaucuucuucugccucugggucuacaucugaggacuagucccuguucccagagcccacuuuuuuuucuuuuuuugaaauaaaauagccugucuuucagaucucaaaggcucuuuucagagccaccaaaaaaaaaaaaaaaaaaaaaaaaaaaaaaaaaaaaaaaaaaaaaaaaaaaaaaaaaaaaaaaaaaaaaaaaaaaaaaaaaaaaaaaaaaaaaaaaaaaaagaauu

SEQ ID NO: 7377 - RNA, 1471 nt, Artificial Sequence
  mRNA Design a-1 (hSL-A100-N5) comprising derived and/or modified sequence from Pf(3D7)__XP_001351122.1__Pf-CSP (opt3)
aggagagucccgcagucggcguccagcggcucugcuuguucgugugugugucguugcaggccuuauucaagcuuaccaugaugagaaagcuggccauccucagcguguccucuuuccuuuuugucgaggcucuguuccaggaauaccaaugcuauggcucaaguagcaacaccaggguuuugaaugaguuaaacuacgacaaugcagggacaaaccuguauaaugaacuagagaugaacuacuauggaaaacaggaaaauugguacucccucaagaaaaacucucggucgcugggugagaaugaugacggcaacaaugaggauaacgaaaaacuucgcaagcccaagcacaagaaacugaagcagccugccgacgggaauccagauccgaacgcgaaucccaacguggacccuaacgcuaauccaaacguagaucccaaugccaacccuaauguggacccaaacgcaaaucccaacgccaauccuaacgcuaauccaaacgcaaauccgaacgccaaucccaacgcuaacccuaaugccaacccaaaugcgaaccccaaugcaaacccuaaugccaacccaaaugcuaaccccaaugccaacccgaaugcaaacccuaaugcuaaccccaacgccaauccaaacgcgaauccuaacgccaaucccaacgucgauccaaaugcaaaccccaaugcuaacccuaaugccaacccaaaugcuaacccgaaugccaaccccaacgcaaauccuaacgccaauccaaacgcuaaucccaacgcgaauccuaacgcaaauccaaacgccaaucccaacgcuaauccgaacgccaauccuaacgcaaauccaaacgccaaccccaaugcuaacccuaaugccaaccccaaugcaaacccaaauaaaaacaaucagggaaacggccaaggucauaauaugccuaacgaccccaaucgaaacguggaugagaaugcgaacgcuaacucagccguuaagaauaacaauaacgaggaaccaagcgacaaacacauuaaggaguauuugaauaagauacagaacagucucuccacugaauggucuccguguagcgugacgugcgggaauggaauccagguccguauuaaaccuggcuccgcaaacaagcccaaagaugagcuggacuacgccaaugacaucgaaaagaaaauuuguaagauggagaaaugcucaaguguguuuaacguaguuaauagcucuaucggccugauaauggugcucuccuucuuauuucugaacugaggacuagucccuguucccagagcccacuuuuuuuucuuuuuuugaaauaaaauagccugucuuucagaucucaaaggcucuuuucagagccaccaaaaaaaaaaaaaaaaaaaaaaaaaaaaaaaaaaaaaaaaaaaaaaaaaaaaaaaaaaaaaaaaaaaaaaaaaaaaaaaaaaaaaaaaaaaaaaaaaaaaagaauu

SEQ ID NO: 7378 - RNA, 1402 nt, Artificial Sequence
  mRNA Design a-1 (hSL-A100-N5) comprising derived and/or modified sequence from Pf(3D7)__XP_001351122.1__Pf-CSP(1-374) (opt3)
aggagagucccgcagucggcguccagcggcucugcuuguucgugugugugucguugcaggccuuauucaagcuuaccaugaugagaaagcuggccauccucagcguguccucuuuccuuuuugucgaggcucuguuccaggaauaccaaugcuauggcucaaguagcaacaccaggguuuugaaugaguuaaacuacgacaaugcagggacaaaccuguauaaugaacuagagaugaacuacuauggaaaacaggaaaauugguacucccucaagaaaaacucucggucgcugggugagaaugaugacggcaacaaugaggauaacgaaaaacuucgcaagcccaagcacaagaaacugaagcagccugccgacgggaauccagauccgaacgcgaaucccaacguggacccuaacgcuaauccaaacguagaucccaaugccaacccuaauguggacccaaacgcaaaucccaacgccaauccuaacgcuaauccaaacgcaaauccgaacgccaaucccaacgcuaacccuaaugccaacccaaaugcgaaccccaaugcaaacccuaaugccaacccaaaugcuaaccccaaugccaacccgaaugcaaacccuaaugcuaaccccaacgccaauccaaacgcgaauccuaacgccaaucccaacgucgauccaaaugcaaaccccaaugcuaacccuaaugccaacccaaaugcuaacccgaaugccaaccccaacgcaaauccuaacgccaauccaaacgcuaaucccaacgcgaauccuaacgcaaauccaaacgccaaucccaacgcuaauccgaacgccaauccuaacgcaaauccaaacgccaaccccaaugcuaacccuaaugccaaccccaaugcaaacccaaauaaaaacaaucagggaaacggccaaggucauaauaugccuaacgaccccaaucgaaacguggaugagaaugcgaacgcuaacucagccguuaagaauaacaauaacgaggaaccaagcgacaaacacauuaaggaguauuugaauaagauacagaacagucucuccacugaauggucuccguguagcgugacgugcgggaauggaauccagguccguauuaaaccuggcuccgcaaacaagcccaaagaugagcuggacuacgccaaugacaucgaaaagaaaauuuguaagauggagaaaugcugaggacuagucccuguucccagagcccacuuuuuuuucuuuuuuugaaauaaaauagccugucuuucagaucucaaaggcucuuuucagagccaccaaaaaaaaaaaaaaaaaaaaaaaaaaaaaaaaaaaaaaaaaaaaaaaaaaaaaaaaaaaaaaaaaaaaaaaaaaaaaaaaaaaaaaaaaaaaaaaaaaaaagaauu

SEQ ID NO: 7379 - RNA, 1255 nt, Artificial Sequence
  mRNA Design a-1 (hSL-A100-N5) comprising derived and/or modified sequence from Pf(3D7)__XP_001351122.1__Pf-CSP(1-325) (opt3)
aggagagucccgcagucggcguccagcggcucugcuuguucgugugugugucguugcaggccuuauucaagcuuaccaugaugagaaagcuggccauccucagcguguccucuuuccuuuuugucgaggcucuguuccaggaauaccaaugcuauggcucaaguagcaacaccaggguuuugaaugaguuaaacuacgacaaugcagggacaaaccuguauaaugaacuagagaugaacuacuauggaaaacaggaaaauugguacucccucaagaaaaacucucggucgcugggugagaaugaugacggcaacaaugaggauaacgaaaaacuucgcaagcccaagcacaagaaacugaagcagccugccgacgggaauccagauccgaacgcgaaucccaacguggacccuaacgcuaauccaaacguagaucccaaugccaacccuaauguggacccaaacgcaaaucccaacgccaauccuaacgcuaauccaaacgcaaauccgaacgccaaucccaacgcuaacccuaaugccaacccaaaugcgaaccccaaugcaaacccuaaugccaacccaaaugcuaaccccaaugccaacccgaaugcaaacccuaaugcuaaccccaacgccaauccaaacgcgaauccuaacgccaaucccaacgucgauccaaaugcaaaccccaaugcuaacccuaaugccaacccaaaugcuaacccgaaugccaaccccaacgcaaauccuaacgccaauccaaacgcuaaucccaacgcgaauccuaacgcaaauccaaacgccaaucccaacgcuaauccgaacgccaauccuaacgcaaauccaaacgccaaccccaaugcuaacccuaaugccaaccccaaugcaaacccaaauaaaaacaaucagggaaacggccaaggucauaauaugccuaacgaccccaaucgaaacguggaugagaaugcgaacgcuaacucagccguuaagaauaacaauaacgaggaaccaagcgacaaacacauuaaggaguauuugaauaagauacagaacugaggacuagucccuguucccagagcccacuuuuuuuucuuuuuuugaaauaaaauagccugucuuucagaucucaaaggcucuuuucagagccaccaaaaaaaaaaaaaaaaaaaaaaaaaaaaaaaaaaaaaaaaaaaaaaaaaaaaaaaaaaaaaaaaaaaaaaaaaaaaaaaaaaaaaaaaaaaaaaaaaaaaagaauu

SEQ ID NO: 7380 - RNA, 1471 nt, Artificial Sequence
  mRNA Design a-1 (hSL-A100-N5) comprising derived and/or modified sequence from Pf(3D7)__XP_001351122.1__HsALB_Pf-CSP(19-397) (opt3)
aggagagucccgcagucggcguccagcggcucugcuuguucgugugugugucguugcaggccuuauucaagcuuaccaugaagugggugaccuucaucagccugcucuuucuuuucuccucugccuacucacuguuucaggaguaucaaugcuacggcaguagcuccaacacaagagucuugaaugaauuaaacuaugacaaugcugggacuaaccuguacaaugagcuagaaaugaacuauuacggaaaacaggagaauugguauucucucaagaaaaacucgaggucacugggugaaaaugaugacggcaacaaugaggauaacgagaaacuucggaagcccaagcacaagaaacugaagcagccugcagacgggaauccagauccgaacgccaaucccaacguugacccuaacgcgaauccaaacguggaucccaaugcuaacccuaauguagacccaaacgccaaucccaacgcaaauccuaacgccaauccaaacgcuaauccgaacgcaaaucccaacgccaacccuaaugcuaacccaaaugccaaccccaaugcgaacccuaaugcaaacccaaaugccaaccccaaugcuaacccgaaugccaacccuaaugcaaaccccaacgcuaauccaaacgccaauccuaacgcgaaucccaacguggauccaaaugccaaccccaaugcaaacccuaaugcuaacccaaaugccaacccgaaugcuaaccccaacgccaauccuaacgcaaauccaaacgccaaucccaacgcuaauccuaacgcgaauccaaacgcaaaucccaacgccaauccgaacgcuaauccuaacgccaauccaaacgcaaaccccaaugccaacccuaaugcuaaccccaaugccaacccaaauaaaaacaaucagggaaacggccaaggucauaauaugccuaacgaccccaaucgcaacgucgaugaaaaugcaaacgcgaacagcgcugugaagaauaacaauaacgaggaaccaagugacaaacacauuaaggaguacuugaauaagauacagaacucccucucuacggaguggagcccguguuccguuaccugcgggaauggaauccaggugcgaauuaaaccuggcucagccaacaagcccaaagaugaacuggacuacgcaaaugacaucgagaagaaaauuuguaagauggaaaaaugcaguagcgucuucaacgugguaaauucuuccaucggccugauaaugguucucucauuuuuauuccugaacugaggacuagucccuguucccagagcccacuuuuuuuucuuuuuuugaaauaaaauagccugucuuucagaucucaaaggcucuuuucagagccaccaaaaaaaaaaaaaaaaaaaaaaaaaaaaaaaaaaaaaaaaaaaaaaaaaaaaaaaaaaaaaaaaaaaaaaaaaaaaaaaaaaaaaaaaaaaaaaaaaaaaagaauu

SEQ ID NO: 7381 - RNA, 1489 nt, Artificial Sequence
  mRNA Design a-1 (hSL-A100-N5) comprising derived and/or modified sequence from Pf(3D7)__XP_001351122.1__HsIns-iso1_Pf-CSP(19-397) (opt3)
aggagagucccgcagucggcguccagcggcucugcuuguucgugugugugucguugcaggccuuauucaagcuuaccauggcccuguggaugagacuccuuccccuguuggcuuuacuggcacuauggggcccugacccagccgcggcucucuuccaggaguaccaaugcuaugggagcuccucuaacaccagggugcugaaugaacuuaacuacgauaaugccggaacaaaccuguauaaugaguuggaaaugaacuacuaugguaagcaggagaauugguacucacucaaaaagaacagucggagccugggcgaaaaugacgaugggaacaaugaggacaacgagaaacugcgcaagccgaaacacaagaagcucaaacagcccgcagauggaaauccugacccaaacgccaaucccaacgucgauccuaacgcuaauccaaacguugaccccaaugcaaacccuaauguggauccaaacgccaauccgaacgcuaaucccaacgccaauccuaacgcgaauccaaacgcaaaucccaacgccaacccuaaugcuaacccaaaugccaaccccaaugcaaacccgaaugcuaacccuaaugccaaccccaaugcgaacccaaaugccaacccuaaugcaaaccccaacgcuaauccaaacgccaaucccaacgcuaauccuaacguagacccaaaugccaacccgaaugcaaaccccaaugccaacccuaaugcuaacccaaaugcgaaccccaacgcaaauccuaacgccaauccaaacgcuaaucccaacgccaauccgaacgcaaauccuaacgccaauccaaacgcuaaucccaacgccaauccuaacgcaaaucccaacgcgaacccaaaugcuaacccuaaugccaaccccaaugcaaacccaaauaagaacaaucagggcaacggucaagggcauaauaugccgaacgauccuaaucgaaacguggacgaaaaugccaacgcuaacuccgccgucaaaaauaacaauaacgaggaacccucugauaagcacaucaaagaguauuuaaauaagauucagaacucgcugucaacugaguggagcccauguagugugacgugcggaaauggcauacagguucguaucaagcccggcuccgcaaacaaaccuaaggacgaacuugacuacgcuaaugauauugagaaaaagaucuguaaaauggaaaagugcucuagcguguuuaacgucguaaauuccucaauuggguugaucauggugcugaguuuccuauuucucaacugaggacuagucccuguucccagagcccacuuuuuuuucuuuuuuugaaauaaaauagccugucuuucagaucucaaaggcucuuuucagagccaccaaaaaaaaaaaaaaaaaaaaaaaaaaaaaaaaaaaaaaaaaaaaaaaaaaaaaaaaaaaaaaaaaaaaaaaaaaaaaaaaaaaaaaaaaaaaaaaaaaaaagaauu

SEQ ID NO: 7382 - RNA, 1468 nt, Artificial Sequence
  mRNA Design a-1 (hSL-A100-N5) comprising derived and/or modified sequence from Pf(3D7)__XP_001351122.1__HsSPARC_Pf-CSP(19-397) (opt3)
aggagagucccgcagucggcguccagcggcucugcuuguucgugugugugucguugcaggccuuauucaagcuuaccaugagagccuggaucuucuuucugcucugccuugcuggcagggcacuggccuuguuccaggaguaccaauguuaugggagcuccucuaacacccggguguuaaaugaacugaacuacgacaaugcgggaacaaaccuauauaaugagcucgaaaugaacuacuaugguaagcaggagaauugguacucacugaaaaagaacagucgcagccuuggcgaaaaugaugacgggaacaaugaggauaacgagaaacugcgaaagcccaaacacaagaaguugaaacagccugcugacggaaauccagauccgaacgccaaucccaacgucgacccuaacgcaaauccaaacguugaucccaaugccaacccuaauguggacccaaacgcuaaucccaacgcaaauccuaacgccaauccaaacgcuaauccgaacgccaaucccaacgcgaacccuaaugcaaacccaaaugccaaccccaaugcuaacccuaaugccaacccaaaugcaaaccccaaugcuaacccgaaugccaacccuaaugcgaaccccaacgccaauccaaacgcaaauccuaacgcuaaucccaacguagauccaaaugccaaccccaaugcuaacccuaaugccaacccaaaugcaaacccgaaugccaaccccaacgcuaauccuaacgcgaauccaaacgcaaaucccaacgccaauccuaacgcuaauccaaacgccaaucccaacgcaaauccgaacgccaauccuaacgcuaauccaaacgccaaccccaaugcaaacccuaaugcgaaccccaaugcuaacccaaauaagaacaaucagggcaacggucaagggcauaauaugccuaacgaccccaaucguaacguggaugaaaaugccaacgcaaacuccgccgucaaaaauaacaauaacgaggaaccaucugacaagcacauuaaagaguaucucaauaagauacagaacucgcugucaacugaguggagcccgugcagugugacguguggaaauggcauccagguuagaauuaagccuggcuccgcuaacaaacccaaggaugaacuggacuacgccaaugacaucgagaaaaagauuugcaaaauggaaaaguguucuagcguguuuaacgucguaaauuccucaaucgggcucauaaugguguuaaguuuccuguuucuuaacugaggacuagucccuguucccagagcccacuuuuuuuucuuuuuuugaaauaaaauagccugucuuucagaucucaaaggcucuuuucagagccaccaaaaaaaaaaaaaaaaaaaaaaaaaaaaaaaaaaaaaaaaaaaaaaaaaaaaaaaaaaaaaaaaaaaaaaaaaaaaaaaaaaaaaaaaaaaaaaaaaaaaagaauu

SEQ ID NO: 7383 - RNA, 1471 nt, Artificial Sequence
  mRNA Design a-1 (hSL-A100-N5) comprising derived and/or modified sequence from Pf(3D7)__XP_001351122.1__IgE_Pf-CSP(19-397) (opt3)
aggagagucccgcagucggcguccagcggcucugcuuguucgugugugugucguugcaggccuuauucaagcuuaccauggacuggaccuggauccuguuccucguggccgcugcaacaagaguccacagccuuuuucaggaguaccaaugcuauggcuccucuucaaacacuaggguucugaaugaauugaacuacgauaaugccgggacgaacuuauauaaugagcuggaaaugaacuacuauggaaagcaggagaauugguacagucuaaagaagaacagccggucccucggugaaaaugacgauggcaacaaugaggacaacgagaaacugcgcaagcccaaacauaagaaacuuaaacagccugcggaugggaauccagacccgaacgcuaaucccaacguggauccuaacgccaauccaaacguagaccccaaugcaaacccuaauguggauccaaacgccaaucccaacgcuaauccuaacgcaaauccaaacgccaauccgaacgcuaaucccaacgccaacccuaaugcgaacccaaaugcaaaccccaaugccaacccuaaugcuaacccaaaugccaaccccaaugcaaacccgaaugcuaacccuaaugccaaccccaacgcgaauccaaacgccaauccuaacgcaaaucccaacgucgacccaaaugcuaaccccaaugccaacccuaaugcuaacccaaaugccaacccgaaugcaaaccccaacgccaauccuaacgcuaauccaaacgcgaaucccaacgcaaauccuaacgccaauccaaacgcuaaucccaacgccaauccgaacgcaaauccuaacgccaauccaaacgcuaaccccaaugccaacccuaaugcaaaccccaaugcgaacccaaauaagaacaaucagggaaacggccaaggucacaauaugccuaacgaucccaaucgaaacguggacgaaaaugcuaacgccaacucugcaguuaaaaauaacaauaacgaggaaccaucggauaagcauauuaaagaguaucugaauaagauacagaacucauugagcaccgaguggaguccguguuccgugacaugcgggaauggaauccagguccguauuaagccuggcucugccaacaaacccaaggacgaacucgacuacgcuaaugauaucgagaaaaagauuuguaaaauggaaaagugcagcuccguguucaacguaguuaauucaaguaucggccugauaauggugcugagcuuucucuucuuaaacugaggacuagucccuguucccagagcccacuuuuuuuucuuuuuuugaaauaaaauagccugucuuucagaucucaaaggcucuuuucagagccaccaaaaaaaaaaaaaaaaaaaaaaaaaaaaaaaaaaaaaaaaaaaaaaaaaaaaaaaaaaaaaaaaaaaaaaaaaaaaaaaaaaaaaaaaaaaaaaaaaaaaagaauu

SEQ ID NO: 7384 - RNA, 1636 nt, Artificial Sequence
  mRNA Design a-1 (hSL-A100-N5) comprising derived and/or modified sequence from Pf(3D7)__XP_001351122.1__Pf-CSP_L(G4SG4)_TM domain HA (opt3)
aggagagucccgcagucggcguccagcggcucugcuuguucgugugugugucguugcaggccuuauucaagcuuaccaugaugagaaagcuggccauccucagcguguccucuuuccuuuuugucgaggcucuguuccaggaauaccaaugcuauggcucaaguagcaacaccaggguuuugaaugaguuaaacuacgacaaugcagggacaaaccuguauaaugaacuagagaugaacuacuauggaaagcaggaaaauugguacucccucaagaaaaacucucggucgcugggugagaaugaugacggcaacaaugaggauaacgaaaaacuucgcaagcccaagcacaagaaacugaagcagccugccgacgggaauccagauccgaacgcgaaucccaacguggacccuaacgcuaauccaaacguagaucccaaugccaacccuaauguggacccaaacgcaaaucccaacgccaauccuaacgcuaauccaaacgcaaauccgaacgccaaucccaacgcuaacccuaaugccaacccaaaugcgaaccccaaugcaaacccuaaugccaacccaaaugcuaaccccaaugccaacccgaaugcaaacccuaaugcuaaccccaacgccaauccaaacgcgaauccuaacgccaaucccaacgucgauccaaaugcaaaccccaaugcuaacccuaaugccaacccaaaugcuaacccgaaugccaaccccaacgcaaauccuaacgccaauccaaacgcuaaucccaacgcgaauccuaacgcaaauccaaacgccaaucccaacgcuaauccgaacgccaauccuaacgcaaauccaaacgccaaccccaaugcuaacccuaaugccaaccccaaugcaaacccaaauaaaaacaaucagggaaacggccaaggucauaauaugccuaacgaccccaaucgaaacguggaugagaaugcgaacgcuaacucagccguuaagaauaacaauaacgaggaaccaagcgacaaacacauuaaggaguauuugaauaagauacagaacagucucuccacugaauggucuccguguagcgugacgugcgggaauggaauccagguccguauuaaaccuggcuccgcaaacaagcccaaagaugagcuggacuacgccaaugacaucgaaaagaaaauuuguaagauggagaaaugcucaaguguguuuaacguaguuaauagcucuaucggccugauaauggugcucuccuucuuauuucugaacgggggagguggcucagggggaggcgguaaacuugaaagcaccagaaucuaccagauuuuggcuaucuauaguacagucgccucuucccuggugcuaguggucagccucggggcaauuucguucuggauguguucuaauggaucccugcaaugcaggaucuguauaugaggacuagucccuguucccagagcccacuuuuuuuucuuuuuuugaaauaaaauagccugucuuucagaucucaaaggcucuuuucagagccaccaaaaaaaaaaaaaaaaaaaaaaaaaaaaaaaaaaaaaaaaaaaaaaaaaaaaaaaaaaaaaaaaaaaaaaaaaaaaaaaaaaaaaaaaaaaaaaaaaaaaagaauu

SEQ ID NO: 7385 - RNA, 1510 nt, Artificial Sequence
  mRNA Design a-1 (hSL-A100-N5) comprising derived and/or modified sequence from Pf(3D7)__XP_001351122.1__Pf-CSP(199-377)_L(PVTN)_HBsAg (opt3)
aggagagucccgcagucggcguccagcggcucugcuuguucgugugugugucguugcaggccuuauucaagcuuaccauggaccccaacgccaauccuaacgcuaauccaaacgcaaauccgaacgccaaucccaacgcgaauccuaacgcuaauccaaacgccaaucccaacgcaaauccuaacgccaacccaaaugcuaaccccaaugcaaacccuaaugccaacccaaaugcuaacccgaaugccaaccccaaugcgaacccuaaugcaaacccaaaugccaaccccaacgcuaauccuaacaagaauaaccagggcaaugggcaaggacacaacaugccaaaugaucccaacagaaauguggacgagaacgccaaugcaaacagcgcugucaaaaauaacaauaacgaggaaccguccgauaagcauaucaaagaauaccugaacaagauucaaaauucucucucaaccgaguggaguccuugcagcguuacaugugguaacggcauacaggugaggaucaaacccggguccgccaauaagccaaaggacgaacuugauuaugcgaacgacauugagaaaaagaucugcaaaauggagaaguguucuucgguaccugugacuaauauggaaaacauuacgucaggauuccugggccccuuguuaguccugcaggccggguuuuuccuacucacccggauccugacaauaccacagagccuugauaguugguggacuucccugaauuuucucgguggaucucccgugugcuugggccagaacagccaguccccuaccucaaaucacaguccaacaagcuguccgcccaucugcccuggcuaccgcuggaugugucugcgacguuucauuaucuuucuguucauucucuuacugugccuuaucuuuuugcugguucuacucgacuaucaggggaugcugccaguguguccccuuauaccuggaucuaccacuacaaacaccgguccaugcaaaacguguacuacccccgcacaaggcaauuccauguucccgucaugcugcuguacaaagccuacugaugggaacugcaccuguauuccaauccccagcaguugggcuuuugccaaguaccugugggagugggcuucugucagauucuccugguugagccuccuggugccuuuuguacagugguucguuggauuaucgcccacaguguggcugucugccauuuggaugaugugguauuggggcccaucccucuacucaaucgucaguccuuuuaucccccuucugccaauuuucuucugcuuguggguguauauaugaggacuagucccuguucccagagcccacuuuuuuuucuuuuuuugaaauaaaauagccugucuuucagaucucaaaggcucuuuucagagccaccaaaaaaaaaaaaaaaaaaaaaaaaaaaaaaaaaaaaaaaaaaaaaaaaaaaaaaaaaaaaaaaaaaaaaaaaaaaaaaaaaaaaaaaaaaaaaaaaaaaaagaauu

SEQ ID NO: 7386 - RNA, 1552 nt, Artificial Sequence
  mRNA Design a-1 (hSL-A100-N5) comprising derived and/or modified sequence from Pf(3D7)__XP_001351122.1__Pf-CSP(199-387)_L(PVTN)_HBsAg (opt3)
aggagagucccgcagucggcguccagcggcucugcuuguucgugugugugucguugcaggccuuauucaagcuuaccaugauggcccccgacccuaacgcuaauccaaacgcaaauccgaacgccaaucccaacgcgaauccuaacgcuaauccaaacgccaaucccaacgcaaauccuaacgccaauccaaacgcuaaccccaaugcaaacccuaaugccaacccaaaugcuaacccgaaugccaaccccaaugcgaacccuaaugcaaacccaaaugccaaccccaaugcuaacccuaacgccaauccaaacaagaauaaccagggcaaugggcaaggacacaacaugcccaaugauccgaacagaaauguggacgagaacgcaaaugcuaacagcgccgucaaaaauaacaauaacgaggaaccuuccgauaagcauaucaaagaauaccugaacaagauucaaaauucucucucaaccgaguggagucccugcagcguuacaugugguaacggcauacaggugaggaucaaaccaggguccgcgaauaagccuaaggacgaacuugauuaugccaacgacauugagaaaaagaucugcaaaauggagaaguguucuucgguauucaauguggucaacucaagcauuggacugggccccgugacuaauauggaaaacaucacgaguggguuuuuggguccauuacugguucuacaggcaggauucuuucuccugacccggauacuuacaaucccccagucccuggauucuugguggacuagcuugaauuuccucggcggcuccccugugugccuggggcagaacucacagaguccaaccagcaaucacucuccgacauccugucccccuauuugcccaggauaccgcuggaugugucugcgacguuuuaucauuuuccucuuuaucuuacugcuuugcuugauauuccugcuaguccuccuggacuaucaggguaugcuucccguguguccucugauuccaggcucaaccacuacaaacaccgggcccugcaaaacguguacuaccccggcucaaggaaauagcauguuuccuaguugcugcuguacaaagccaacugauggcaacugcaccuguauccccauuccuucuuccugggccuucgcuaaguacuugugggagugggccagcguaagauuuucguggcucucucuguuaguucccuucgugcagugguuugucggucuguccccaacaguguggcucucagcaaucuggaugaugugguauugggggccuagucuuuacagcaucgugucccccuucauuccacuguugccgauauucuuuugccuaugggucuauaucugaggacuagucccuguucccagagcccacuuuuuuuucuuuuuuugaaauaaaauagccugucuuucagaucucaaaggcucuuuucagagccaccaaaaaaaaaaaaaaaaaaaaaaaaaaaaaaaaaaaaaaaaaaaaaaaaaaaaaaaaaaaaaaaaaaaaaaaaaaaaaaaaaaaaaaaaaaaaaaaaaaaaagaauu

SEQ ID NO: 7387 - RNA, 736 nt, Artificial Sequence
  mRNA Design a-1 (hSL-A100-N5) comprising derived and/or modified sequence from Pf(3D7)__XP_001351122.1__HsALB_Pf-CSP(19-152) (opt3)
aggagagucccgcagucggcguccagcggcucugcuuguucgugugugugucguugcaggccuuauucaagcuuaccaugaagugggugaccuucaucagccugcucuuucuuuucuccucugccuacucacuguuucaggaguaucaaugcuacggcaguagcuccaacacaagagucuugaaugaauuaaacuaugacaaugcugggacuaaccuguacaaugagcuagaaaugaacuauuacggaaaacaggagaauugguauucucucaagaaaaacucgaggucacugggugaaaaugaugacggcaacaaugaggauaacgagaaacuucggaagcccaagcacaagaaacugaagcagccugcagacgggaauccagauccgaacgccaaucccaacguugacccuaacgcgaauccaaacguggaucccaaugcuaacccuaauguagacccaaacgccaaucccaacgcaaauccuaacgccaauccaaacgcuaauccgaacgcaaaucccaacgccaacccuugaggacuagucccuguucccagagcccacuuuuuuuucuuuuuuugaaauaaaauagccugucuuucagaucucaaaggcucuuuucagagccaccaaaaaaaaaaaaaaaaaaaaaaaaaaaaaaaaaaaaaaaaaaaaaaaaaaaaaaaaaaaaaaaaaaaaaaaaaaaaaaaaaaaaaaaaaaaaaaaaaaaaagaauu

SEQ ID NO: 7388 - RNA, 856 nt, Artificial Sequence
  mRNA Design a-1 (hSL-A100-N5) comprising derived and/or modified sequence from Pf(3D7)__XP_001351122.1__HsALB_Pf-CSP(19-192) (opt3)
aggagagucccgcagucggcguccagcggcucugcuuguucgugugugugucguugcaggccuuauucaagcuuaccaugaagugggugaccuucaucagccugcucuuucuuuucuccucugccuacucacuguuucaggaguaucaaugcuacggcaguagcuccaacacaagagucuugaaugaauuaaacuaugacaaugcugggacuaaccuguacaaugagcuagaaaugaacuauuacggaaaacaggagaauugguauucucucaagaaaaacucgaggucacugggugaaaaugaugacggcaacaaugaggauaacgagaaacuucggaagcccaagcacaagaaacugaagcagccugcagacgggaauccagauccgaacgccaaucccaacguugacccuaacgcgaauccaaacguggaucccaaugcuaacccuaauguagacccaaacgccaaucccaacgcaaauccuaacgccaauccaaacgcuaauccgaacgcaaaucccaacgccaacccuaaugcuaacccaaaugccaaccccaaugcgaacccuaaugcaaacccaaaugccaaccccaaugcuaacccgaaugccaacccuaaugcaaaccccaacgcuaauccaaacgccaauccuugaggacuagucccuguucccagagcccacuuuuuuuucuuuuuuugaaauaaaauagccugucuuucagaucucaaaggcucuuuucagagccaccaaaaaaaaaaaaaaaaaaaaaaaaaaaaaaaaaaaaaaaaaaaaaaaaaaaaaaaaaaaaaaaaaaaaaaaaaaaaaaaaaaaaaaaaaaaaaaaaaaaaagaauu

SEQ ID NO: 7389 - RNA, 1096 nt, Artificial Sequence
  mRNA Design a-1 (hSL-A100-N5) comprising derived and/or modified sequence from Pf(3D7)__XP_001351122.1__HsALB_Pf-CSP(19-272) (opt3)
aggagagucccgcagucggcguccagcggcucugcuuguucgugugugugucguugcaggccuuauucaagcuuaccaugaagugggugaccuucaucagccugcucuuucuuuucuccucugccuacucacuguuucaggaguaucaaugcuacggcaguagcuccaacacaagagucuugaaugaauuaaacuaugacaaugcugggacuaaccuguacaaugagcuagaaaugaacuauuacggaaaacaggagaauugguauucucucaagaaaaacucgaggucacugggugaaaaugaugacggcaacaaugaggauaacgagaaacuucggaagcccaagcacaagaaacugaagcagccugcagacgggaauccagauccgaacgccaaucccaacguugacccuaacgcgaauccaaacguggaucccaaugcuaacccuaauguagacccaaacgccaaucccaacgcaaauccuaacgccaauccaaacgcuaauccgaacgcaaaucccaacgccaacccuaaugcuaacccaaaugccaaccccaaugcgaacccuaaugcaaacccaaaugccaaccccaaugcuaacccgaaugccaacccuaaugcaaaccccaacgcuaauccaaacgccaauccuaacgcgaaucccaacguggauccaaaugccaaccccaaugcaaacccuaaugcuaacccaaaugccaacccgaaugcuaaccccaacgccaauccuaacgcaaauccaaacgccaaucccaacgcuaauccuaacgcgaauccaaacgcaaaucccaacgccaauccgaacgcuaauccuaacgccaauccaaacgcaaaccccaaugccaacccuaaugcuaaccccaaugccaacccaugaggacuagucccuguucccagagcccacuuuuuuuucuuuuuuugaaauaaaauagccugucuuucagaucucaaaggcucuuuucagagccaccaaaaaaaaaaaaaaaaaaaaaaaaaaaaaaaaaaaaaaaaaaaaaaaaaaaaaaaaaaaaaaaaaaaaaaaaaaaaaaaaaaaaaaaaaaaaaaaaaaaaagaauu

SEQ ID NO: 7390 - RNA, 1258 nt, Artificial Sequence
  mRNA Design a-1 (hSL-A100-N5) comprising derived and/or modified sequence from Pf(3D7)__XP_001351122.1__HsALB_Pf-CSP(19-272)_L(AAY)_Pf-CSP(310-3 27)_L(AAY)_Pf-CSP(346-375) (opt3)
aggagagucccgcagucggcguccagcggcucugcuuguucgugugugugucguugcaggccuuauucaagcuuaccaugaagugggugaccuucaucagccugcucuuucuuuucuccucugccuacucacuguuucaggaguaucaaugcuacggcaguagcuccaacacaagagucuugaaugaauuaaacuaugacaaugcugggacuaaccuguacaaugagcuagaaaugaacuauuacggaaaacaggagaauugguauucucucaagaaaaacucgaggucacugggugaaaaugaugacggcaacaaugaggauaacgagaaacuucggaagcccaagcacaagaaacugaagcagccugcagacgggaauccagauccgaacgccaaucccaacguugacccuaacgcgaauccaaacguggaucccaaugcuaacccuaauguagacccaaacgccaaucccaacgcaaauccuaacgccaauccaaacgcuaauccgaacgcaaaucccaacgccaacccuaaugcuaacccaaaugccaaccccaaugcgaacccuaaugcaaacccaaaugccaaccccaaugcuaacccgaaugccaacccuaaugcaaaccccaacgcuaauccaaacgccaauccuaacgcgaaucccaacguggauccaaaugccaaccccaaugcaaacccuaaugcuaacccaaaugccaacccgaaugcuaaccccaacgccaauccuaacgcaaauccaaacgccaaucccaacgcuaauccuaacgcgaauccaaacgcaaaucccaacgccaauccgaacgcuaauccuaacgccaauccaaacgcaaaccccaaugccaacccuaaugcuaaccccaaugccaacccagcagcguacgaaccuagcgacaaacauauuaaggaguacuugaauaaaauacagaacagucucgcugccuauaucaagcccggauccgcaaauaagccaaaagaugaacuggacuacgccaacgauauugagaagaaaaucuguaagauggagaaaugcucuugaggacuagucccuguucccagagcccacuuuuuuuucuuuuuuugaaauaaaauagccugucuuucagaucucaaaggcucuuuucagagccaccaaaaaaaaaaaaaaaaaaaaaaaaaaaaaaaaaaaaaaaaaaaaaaaaaaaaaaaaaaaaaaaaaaaaaaaaaaaaaaaaaaaaaaaaaaaaaaaaaaaaagaauu

SEQ ID NO: 7391 - RNA, 1219 nt, Artificial Sequence
  mRNA Design a-1 (hSL-A100-N5) comprising derived and/or modified sequence from Pf(3D7)__XP_001351122.1__HsALB_Pf-CSP(19-272)_L(AAY)_Pf-CSP(346-3 65)_L(AAY)_P2 (opt3)
aggagagucccgcagucggcguccagcggcucugcuuguucgugugugugucguugcaggccuuauucaagcuuaccaugaagugggugaccuucaucagccugcucuuucuuuucuccucugccuacucacuguuucaggaguaucaaugcuacggcaguagcuccaacacaagagucuugaaugaauuaaacuaugacaaugcugggacuaaccuguacaaugagcuagaaaugaacuauuacggaaaacaggagaauugguauucucucaagaaaaacucgaggucacugggugaaaaugaugacggcaacaaugaggauaacgagaaacuucggaagcccaagcacaagaaacugaagcagccugcagacgggaauccagauccgaacgccaaucccaacguugacccuaacgcgaauccaaacguggaucccaaugcuaacccuaauguagacccaaacgccaaucccaacgcaaauccuaacgccaauccaaacgcuaauccgaacgcaaaucccaacgccaacccuaaugcuaacccaaaugccaaccccaaugcgaacccuaaugcaaacccaaaugccaaccccaaugcuaacccgaaugccaacccuaaugcaaaccccaacgcuaauccaaacgccaauccuaacgcgaaucccaacguggauccaaaugccaaccccaaugcaaacccuaaugcuaacccaaaugccaacccgaaugcuaaccccaacgccaauccuaacgcaaauccaaacgccaaucccaacgcuaauccuaacgcgaauccaaacgcaaaucccaacgccaauccgaacgcuaauccuaacgccaauccaaacgcaaaccccaaugccaacccuaaugcuaaccccaaugccaacccagcagcguacauuaaaccuggaagcgcuaauaagcccaaagacgaauuggauuacgccaacgacauagaggcagccuaucaguacaucaaggcuaauaguaaguucauuggcaucacggaacucugaggacuagucccuguucccagagcccacuuuuuuuucuuuuuuugaaauaaaauagccugucuuucagaucucaaaggcucuuuucagagccaccaaaaaaaaaaaaaaaaaaaaaaaaaaaaaaaaaaaaaaaaaaaaaaaaaaaaaaaaaaaaaaaaaaaaaaaaaaaaaaaaaaaaaaaaaaaaaaaaaaaaagaauu

SEQ ID NO: 7392 - RNA, 1213 nt, Artificial Sequence
  mRNA Design a-1 (hSL-A100-N5) comprising derived and/or modified sequence from Pf(3D7)__XP_001351122.1__HsALB_Pf-CSP(19-272)_L(AAY)_Pf-CSP(346-3 65)_L(AAY)_PADRE (opt3)
aggagagucccgcagucggcguccagcggcucugcuuguucgugugugugucguugcaggccuuauucaagcuuaccaugaagugggugaccuucaucagccugcucuuucuuuucuccucugccuacucacuguuucaggaguaucaaugcuacggcaguagcuccaacacaagagucuugaaugaauuaaacuaugacaaugcugggacuaaccuguacaaugagcuagaaaugaacuauuacggaaaacaggagaauugguauucucucaagaaaaacucgaggucacugggugaaaaugaugacggcaacaaugaggauaacgagaaacuucggaagcccaagcacaagaaacugaagcagccugcagacgggaauccagauccgaacgccaaucccaacguugacccuaacgcgaauccaaacguggaucccaaugcuaacccuaauguagacccaaacgccaaucccaacgcaaauccuaacgccaauccaaacgcuaauccgaacgcaaaucccaacgccaacccuaaugcuaacccaaaugccaaccccaaugcgaacccuaaugcaaacccaaaugccaaccccaaugcuaacccgaaugccaacccuaaugcaaaccccaacgcuaauccaaacgccaauccuaacgcgaaucccaacguggauccaaaugccaaccccaaugcaaacccuaaugcuaacccaaaugccaacccgaaugcuaaccccaacgccaauccuaacgcaaauccaaacgccaaucccaacgcuaauccuaacgcgaauccaaacgcaaaucccaacgccaauccgaacgcuaauccuaacgccaauccaaacgcaaaccccaaugccaacccuaaugcuaaccccaaugccaacccagcagcguacauuaaaccuggaagcgcuaauaagcccaaagacgaauuggauuacgccaacgacauagaggcagccuaugcuaaguucgucgccgcauggacgcucaaggcugccgcgugaggacuagucccuguucccagagcccacuuuuuuuucuuuuuuugaaauaaaauagccugucuuucagaucucaaaggcucuuuucagagccaccaaaaaaaaaaaaaaaaaaaaaaaaaaaaaaaaaaaaaaaaaaaaaaaaaaaaaaaaaaaaaaaaaaaaaaaaaaaaaaaaaaaaaaaaaaaaaaaaaaaaagaauu

SEQ ID NO: 7393 - RNA, 1270 nt, Artificial Sequence
  mRNA Design a-1 (hSL-A100-N5) comprising derived and/or modified sequence from Pf(3D7)__XP_001351122.1__HsALB_Pf-CSP(19-272)_L(G4S)_Pf-CSP(310-3 27)_L(G4S)_Pf-CSP(346-375) (opt3)
aggagagucccgcagucggcguccagcggcucugcuuguucgugugugugucguugcaggccuuauucaagcuuaccaugaagugggugaccuucaucagccugcucuuucuuuucuccucugccuacucacuguuucaggaguaucaaugcuacggcaguagcuccaacacaagagucuugaaugaauuaaacuaugacaaugcugggacuaaccuguacaaugagcuagaaaugaacuauuacggaaaacaggagaauugguauucucucaagaaaaacucgaggucacugggugaaaaugaugacggcaacaaugaggauaacgagaaacuucggaagcccaagcacaagaaacugaagcagccugcagacgggaauccagauccgaacgccaaucccaacguugacccuaacgcgaauccaaacguggaucccaaugcuaacccuaauguagacccaaacgccaaucccaacgcaaauccuaacgccaauccaaacgcuaauccgaacgcaaaucccaacgccaacccuaaugcuaacccaaaugccaaccccaaugcgaacccuaaugcaaacccaaaugccaaccccaaugcuaacccgaaugccaacccuaaugcaaaccccaacgcuaauccaaacgccaauccuaacgcgaaucccaacguggauccaaaugccaaccccaaugcaaacccuaaugcuaacccaaaugccaacccgaaugcuaaccccaacgccaauccuaacgcaaauccaaacgccaaucccaacgcuaauccuaacgcgaauccaaacgcaaaucccaacgccaauccgaacgcuaauccuaacgccaauccaaacgcaaaccccaaugccaacccuaaugcuaaccccaaugccaacccaggaggcggugggagcgaaccuagugacaaacauauuaaggaguacuugaauaaaauacagaacucccucggaggcggcgggucuaucaagcccggaagcgcaaauaagccaaaagaugaacuggacuacgcgaacgauauugagaagaaaaucuguaagauggagaaaugcuccugaggacuagucccuguucccagagcccacuuuuuuuucuuuuuuugaaauaaaauagccugucuuucagaucucaaaggcucuuuucagagccaccaaaaaaaaaaaaaaaaaaaaaaaaaaaaaaaaaaaaaaaaaaaaaaaaaaaaaaaaaaaaaaaaaaaaaaaaaaaaaaaaaaaaaaaaaaaaaaaaaaaaagaauu

SEQ ID NO: 7394 - RNA, 1255 nt, Artificial Sequence
  mRNA Design a-1 (hSL-A100-N5) comprising derived and/or modified sequence from Pf(3D7)__XP_001351122.1__HsALB_Pf-CSP(19-272)_L(G4S)_Pf-CSP(310-3 27)_Pf-CSP(346-375) (opt3)
aggagagucccgcagucggcguccagcggcucugcuuguucgugugugugucguugcaggccuuauucaagcuuaccaugaagugggugaccuucaucagccugcucuuucuuuucuccucugccuacucacuguuucaggaguaucaaugcuacggcaguagcuccaacacaagagucuugaaugaauuaaacuaugacaaugcugggacuaaccuguacaaugagcuagaaaugaacuauuacggaaaacaggagaauugguauucucucaagaaaaacucgaggucacugggugaaaaugaugacggcaacaaugaggauaacgagaaacuucggaagcccaagcacaagaaacugaagcagccugcagacgggaauccagauccgaacgccaaucccaacguugacccuaacgcgaauccaaacguggaucccaaugcuaacccuaauguagacccaaacgccaaucccaacgcaaauccuaacgccaauccaaacgcuaauccgaacgcaaaucccaacgccaacccuaaugcuaacccaaaugccaaccccaaugcgaacccuaaugcaaacccaaaugccaaccccaaugcuaacccgaaugccaacccuaaugcaaaccccaacgcuaauccaaacgccaauccuaacgcgaaucccaacguggauccaaaugccaaccccaaugcaaacccuaaugcuaacccaaaugccaacccgaaugcuaaccccaacgccaauccuaacgcaaauccaaacgccaaucccaacgcuaauccuaacgcgaauccaaacgcaaaucccaacgccaauccgaacgcuaauccuaacgccaauccaaacgcaaaccccaaugccaacccuaaugcuaaccccaaugccaacccaggaggcggugggagcgaaccuagugacaaacauauuaaggaguacuugaauaaaauacagaacucccucaucaagcccggaucugcaaauaagccaaaagaugaacuggacuacgcgaacgauauugagaagaaaaucuguaagauggagaaaugcagcugaggacuagucccuguucccagagcccacuuuuuuuucuuuuuuugaaauaaaauagccugucuuucagaucucaaaggcucuuuucagagccaccaaaaaaaaaaaaaaaaaaaaaaaaaaaaaaaaaaaaaaaaaaaaaaaaaaaaaaaaaaaaaaaaaaaaaaaaaaaaaaaaaaaaaaaaaaaaaaaaaaaaagaauu

SEQ ID NO: 7395 - RNA, 1255 nt, Artificial Sequence
  mRNA Design a-1 (hSL-A100-N5) comprising derived and/or modified sequence from Pf(3D7)__XP_001351122.1__HsALB_Pf-CSP(19-325) (opt3)
aggagagucccgcagucggcguccagcggcucugcuuguucgugugugugucguugcaggccuuauucaagcuuaccaugaagugggugaccuucaucagccugcucuuucuuuucuccucugccuacucacuguuucaggaguaucaaugcuacggcaguagcuccaacacaagagucuugaaugaauuaaacuaugacaaugcugggacuaaccuguacaaugagcuagaaaugaacuauuacggaaaacaggagaauugguauucucucaagaaaaacucgaggucacugggugaaaaugaugacggcaacaaugaggauaacgagaaacuucggaagcccaagcacaagaaacugaagcagccugcagacgggaauccagauccgaacgccaaucccaacguugacccuaacgcgaauccaaacguggaucccaaugcuaacccuaauguagacccaaacgccaaucccaacgcaaauccuaacgccaauccaaacgcuaauccgaacgcaaaucccaacgccaacccuaaugcuaacccaaaugccaaccccaaugcgaacccuaaugcaaacccaaaugccaaccccaaugcuaacccgaaugccaacccuaaugcaaaccccaacgcuaauccaaacgccaauccuaacgcgaaucccaacguggauccaaaugccaaccccaaugcaaacccuaaugcuaacccaaaugccaacccgaaugcuaaccccaacgccaauccuaacgcaaauccaaacgccaaucccaacgcuaauccuaacgcgaauccaaacgcaaaucccaacgccaauccgaacgcuaauccuaacgccaauccaaacgcaaaccccaaugccaacccuaaugcuaaccccaaugccaacccaaauaaaaacaaucagggaaacggccaaggucauaauaugccuaacgaccccaaucgcaacgucgaugaaaaugcaaacgcgaacagcgcugugaagaauaacaauaacgaggaaccaagugacaaacacauuaaggaguacuugaauaagauacagaacugaggacuagucccuguucccagagcccacuuuuuuuucuuuuuuugaaauaaaauagccugucuuucagaucucaaaggcucuuuucagagccaccaaaaaaaaaaaaaaaaaaaaaaaaaaaaaaaaaaaaaaaaaaaaaaaaaaaaaaaaaaaaaaaaaaaaaaaaaaaaaaaaaaaaaaaaaaaaaaaaaaaaagaauu

SEQ ID NO: 7396 - RNA, 1432 nt, Artificial Sequence
  mRNA Design a-1 (hSL-A100-N5) comprising derived and/or modified sequence from Pf(3D7)__XP_001351122.1__HsALB_Pf-CSP(19-384) (opt3)
aggagagucccgcagucggcguccagcggcucugcuuguucgugugugugucguugcaggccuuauucaagcuuaccaugaagugggugaccuucaucagccugcucuuucuuuucuccucugccuacucacuguuucaggaguaucaaugcuacggcaguagcuccaacacaagagucuugaaugaauuaaacuaugacaaugcugggacuaaccuguacaaugagcuagaaaugaacuauuacggaaaacaggagaauugguauucucucaagaaaaacucgaggucacugggugaaaaugaugacggcaacaaugaggauaacgagaaacuucggaagcccaagcacaagaaacugaagcagccugcagacgggaauccagauccgaacgccaaucccaacguugacccuaacgcgaauccaaacguggaucccaaugcuaacccuaauguagacccaaacgccaaucccaacgcaaauccuaacgccaauccaaacgcuaauccgaacgcaaaucccaacgccaacccuaaugcuaacccaaaugccaaccccaaugcgaacccuaaugcaaacccaaaugccaaccccaaugcuaacccgaaugccaacccuaaugcaaaccccaacgcuaauccaaacgccaauccuaacgcgaaucccaacguggauccaaaugccaaccccaaugcaaacccuaaugcuaacccaaaugccaacccgaaugcuaaccccaacgccaauccuaacgcaaauccaaacgccaaucccaacgcuaauccuaacgcgaauccaaacgcaaaucccaacgccaauccgaacgcuaauccuaacgccaauccaaacgcaaaccccaaugccaacccuaaugcuaaccccaaugccaacccaaauaaaaacaaucagggaaacggccaaggucauaauaugccuaacgaccccaaucgcaacgucgaugaaaaugcaaacgcgaacagcgcugugaagaauaacaauaacgaggaaccaagugacaaacacauuaaggaguacuugaauaagauacagaacucccucucuacggaguggagcccguguuccguuaccugcgggaauggaauccaggugcgaauuaaaccuggcucagccaacaagcccaaagaugaacuggacuacgcaaaugacaucgagaagaaaauuuguaagauggaaaaaugcaguagcgucuucaacgugguaaauucuuccugaggacuagucccuguucccagagcccacuuuuuuuucuuuuuuugaaauaaaauagccugucuuucagaucucaaaggcucuuuucagagccaccaaaaaaaaaaaaaaaaaaaaaaaaaaaaaaaaaaaaaaaaaaaaaaaaaaaaaaaaaaaaaaaaaaaaaaaaaaaaaaaaaaaaaaaaaaaaaaaaaaaaagaauu

SEQ ID NO: 7397 - RNA, 1570 nt, Artificial Sequence
  mRNA Design a-1 (hSL-A100-N5) comprising derived and/or modified sequence from Pf(3D7)__XP_001351122.1__HsALB_Pf-CSP(19-384)_TM domain HA (opt3)
aggagagucccgcagucggcguccagcggcucugcuuguucgugugugugucguugcaggccuuauucaagcuuaccaugaagugggugaccuucaucagccugcucuuucuuuucuccucugccuacucacuguuucaggaguaucaaugcuacggcaguagcuccaacacaagagucuugaaugaauuaaacuaugacaaugcugggacuaaccuguacaaugagcuagaaaugaacuauuacggaaaacaggagaauugguauucucucaagaaaaacucgaggucacugggugaaaaugaugacggcaacaaugaggauaacgagaaacuucggaagcccaagcacaagaaacugaagcagccugcagacgggaauccagauccgaacgccaaucccaacguugacccuaacgcgaauccaaacguggaucccaaugcuaacccuaauguagacccaaacgccaaucccaacgcaaauccuaacgccaauccaaacgcuaauccgaacgcaaaucccaacgccaacccuaaugcuaacccaaaugccaaccccaaugcgaacccuaaugcaaacccaaaugccaaccccaaugcuaacccgaaugccaacccuaaugcaaaccccaacgcuaauccaaacgccaauccuaacgcgaaucccaacguggauccaaaugccaaccccaaugcaaacccuaaugcuaacccaaaugccaacccgaaugcuaaccccaacgccaauccuaacgcaaauccaaacgccaaucccaacgcuaauccuaacgcgaauccaaacgcaaaucccaacgccaauccgaacgcuaauccuaacgccaauccaaacgcaaaccccaaugccaacccuaaugcuaaccccaaugccaacccaaauaaaaacaaucagggaaacggccaaggucauaauaugccuaacgaccccaaucgcaacgucgaugaaaaugcaaacgcgaacagcgcugugaagaauaacaauaacgaggaaccaagugacaaacacauuaaggaguacuugaauaagauacagaacucccucucuacggaguggagcccguguuccguuaccugcgggaauggaauccaggugcgaauuaaaccuggcucagccaacaagcccaaagaugaacuggacuacgcaaaugacaucgagaagaaaauuuguaagauggaaaaaugcaguagcgucuucaacgugguaaauucuuccaagcuggagucaacacguaucuaucagauacucgccaucuacagcacuguugcuaguucuuuagugcuggucgugucccuuggcgccauuagcuuuuggauguguucgaacgggucuuugcaaugcagaaucuguauuugaggacuagucccuguucccagagcccacuuuuuuuucuuuuuuugaaauaaaauagccugucuuucagaucucaaaggcucuuuucagagccaccaaaaaaaaaaaaaaaaaaaaaaaaaaaaaaaaaaaaaaaaaaaaaaaaaaaaaaaaaaaaaaaaaaaaaaaaaaaaaaaaaaaaaaaaaaaaaaaaaaaaagaauu

SEQ ID NO: 7398 - RNA, 1282 nt, Artificial Sequence
  mRNA Design a-1 (hSL-A100-N5) comprising derived and/or modified sequence from Pf(3D7)__XP_001351122.1__HsALB_Pf-CSP(82-397) (opt3)
aggagagucccgcagucggcguccagcggcucugcuuguucgugugugugucguugcaggccuuauucaagcuuaccaugaagugggugaccuucaucagccugcucuuucuuuucuccucugccuacucagacaacgagaaacugagaaagcccaaacacaagaaauugaagcagccugcugauggcaauccagacccgaacgcaaaucccaacgucgauccuaaugccaacccaaauguugaccccaacgcgaauccuaacguggauccaaaugcuaaccccaaugccaacccuaaugcaaacccaaacgccaauccgaacgcuaaucccaacgcaaauccuaacgccaauccaaacgcuaaucccaacgccaauccuaacgcgaauccaaacgcaaaucccaacgccaacccgaaugcuaacccuaaugccaaccccaaugcaaacccaaaugcuaacccuaaugccaaccccaauguagacccaaacgcgaaucccaacgccaauccuaacgcaaacccaaaugcuaacccgaaugccaaccccaaugcuaacccuaaugccaacccaaaugcaaaccccaaugccaacccuaaugcuaacccaaaugcgaaccccaacgcaaauccgaacgccaauccuaacgcuaauccaaacgccaaucccaacgcaaauccuaacgccaaucccaacgcuaauccaaacaagaauaaccaggggaauggacagggucauaacaugccuaacgaucccaauaggaacguggacgaaaaugccaacgcaaauagugcggucaaaaacaauaacaaugaggaaccaagcgauaagcacauuaaagaguauuuaaacaagauacaaaauucccugucuacagaauggucgccgugcucagugacuuguggcaacgggauccagguucggauuaaaccuggaagcgcuaauaagcccaaggacgagcuagauuacgccaacgacaucgagaaaaagauuugcaaaauggaaaaguguaguuccguguuuaaugucgugaacucuagcaucggccucauaaugguacuguccuuccuuuuucugaacugaggacuagucccuguucccagagcccacuuuuuuuucuuuuuuugaaauaaaauagccugucuuucagaucucaaaggcucuuuucagagccaccaaaaaaaaaaaaaaaaaaaaaaaaaaaaaaaaaaaaaaaaaaaaaaaaaaaaaaaaaaaaaaaaaaaaaaaaaaaaaaaaaaaaaaaaaaaaaaaaaaaaagaauu

SEQ ID NO: 7399 - RNA, 634 nt, Artificial Sequence
  mRNA Design a-1 (hSL-A100-N5) comprising derived and/or modified sequence from Pf(3D7)__XP_001351122.1__HsALB_Pf-CSP(93-192) (opt3)
aggagagucccgcagucggcguccagcggcucugcuuguucgugugugugucguugcaggccuuauucaagcuuaccaugaagugggugaccuucaucagccugcucuuucuuuucuccucugccuacucaaaacugaagcagcccgcugacggcaacccugauccaaaugcaaacccgaaugucgaccccaacgccaauccuaacguugauccaaaugcgaaccccaauguggacccuaacgcuaauccaaacgccaaucccaacgcaaauccuaacgccaacccaaaugcuaacccgaaugcaaaccccaaugccaacccuaaugcuaacccaaaugccaaccccaaugcgaacccuaaugcaaacccaaaugccaaccccaacgcuaauccgaacgccaauccuaacgcaaaucccaacgcuaauccaugaggacuagucccuguucccagagcccacuuuuuuuucuuuuuuugaaauaaaauagccugucuuucagaucucaaaggcucuuuucagagccaccaaaaaaaaaaaaaaaaaaaaaaaaaaaaaaaaaaaaaaaaaaaaaaaaaaaaaaaaaaaaaaaaaaaaaaaaaaaaaaaaaaaaaaaaaaaaaaaaaaaaagaauu

SEQ ID NO: 7400 - RNA, 874 nt, Artificial Sequence
  mRNA Design a-1 (hSL-A100-N5) comprising derived and/or modified sequence from Pf(3D7)__XP_001351122.1__HsALB_Pf-CSP(93-272) (opt3)
aggagagucccgcagucggcguccagcggcucugcuuguucgugugugugucguugcaggccuuauucaagcuuaccaugaagugggugaccuucaucagccugcucuuucuuuucuccucugccuacucaaaacugaagcagcccgcugacggcaacccugauccaaaugcaaacccgaaugucgaccccaacgccaauccuaacguugauccaaaugcgaaccccaauguggacccuaacgcuaauccaaacgccaaucccaacgcaaauccuaacgccaacccaaaugcuaacccgaaugcaaaccccaaugccaacccuaaugcuaacccaaaugccaaccccaaugcgaacccuaaugcaaacccaaaugccaaccccaacgcuaauccgaacgccaauccuaacgcaaaucccaacgcuaauccaaacgccaauccuaacguagaucccaaugcgaacccaaaugccaaccccaaugcaaacccuaacgcuaauccaaacgccaauccgaacgcuaaucccaacgccaauccuaacgcaaauccaaacgccaaucccaacgcuaauccuaacgcgaauccaaacgcaaaccccaaugccaacccgaaugcuaacccuaaugccaacccaaaugcaaaccccaaugccaacccuaaugcuaaccccugaggacuagucccuguucccagagcccacuuuuuuuucuuuuuuugaaauaaaauagccugucuuucagaucucaaaggcucuuuucagagccaccaaaaaaaaaaaaaaaaaaaaaaaaaaaaaaaaaaaaaaaaaaaaaaaaaaaaaaaaaaaaaaaaaaaaaaaaaaaaaaaaaaaaaaaaaaaaaaaaaaaaagaauu

SEQ ID NO: 7401 - RNA, 1249 nt, Artificial Sequence
  mRNA Design a-1 (hSL-A100-N5) comprising derived and/or modified sequence from Pf(3D7)__XP_001351122.1__HsALB_Pf-CSP(93-397) (opt3)
aggagagucccgcagucggcguccagcggcucugcuuguucgugugugugucguugcaggccuuauucaagcuuaccaugaagugggugaccuucaucagccugcucuuucuuuucuccucugccuacucaaaacugaagcagcccgcugacggcaacccugauccaaaugcaaacccgaaugucgaccccaacgccaauccuaacguugauccaaaugcgaaccccaauguggacccuaacgcuaauccaaacgccaaucccaacgcaaauccuaacgccaacccaaaugcuaacccgaaugcaaaccccaaugccaacccuaaugcuaacccaaaugccaaccccaaugcgaacccuaaugcaaacccaaaugccaaccccaacgcuaauccgaacgccaauccuaacgcaaaucccaacgcuaauccaaacgccaauccuaacguagaucccaaugcgaacccaaaugccaaccccaaugcaaacccuaacgcuaauccaaacgccaauccgaacgcuaaucccaacgccaauccuaacgcaaauccaaacgccaaucccaacgcuaauccuaacgcgaauccaaacgcaaaccccaaugccaacccgaaugcuaacccuaaugccaacccaaaugcaaaccccaaugccaacccuaaugcuaaccccaauaaaaacaaucaagggaacggacagggucacaauaugccaaacgacccuaacagaaauguggaugagaacgccaaugcaaacagugcggucaagaauaacaauaacgaggaacccagcgacaaacauauuaaggaauauuugaauaagauacagaacuccuuaucuacagaguggucgccaugcucagugacuuguggcaaugggauccagguuaggauuaaaccgggaagcgcuaacaagccuaaagaugaacuggacuacgccaaugauaucgagaagaaaauuugcaagauggagaaguguaguuccguguuuaacgucguaaauucuagcaucggccuaauaauggugcucuccuuccuguuucuuaacugaggacuagucccuguucccagagcccacuuuuuuuucuuuuuuugaaauaaaauagccugucuuucagaucucaaaggcucuuuucagagccaccaaaaaaaaaaaaaaaaaaaaaaaaaaaaaaaaaaaaaaaaaaaaaaaaaaaaaaaaaaaaaaaaaaaaaaaaaaaaaaaaaaaaaaaaaaaaaaaaaaaaagaauu

SEQ ID NO: 7402 - RNA, 619 nt, Artificial Sequence
  mRNA Design a-1 (hSL-A100-N5) comprising derived and/or modified sequence from Pf(3D7)__XP_001351122.1__HsALB_Pf-CSP(98-192) (opt3)
aggagagucccgcagucggcguccagcggcucugcuuguucgugugugugucguugcaggccuuauucaagcuuaccaugaagugggugaccuucaucagccugcucuuucuuuucuccucugccuacucagcugacggcaaccccgauccuaaugcaaacccaaaugucgacccgaacgccaaucccaacguugauccuaaugcgaacccaaauguggaccccaacgcuaauccuaacgccaauccaaacgcaaaucccaacgccaacccuaaugcuaacccaaaugcaaacccgaaugccaaccccaaugcuaacccuaaugccaacccaaaugcgaaccccaaugcaaacccuaaugccaacccaaacgcuaaucccaacgccaauccgaacgcaaauccuaacgcuaaucccugaggacuagucccuguucccagagcccacuuuuuuuucuuuuuuugaaauaaaauagccugucuuucagaucucaaaggcucuuuucagagccaccaaaaaaaaaaaaaaaaaaaaaaaaaaaaaaaaaaaaaaaaaaaaaaaaaaaaaaaaaaaaaaaaaaaaaaaaaaaaaaaaaaaaaaaaaaaaaaaaaaaaagaauu

SEQ ID NO: 7403 - RNA, 859 nt, Artificial Sequence
  mRNA Design a-1 (hSL-A100-N5) comprising derived and/or modified sequence from Pf(3D7)__XP_001351122.1__HsALB_Pf-CSP(98-272) (opt3)
aggagagucccgcagucggcguccagcggcucugcuuguucgugugugugucguugcaggccuuauucaagcuuaccaugaagugggugaccuucaucagccugcucuuucuuuucuccucugccuacucagcugacggcaaccccgauccuaaugcaaacccaaaugucgacccgaacgccaaucccaacguugauccuaaugcgaacccaaauguggaccccaacgcuaauccuaacgccaauccaaacgcaaaucccaacgccaacccuaaugcuaacccaaaugcaaacccgaaugccaaccccaaugcuaacccuaaugccaacccaaaugcgaaccccaaugcaaacccuaaugccaacccaaacgcuaaucccaacgccaauccgaacgcaaauccuaacgcuaaucccaacgccaauccaaacguagauccuaaugcgaaccccaaugccaacccaaaugcaaaccccaacgcuaauccuaacgccaauccaaacgcuaauccgaacgccaaucccaacgcaaauccuaacgccaauccaaacgcuaaucccaacgcgaauccuaacgcaaacccaaaugccaaccccaaugcuaacccgaaugccaacccuaaugcaaacccaaaugccaaccccaaugcuaacccuugaggacuagucccuguucccagagcccacuuuuuuuucuuuuuuugaaauaaaauagccugucuuucagaucucaaaggcucuuuucagagccaccaaaaaaaaaaaaaaaaaaaaaaaaaaaaaaaaaaaaaaaaaaaaaaaaaaaaaaaaaaaaaaaaaaaaaaaaaaaaaaaaaaaaaaaaaaaaaaaaaaaaagaauu

SEQ ID NO: 7404 - RNA, 1165 nt, Artificial Sequence
  mRNA Design a-1 (hSL-A100-N5) comprising derived and/or modified sequence from Pf(3D7)__XP_001351122.1__HsALB_Pf-CSP(98-374) (opt3)
aggagagucccgcagucggcguccagcggcucugcuuguucgugugugugucguugcaggccuuauucaagcuuaccaugaagugggugaccuucaucagccugcucuuucuuuucuccucugccuacucagcugacggcaaccccgauccuaaugcaaacccaaaugucgacccgaacgccaaucccaacguugauccuaaugcgaacccaaauguggaccccaacgcuaauccuaacgccaauccaaacgcaaaucccaacgccaacccuaaugcuaacccaaaugcaaacccgaaugccaaccccaaugcuaacccuaaugccaacccaaaugcgaaccccaaugcaaacccuaaugccaacccaaacgcuaaucccaacgccaauccgaacgcaaauccuaacgcuaaucccaacgccaauccaaacguagauccuaaugcgaaccccaaugccaacccaaaugcaaaccccaacgcuaauccuaacgccaauccaaacgcuaauccgaacgccaaucccaacgcaaauccuaacgccaauccaaacgcuaaucccaacgcgaauccuaacgcaaacccaaaugccaaccccaaugcuaacccgaaugccaacccuaaugcaaacccaaaugccaaccccaaugcuaacccuaauaaaaacaaucaggggaacggacaaggucacaauaugcccaacgacccaaacagaaauguggaugagaacgccaaugcaaacagugcggucaagaauaacaauaacgaggaaccuagcgacaaacauauuaaggaauaucugaauaaaauacagaacuccuugucuacagaguggucgcccugcucagugacuuguggcaaugggauccagguuaggauuaagccaggaagcgcuaacaagccgaaagaugaauuagacuacgccaaugauaucgagaagaaaauuugcaagauggagaaauguugaggacuagucccuguucccagagcccacuuuuuuuucuuuuuuugaaauaaaauagccugucuuucagaucucaaaggcucuuuucagagccaccaaaaaaaaaaaaaaaaaaaaaaaaaaaaaaaaaaaaaaaaaaaaaaaaaaaaaaaaaaaaaaaaaaaaaaaaaaaaaaaaaaaaaaaaaaaaaaaaaaaaagaauu

SEQ ID NO: 7405 - RNA, 1234 nt, Artificial Sequence
  mRNA Design a-1 (hSL-A100-N5) comprising derived and/or modified sequence from Pf(3D7)__XP_001351122.1__HsALB_Pf-CSP(98-397) (opt3)
aggagagucccgcagucggcguccagcggcucugcuuguucgugugugugucguugcaggccuuauucaagcuuaccaugaagugggugaccuucaucagccugcucuuucuuuucuccucugccuacucagcugacggcaaccccgauccuaaugcaaacccaaaugucgacccgaacgccaaucccaacguugauccuaaugcgaacccaaauguggaccccaacgcuaauccuaacgccaauccaaacgcaaaucccaacgccaacccuaaugcuaacccaaaugcaaacccgaaugccaaccccaaugcuaacccuaaugccaacccaaaugcgaaccccaaugcaaacccuaaugccaacccaaacgcuaaucccaacgccaauccgaacgcaaauccuaacgcuaaucccaacgccaauccaaacguagauccuaaugcgaaccccaaugccaacccaaaugcaaaccccaacgcuaauccuaacgccaauccaaacgcuaauccgaacgccaaucccaacgcaaauccuaacgccaauccaaacgcuaaucccaacgcgaauccuaacgcaaacccaaaugccaaccccaaugcuaacccgaaugccaacccuaaugcaaacccaaaugccaaccccaaugcuaacccuaauaaaaacaaucaggggaacggacaaggucacaauaugcccaacgacccaaacagaaauguggaugagaacgccaaugcaaacagugcggucaagaauaacaauaacgaggaaccuagcgacaaacauauuaaggaauaucugaauaaaauacagaacuccuugucuacagaguggucgcccugcucagugacuuguggcaaugggauccagguuaggauuaagccaggaagcgcuaacaagccgaaagaugaauuagacuacgccaaugauaucgagaagaaaauuugcaagauggagaaauguaguuccguguuuaacgucguaaauucuagcaucggccugauaauggugcuauccuuccucuuucugaacugaggacuagucccuguucccagagcccacuuuuuuuucuuuuuuugaaauaaaauagccugucuuucagaucucaaaggcucuuuucagagccaccaaaaaaaaaaaaaaaaaaaaaaaaaaaaaaaaaaaaaaaaaaaaaaaaaaaaaaaaaaaaaaaaaaaaaaaaaaaaaaaaaaaaaaaaaaaaaaaaaaaaagaauu

SEQ ID NO: 7406 - RNA, 1561 nt, Artificial Sequence
  mRNA Design a-1 (hSL-A100-N5) comprising derived and/or modified sequence from Pf(3D7)__XP_001351122.1__HsALB_Pf-CSP(199-377)_L(PVTN)_HBsAg (opt3)
aggagagucccgcagucggcguccagcggcucugcuuguucgugugugugucguugcaggccuuauucaagcuuaccaugaagugggugaccuucaucagccugcucuuucuuuucuccucugccuacucagaccccaacgcuaauccuaacgcaaauccaaacgccaauccgaacgcgaaucccaacgcuaauccuaacgccaauccaaacgcaaaucccaacgccaauccuaacgcuaacccaaaugcaaaccccaaugccaacccuaaugcuaacccaaaugccaacccgaaugcgaaccccaaugcaaacccuaaugccaacccaaaugcuaaccccaacgccaauccuaacaaaaauaaccagggcaaugggcaaggacacaacaugccaaaugaucccaacagaaaugucgacgagaacgcaaaugcuaacagugccguuaagaauaacaauaacgaggaaccgagcgauaaacauauuaaggaauaucugaacaaaauacaaaauuccuugucuacagaguggucgccuugcucagugacuugugguaacggcauccagguaaggauuaagcccgggagcgcgaauaagccaaaagacgaauuagauuacgccaacgacaucgagaagaaaauuugcaagauggagaaauguaguuccgugccugucacgaauauggaaaacaucaccucuggauuucugggcccccuacucgugcugcaggcagguuucuuucuucugacacggauauugacuaucccacagagccucgauuccugguggaccucacugaauuuccucgggggaagucccguuugccugggccagaacagccagucuccuacauccaaucacucaccaaccagcuguccgcccauuugcccuggcuaucgcuggauguguuuacgacguuuuaucauuuuccuguuuauccuuuugcugugccuaauauuccuccuggugcuucuggacuaccaggggauguugccagucuguccccucauuccuggaaguacuacaaccaacacggguccaugcaagacuuguaccacacccgcucaaggcaauucuauguuuccguccugcugcuguacuaagccuaccgaugggaacugcacauguaucccaauucccagcucgugggccuucgcuaaauaucugugggagugggccucugugagauuuuccugguuaucacugcucguaccuuucguucagugguucgugggacuuagucccaccgucuggcugagcgcaaucuggaugaugugguacuggggcccauccuuguauucuaucgugagcccuuuuauuccccuacugccaauauucuuuugccucuggguguacaucugaggacuagucccuguucccagagcccacuuuuuuuucuuuuuuugaaauaaaauagccugucuuucagaucucaaaggcucuuuucagagccaccaaaaaaaaaaaaaaaaaaaaaaaaaaaaaaaaaaaaaaaaaaaaaaaaaaaaaaaaaaaaaaaaaaaaaaaaaaaaaaaaaaaaaaaaaaaaaaaaaaaaagaauu

SEQ ID NO: 7407 - RNA, 1471 nt, Artificial Sequence
  mRNA Design a-1 (hSL-A100-N5) comprising derived and/or modified sequence from Pf(3D7)__XP_001351122.1__Pf-CSP (opt4)
aggagagucccgcagucggcguccagcggcucugcuuguucgugugugugucguugcaggccuuauucaagcuuaccaugaugagaaagcuggccauccugagcgugagcagcuuccuguucguggaggcccuguuccaggaguaccagugcuacggcagcagcagcaacaccagagugcugaacgagcugaacuacgacaacgccggcaccaaccuguacaacgagcuggagaugaacuacuacggcaagcaggagaacugguacagccugaagaagaacagcagaagccugggcgagaacgacgacggcaacaacgaggacaacgagaagcugagaaagcccaagcacaagaagcugaagcagcccgccgacggcaaccccgaccccaacgccaaccccaacguggaccccaacgccaaccccaacguggaccccaacgccaaccccaacguggaccccaacgccaaccccaacgccaaccccaacgccaaccccaacgccaaccccaacgccaaccccaacgccaaccccaacgccaaccccaacgccaaccccaacgccaaccccaacgccaaccccaacgccaaccccaacgccaaccccaacgccaaccccaacgccaaccccaacgccaaccccaacgccaaccccaacgccaaccccaacguggaccccaacgccaaccccaacgccaaccccaacgccaaccccaacgccaaccccaacgccaaccccaacgccaaccccaacgccaaccccaacgccaaccccaacgccaaccccaacgccaaccccaacgccaaccccaacgccaaccccaacgccaaccccaacgccaaccccaacgccaaccccaacgccaaccccaacgccaaccccaacgccaaccccaacaagaacaaccagggcaacggccagggccacaacaugcccaacgaccccaacagaaacguggacgagaacgccaacgccaacagcgccgugaagaacaacaacaacgaggagcccagcgacaagcacaucaaggaguaccugaacaagauccagaacagccugagcaccgaguggagccccugcagcgugaccugcggcaacggcauccaggugagaaucaagcccggcagcgccaacaagcccaaggacgagcuggacuacgccaacgacaucgagaagaagaucugcaagauggagaagugcagcagcguguucaacguggugaacagcagcaucggccugaucauggugcugagcuuccuguuccugaacugaggacuagucccuguucccagagcccacuuuuuuuucuuuuuuugaaauaaaauagccugucuuucagaucucaaaggcucuuuucagagccaccaaaaaaaaaaaaaaaaaaaaaaaaaaaaaaaaaaaaaaaaaaaaaaaaaaaaaaaaaaaaaaaaaaaaaaaaaaaaaaaaaaaaaaaaaaaaaaaaaaaaagaauu

SEQ ID NO: 7408 - RNA, 1402 nt, Artificial Sequence
  mRNA Design a-1 (hSL-A100-N5) comprising derived and/or modified sequence from Pf(3D7)__XP_001351122.1__Pf-CSP(1-374) (opt4)
aggagagucccgcagucggcguccagcggcucugcuuguucgugugugugucguugcaggccuuauucaagcuuaccaugaugagaaagcuggccauccugagcgugagcagcuuccuguucguggaggcccuguuccaggaguaccagugcuacggcagcagcagcaacaccagagugcugaacgagcugaacuacgacaacgccggcaccaaccuguacaacgagcuggagaugaacuacuacggcaagcaggagaacugguacagccugaagaagaacagcagaagccugggcgagaacgacgacggcaacaacgaggacaacgagaagcugagaaagcccaagcacaagaagcugaagcagcccgccgacggcaaccccgaccccaacgccaaccccaacguggaccccaacgccaaccccaacguggaccccaacgccaaccccaacguggaccccaacgccaaccccaacgccaaccccaacgccaaccccaacgccaaccccaacgccaaccccaacgccaaccccaacgccaaccccaacgccaaccccaacgccaaccccaacgccaaccccaacgccaaccccaacgccaaccccaacgccaaccccaacgccaaccccaacgccaaccccaacgccaaccccaacgccaaccccaacguggaccccaacgccaaccccaacgccaaccccaacgccaaccccaacgccaaccccaacgccaaccccaacgccaaccccaacgccaaccccaacgccaaccccaacgccaaccccaacgccaaccccaacgccaaccccaacgccaaccccaacgccaaccccaacgccaaccccaacgccaaccccaacgccaaccccaacgccaaccccaacgccaaccccaacaagaacaaccagggcaacggccagggccacaacaugcccaacgaccccaacagaaacguggacgagaacgccaacgccaacagcgccgugaagaacaacaacaacgaggagcccagcgacaagcacaucaaggaguaccugaacaagauccagaacagccugagcaccgaguggagccccugcagcgugaccugcggcaacggcauccaggugagaaucaagcccggcagcgccaacaagcccaaggacgagcuggacuacgccaacgacaucgagaagaagaucugcaagauggagaagugcugaggacuagucccuguucccagagcccacuuuuuuuucuuuuuuugaaauaaaauagccugucuuucagaucucaaaggcucuuuucagagccaccaaaaaaaaaaaaaaaaaaaaaaaaaaaaaaaaaaaaaaaaaaaaaaaaaaaaaaaaaaaaaaaaaaaaaaaaaaaaaaaaaaaaaaaaaaaaaaaaaaaaagaauu

SEQ ID NO: 7409 - RNA, 1255 nt, Artificial Sequence
  mRNA Design a-1 (hSL-A100-N5) comprising derived and/or modified sequence from Pf(3D7)__XP_001351122.1__Pf-CSP(1-325) (opt4)
aggagagucccgcagucggcguccagcggcucugcuuguucgugugugugucguugcaggccuuauucaagcuuaccaugaugagaaagcuggccauccugagcgugagcagcuuccuguucguggaggcccuguuccaggaguaccagugcuacggcagcagcagcaacaccagagugcugaacgagcugaacuacgacaacgccggcaccaaccuguacaacgagcuggagaugaacuacuacggcaagcaggagaacugguacagccugaagaagaacagcagaagccugggcgagaacgacgacggcaacaacgaggacaacgagaagcugagaaagcccaagcacaagaagcugaagcagcccgccgacggcaaccccgaccccaacgccaaccccaacguggaccccaacgccaaccccaacguggaccccaacgccaaccccaacguggaccccaacgccaaccccaacgccaaccccaacgccaaccccaacgccaaccccaacgccaaccccaacgccaaccccaacgccaaccccaacgccaaccccaacgccaaccccaacgccaaccccaacgccaaccccaacgccaaccccaacgccaaccccaacgccaaccccaacgccaaccccaacgccaaccccaacgccaaccccaacguggaccccaacgccaaccccaacgccaaccccaacgccaaccccaacgccaaccccaacgccaaccccaacgccaaccccaacgccaaccccaacgccaaccccaacgccaaccccaacgccaaccccaacgccaaccccaacgccaaccccaacgccaaccccaacgccaaccccaacgccaaccccaacgccaaccccaacgccaaccccaacgccaaccccaacaagaacaaccagggcaacggccagggccacaacaugcccaacgaccccaacagaaacguggacgagaacgccaacgccaacagcgccgugaagaacaacaacaacgaggagcccagcgacaagcacaucaaggaguaccugaacaagauccagaacugaggacuagucccuguucccagagcccacuuuuuuuucuuuuuuugaaauaaaauagccugucuuucagaucucaaaggcucuuuucagagccaccaaaaaaaaaaaaaaaaaaaaaaaaaaaaaaaaaaaaaaaaaaaaaaaaaaaaaaaaaaaaaaaaaaaaaaaaaaaaaaaaaaaaaaaaaaaaaaaaaaaaagaauu

SEQ ID NO: 7410 - RNA, 1471 nt, Artificial Sequence
  mRNA Design a-1 (hSL-A100-N5) comprising derived and/or modified sequence from Pf(3D7)__XP_001351122.1__HsALB_Pf-CSP(19-397) (opt4)
aggagagucccgcagucggcguccagcggcucugcuuguucgugugugugucguugcaggccuuauucaagcuuaccaugaagugggugaccuucaucagccugcuguuccuguucagcagcgccuacagccuguuccaggaguaccagugcuacggcagcagcagcaacaccagagugcugaacgagcugaacuacgacaacgccggcaccaaccuguacaacgagcuggagaugaacuacuacggcaagcaggagaacugguacagccugaagaagaacagcagaagccugggcgagaacgacgacggcaacaacgaggacaacgagaagcugagaaagcccaagcacaagaagcugaagcagcccgccgacggcaaccccgaccccaacgccaaccccaacguggaccccaacgccaaccccaacguggaccccaacgccaaccccaacguggaccccaacgccaaccccaacgccaaccccaacgccaaccccaacgccaaccccaacgccaaccccaacgccaaccccaacgccaaccccaacgccaaccccaacgccaaccccaacgccaaccccaacgccaaccccaacgccaaccccaacgccaaccccaacgccaaccccaacgccaaccccaacgccaaccccaacgccaaccccaacguggaccccaacgccaaccccaacgccaaccccaacgccaaccccaacgccaaccccaacgccaaccccaacgccaaccccaacgccaaccccaacgccaaccccaacgccaaccccaacgccaaccccaacgccaaccccaacgccaaccccaacgccaaccccaacgccaaccccaacgccaaccccaacgccaaccccaacgccaaccccaacgccaaccccaacaagaacaaccagggcaacggccagggccacaacaugcccaacgaccccaacagaaacguggacgagaacgccaacgccaacagcgccgugaagaacaacaacaacgaggagcccagcgacaagcacaucaaggaguaccugaacaagauccagaacagccugagcaccgaguggagccccugcagcgugaccugcggcaacggcauccaggugagaaucaagcccggcagcgccaacaagcccaaggacgagcuggacuacgccaacgacaucgagaagaagaucugcaagauggagaagugcagcagcguguucaacguggugaacagcagcaucggccugaucauggugcugagcuuccuguuccugaacugaggacuagucccuguucccagagcccacuuuuuuuucuuuuuuugaaauaaaauagccugucuuucagaucucaaaggcucuuuucagagccaccaaaaaaaaaaaaaaaaaaaaaaaaaaaaaaaaaaaaaaaaaaaaaaaaaaaaaaaaaaaaaaaaaaaaaaaaaaaaaaaaaaaaaaaaaaaaaaaaaaaaagaauu

SEQ ID NO: 7411 - RNA, 1489 nt, Artificial Sequence
  mRNA Design a-1 (hSL-A100-N5) comprising derived and/or modified sequence from Pf(3D7)__XP_001351122.1__HsIns-iso1_Pf-CSP(19-397) (opt4)
aggagagucccgcagucggcguccagcggcucugcuuguucgugugugugucguugcaggccuuauucaagcuuaccauggcccuguggaugagacugcugccccugcuggcccugcuggcccuguggggccccgaccccgccgccgcccuguuccaggaguaccagugcuacggcagcagcagcaacaccagagugcugaacgagcugaacuacgacaacgccggcaccaaccuguacaacgagcuggagaugaacuacuacggcaagcaggagaacugguacagccugaagaagaacagcagaagccugggcgagaacgacgacggcaacaacgaggacaacgagaagcugagaaagcccaagcacaagaagcugaagcagcccgccgacggcaaccccgaccccaacgccaaccccaacguggaccccaacgccaaccccaacguggaccccaacgccaaccccaacguggaccccaacgccaaccccaacgccaaccccaacgccaaccccaacgccaaccccaacgccaaccccaacgccaaccccaacgccaaccccaacgccaaccccaacgccaaccccaacgccaaccccaacgccaaccccaacgccaaccccaacgccaaccccaacgccaaccccaacgccaaccccaacgccaaccccaacgccaaccccaacguggaccccaacgccaaccccaacgccaaccccaacgccaaccccaacgccaaccccaacgccaaccccaacgccaaccccaacgccaaccccaacgccaaccccaacgccaaccccaacgccaaccccaacgccaaccccaacgccaaccccaacgccaaccccaacgccaaccccaacgccaaccccaacgccaaccccaacgccaaccccaacgccaaccccaacaagaacaaccagggcaacggccagggccacaacaugcccaacgaccccaacagaaacguggacgagaacgccaacgccaacagcgccgugaagaacaacaacaacgaggagcccagcgacaagcacaucaaggaguaccugaacaagauccagaacagccugagcaccgaguggagccccugcagcgugaccugcggcaacggcauccaggugagaaucaagcccggcagcgccaacaagcccaaggacgagcuggacuacgccaacgacaucgagaagaagaucugcaagauggagaagugcagcagcguguucaacguggugaacagcagcaucggccugaucauggugcugagcuuccuguuccugaacugaggacuagucccuguucccagagcccacuuuuuuuucuuuuuuugaaauaaaauagccugucuuucagaucucaaaggcucuuuucagagccaccaaaaaaaaaaaaaaaaaaaaaaaaaaaaaaaaaaaaaaaaaaaaaaaaaaaaaaaaaaaaaaaaaaaaaaaaaaaaaaaaaaaaaaaaaaaaaaaaaaaaagaauu

SEQ ID NO: 7412 - RNA, 1468 nt, Artificial Sequence
  mRNA Design a-1 (hSL-A100-N5) comprising derived and/or modified sequence from Pf(3D7)__XP_001351122.1__HsSPARC_Pf-CSP(19-397) (opt4)
aggagagucccgcagucggcguccagcggcucugcuuguucgugugugugucguugcaggccuuauucaagcuuaccaugagagccuggaucuucuuccugcugugccuggccggcagagcccuggcccuguuccaggaguaccagugcuacggcagcagcagcaacaccagagugcugaacgagcugaacuacgacaacgccggcaccaaccuguacaacgagcuggagaugaacuacuacggcaagcaggagaacugguacagccugaagaagaacagcagaagccugggcgagaacgacgacggcaacaacgaggacaacgagaagcugagaaagcccaagcacaagaagcugaagcagcccgccgacggcaaccccgaccccaacgccaaccccaacguggaccccaacgccaaccccaacguggaccccaacgccaaccccaacguggaccccaacgccaaccccaacgccaaccccaacgccaaccccaacgccaaccccaacgccaaccccaacgccaaccccaacgccaaccccaacgccaaccccaacgccaaccccaacgccaaccccaacgccaaccccaacgccaaccccaacgccaaccccaacgccaaccccaacgccaaccccaacgccaaccccaacgccaaccccaacguggaccccaacgccaaccccaacgccaaccccaacgccaaccccaacgccaaccccaacgccaaccccaacgccaaccccaacgccaaccccaacgccaaccccaacgccaaccccaacgccaaccccaacgccaaccccaacgccaaccccaacgccaaccccaacgccaaccccaacgccaaccccaacgccaaccccaacgccaaccccaacgccaaccccaacaagaacaaccagggcaacggccagggccacaacaugcccaacgaccccaacagaaacguggacgagaacgccaacgccaacagcgccgugaagaacaacaacaacgaggagcccagcgacaagcacaucaaggaguaccugaacaagauccagaacagccugagcaccgaguggagccccugcagcgugaccugcggcaacggcauccaggugagaaucaagcccggcagcgccaacaagcccaaggacgagcuggacuacgccaacgacaucgagaagaagaucugcaagauggagaagugcagcagcguguucaacguggugaacagcagcaucggccugaucauggugcugagcuuccuguuccugaacugaggacuagucccuguucccagagcccacuuuuuuuucuuuuuuugaaauaaaauagccugucuuucagaucucaaaggcucuuuucagagccaccaaaaaaaaaaaaaaaaaaaaaaaaaaaaaaaaaaaaaaaaaaaaaaaaaaaaaaaaaaaaaaaaaaaaaaaaaaaaaaaaaaaaaaaaaaaaaaaaaaaaagaauu

SEQ ID NO: 7413 - RNA, 1471 nt, Artificial Sequence
  mRNA Design a-1 (hSL-A100-N5) comprising derived and/or modified sequence from Pf(3D7)__XP_001351122.1__IgE_Pf-CSP(19-397) (opt4)
aggagagucccgcagucggcguccagcggcucugcuuguucgugugugugucguugcaggccuuauucaagcuuaccauggacuggaccuggauccuguuccugguggccgccgccaccagagugcacagccuguuccaggaguaccagugcuacggcagcagcagcaacaccagagugcugaacgagcugaacuacgacaacgccggcaccaaccuguacaacgagcuggagaugaacuacuacggcaagcaggagaacugguacagccugaagaagaacagcagaagccugggcgagaacgacgacggcaacaacgaggacaacgagaagcugagaaagcccaagcacaagaagcugaagcagcccgccgacggcaaccccgaccccaacgccaaccccaacguggaccccaacgccaaccccaacguggaccccaacgccaaccccaacguggaccccaacgccaaccccaacgccaaccccaacgccaaccccaacgccaaccccaacgccaaccccaacgccaaccccaacgccaaccccaacgccaaccccaacgccaaccccaacgccaaccccaacgccaaccccaacgccaaccccaacgccaaccccaacgccaaccccaacgccaaccccaacgccaaccccaacgccaaccccaacguggaccccaacgccaaccccaacgccaaccccaacgccaaccccaacgccaaccccaacgccaaccccaacgccaaccccaacgccaaccccaacgccaaccccaacgccaaccccaacgccaaccccaacgccaaccccaacgccaaccccaacgccaaccccaacgccaaccccaacgccaaccccaacgccaaccccaacgccaaccccaacgccaaccccaacaagaacaaccagggcaacggccagggccacaacaugcccaacgaccccaacagaaacguggacgagaacgccaacgccaacagcgccgugaagaacaacaacaacgaggagcccagcgacaagcacaucaaggaguaccugaacaagauccagaacagccugagcaccgaguggagccccugcagcgugaccugcggcaacggcauccaggugagaaucaagcccggcagcgccaacaagcccaaggacgagcuggacuacgccaacgacaucgagaagaagaucugcaagauggagaagugcagcagcguguucaacguggugaacagcagcaucggccugaucauggugcugagcuuccuguuccugaacugaggacuagucccuguucccagagcccacuuuuuuuucuuuuuuugaaauaaaauagccugucuuucagaucucaaaggcucuuuucagagccaccaaaaaaaaaaaaaaaaaaaaaaaaaaaaaaaaaaaaaaaaaaaaaaaaaaaaaaaaaaaaaaaaaaaaaaaaaaaaaaaaaaaaaaaaaaaaaaaaaaaaagaauu

SEQ ID NO: 7414 - RNA, 1636 nt, Artificial Sequence
  mRNA Design a-1 (hSL-A100-N5) comprising derived and/or modified sequence from Pf(3D7)__XP_001351122.1__Pf-CSP_L(G4SG4)_TM domain HA (opt4)
aggagagucccgcagucggcguccagcggcucugcuuguucgugugugugucguugcaggccuuauucaagcuuaccaugaugagaaagcuggccauccugagcgugagcagcuuccuguucguggaggcccuguuccaggaguaccagugcuacggcagcagcagcaacaccagagugcugaacgagcugaacuacgacaacgccggcaccaaccuguacaacgagcuggagaugaacuacuacggcaagcaggagaacugguacagccugaagaagaacagcagaagccugggcgagaacgacgacggcaacaacgaggacaacgagaagcugagaaagcccaagcacaagaagcugaagcagcccgccgacggcaaccccgaccccaacgccaaccccaacguggaccccaacgccaaccccaacguggaccccaacgccaaccccaacguggaccccaacgccaaccccaacgccaaccccaacgccaaccccaacgccaaccccaacgccaaccccaacgccaaccccaacgccaaccccaacgccaaccccaacgccaaccccaacgccaaccccaacgccaaccccaacgccaaccccaacgccaaccccaacgccaaccccaacgccaaccccaacgccaaccccaacgccaaccccaacguggaccccaacgccaaccccaacgccaaccccaacgccaaccccaacgccaaccccaacgccaaccccaacgccaaccccaacgccaaccccaacgccaaccccaacgccaaccccaacgccaaccccaacgccaaccccaacgccaaccccaacgccaaccccaacgccaaccccaacgccaaccccaacgccaaccccaacgccaaccccaacgccaaccccaacaagaacaaccagggcaacggccagggccacaacaugcccaacgaccccaacagaaacguggacgagaacgccaacgccaacagcgccgugaagaacaacaacaacgaggagcccagcgacaagcacaucaaggaguaccugaacaagauccagaacagccugagcaccgaguggagccccugcagcgugaccugcggcaacggcauccaggugagaaucaagcccggcagcgccaacaagcccaaggacgagcuggacuacgccaacgacaucgagaagaagaucugcaagauggagaagugcagcagcguguucaacguggugaacagcagcaucggccugaucauggugcugagcuuccuguuccugaacggcggcggcggcagcggcggcggcggcaagcuggagagcaccagaaucuaccagauccuggccaucuacagcaccguggccagcagccuggugcugguggugagccugggcgccaucagcuucuggaugugcagcaacggcagccugcagugcagaaucugcaucugaggacuagucccuguucccagagcccacuuuuuuuucuuuuuuugaaauaaaauagccugucuuucagaucucaaaggcucuuuucagagccaccaaaaaaaaaaaaaaaaaaaaaaaaaaaaaaaaaaaaaaaaaaaaaaaaaaaaaaaaaaaaaaaaaaaaaaaaaaaaaaaaaaaaaaaaaaaaaaaaaaaaagaauu

SEQ ID NO: 7415 - RNA, 1510 nt, Artificial Sequence
  mRNA Design a-1 (hSL-A100-N5) comprising derived and/or modified sequence from Pf(3D7)__XP_001351122.1__Pf-CSP(199-377)_L(PVTN)_HBsAg (opt4)
aggagagucccgcagucggcguccagcggcucugcuuguucgugugugugucguugcaggccuuauucaagcuuaccauggaccccaacgccaaccccaacgccaaccccaacgccaaccccaacgccaaccccaacgccaaccccaacgccaaccccaacgccaaccccaacgccaaccccaacgccaaccccaacgccaaccccaacgccaaccccaacgccaaccccaacgccaaccccaacgccaaccccaacgccaaccccaacgccaaccccaacgccaaccccaacgccaaccccaacaagaacaaccagggcaacggccagggccacaacaugcccaacgaccccaacagaaacguggacgagaacgccaacgccaacagcgccgugaagaacaacaacaacgaggagcccagcgacaagcacaucaaggaguaccugaacaagauccagaacagccugagcaccgaguggagccccugcagcgugaccugcggcaacggcauccaggugagaaucaagcccggcagcgccaacaagcccaaggacgagcuggacuacgccaacgacaucgagaagaagaucugcaagauggagaagugcagcagcgugcccgugaccaacauggagaacaucaccagcggcuuccugggcccccugcuggugcugcaggccggcuucuuccugcugaccagaauccugaccaucccccagagccuggacagcugguggaccagccugaacuuccugggcggcagccccgugugccugggccagaacagccagagccccaccagcaaccacagccccaccagcugcccccccaucugccccggcuacagauggaugugccugagaagauucaucaucuuccuguucauccugcugcugugccugaucuuccugcuggugcugcuggacuaccagggcaugcugcccgugugcccccugauccccggcagcaccaccaccaacaccggccccugcaagaccugcaccacccccgcccagggcaacagcauguuccccagcugcugcugcaccaagcccaccgacggcaacugcaccugcauccccauccccagcagcugggccuucgccaaguaccugugggagugggccagcgugagauucagcuggcugagccugcuggugcccuucgugcagugguucgugggccugagccccaccguguggcugagcgccaucuggaugaugugguacuggggccccagccuguacagcaucgugagccccuucaucccccugcugcccaucuucuucugccuguggguguacaucugaggacuagucccuguucccagagcccacuuuuuuuucuuuuuuugaaauaaaauagccugucuuucagaucucaaaggcucuuuucagagccaccaaaaaaaaaaaaaaaaaaaaaaaaaaaaaaaaaaaaaaaaaaaaaaaaaaaaaaaaaaaaaaaaaaaaaaaaaaaaaaaaaaaaaaaaaaaaaaaaaaaaagaauu

SEQ ID NO: 7416 - RNA, 1552 nt, Artificial Sequence
  mRNA Design a-1 (hSL-A100-N5) comprising derived and/or modified sequence from Pf(3D7)__XP_001351122.1__Pf-CSP(199-387)_L(PVTN)_HBsAg (opt4)
aggagagucccgcagucggcguccagcggcucugcuuguucgugugugugucguugcaggccuuauucaagcuuaccaugauggcccccgaccccaacgccaaccccaacgccaaccccaacgccaaccccaacgccaaccccaacgccaaccccaacgccaaccccaacgccaaccccaacgccaaccccaacgccaaccccaacgccaaccccaacgccaaccccaacgccaaccccaacgccaaccccaacgccaaccccaacgccaaccccaacgccaaccccaacgccaaccccaacgccaaccccaacaagaacaaccagggcaacggccagggccacaacaugcccaacgaccccaacagaaacguggacgagaacgccaacgccaacagcgccgugaagaacaacaacaacgaggagcccagcgacaagcacaucaaggaguaccugaacaagauccagaacagccugagcaccgaguggagccccugcagcgugaccugcggcaacggcauccaggugagaaucaagcccggcagcgccaacaagcccaaggacgagcuggacuacgccaacgacaucgagaagaagaucugcaagauggagaagugcagcagcguguucaacguggugaacagcagcaucggccugggccccgugaccaacauggagaacaucaccagcggcuuccugggcccccugcuggugcugcaggccggcuucuuccugcugaccagaauccugaccaucccccagagccuggacagcugguggaccagccugaacuuccugggcggcagccccgugugccugggccagaacagccagagccccaccagcaaccacagccccaccagcugcccccccaucugccccggcuacagauggaugugccugagaagauucaucaucuuccuguucauccugcugcugugccugaucuuccugcuggugcugcuggacuaccagggcaugcugcccgugugcccccugauccccggcagcaccaccaccaacaccggccccugcaagaccugcaccacccccgcccagggcaacagcauguuccccagcugcugcugcaccaagcccaccgacggcaacugcaccugcauccccauccccagcagcugggccuucgccaaguaccugugggagugggccagcgugagauucagcuggcugagccugcuggugcccuucgugcagugguucgugggccugagccccaccguguggcugagcgccaucuggaugaugugguacuggggccccagccuguacagcaucgugagccccuucaucccccugcugcccaucuucuucugccuguggguguacaucugaggacuagucccuguucccagagcccacuuuuuuuucuuuuuuugaaauaaaauagccugucuuucagaucucaaaggcucuuuucagagccaccaaaaaaaaaaaaaaaaaaaaaaaaaaaaaaaaaaaaaaaaaaaaaaaaaaaaaaaaaaaaaaaaaaaaaaaaaaaaaaaaaaaaaaaaaaaaaaaaaaaaagaauu

SEQ ID NO: 7417 - RNA, 736 nt, Artificial Sequence
  mRNA Design a-1 (hSL-A100-N5) comprising derived and/or modified sequence from Pf(3D7)__XP_001351122.1__HsALB_Pf-CSP(19-152) (opt4)
aggagagucccgcagucggcguccagcggcucugcuuguucgugugugugucguugcaggccuuauucaagcuuaccaugaagugggugaccuucaucagccugcuguuccuguucagcagcgccuacagccuguuccaggaguaccagugcuacggcagcagcagcaacaccagagugcugaacgagcugaacuacgacaacgccggcaccaaccuguacaacgagcuggagaugaacuacuacggcaagcaggagaacugguacagccugaagaagaacagcagaagccugggcgagaacgacgacggcaacaacgaggacaacgagaagcugagaaagcccaagcacaagaagcugaagcagcccgccgacggcaaccccgaccccaacgccaaccccaacguggaccccaacgccaaccccaacguggaccccaacgccaaccccaacguggaccccaacgccaaccccaacgccaaccccaacgccaaccccaacgccaaccccaacgccaaccccaacgccaaccccugaggacuagucccuguucccagagcccacuuuuuuuucuuuuuuugaaauaaaauagccugucuuucagaucucaaaggcucuuuucagagccaccaaaaaaaaaaaaaaaaaaaaaaaaaaaaaaaaaaaaaaaaaaaaaaaaaaaaaaaaaaaaaaaaaaaaaaaaaaaaaaaaaaaaaaaaaaaaaaaaaaaaagaauu

SEQ ID NO: 7418 - RNA, 856 nt, Artificial Sequence
  mRNA Design a-1 (hSL-A100-N5) comprising derived and/or modified sequence from Pf(3D7)__XP_001351122.1__HsALB_Pf-CSP(19-192) (opt4)
aggagagucccgcagucggcguccagcggcucugcuuguucgugugugugucguugcaggccuuauucaagcuuaccaugaagugggugaccuucaucagccugcuguuccuguucagcagcgccuacagccuguuccaggaguaccagugcuacggcagcagcagcaacaccagagugcugaacgagcugaacuacgacaacgccggcaccaaccuguacaacgagcuggagaugaacuacuacggcaagcaggagaacugguacagccugaagaagaacagcagaagccugggcgagaacgacgacggcaacaacgaggacaacgagaagcugagaaagcccaagcacaagaagcugaagcagcccgccgacggcaaccccgaccccaacgccaaccccaacguggaccccaacgccaaccccaacguggaccccaacgccaaccccaacguggaccccaacgccaaccccaacgccaaccccaacgccaaccccaacgccaaccccaacgccaaccccaacgccaaccccaacgccaaccccaacgccaaccccaacgccaaccccaacgccaaccccaacgccaaccccaacgccaaccccaacgccaaccccaacgccaaccccaacgccaaccccaacgccaaccccugaggacuagucccuguucccagagcccacuuuuuuuucuuuuuuugaaauaaaauagccugucuuucagaucucaaaggcucuuuucagagccaccaaaaaaaaaaaaaaaaaaaaaaaaaaaaaaaaaaaaaaaaaaaaaaaaaaaaaaaaaaaaaaaaaaaaaaaaaaaaaaaaaaaaaaaaaaaaaaaaaaaaagaauu

SEQ ID NO: 7419 - RNA, 1096 nt, Artificial Sequence
  mRNA Design a-1 (hSL-A100-N5) comprising derived and/or modified sequence from Pf(3D7)__XP_001351122.1__HsALB_Pf-CSP(19-272) (opt4)
aggagagucccgcagucggcguccagcggcucugcuuguucgugugugugucguugcaggccuuauucaagcuuaccaugaagugggugaccuucaucagccugcuguuccuguucagcagcgccuacagccuguuccaggaguaccagugcuacggcagcagcagcaacaccagagugcugaacgagcugaacuacgacaacgccggcaccaaccuguacaacgagcuggagaugaacuacuacggcaagcaggagaacugguacagccugaagaagaacagcagaagccugggcgagaacgacgacggcaacaacgaggacaacgagaagcugagaaagcccaagcacaagaagcugaagcagcccgccgacggcaaccccgaccccaacgccaaccccaacguggaccccaacgccaaccccaacguggaccccaacgccaaccccaacguggaccccaacgccaaccccaacgccaaccccaacgccaaccccaacgccaaccccaacgccaaccccaacgccaaccccaacgccaaccccaacgccaaccccaacgccaaccccaacgccaaccccaacgccaaccccaacgccaaccccaacgccaaccccaacgccaaccccaacgccaaccccaacgccaaccccaacgccaaccccaacguggaccccaacgccaaccccaacgccaaccccaacgccaaccccaacgccaaccccaacgccaaccccaacgccaaccccaacgccaaccccaacgccaaccccaacgccaaccccaacgccaaccccaacgccaaccccaacgccaaccccaacgccaaccccaacgccaaccccaacgccaaccccaacgccaaccccaacgccaaccccaacgccaaccccugaggacuagucccuguucccagagcccacuuuuuuuucuuuuuuugaaauaaaauagccugucuuucagaucucaaaggcucuuuucagagccaccaaaaaaaaaaaaaaaaaaaaaaaaaaaaaaaaaaaaaaaaaaaaaaaaaaaaaaaaaaaaaaaaaaaaaaaaaaaaaaaaaaaaaaaaaaaaaaaaaaaaagaauu

SEQ ID NO: 7420 - RNA, 1258 nt, Artificial Sequence
  mRNA Design a-1 (hSL-A100-N5) comprising derived and/or modified sequence from Pf(3D7)__XP_001351122.1__HsALB_Pf-CSP(19-272)_L(AAY)_Pf-CSP(310-3 27)_L(AAY)_Pf-CSP(346-375) (opt4)
aggagagucccgcagucggcguccagcggcucugcuuguucgugugugugucguugcaggccuuauucaagcuuaccaugaagugggugaccuucaucagccugcuguuccuguucagcagcgccuacagccuguuccaggaguaccagugcuacggcagcagcagcaacaccagagugcugaacgagcugaacuacgacaacgccggcaccaaccuguacaacgagcuggagaugaacuacuacggcaagcaggagaacugguacagccugaagaagaacagcagaagccugggcgagaacgacgacggcaacaacgaggacaacgagaagcugagaaagcccaagcacaagaagcugaagcagcccgccgacggcaaccccgaccccaacgccaaccccaacguggaccccaacgccaaccccaacguggaccccaacgccaaccccaacguggaccccaacgccaaccccaacgccaaccccaacgccaaccccaacgccaaccccaacgccaaccccaacgccaaccccaacgccaaccccaacgccaaccccaacgccaaccccaacgccaaccccaacgccaaccccaacgccaaccccaacgccaaccccaacgccaaccccaacgccaaccccaacgccaaccccaacgccaaccccaacguggaccccaacgccaaccccaacgccaaccccaacgccaaccccaacgccaaccccaacgccaaccccaacgccaaccccaacgccaaccccaacgccaaccccaacgccaaccccaacgccaaccccaacgccaaccccaacgccaaccccaacgccaaccccaacgccaaccccaacgccaaccccaacgccaaccccaacgccaaccccaacgccaaccccgccgccuacgagcccagcgacaagcacaucaaggaguaccugaacaagauccagaacagccuggccgccuacaucaagcccggcagcgccaacaagcccaaggacgagcuggacuacgccaacgacaucgagaagaagaucugcaagauggagaagugcagcugaggacuagucccuguucccagagcccacuuuuuuuucuuuuuuugaaauaaaauagccugucuuucagaucucaaaggcucuuuucagagccaccaaaaaaaaaaaaaaaaaaaaaaaaaaaaaaaaaaaaaaaaaaaaaaaaaaaaaaaaaaaaaaaaaaaaaaaaaaaaaaaaaaaaaaaaaaaaaaaaaaaaagaauu

SEQ ID NO: 7421 - RNA, 1219 nt, Artificial Sequence
  mRNA Design a-1 (hSL-A100-N5) comprising derived and/or modified sequence from Pf(3D7)__XP_001351122.1__HsALB_Pf-CSP(19-272)_L(AAY)_Pf-CSP(346-3 65)_L(AAY)_P2 (opt4)
aggagagucccgcagucggcguccagcggcucugcuuguucgugugugugucguugcaggccuuauucaagcuuaccaugaagugggugaccuucaucagccugcuguuccuguucagcagcgccuacagccuguuccaggaguaccagugcuacggcagcagcagcaacaccagagugcugaacgagcugaacuacgacaacgccggcaccaaccuguacaacgagcuggagaugaacuacuacggcaagcaggagaacugguacagccugaagaagaacagcagaagccugggcgagaacgacgacggcaacaacgaggacaacgagaagcugagaaagcccaagcacaagaagcugaagcagcccgccgacggcaaccccgaccccaacgccaaccccaacguggaccccaacgccaaccccaacguggaccccaacgccaaccccaacguggaccccaacgccaaccccaacgccaaccccaacgccaaccccaacgccaaccccaacgccaaccccaacgccaaccccaacgccaaccccaacgccaaccccaacgccaaccccaacgccaaccccaacgccaaccccaacgccaaccccaacgccaaccccaacgccaaccccaacgccaaccccaacgccaaccccaacgccaaccccaacguggaccccaacgccaaccccaacgccaaccccaacgccaaccccaacgccaaccccaacgccaaccccaacgccaaccccaacgccaaccccaacgccaaccccaacgccaaccccaacgccaaccccaacgccaaccccaacgccaaccccaacgccaaccccaacgccaaccccaacgccaaccccaacgccaaccccaacgccaaccccaacgccaaccccgccgccuacaucaagcccggcagcgccaacaagcccaaggacgagcuggacuacgccaacgacaucgaggccgccuaccaguacaucaaggccaacagcaaguucaucggcaucaccgagcugugaggacuagucccuguucccagagcccacuuuuuuuucuuuuuuugaaauaaaauagccugucuuucagaucucaaaggcucuuuucagagccaccaaaaaaaaaaaaaaaaaaaaaaaaaaaaaaaaaaaaaaaaaaaaaaaaaaaaaaaaaaaaaaaaaaaaaaaaaaaaaaaaaaaaaaaaaaaaaaaaaaaaagaauu

SEQ ID NO: 7422 - RNA, 1213 nt, Artificial Sequence
  mRNA Design a-1 (hSL-A100-N5) comprising derived and/or modified sequence from Pf(3D7)__XP_001351122.1__HsALB_Pf-CSP(19-272)_L(AAY)_Pf-CSP(346-3 65)_L(AAY)_PADRE (opt4)
aggagagucccgcagucggcguccagcggcucugcuuguucgugugugugucguugcaggccuuauucaagcuuaccaugaagugggugaccuucaucagccugcuguuccuguucagcagcgccuacagccuguuccaggaguaccagugcuacggcagcagcagcaacaccagagugcugaacgagcugaacuacgacaacgccggcaccaaccuguacaacgagcuggagaugaacuacuacggcaagcaggagaacugguacagccugaagaagaacagcagaagccugggcgagaacgacgacggcaacaacgaggacaacgagaagcugagaaagcccaagcacaagaagcugaagcagcccgccgacggcaaccccgaccccaacgccaaccccaacguggaccccaacgccaaccccaacguggaccccaacgccaaccccaacguggaccccaacgccaaccccaacgccaaccccaacgccaaccccaacgccaaccccaacgccaaccccaacgccaaccccaacgccaaccccaacgccaaccccaacgccaaccccaacgccaaccccaacgccaaccccaacgccaaccccaacgccaaccccaacgccaaccccaacgccaaccccaacgccaaccccaacgccaaccccaacguggaccccaacgccaaccccaacgccaaccccaacgccaaccccaacgccaaccccaacgccaaccccaacgccaaccccaacgccaaccccaacgccaaccccaacgccaaccccaacgccaaccccaacgccaaccccaacgccaaccccaacgccaaccccaacgccaaccccaacgccaaccccaacgccaaccccaacgccaaccccaacgccaaccccgccgccuacaucaagcccggcagcgccaacaagcccaaggacgagcuggacuacgccaacgacaucgaggccgccuacgccaaguucguggccgccuggacccugaaggccgccgccugaggacuagucccuguucccagagcccacuuuuuuuucuuuuuuugaaauaaaauagccugucuuucagaucucaaaggcucuuuucagagccaccaaaaaaaaaaaaaaaaaaaaaaaaaaaaaaaaaaaaaaaaaaaaaaaaaaaaaaaaaaaaaaaaaaaaaaaaaaaaaaaaaaaaaaaaaaaaaaaaaaaaagaauu

SEQ ID NO: 7423 - RNA, 1270 nt, Artificial Sequence
  mRNA Design a-1 (hSL-A100-N5) comprising derived and/or modified sequence from Pf(3D7)__XP_001351122.1__HsALB_Pf-CSP(19-272)_L(G4S)_Pf-CSP(310-3 27)_L(G4S)_Pf-CSP(346-375) (opt4)
aggagagucccgcagucggcguccagcggcucugcuuguucgugugugugucguugcaggccuuauucaagcuuaccaugaagugggugaccuucaucagccugcuguuccuguucagcagcgccuacagccuguuccaggaguaccagugcuacggcagcagcagcaacaccagagugcugaacgagcugaacuacgacaacgccggcaccaaccuguacaacgagcuggagaugaacuacuacggcaagcaggagaacugguacagccugaagaagaacagcagaagccugggcgagaacgacgacggcaacaacgaggacaacgagaagcugagaaagcccaagcacaagaagcugaagcagcccgccgacggcaaccccgaccccaacgccaaccccaacguggaccccaacgccaaccccaacguggaccccaacgccaaccccaacguggaccccaacgccaaccccaacgccaaccccaacgccaaccccaacgccaaccccaacgccaaccccaacgccaaccccaacgccaaccccaacgccaaccccaacgccaaccccaacgccaaccccaacgccaaccccaacgccaaccccaacgccaaccccaacgccaaccccaacgccaaccccaacgccaaccccaacgccaaccccaacguggaccccaacgccaaccccaacgccaaccccaacgccaaccccaacgccaaccccaacgccaaccccaacgccaaccccaacgccaaccccaacgccaaccccaacgccaaccccaacgccaaccccaacgccaaccccaacgccaaccccaacgccaaccccaacgccaaccccaacgccaaccccaacgccaaccccaacgccaaccccaacgccaaccccggcggcggcggcagcgagcccagcgacaagcacaucaaggaguaccugaacaagauccagaacagccugggcggcggcggcagcaucaagcccggcagcgccaacaagcccaaggacgagcuggacuacgccaacgacaucgagaagaagaucugcaagauggagaagugcagcugaggacuagucccuguucccagagcccacuuuuuuuucuuuuuuugaaauaaaauagccugucuuucagaucucaaaggcucuuuucagagccaccaaaaaaaaaaaaaaaaaaaaaaaaaaaaaaaaaaaaaaaaaaaaaaaaaaaaaaaaaaaaaaaaaaaaaaaaaaaaaaaaaaaaaaaaaaaaaaaaaaaaagaauu

SEQ ID NO: 7424 - RNA, 1255 nt, Artificial Sequence
  mRNA Design a-1 (hSL-A100-N5) comprising derived and/or modified sequence from Pf(3D7)__XP_001351122.1__HsALB_Pf-CSP(19-272)_L(G4S)_Pf-CSP(310-3 27)_Pf-CSP(346-375) (opt4)
aggagagucccgcagucggcguccagcggcucugcuuguucgugugugugucguugcaggccuuauucaagcuuaccaugaagugggugaccuucaucagccugcuguuccuguucagcagcgccuacagccuguuccaggaguaccagugcuacggcagcagcagcaacaccagagugcugaacgagcugaacuacgacaacgccggcaccaaccuguacaacgagcuggagaugaacuacuacggcaagcaggagaacugguacagccugaagaagaacagcagaagccugggcgagaacgacgacggcaacaacgaggacaacgagaagcugagaaagcccaagcacaagaagcugaagcagcccgccgacggcaaccccgaccccaacgccaaccccaacguggaccccaacgccaaccccaacguggaccccaacgccaaccccaacguggaccccaacgccaaccccaacgccaaccccaacgccaaccccaacgccaaccccaacgccaaccccaacgccaaccccaacgccaaccccaacgccaaccccaacgccaaccccaacgccaaccccaacgccaaccccaacgccaaccccaacgccaaccccaacgccaaccccaacgccaaccccaacgccaaccccaacgccaaccccaacguggaccccaacgccaaccccaacgccaaccccaacgccaaccccaacgccaaccccaacgccaaccccaacgccaaccccaacgccaaccccaacgccaaccccaacgccaaccccaacgccaaccccaacgccaaccccaacgccaaccccaacgccaaccccaacgccaaccccaacgccaaccccaacgccaaccccaacgccaaccccaacgccaaccccggcggcggcggcagcgagcccagcgacaagcacaucaaggaguaccugaacaagauccagaacagccugaucaagcccggcagcgccaacaagcccaaggacgagcuggacuacgccaacgacaucgagaagaagaucugcaagauggagaagugcagcugaggacuagucccuguucccagagcccacuuuuuuuucuuuuuuugaaauaaaauagccugucuuucagaucucaaaggcucuuuucagagccaccaaaaaaaaaaaaaaaaaaaaaaaaaaaaaaaaaaaaaaaaaaaaaaaaaaaaaaaaaaaaaaaaaaaaaaaaaaaaaaaaaaaaaaaaaaaaaaaaaaaaagaauu

SEQ ID NO: 7425 - RNA, 1255 nt, Artificial Sequence
  mRNA Design a-1 (hSL-A100-N5) comprising derived and/or modified sequence from Pf(3D7)__XP_001351122.1__HsALB_Pf-CSP(19-325) (opt4)
aggagagucccgcagucggcguccagcggcucugcuuguucgugugugugucguugcaggccuuauucaagcuuaccaugaagugggugaccuucaucagccugcuguuccuguucagcagcgccuacagccuguuccaggaguaccagugcuacggcagcagcagcaacaccagagugcugaacgagcugaacuacgacaacgccggcaccaaccuguacaacgagcuggagaugaacuacuacggcaagcaggagaacugguacagccugaagaagaacagcagaagccugggcgagaacgacgacggcaacaacgaggacaacgagaagcugagaaagcccaagcacaagaagcugaagcagcccgccgacggcaaccccgaccccaacgccaaccccaacguggaccccaacgccaaccccaacguggaccccaacgccaaccccaacguggaccccaacgccaaccccaacgccaaccccaacgccaaccccaacgccaaccccaacgccaaccccaacgccaaccccaacgccaaccccaacgccaaccccaacgccaaccccaacgccaaccccaacgccaaccccaacgccaaccccaacgccaaccccaacgccaaccccaacgccaaccccaacgccaaccccaacgccaaccccaacguggaccccaacgccaaccccaacgccaaccccaacgccaaccccaacgccaaccccaacgccaaccccaacgccaaccccaacgccaaccccaacgccaaccccaacgccaaccccaacgccaaccccaacgccaaccccaacgccaaccccaacgccaaccccaacgccaaccccaacgccaaccccaacgccaaccccaacgccaaccccaacgccaaccccaacaagaacaaccagggcaacggccagggccacaacaugcccaacgaccccaacagaaacguggacgagaacgccaacgccaacagcgccgugaagaacaacaacaacgaggagcccagcgacaagcacaucaaggaguaccugaacaagauccagaacugaggacuagucccuguucccagagcccacuuuuuuuucuuuuuuugaaauaaaauagccugucuuucagaucucaaaggcucuuuucagagccaccaaaaaaaaaaaaaaaaaaaaaaaaaaaaaaaaaaaaaaaaaaaaaaaaaaaaaaaaaaaaaaaaaaaaaaaaaaaaaaaaaaaaaaaaaaaaaaaaaaaaagaauu

SEQ ID NO: 7426 - RNA, 1432 nt, Artificial Sequence
  mRNA Design a-1 (hSL-A100-N5) comprising derived and/or modified sequence from Pf(3D7)__XP_001351122.1__HsALB_Pf-CSP(19-384) (opt4)
aggagagucccgcagucggcguccagcggcucugcuuguucgugugugugucguugcaggccuuauucaagcuuaccaugaagugggugaccuucaucagccugcuguuccuguucagcagcgccuacagccuguuccaggaguaccagugcuacggcagcagcagcaacaccagagugcugaacgagcugaacuacgacaacgccggcaccaaccuguacaacgagcuggagaugaacuacuacggcaagcaggagaacugguacagccugaagaagaacagcagaagccugggcgagaacgacgacggcaacaacgaggacaacgagaagcugagaaagcccaagcacaagaagcugaagcagcccgccgacggcaaccccgaccccaacgccaaccccaacguggaccccaacgccaaccccaacguggaccccaacgccaaccccaacguggaccccaacgccaaccccaacgccaaccccaacgccaaccccaacgccaaccccaacgccaaccccaacgccaaccccaacgccaaccccaacgccaaccccaacgccaaccccaacgccaaccccaacgccaaccccaacgccaaccccaacgccaaccccaacgccaaccccaacgccaaccccaacgccaaccccaacgccaaccccaacguggaccccaacgccaaccccaacgccaaccccaacgccaaccccaacgccaaccccaacgccaaccccaacgccaaccccaacgccaaccccaacgccaaccccaacgccaaccccaacgccaaccccaacgccaaccccaacgccaaccccaacgccaaccccaacgccaaccccaacgccaaccccaacgccaaccccaacgccaaccccaacgccaaccccaacaagaacaaccagggcaacggccagggccacaacaugcccaacgaccccaacagaaacguggacgagaacgccaacgccaacagcgccgugaagaacaacaacaacgaggagcccagcgacaagcacaucaaggaguaccugaacaagauccagaacagccugagcaccgaguggagccccugcagcgugaccugcggcaacggcauccaggugagaaucaagcccggcagcgccaacaagcccaaggacgagcuggacuacgccaacgacaucgagaagaagaucugcaagauggagaagugcagcagcguguucaacguggugaacagcagcugaggacuagucccuguucccagagcccacuuuuuuuucuuuuuuugaaauaaaauagccugucuuucagaucucaaaggcucuuuucagagccaccaaaaaaaaaaaaaaaaaaaaaaaaaaaaaaaaaaaaaaaaaaaaaaaaaaaaaaaaaaaaaaaaaaaaaaaaaaaaaaaaaaaaaaaaaaaaaaaaaaaaagaauu

SEQ ID NO: 7427 - RNA, 1570 nt, Artificial Sequence
  mRNA Design a-1 (hSL-A100-N5) comprising derived and/or modified sequence from Pf(3D7)__XP_001351122.1__HsALB_Pf-CSP(19-384)_TM domain HA (opt4)
aggagagucccgcagucggcguccagcggcucugcuuguucgugugugugucguugcaggccuuauucaagcuuaccaugaagugggugaccuucaucagccugcuguuccuguucagcagcgccuacagccuguuccaggaguaccagugcuacggcagcagcagcaacaccagagugcugaacgagcugaacuacgacaacgccggcaccaaccuguacaacgagcuggagaugaacuacuacggcaagcaggagaacugguacagccugaagaagaacagcagaagccugggcgagaacgacgacggcaacaacgaggacaacgagaagcugagaaagcccaagcacaagaagcugaagcagcccgccgacggcaaccccgaccccaacgccaaccccaacguggaccccaacgccaaccccaacguggaccccaacgccaaccccaacguggaccccaacgccaaccccaacgccaaccccaacgccaaccccaacgccaaccccaacgccaaccccaacgccaaccccaacgccaaccccaacgccaaccccaacgccaaccccaacgccaaccccaacgccaaccccaacgccaaccccaacgccaaccccaacgccaaccccaacgccaaccccaacgccaaccccaacgccaaccccaacguggaccccaacgccaaccccaacgccaaccccaacgccaaccccaacgccaaccccaacgccaaccccaacgccaaccccaacgccaaccccaacgccaaccccaacgccaaccccaacgccaaccccaacgccaaccccaacgccaaccccaacgccaaccccaacgccaaccccaacgccaaccccaacgccaaccccaacgccaaccccaacgccaaccccaacaagaacaaccagggcaacggccagggccacaacaugcccaacgaccccaacagaaacguggacgagaacgccaacgccaacagcgccgugaagaacaacaacaacgaggagcccagcgacaagcacaucaaggaguaccugaacaagauccagaacagccugagcaccgaguggagccccugcagcgugaccugcggcaacggcauccaggugagaaucaagcccggcagcgccaacaagcccaaggacgagcuggacuacgccaacgacaucgagaagaagaucugcaagauggagaagugcagcagcguguucaacguggugaacagcagcaagcuggagagcaccagaaucuaccagauccuggccaucuacagcaccguggccagcagccuggugcugguggugagccugggcgccaucagcuucuggaugugcagcaacggcagccugcagugcagaaucugcaucugaggacuagucccuguucccagagcccacuuuuuuuucuuuuuuugaaauaaaauagccugucuuucagaucucaaaggcucuuuucagagccaccaaaaaaaaaaaaaaaaaaaaaaaaaaaaaaaaaaaaaaaaaaaaaaaaaaaaaaaaaaaaaaaaaaaaaaaaaaaaaaaaaaaaaaaaaaaaaaaaaaaaagaauu

SEQ ID NO: 7428 - RNA, 1282 nt, Artificial Sequence
  mRNA Design a-1 (hSL-A100-N5) comprising derived and/or modified sequence from Pf(3D7)__XP_001351122.1__HsALB_Pf-CSP(82-397) (opt4)
aggagagucccgcagucggcguccagcggcucugcuuguucgugugugugucguugcaggccuuauucaagcuuaccaugaagugggugaccuucaucagccugcuguuccuguucagcagcgccuacagcgacaacgagaagcugagaaagcccaagcacaagaagcugaagcagcccgccgacggcaaccccgaccccaacgccaaccccaacguggaccccaacgccaaccccaacguggaccccaacgccaaccccaacguggaccccaacgccaaccccaacgccaaccccaacgccaaccccaacgccaaccccaacgccaaccccaacgccaaccccaacgccaaccccaacgccaaccccaacgccaaccccaacgccaaccccaacgccaaccccaacgccaaccccaacgccaaccccaacgccaaccccaacgccaaccccaacgccaaccccaacgccaaccccaacguggaccccaacgccaaccccaacgccaaccccaacgccaaccccaacgccaaccccaacgccaaccccaacgccaaccccaacgccaaccccaacgccaaccccaacgccaaccccaacgccaaccccaacgccaaccccaacgccaaccccaacgccaaccccaacgccaaccccaacgccaaccccaacgccaaccccaacgccaaccccaacgccaaccccaacaagaacaaccagggcaacggccagggccacaacaugcccaacgaccccaacagaaacguggacgagaacgccaacgccaacagcgccgugaagaacaacaacaacgaggagcccagcgacaagcacaucaaggaguaccugaacaagauccagaacagccugagcaccgaguggagccccugcagcgugaccugcggcaacggcauccaggugagaaucaagcccggcagcgccaacaagcccaaggacgagcuggacuacgccaacgacaucgagaagaagaucugcaagauggagaagugcagcagcguguucaacguggugaacagcagcaucggccugaucauggugcugagcuuccuguuccugaacugaggacuagucccuguucccagagcccacuuuuuuuucuuuuuuugaaauaaaauagccugucuuucagaucucaaaggcucuuuucagagccaccaaaaaaaaaaaaaaaaaaaaaaaaaaaaaaaaaaaaaaaaaaaaaaaaaaaaaaaaaaaaaaaaaaaaaaaaaaaaaaaaaaaaaaaaaaaaaaaaaaaaagaauu

SEQ ID NO: 7429 - RNA, 634 nt, Artificial Sequence
  mRNA Design a-1 (hSL-A100-N5) comprising derived and/or modified sequence from Pf(3D7)__XP_001351122.1__HsALB_Pf-CSP(93-192) (opt4)
aggagagucccgcagucggcguccagcggcucugcuuguucgugugugugucguugcaggccuuauucaagcuuaccaugaagugggugaccuucaucagccugcuguuccuguucagcagcgccuacagcaagcugaagcagcccgccgacggcaaccccgaccccaacgccaaccccaacguggaccccaacgccaaccccaacguggaccccaacgccaaccccaacguggaccccaacgccaaccccaacgccaaccccaacgccaaccccaacgccaaccccaacgccaaccccaacgccaaccccaacgccaaccccaacgccaaccccaacgccaaccccaacgccaaccccaacgccaaccccaacgccaaccccaacgccaaccccaacgccaaccccaacgccaaccccaacgccaaccccugaggacuagucccuguucccagagcccacuuuuuuuucuuuuuuugaaauaaaauagccugucuuucagaucucaaaggcucuuuucagagccaccaaaaaaaaaaaaaaaaaaaaaaaaaaaaaaaaaaaaaaaaaaaaaaaaaaaaaaaaaaaaaaaaaaaaaaaaaaaaaaaaaaaaaaaaaaaaaaaaaaaaagaauu

SEQ ID NO: 7430 - RNA, 874 nt, Artificial Sequence
  mRNA Design a-1 (hSL-A100-N5) comprising derived and/or modified sequence from Pf(3D7)__XP_001351122.1__HsALB_Pf-CSP(93-272) (opt4)
aggagagucccgcagucggcguccagcggcucugcuuguucgugugugugucguugcaggccuuauucaagcuuaccaugaagugggugaccuucaucagccugcuguuccuguucagcagcgccuacagcaagcugaagcagcccgccgacggcaaccccgaccccaacgccaaccccaacguggaccccaacgccaaccccaacguggaccccaacgccaaccccaacguggaccccaacgccaaccccaacgccaaccccaacgccaaccccaacgccaaccccaacgccaaccccaacgccaaccccaacgccaaccccaacgccaaccccaacgccaaccccaacgccaaccccaacgccaaccccaacgccaaccccaacgccaaccccaacgccaaccccaacgccaaccccaacgccaaccccaacgccaaccccaacguggaccccaacgccaaccccaacgccaaccccaacgccaaccccaacgccaaccccaacgccaaccccaacgccaaccccaacgccaaccccaacgccaaccccaacgccaaccccaacgccaaccccaacgccaaccccaacgccaaccccaacgccaaccccaacgccaaccccaacgccaaccccaacgccaaccccaacgccaaccccaacgccaaccccugaggacuagucccuguucccagagcccacuuuuuuuucuuuuuuugaaauaaaauagccugucuuucagaucucaaaggcucuuuucagagccaccaaaaaaaaaaaaaaaaaaaaaaaaaaaaaaaaaaaaaaaaaaaaaaaaaaaaaaaaaaaaaaaaaaaaaaaaaaaaaaaaaaaaaaaaaaaaaaaaaaaaagaauu

SEQ ID NO: 7431 - RNA, 1249 nt, Artificial Sequence
  mRNA Design a-1 (hSL-A100-N5) comprising derived and/or modified sequence from Pf(3D7)__XP_001351122.1__HsALB_Pf-CSP(93-397) (opt4)
aggagagucccgcagucggcguccagcggcucugcuuguucgugugugugucguugcaggccuuauucaagcuuaccaugaagugggugaccuucaucagccugcuguuccuguucagcagcgccuacagcaagcugaagcagcccgccgacggcaaccccgaccccaacgccaaccccaacguggaccccaacgccaaccccaacguggaccccaacgccaaccccaacguggaccccaacgccaaccccaacgccaaccccaacgccaaccccaacgccaaccccaacgccaaccccaacgccaaccccaacgccaaccccaacgccaaccccaacgccaaccccaacgccaaccccaacgccaaccccaacgccaaccccaacgccaaccccaacgccaaccccaacgccaaccccaacgccaaccccaacgccaaccccaacguggaccccaacgccaaccccaacgccaaccccaacgccaaccccaacgccaaccccaacgccaaccccaacgccaaccccaacgccaaccccaacgccaaccccaacgccaaccccaacgccaaccccaacgccaaccccaacgccaaccccaacgccaaccccaacgccaaccccaacgccaaccccaacgccaaccccaacgccaaccccaacgccaaccccaacaagaacaaccagggcaacggccagggccacaacaugcccaacgaccccaacagaaacguggacgagaacgccaacgccaacagcgccgugaagaacaacaacaacgaggagcccagcgacaagcacaucaaggaguaccugaacaagauccagaacagccugagcaccgaguggagccccugcagcgugaccugcggcaacggcauccaggugagaaucaagcccggcagcgccaacaagcccaaggacgagcuggacuacgccaacgacaucgagaagaagaucugcaagauggagaagugcagcagcguguucaacguggugaacagcagcaucggccugaucauggugcugagcuuccuguuccugaacugaggacuagucccuguucccagagcccacuuuuuuuucuuuuuuugaaauaaaauagccugucuuucagaucucaaaggcucuuuucagagccaccaaaaaaaaaaaaaaaaaaaaaaaaaaaaaaaaaaaaaaaaaaaaaaaaaaaaaaaaaaaaaaaaaaaaaaaaaaaaaaaaaaaaaaaaaaaaaaaaaaaaagaauu

SEQ ID NO: 7432 - RNA, 619 nt, Artificial Sequence
  mRNA Design a-1 (hSL-A100-N5) comprising derived and/or modified sequence from Pf(3D7)__XP_001351122.1__HsALB_Pf-CSP(98-192) (opt4)
aggagagucccgcagucggcguccagcggcucugcuuguucgugugugugucguugcaggccuuauucaagcuuaccaugaagugggugaccuucaucagccugcuguuccuguucagcagcgccuacagcgccgacggcaaccccgaccccaacgccaaccccaacguggaccccaacgccaaccccaacguggaccccaacgccaaccccaacguggaccccaacgccaaccccaacgccaaccccaacgccaaccccaacgccaaccccaacgccaaccccaacgccaaccccaacgccaaccccaacgccaaccccaacgccaaccccaacgccaaccccaacgccaaccccaacgccaaccccaacgccaaccccaacgccaaccccaacgccaaccccaacgccaaccccugaggacuagucccuguucccagagcccacuuuuuuuucuuuuuuugaaauaaaauagccugucuuucagaucucaaaggcucuuuucagagccaccaaaaaaaaaaaaaaaaaaaaaaaaaaaaaaaaaaaaaaaaaaaaaaaaaaaaaaaaaaaaaaaaaaaaaaaaaaaaaaaaaaaaaaaaaaaaaaaaaaaaagaauu

SEQ ID NO: 7433 - RNA, 859 nt, Artificial Sequence
  mRNA Design a-1 (hSL-A100-N5) comprising derived and/or modified sequence from Pf(3D7)__XP_001351122.1__HsALB_Pf-CSP(98-272) (opt4)
aggagagucccgcagucggcguccagcggcucugcuuguucgugugugugucguugcaggccuuauucaagcuuaccaugaagugggugaccuucaucagccugcuguuccuguucagcagcgccuacagcgccgacggcaaccccgaccccaacgccaaccccaacguggaccccaacgccaaccccaacguggaccccaacgccaaccccaacguggaccccaacgccaaccccaacgccaaccccaacgccaaccccaacgccaaccccaacgccaaccccaacgccaaccccaacgccaaccccaacgccaaccccaacgccaaccccaacgccaaccccaacgccaaccccaacgccaaccccaacgccaaccccaacgccaaccccaacgccaaccccaacgccaaccccaacgccaaccccaacguggaccccaacgccaaccccaacgccaaccccaacgccaaccccaacgccaaccccaacgccaaccccaacgccaaccccaacgccaaccccaacgccaaccccaacgccaaccccaacgccaaccccaacgccaaccccaacgccaaccccaacgccaaccccaacgccaaccccaacgccaaccccaacgccaaccccaacgccaaccccaacgccaaccccugaggacuagucccuguucccagagcccacuuuuuuuucuuuuuuugaaauaaaauagccugucuuucagaucucaaaggcucuuuucagagccaccaaaaaaaaaaaaaaaaaaaaaaaaaaaaaaaaaaaaaaaaaaaaaaaaaaaaaaaaaaaaaaaaaaaaaaaaaaaaaaaaaaaaaaaaaaaaaaaaaaaaagaauu

SEQ ID NO: 7434 - RNA, 1165 nt, Artificial Sequence
  mRNA Design a-1 (hSL-A100-N5) comprising derived and/or modified sequence from Pf(3D7)__XP_001351122.1__HsALB_Pf-CSP(98-374) (opt4)
aggagagucccgcagucggcguccagcggcucugcuuguucgugugugugucguugcaggccuuauucaagcuuaccaugaagugggugaccuucaucagccugcuguuccuguucagcagcgccuacagcgccgacggcaaccccgaccccaacgccaaccccaacguggaccccaacgccaaccccaacguggaccccaacgccaaccccaacguggaccccaacgccaaccccaacgccaaccccaacgccaaccccaacgccaaccccaacgccaaccccaacgccaaccccaacgccaaccccaacgccaaccccaacgccaaccccaacgccaaccccaacgccaaccccaacgccaaccccaacgccaaccccaacgccaaccccaacgccaaccccaacgccaaccccaacgccaaccccaacguggaccccaacgccaaccccaacgccaaccccaacgccaaccccaacgccaaccccaacgccaaccccaacgccaaccccaacgccaaccccaacgccaaccccaacgccaaccccaacgccaaccccaacgccaaccccaacgccaaccccaacgccaaccccaacgccaaccccaacgccaaccccaacgccaaccccaacgccaaccccaacgccaaccccaacaagaacaaccagggcaacggccagggccacaacaugcccaacgaccccaacagaaacguggacgagaacgccaacgccaacagcgccgugaagaacaacaacaacgaggagcccagcgacaagcacaucaaggaguaccugaacaagauccagaacagccugagcaccgaguggagccccugcagcgugaccugcggcaacggcauccaggugagaaucaagcccggcagcgccaacaagcccaaggacgagcuggacuacgccaacgacaucgagaagaagaucugcaagauggagaagugcugaggacuagucccuguucccagagcccacuuuuuuuucuuuuuuugaaauaaaauagccugucuuucagaucucaaaggcucuuuucagagccaccaaaaaaaaaaaaaaaaaaaaaaaaaaaaaaaaaaaaaaaaaaaaaaaaaaaaaaaaaaaaaaaaaaaaaaaaaaaaaaaaaaaaaaaaaaaaaaaaaaaaagaauu

SEQ ID NO: 7435 - RNA, 1234 nt, Artificial Sequence
  mRNA Design a-1 (hSL-A100-N5) comprising derived and/or modified sequence from Pf(3D7)__XP_001351122.1__HsALB_Pf-CSP(98-397) (opt4)
aggagagucccgcagucggcguccagcggcucugcuuguucgugugugugucguugcaggccuuauucaagcuuaccaugaagugggugaccuucaucagccugcuguuccuguucagcagcgccuacagcgccgacggcaaccccgaccccaacgccaaccccaacguggaccccaacgccaaccccaacguggaccccaacgccaaccccaacguggaccccaacgccaaccccaacgccaaccccaacgccaaccccaacgccaaccccaacgccaaccccaacgccaaccccaacgccaaccccaacgccaaccccaacgccaaccccaacgccaaccccaacgccaaccccaacgccaaccccaacgccaaccccaacgccaaccccaacgccaaccccaacgccaaccccaacgccaaccccaacguggaccccaacgccaaccccaacgccaaccccaacgccaaccccaacgccaaccccaacgccaaccccaacgccaaccccaacgccaaccccaacgccaaccccaacgccaaccccaacgccaaccccaacgccaaccccaacgccaaccccaacgccaaccccaacgccaaccccaacgccaaccccaacgccaaccccaacgccaaccccaacgccaaccccaacaagaacaaccagggcaacggccagggccacaacaugcccaacgaccccaacagaaacguggacgagaacgccaacgccaacagcgccgugaagaacaacaacaacgaggagcccagcgacaagcacaucaaggaguaccugaacaagauccagaacagccugagcaccgaguggagccccugcagcgugaccugcggcaacggcauccaggugagaaucaagcccggcagcgccaacaagcccaaggacgagcuggacuacgccaacgacaucgagaagaagaucugcaagauggagaagugcagcagcguguucaacguggugaacagcagcaucggccugaucauggugcugagcuuccuguuccugaacugaggacuagucccuguucccagagcccacuuuuuuuucuuuuuuugaaauaaaauagccugucuuucagaucucaaaggcucuuuucagagccaccaaaaaaaaaaaaaaaaaaaaaaaaaaaaaaaaaaaaaaaaaaaaaaaaaaaaaaaaaaaaaaaaaaaaaaaaaaaaaaaaaaaaaaaaaaaaaaaaaaaaagaauu

SEQ ID NO: 7436 - RNA, 1561 nt, Artificial Sequence
  mRNA Design a-1 (hSL-A100-N5) comprising derived and/or modified sequence from Pf(3D7)__XP_001351122.1__HsALB_Pf-CSP(199-377)_L(PVTN)_HBsAg (opt4)
aggagagucccgcagucggcguccagcggcucugcuuguucgugugugugucguugcaggccuuauucaagcuuaccaugaagugggugaccuucaucagccugcuguuccuguucagcagcgccuacagcgaccccaacgccaaccccaacgccaaccccaacgccaaccccaacgccaaccccaacgccaaccccaacgccaaccccaacgccaaccccaacgccaaccccaacgccaaccccaacgccaaccccaacgccaaccccaacgccaaccccaacgccaaccccaacgccaaccccaacgccaaccccaacgccaaccccaacgccaaccccaacgccaaccccaacaagaacaaccagggcaacggccagggccacaacaugcccaacgaccccaacagaaacguggacgagaacgccaacgccaacagcgccgugaagaacaacaacaacgaggagcccagcgacaagcacaucaaggaguaccugaacaagauccagaacagccugagcaccgaguggagccccugcagcgugaccugcggcaacggcauccaggugagaaucaagcccggcagcgccaacaagcccaaggacgagcuggacuacgccaacgacaucgagaagaagaucugcaagauggagaagugcagcagcgugcccgugaccaacauggagaacaucaccagcggcuuccugggcccccugcuggugcugcaggccggcuucuuccugcugaccagaauccugaccaucccccagagccuggacagcugguggaccagccugaacuuccugggcggcagccccgugugccugggccagaacagccagagccccaccagcaaccacagccccaccagcugcccccccaucugccccggcuacagauggaugugccugagaagauucaucaucuuccuguucauccugcugcugugccugaucuuccugcuggugcugcuggacuaccagggcaugcugcccgugugcccccugauccccggcagcaccaccaccaacaccggccccugcaagaccugcaccacccccgcccagggcaacagcauguuccccagcugcugcugcaccaagcccaccgacggcaacugcaccugcauccccauccccagcagcugggccuucgccaaguaccugugggagugggccagcgugagauucagcuggcugagccugcuggugcccuucgugcagugguucgugggccugagccccaccguguggcugagcgccaucuggaugaugugguacuggggccccagccuguacagcaucgugagccccuucaucccccugcugcccaucuucuucugccuguggguguacaucugaggacuagucccuguucccagagcccacuuuuuuuucuuuuuuugaaauaaaauagccugucuuucagaucucaaaggcucuuuucagagccaccaaaaaaaaaaaaaaaaaaaaaaaaaaaaaaaaaaaaaaaaaaaaaaaaaaaaaaaaaaaaaaaaaaaaaaaaaaaaaaaaaaaaaaaaaaaaaaaaaaaaagaauu

SEQ ID NO: 7437 - RNA, 1471 nt, Artificial Sequence
  mRNA Design a-1 (hSL-A100-N5) comprising derived and/or modified sequence from Pf(3D7)__XP_001351122.1__Pf-CSP (opt5)
aggagagucccgcagucggcguccagcggcucugcuuguucgugugugugucguugcaggccuuauucaagcuuaccaugaugagaaagcuggccauccucagcguguccucuuuccuguuugucgaggcucuuuuccaggaauaccaaugcuauggcagcuccucuaacacccggguucugaaugagcucaacuacgacaaugccgggacaaaccuguauaaugaacuugagaugaacuacuauggaaaacaggaaaauugguacagccugaagaaaaacucccgcucucucggcgagaaugaugacgggaacaaugaggauaacgaaaagcugagaaaacccaagcacaagaaacugaagcagccugcggacggaaauccggaucccaacgcuaauccuaacguggaccccaacgccaauccuaacguggaucccaaugccaacccuaaugucgacccgaacgcuaaucccaacgccaauccuaacgcuaaucccaacgccaauccuaacgcgaaucccaacgccaacccgaaugcuaacccuaaugccaaccccaaugcuaacccuaaugccaaccccaaugcgaaccccaaugccaacccuaaugcuaacccgaaugccaaccccaacgcuaauccuaacgccaaucccaacgccaauccuaacguggaucccaaugcuaacccgaaugcgaacccuaaugccaaccccaaugcuaacccuaaugccaaccccaacgccaauccuaacgcuaaucccaacgccaauccgaacgcgaauccuaacgcuaaucccaacgccaaucccaacgccaauccuaacgcuaauccgaacgccaaucccaacgcuaacccuaaugccaaccccaaugcgaacccuaaugccaaccccaauaaaaacaaucagggcaacgggcaaggacauaauaugccuaacgaccccaaucggaacguugaugagaaugcuaacgccaacagcgcugugaagaauaacaauaacgaggaaccguccgacaaacacauuaaggaguaucucaauaagauccagaacagccugucuacggaaugguccccuuguagcgugaccugcggcaauggcauucagguccgcaucaaacccgggucugccaacaagccuaaagaugagcuugacuacgcgaaugacauugaaaagaaaaucuguaagauggagaaaugcuccagcguuuuuaacguggucaauucuuccaucggacugauuauggugcucagcuuccuguuucuuaacugaggacuagucccuguucccagagcccacuuuuuuuucuuuuuuugaaauaaaauagccugucuuucagaucucaaaggcucuuuucagagccaccaaaaaaaaaaaaaaaaaaaaaaaaaaaaaaaaaaaaaaaaaaaaaaaaaaaaaaaaaaaaaaaaaaaaaaaaaaaaaaaaaaaaaaaaaaaaaaaaaaaaagaauu

SEQ ID NO: 7438 - RNA, 1402 nt, Artificial Sequence
  mRNA Design a-1 (hSL-A100-N5) comprising derived and/or modified sequence from Pf(3D7)__XP_001351122.1__Pf-CSP(1-374) (opt5)
aggagagucccgcagucggcguccagcggcucugcuuguucgugugugugucguugcaggccuuauucaagcuuaccaugaugagaaagcuggccauccucagcguguccucuuuccuguuugucgaggcucuuuuccaggaauaccaaugcuauggcagcuccucuaacacccggguucugaaugagcucaacuacgacaaugccgggacaaaccuguauaaugaacuugagaugaacuacuauggaaaacaggaaaauugguacagccugaagaaaaacucccgcucucucggcgagaaugaugacgggaacaaugaggauaacgaaaagcugagaaaacccaagcacaagaaacugaagcagccugcggacggaaauccggaucccaacgcuaauccuaacguggaccccaacgccaauccuaacguggaucccaaugccaacccuaaugucgacccgaacgcuaaucccaacgccaauccuaacgcuaaucccaacgccaauccuaacgcgaaucccaacgccaacccgaaugcuaacccuaaugccaaccccaaugcuaacccuaaugccaaccccaaugcgaaccccaaugccaacccuaaugcuaacccgaaugccaaccccaacgcuaauccuaacgccaaucccaacgccaauccuaacguggaucccaaugcuaacccgaaugcgaacccuaaugccaaccccaaugcuaacccuaaugccaaccccaacgccaauccuaacgcuaaucccaacgccaauccgaacgcgaauccuaacgcuaaucccaacgccaaucccaacgccaauccuaacgcuaauccgaacgccaaucccaacgcuaacccuaaugccaaccccaaugcgaacccuaaugccaaccccaauaaaaacaaucagggcaacgggcaaggacauaauaugccuaacgaccccaaucggaacguugaugagaaugcuaacgccaacagcgcugugaagaauaacaauaacgaggaaccguccgacaaacacauuaaggaguaucucaauaagauccagaacagccugucuacggaaugguccccuuguagcgugaccugcggcaauggcauucagguccgcaucaaacccgggucugccaacaagccuaaagaugagcuugacuacgcgaaugacauugaaaagaaaaucuguaagauggagaaaugcugaggacuagucccuguucccagagcccacuuuuuuuucuuuuuuugaaauaaaauagccugucuuucagaucucaaaggcucuuuucagagccaccaaaaaaaaaaaaaaaaaaaaaaaaaaaaaaaaaaaaaaaaaaaaaaaaaaaaaaaaaaaaaaaaaaaaaaaaaaaaaaaaaaaaaaaaaaaaaaaaaaaaagaauu

SEQ ID NO: 7439 - RNA, 1255 nt, Artificial Sequence
  mRNA Design a-1 (hSL-A100-N5) comprising derived and/or modified sequence from Pf(3D7)__XP_001351122.1__Pf-CSP(1-325) (opt5)
aggagagucccgcagucggcguccagcggcucugcuuguucgugugugugucguugcaggccuuauucaagcuuaccaugaugagaaagcuggccauccucagcguguccucuuuccuguuugucgaggcucuuuuccaggaauaccaaugcuauggcagcuccucuaacacccggguucugaaugagcucaacuacgacaaugccgggacaaaccuguauaaugaacuugagaugaacuacuauggaaaacaggaaaauugguacagccugaagaaaaacucccgcucucucggcgagaaugaugacgggaacaaugaggauaacgaaaagcugagaaaacccaagcacaagaaacugaagcagccugcggacggaaauccggaucccaacgcuaauccuaacguggaccccaacgccaauccuaacguggaucccaaugccaacccuaaugucgacccgaacgcuaaucccaacgccaauccuaacgcuaaucccaacgccaauccuaacgcgaaucccaacgccaacccgaaugcuaacccuaaugccaaccccaaugcuaacccuaaugccaaccccaaugcgaaccccaaugccaacccuaaugcuaacccgaaugccaaccccaacgcuaauccuaacgccaaucccaacgccaauccuaacguggaucccaaugcuaacccgaaugcgaacccuaaugccaaccccaaugcuaacccuaaugccaaccccaacgccaauccuaacgcuaaucccaacgccaauccgaacgcgaauccuaacgcuaaucccaacgccaaucccaacgccaauccuaacgcuaauccgaacgccaaucccaacgcuaacccuaaugccaaccccaaugcgaacccuaaugccaaccccaauaaaaacaaucagggcaacgggcaaggacauaauaugccuaacgaccccaaucggaacguugaugagaaugcuaacgccaacagcgcugugaagaauaacaauaacgaggaaccguccgacaaacacauuaaggaguaucucaauaagauccagaacugaggacuagucccuguucccagagcccacuuuuuuuucuuuuuuugaaauaaaauagccugucuuucagaucucaaaggcucuuuucagagccaccaaaaaaaaaaaaaaaaaaaaaaaaaaaaaaaaaaaaaaaaaaaaaaaaaaaaaaaaaaaaaaaaaaaaaaaaaaaaaaaaaaaaaaaaaaaaaaaaaaaaagaauu

SEQ ID NO: 7440 - RNA, 1471 nt, Artificial Sequence
  mRNA Design a-1 (hSL-A100-N5) comprising derived and/or modified sequence from Pf(3D7)__XP_001351122.1__HsALB_Pf-CSP(19-397) (opt5)
aggagagucccgcagucggcguccagcggcucugcuuguucgugugugugucguugcaggccuuauucaagcuuaccaugaagugggugaccuucaucagccugcucuuucuguucuccucugccuacagccuuuuucaggaguaucaaugcuacggcuccucuagcaacacaagaguccugaaugaacucaacuaugacaaugcugggacgaaccuguacaaugagcuugaaaugaacuauuacggaaaacaggagaauugguauucccugaagaaaaacucucggagccucggcgaaaaugaugacgggaacaaugaggauaacgagaagcugcgcaaacccaagcacaagaaacugaagcagccugccgacggaaauccggaucccaacgcgaauccuaacguugaccccaacgcuaauccuaacguggaucccaaugccaacccuaauguggacccgaacgccaaucccaacgcuaauccuaacgccaaucccaacgcuaauccuaacgccaaucccaacgcgaacccgaaugccaacccuaaugcuaaccccaaugccaacccuaaugcuaaccccaaugccaaccccaaugcgaacccuaaugccaacccgaaugcuaaccccaacgccaauccuaacgcuaaucccaacgccaauccuaacgucgaucccaaugccaacccgaaugcuaacccuaaugcgaaccccaaugccaacccuaaugcuaaccccaacgccaauccuaacgccaaucccaacgcuaauccgaacgccaauccuaacgcgaaucccaacgcuaaucccaacgccaauccuaacgccaauccgaacgcuaaucccaacgccaacccuaaugcuaaccccaaugccaacccuaaugcgaaccccaauaaaaacaaucagggcaacgggcaaggacauaauaugccuaacgaccccaauagaaacguggaugaaaaugccaacgcuaacuccgccguuaagaauaacaauaacgaggaaccgagcgacaaacacauuaaggaguaccucaauaagauccagaacucucuguccaccgaguggagcccuuguucugugacaugcggcaauggcauucagguccggaucaaacccggguccgcuaacaagccuaaagaugaacuugacuacgccaaugacauugagaagaaaaucuguaagauggaaaaaugcagcucuguguucaacguugucaauuccagcaucggacugauuauggugcucuccuuucuguuccuuaacugaggacuagucccuguucccagagcccacuuuuuuuucuuuuuuugaaauaaaauagccugucuuucagaucucaaaggcucuuuucagagccaccaaaaaaaaaaaaaaaaaaaaaaaaaaaaaaaaaaaaaaaaaaaaaaaaaaaaaaaaaaaaaaaaaaaaaaaaaaaaaaaaaaaaaaaaaaaaaaaaaaaaagaauu

SEQ ID NO: 7441 - RNA, 1489 nt, Artificial Sequence
  mRNA Design a-1 (hSL-A100-N5) comprising derived and/or modified sequence from Pf(3D7)__XP_001351122.1__HsIns-iso1_Pf-CSP(19-397) (opt5)
aggagagucccgcagucggcguccagcggcucugcuuguucgugugugugucguugcaggccuuauucaagcuuaccauggcccuguggaugagacuccugccccuucuggcucuccuggcccuuuggggcccugacccggcggcugcccuguuccaggaguaccaaugcuaugggagcuccucuaacacccgggugcucaaugaacugaacuacgauaaugccggaacaaaccuguauaaugagcucgaaaugaacuacuauggcaagcaggagaauugguacagccugaaaaagaacucccgcucucuuggggaaaaugacgauggaaacaaugaggacaacgagaaacugagaaagcccaaacacaagaagcucaaacagccugcugauggcaaucccgacccuaacgccaaucccaacgucgauccuaacgcuaauccgaacguugaccccaaugccaacccuaauguggaucccaacgcgaauccuaacgccaaucccaacgcuaauccgaacgccaauccuaacgcuaaucccaacgccaacccuaaugcgaaccccaaugccaaccccaaugcuaacccuaaugccaacccgaaugcuaaccccaaugccaacccuaaugccaaccccaaugcuaacccuaacgcgaaucccaacgccaauccgaacgcuaauccuaacguggaccccaaugccaacccuaaugccaaccccaaugcuaacccuaaugccaaccccaaugcgaacccgaacgcuaauccuaacgccaaucccaacgccaaucccaacgcuaauccuaacgccaauccgaacgcuaaucccaacgccaauccuaacgcgaaucccaacgccaauccuaacgcuaaccccaaugccaacccuaaugcuaaccccaaugccaacccgaauaagaacaaucaggggaacggacaaggccauaauaugccuaacgaucccaaucggaacgucgacgaaaaugcgaacgccaacagcgcugugaaaaauaacaauaacgaggaaccuuccgauaagcacaucaaagaguaucugaauaagauucagaacucucuuagcacggaguggucccccuguagcguuaccugcggcaaugggauccaggugcgcauuaagccgggaucugccaacaaaccuaaggacgaacuggacuacgcuaaugauaucgagaaaaagauuuguaaaauggaaaagugcuccagcgucuuuaacgugguuaauucuuccaucggccucaucauggugcugagcuuccuguuucucaacugaggacuagucccuguucccagagcccacuuuuuuuucuuuuuuugaaauaaaauagccugucuuucagaucucaaaggcucuuuucagagccaccaaaaaaaaaaaaaaaaaaaaaaaaaaaaaaaaaaaaaaaaaaaaaaaaaaaaaaaaaaaaaaaaaaaaaaaaaaaaaaaaaaaaaaaaaaaaaaaaaaaaagaauu

SEQ ID NO: 7442 - RNA, 1468 nt, Artificial Sequence
  mRNA Design a-1 (hSL-A100-N5) comprising derived and/or modified sequence from Pf(3D7)__XP_001351122.1__HsSPARC_Pf-CSP(19-397) (opt5)
aggagagucccgcagucggcguccagcggcucugcuuguucgugugugugucguugcaggccuuauucaagcuuaccaugagagccuggaucuucuuucugcucugccuggcuggccgggcccuugcgcuguuccaggaguaccaauguuaugggagcuccucuaacacccgcgugcucaaugaacugaacuacgacaaugcuggaacaaaccuuuauaaugagcuggaaaugaacuacuauggcaagcaggagaauugguacagccucaaaaagaacuccagaucucugggggaaaaugaugacggaaacaaugaggauaacgagaaacugcggaagcccaaacacaagaagcucaaacagccugccgacggcaauccggaucccaacgccaauccuaacgucgaccccaacgcuaauccuaacguugaucccaaugccaacccuaauguggacccgaacgcuaaucccaacgccaauccuaacgcgaaucccaacgccaauccuaacgcuaaucccaacgccaacccgaaugcuaacccuaaugccaaccccaaugcgaacccuaaugccaaccccaaugcuaaccccaaugccaacccuaaugcuaacccgaaugccaaccccaacgccaauccuaacgcuaaucccaacgcgaauccuaacguggaucccaaugccaacccgaaugcuaacccuaaugccaaccccaaugccaacccuaaugcuaaccccaacgccaauccuaacgcgaaucccaacgcuaauccgaacgccaauccuaacgccaaucccaacgcuaaucccaacgccaauccuaacgcuaauccgaacgccaaucccaacgcgaacccuaaugccaaccccaaugcuaacccuaaugccaaccccaauaagaacaaucaggggaacggacaaggccauaauaugccuaacgaccccaaucgcaacgucgaugaaaaugcuaacgccaacagcgcggugaaaaauaacaauaacgaggaaccguccgacaagcacauuaaagaguaucugaauaagauccagaacucucuuagcacggagugguccccuugcagcguuaccuguggcaaugggauucaggugagaaucaagcccggaucugccaacaaaccuaaggaugaacuggacuacgcuaaugacauugagaaaaagaucugcaaaauggaaaaguguuccagcgucuuuaacgugguuaauucuuccaucggccucauuauggugcugagcuuccuuuuucugaacugaggacuagucccuguucccagagcccacuuuuuuuucuuuuuuugaaauaaaauagccugucuuucagaucucaaaggcucuuuucagagccaccaaaaaaaaaaaaaaaaaaaaaaaaaaaaaaaaaaaaaaaaaaaaaaaaaaaaaaaaaaaaaaaaaaaaaaaaaaaaaaaaaaaaaaaaaaaaaaaaaaaaagaauu

SEQ ID NO: 7443 - RNA, 1471 nt, Artificial Sequence
  mRNA Design a-1 (hSL-A100-N5) comprising derived and/or modified sequence from Pf(3D7)__XP_001351122.1__IgE_Pf-CSP(19-397) (opt5)
aggagagucccgcagucggcguccagcggcucugcuuguucgugugugugucguugcaggccuuauucaagcuuaccauggacuggaccuggauccuguuccucguggccgcugccacaagaguccacagccuguuucaggaguaccaaugcuauggcuccucuagcaacacgcggguucuuaaugaacugaacuacgauaaugcggggaccaaccucuauaaugagcuggaaaugaacuacuauggaaagcaggagaauugguacucccuuaaaaagaacucucgcagccugggcgaaaaugacgaugggaacaaugaggacaacgagaaacucagaaagcccaaacauaagaagcugaaacagccugcugauggaaauccggaccccaacgccaauccuaacguggaucccaacgccaauccuaacguggaccccaaugcuaacccuaaugucgauccgaacgccaaucccaacgcuaauccuaacgccaaucccaacgcgaauccuaacgccaaucccaacgcuaacccgaaugccaacccuaaugcuaaccccaaugccaacccuaaugcgaaccccaaugccaaccccaaugcuaacccuaaugccaacccgaaugcuaaccccaacgccaauccuaacgccaaucccaacgcuaauccuaacguggaccccaaugcgaacccgaaugccaacccuaaugcuaaccccaaugccaacccuaaugccaaccccaacgcuaauccuaacgccaaucccaacgcgaauccgaacgcuaauccuaacgccaaucccaacgccaaucccaacgcuaauccuaacgccaauccgaacgcuaaucccaacgccaacccuaaugcgaaccccaaugccaacccuaaugcuaaccccaauaagaacaaucagggcaacgggcaaggacacaauaugccuaacgaucccaaucggaacguugacgaaaaugccaacgcuaacuccgccgugaaaaauaacaauaacgaggaaccgucugauaagcauauuaaagaguaucugaauaagauccagaacagccucuccacagaguggagcccuuguucugugaccugcggcaauggcauucagguccgcaucaagcccggguccgcgaacaaaccuaaggacgaacuggacuacgccaaugauauugagaaaaagaucuguaaaauggaaaagugcagcucuguuuucaacguggucaauuccagcaucggacuuauuauggugcugucuuuucucuuccugaacugaggacuagucccuguucccagagcccacuuuuuuuucuuuuuuugaaauaaaauagccugucuuucagaucucaaaggcucuuuucagagccaccaaaaaaaaaaaaaaaaaaaaaaaaaaaaaaaaaaaaaaaaaaaaaaaaaaaaaaaaaaaaaaaaaaaaaaaaaaaaaaaaaaaaaaaaaaaaaaaaaaaaagaauu

SEQ ID NO: 7444 - RNA, 1636 nt, Artificial Sequence
  mRNA Design a-1 (hSL-A100-N5) comprising derived and/or modified sequence from Pf(3D7)__XP_001351122.1__Pf-CSP_L(G4SG4)_TM domain HA (opt5)
aggagagucccgcagucggcguccagcggcucugcuuguucgugugugugucguugcaggccuuauucaagcuuaccaugaugagaaagcuggccauccucagcguguccucuuuccuguuugucgaggcucuuuuccaggaauaccaaugcuauggcagcuccucuaacacccggguucugaaugagcucaacuacgacaaugccgggacaaaccuguauaaugaacuugagaugaacuacuauggaaaacaggaaaauugguacagccugaagaaaaacucccgcucucucggcgagaaugaugacgggaacaaugaggauaacgaaaagcugagaaaacccaagcacaagaaacugaagcagccugcggacggaaauccggaucccaacgcuaauccuaacguggaccccaacgccaauccuaacguggaucccaaugccaacccuaaugucgacccgaacgcuaaucccaacgccaauccuaacgcuaaucccaacgccaauccuaacgcgaaucccaacgccaacccgaaugcuaacccuaaugccaaccccaaugcuaacccuaaugccaaccccaaugcgaaccccaaugccaacccuaaugcuaacccgaaugccaaccccaacgcuaauccuaacgccaaucccaacgccaauccuaacguggaucccaaugcuaacccgaaugcgaacccuaaugccaaccccaaugcuaacccuaaugccaaccccaacgccaauccuaacgcuaaucccaacgccaauccgaacgcgaauccuaacgcuaaucccaacgccaaucccaacgccaauccuaacgcuaauccgaacgccaaucccaacgcuaacccuaaugccaaccccaaugcgaacccuaaugccaaccccaauaaaaacaaucagggcaacgggcaaggacauaauaugccuaacgaccccaaucggaacguugaugagaaugcuaacgccaacagcgcugugaagaauaacaauaacgaggaaccguccgacaaacacauuaaggaguaucucaauaagauccagaacagccugucuacggaaugguccccuuguagcgugaccugcggcaauggcauucagguccgcaucaaacccgggucugccaacaagccuaaagaugagcuugacuacgcgaaugacauugaaaagaaaaucuguaagauggagaaaugcuccagcguuuuuaacguggucaauucuuccaucggacugauuauggugcucagcuuccuguuucuuaacggcgggggaggcuccgggggaggcggcaagcuggaaucuacaagaaucuaccagauucucgccaucuauagcaccguggcuuccagccugguccugguugugucucucggggccauuuccuucuggauguguagcaauggaucucugcaaugccggaucuguauuugaggacuagucccuguucccagagcccacuuuuuuuucuuuuuuugaaauaaaauagccugucuuucagaucucaaaggcucuuuucagagccaccaaaaaaaaaaaaaaaaaaaaaaaaaaaaaaaaaaaaaaaaaaaaaaaaaaaaaaaaaaaaaaaaaaaaaaaaaaaaaaaaaaaaaaaaaaaaaaaaaaaaagaauu

SEQ ID NO: 7445 - RNA, 1510 nt, Artificial Sequence
  mRNA Design a-1 (hSL-A100-N5) comprising derived and/or modified sequence from Pf(3D7)__XP_001351122.1__Pf-CSP(199-377)_L(PVTN)_HBsAg (opt5)
aggagagucccgcagucggcguccagcggcucugcuuguucgugugugugucguugcaggccuuauucaagcuuaccauggaccccaacgccaauccuaacgcuaauccgaacgccaaucccaacgcgaauccuaacgcuaaucccaacgccaauccuaacgccaaucccaacgcuaauccuaacgccaacccgaaugcuaaccccaaugccaacccuaaugcgaaccccaaugccaacccuaaugcuaaccccaaugccaacccgaaugcuaacccuaaugccaaccccaacgcgaauccuaacaagaauaaccagggcaaugggcaaggacacaacaugcccaaugaucccaacagaaauguggacgagaacgccaaugcuaacagcgccgucaaaaauaacaauaacgaggaaccuuccgauaagcauaucaaagaauaccugaacaagauucaaaauucucucagcaccgagugguccccgugcucuguuacauguggcaacgggauccaggugcggauuaaacccggaagcgcuaauaagccuaaggacgaacuggauuaugccaacgacaucgagaaaaagauuugcaaaauggagaaguguuccucugugcccgucacgaauauggaaaacaucaccagcggcuuccuugggccucugcucgugcugcaggccggauuuuuccuucugacacgcauccucaccauuccccagucccuggauagcugguggacaucucugaauuuucucggcggcuccccgguuugccuggggcagaacagccagucuccuaccuccaaucacagccccacaucuuguccucccaucugcccuggauacagauggaugugucuucggcgcuucauuaucuuucuguucauucuccugcuuugccugaucuuucuccuggugcugcucgacuaucagggcaugcugcccgucuguccgcuuauuccuggguccaccacgaccaacacaggacccugcaaaaccuguacaacccccgcucaaggcaauagcauguucccuuccugcugcuguacgaagccgacagaugggaacugcaccuguauccccaucccuucuagcugggcguuugccaaguaccugugggagugggcuuccgugagauucagcuggcucucucugcuuguucccuuugugcagugguucgucggacuguccccuacaguguggcucagcgccauuuggaugaugugguauuggggccccucucuguacagcaucguguccccuuuuauuccccugcucccgaucuucuucugccugugggucuauauuugaggacuagucccuguucccagagcccacuuuuuuuucuuuuuuugaaauaaaauagccugucuuucagaucucaaaggcucuuuucagagccaccaaaaaaaaaaaaaaaaaaaaaaaaaaaaaaaaaaaaaaaaaaaaaaaaaaaaaaaaaaaaaaaaaaaaaaaaaaaaaaaaaaaaaaaaaaaaaaaaaaaaagaauu

SEQ ID NO: 7446 - RNA, 1552 nt, Artificial Sequence
  mRNA Design a-1 (hSL-A100-N5) comprising derived and/or modified sequence from Pf(3D7)__XP_001351122.1__Pf-CSP(199-387)_L(PVTN)_HBsAg (opt5)
aggagagucccgcagucggcguccagcggcucugcuuguucgugugugugucguugcaggccuuauucaagcuuaccaugauggcccccgacccuaacgcuaauccgaacgccaaucccaacgcgaauccuaacgcuaaucccaacgccaauccuaacgccaaucccaacgcuaauccuaacgccaauccgaacgcuaaccccaaugccaacccuaaugcgaaccccaaugccaacccuaaugcuaaccccaaugccaacccgaaugcuaacccuaaugccaaccccaaugcgaacccuaacgccaaucccaacaagaauaaccagggcaaugggcaaggacacaacaugcccaaugauccuaacagaaauguggacgagaacgcuaaugccaacagcgcugucaaaaauaacaauaacgaggaaccguccgauaagcauaucaaagaauaccugaacaagauucaaaauucucucagcaccgaguggucccccugcucuguuacauguggcaacgggauccaggugcggauuaaaccuggaagcgccaauaagcccaaggacgaacuggauuaugccaacgacaucgagaaaaagauuugcaaaauggagaaguguuccucuguguucaaugucgugaacagcuccaucggccuugggccuguuacgaauauggaaaacaucaccagcggauuucugggcccccuccuggugcuucaggcuggcuucuuucugcucacacgcauucugaccaucccgcagucucuggauuccugguggacaagccucaauuuccuugggggaucuccugucugccugggccagaacucccagagccccaccucuaaucacuccccuacaagcugucccccuauuugccccggguacagauggaugugucugcggcgcuuuaucauuuuccucuuuauccugcuucugugccucauuuuccugcuggugcuccuggacuaucagggaaugcuuccgguuuguccucugauccccggcuccaccacgaccaacacagggcccugcaaaaccuguacaaccccugcgcaaggaaauucuauguuuccgagcugcugcuguacgaagcccacagauggcaacugcaccuguaucccuauucccuccagcugggccuucgcuaaguaccucugggagugggccucugugagauuuuccuggcugagccuucuggucccuuucgugcagugguuugugggccucucucccacagucuggcugagcgccaucuggaugaugugguauugggggccuucccuguacucuauuguuagccccuucaucccgcuccugccuauuuucuuuugccuuuggguguauaucugaggacuagucccuguucccagagcccacuuuuuuuucuuuuuuugaaauaaaauagccugucuuucagaucucaaaggcucuuuucagagccaccaaaaaaaaaaaaaaaaaaaaaaaaaaaaaaaaaaaaaaaaaaaaaaaaaaaaaaaaaaaaaaaaaaaaaaaaaaaaaaaaaaaaaaaaaaaaaaaaaaaaagaauu

SEQ ID NO: 7447 - RNA, 736 nt, Artificial Sequence
  mRNA Design a-1 (hSL-A100-N5) comprising derived and/or modified sequence from Pf(3D7)__XP_001351122.1__HsALB_Pf-CSP(19-152) (opt5)
aggagagucccgcagucggcguccagcggcucugcuuguucgugugugugucguugcaggccuuauucaagcuuaccaugaagugggugaccuucaucagccugcucuuucuguucuccucugccuacagccuuuuucaggaguaucaaugcuacggcuccucuagcaacacaagaguccugaaugaacucaacuaugacaaugcugggacgaaccuguacaaugagcuugaaaugaacuauuacggaaaacaggagaauugguauucccugaagaaaaacucucggagccucggcgaaaaugaugacgggaacaaugaggauaacgagaagcugcgcaaacccaagcacaagaaacugaagcagccugccgacggaaauccggaucccaacgcgaauccuaacguugaccccaacgcuaauccuaacguggaucccaaugccaacccuaauguggacccgaacgccaaucccaacgcuaauccuaacgccaaucccaacgcuaauccuaacgccaaucccaacgcgaacccgugaggacuagucccuguucccagagcccacuuuuuuuucuuuuuuugaaauaaaauagccugucuuucagaucucaaaggcucuuuucagagccaccaaaaaaaaaaaaaaaaaaaaaaaaaaaaaaaaaaaaaaaaaaaaaaaaaaaaaaaaaaaaaaaaaaaaaaaaaaaaaaaaaaaaaaaaaaaaaaaaaaaaagaauu

SEQ ID NO: 7448 - RNA, 856 nt, Artificial Sequence
  mRNA Design a-1 (hSL-A100-N5) comprising derived and/or modified sequence from Pf(3D7)__XP_001351122.1__HsALB_Pf-CSP(19-192) (opt5)
aggagagucccgcagucggcguccagcggcucugcuuguucgugugugugucguugcaggccuuauucaagcuuaccaugaagugggugaccuucaucagccugcucuuucuguucuccucugccuacagccuuuuucaggaguaucaaugcuacggcuccucuagcaacacaagaguccugaaugaacucaacuaugacaaugcugggacgaaccuguacaaugagcuugaaaugaacuauuacggaaaacaggagaauugguauucccugaagaaaaacucucggagccucggcgaaaaugaugacgggaacaaugaggauaacgagaagcugcgcaaacccaagcacaagaaacugaagcagccugccgacggaaauccggaucccaacgcgaauccuaacguugaccccaacgcuaauccuaacguggaucccaaugccaacccuaauguggacccgaacgccaaucccaacgcuaauccuaacgccaaucccaacgcuaauccuaacgccaaucccaacgcgaacccgaaugccaacccuaaugcuaaccccaaugccaacccuaaugcuaaccccaaugccaaccccaaugcgaacccuaaugccaacccgaaugcuaaccccaacgccaauccuaacgcuaaucccugaggacuagucccuguucccagagcccacuuuuuuuucuuuuuuugaaauaaaauagccugucuuucagaucucaaaggcucuuuucagagccaccaaaaaaaaaaaaaaaaaaaaaaaaaaaaaaaaaaaaaaaaaaaaaaaaaaaaaaaaaaaaaaaaaaaaaaaaaaaaaaaaaaaaaaaaaaaaaaaaaaaaagaauu

SEQ ID NO: 7449 - RNA, 1096 nt, Artificial Sequence
  mRNA Design a-1 (hSL-A100-N5) comprising derived and/or modified sequence from Pf(3D7)__XP_001351122.1__HsALB_Pf-CSP(19-272) (opt5)
aggagagucccgcagucggcguccagcggcucugcuuguucgugugugugucguugcaggccuuauucaagcuuaccaugaagugggugaccuucaucagccugcucuuucuguucuccucugccuacagccuuuuucaggaguaucaaugcuacggcuccucuagcaacacaagaguccugaaugaacucaacuaugacaaugcugggacgaaccuguacaaugagcuugaaaugaacuauuacggaaaacaggagaauugguauucccugaagaaaaacucucggagccucggcgaaaaugaugacgggaacaaugaggauaacgagaagcugcgcaaacccaagcacaagaaacugaagcagccugccgacggaaauccggaucccaacgcgaauccuaacguugaccccaacgcuaauccuaacguggaucccaaugccaacccuaauguggacccgaacgccaaucccaacgcuaauccuaacgccaaucccaacgcuaauccuaacgccaaucccaacgcgaacccgaaugccaacccuaaugcuaaccccaaugccaacccuaaugcuaaccccaaugccaaccccaaugcgaacccuaaugccaacccgaaugcuaaccccaacgccaauccuaacgcuaaucccaacgccaauccuaacgucgaucccaaugccaacccgaaugcuaacccuaaugcgaaccccaaugccaacccuaaugcuaaccccaacgccaauccuaacgccaaucccaacgcuaauccgaacgccaauccuaacgcgaaucccaacgcuaaucccaacgccaauccuaacgccaauccgaacgcuaaucccaacgccaacccuaaugcuaaccccaaugccaacccuaaugcgaaccccugaggacuagucccuguucccagagcccacuuuuuuuucuuuuuuugaaauaaaauagccugucuuucagaucucaaaggcucuuuucagagccaccaaaaaaaaaaaaaaaaaaaaaaaaaaaaaaaaaaaaaaaaaaaaaaaaaaaaaaaaaaaaaaaaaaaaaaaaaaaaaaaaaaaaaaaaaaaaaaaaaaaaagaauu

SEQ ID NO: 7450 - RNA, 1258 nt, Artificial Sequence
  mRNA Design a-1 (hSL-A100-N5) comprising derived and/or modified sequence from Pf(3D7)__XP_001351122.1__HsALB_Pf-CSP(19-272)_L(AAY)_Pf-CSP(310-3 27)_L(AAY)_Pf-CSP(346-375) (opt5)
aggagagucccgcagucggcguccagcggcucugcuuguucgugugugugucguugcaggccuuauucaagcuuaccaugaagugggugaccuucaucagccugcucuuucuguucuccucugccuacagccuuuuucaggaguaucaaugcuacggcuccucuagcaacacaagaguccugaaugaacucaacuaugacaaugcugggacgaaccuguacaaugagcuugaaaugaacuauuacggaaaacaggagaauugguauucccugaagaaaaacucucggagccucggcgaaaaugaugacgggaacaaugaggauaacgagaagcugcgcaaacccaagcacaagaaacugaagcagccugccgacggaaauccggaucccaacgcgaauccuaacguugaccccaacgcuaauccuaacguggaucccaaugccaacccuaauguggacccgaacgccaaucccaacgcuaauccuaacgccaaucccaacgcuaauccuaacgccaaucccaacgcgaacccgaaugccaacccuaaugcuaaccccaaugccaacccuaaugcuaaccccaaugccaaccccaaugcgaacccuaaugccaacccgaaugcuaaccccaacgccaauccuaacgcuaaucccaacgccaauccuaacgucgaucccaaugccaacccgaaugcuaacccuaaugcgaaccccaaugccaacccuaaugcuaaccccaacgccaauccuaacgccaaucccaacgcuaauccgaacgccaauccuaacgcgaaucccaacgcuaaucccaacgccaauccuaacgccaauccgaacgcuaaucccaacgccaacccuaaugcuaaccccaaugccaacccuaaugcgaaccccgccgcuuacgaaccuuccgacaaacauauuaaggaguaccucaauaaaauccagaacagccuggccgcuuauauuaagcccggcucugccaauaagccgaaagaugaacuugacuacgcgaacgauaucgagaagaaaauuuguaagauggagaaaugcuccugaggacuagucccuguucccagagcccacuuuuuuuucuuuuuuugaaauaaaauagccugucuuucagaucucaaaggcucuuuucagagccaccaaaaaaaaaaaaaaaaaaaaaaaaaaaaaaaaaaaaaaaaaaaaaaaaaaaaaaaaaaaaaaaaaaaaaaaaaaaaaaaaaaaaaaaaaaaaaaaaaaaaagaauu

SEQ ID NO: 7451 - RNA, 1219 nt, Artificial Sequence
  mRNA Design a-1 (hSL-A100-N5) comprising derived and/or modified sequence from Pf(3D7)__XP_001351122.1__HsALB_Pf-CSP(19-272)_L(AAY)_Pf-CSP(346-3 65)_L(AAY)_P2 (opt5)
aggagagucccgcagucggcguccagcggcucugcuuguucgugugugugucguugcaggccuuauucaagcuuaccaugaagugggugaccuucaucagccugcucuuucuguucuccucugccuacagccuuuuucaggaguaucaaugcuacggcuccucuagcaacacaagaguccugaaugaacucaacuaugacaaugcugggacgaaccuguacaaugagcuugaaaugaacuauuacggaaaacaggagaauugguauucccugaagaaaaacucucggagccucggcgaaaaugaugacgggaacaaugaggauaacgagaagcugcgcaaacccaagcacaagaaacugaagcagccugccgacggaaauccggaucccaacgcgaauccuaacguugaccccaacgcuaauccuaacguggaucccaaugccaacccuaauguggacccgaacgccaaucccaacgcuaauccuaacgccaaucccaacgcuaauccuaacgccaaucccaacgcgaacccgaaugccaacccuaaugcuaaccccaaugccaacccuaaugcuaaccccaaugccaaccccaaugcgaacccuaaugccaacccgaaugcuaaccccaacgccaauccuaacgcuaaucccaacgccaauccuaacgucgaucccaaugccaacccgaaugcuaacccuaaugcgaaccccaaugccaacccuaaugcuaaccccaacgccaauccuaacgccaaucccaacgcuaauccgaacgccaauccuaacgcgaaucccaacgcuaaucccaacgccaauccuaacgccaauccgaacgcuaaucccaacgccaacccuaaugcuaaccccaaugccaacccuaaugcgaaccccgccgcuuacauuaaaccuggcuccgccaauaagcccaaagacgaacucgauuacgcuaacgacaucgaggccgcguaucaguacauuaaggccaauagcaaguucaucgggauuaccgaacugugaggacuagucccuguucccagagcccacuuuuuuuucuuuuuuugaaauaaaauagccugucuuucagaucucaaaggcucuuuucagagccaccaaaaaaaaaaaaaaaaaaaaaaaaaaaaaaaaaaaaaaaaaaaaaaaaaaaaaaaaaaaaaaaaaaaaaaaaaaaaaaaaaaaaaaaaaaaaaaaaaaaaagaauu

SEQ ID NO: 7452 - RNA, 1213 nt, Artificial Sequence
  mRNA Design a-1 (hSL-A100-N5) comprising derived and/or modified sequence from Pf(3D7)__XP_001351122.1__HsALB_Pf-CSP(19-272)_L(AAY)_Pf-CSP(346-3 65)_L(AAY)_PADRE (opt5)
aggagagucccgcagucggcguccagcggcucugcuuguucgugugugugucguugcaggccuuauucaagcuuaccaugaagugggugaccuucaucagccugcucuuucuguucuccucugccuacagccuuuuucaggaguaucaaugcuacggcuccucuagcaacacaagaguccugaaugaacucaacuaugacaaugcugggacgaaccuguacaaugagcuugaaaugaacuauuacggaaaacaggagaauugguauucccugaagaaaaacucucggagccucggcgaaaaugaugacgggaacaaugaggauaacgagaagcugcgcaaacccaagcacaagaaacugaagcagccugccgacggaaauccggaucccaacgcgaauccuaacguugaccccaacgcuaauccuaacguggaucccaaugccaacccuaauguggacccgaacgccaaucccaacgcuaauccuaacgccaaucccaacgcuaauccuaacgccaaucccaacgcgaacccgaaugccaacccuaaugcuaaccccaaugccaacccuaaugcuaaccccaaugccaaccccaaugcgaacccuaaugccaacccgaaugcuaaccccaacgccaauccuaacgcuaaucccaacgccaauccuaacgucgaucccaaugccaacccgaaugcuaacccuaaugcgaaccccaaugccaacccuaaugcuaaccccaacgccaauccuaacgccaaucccaacgcuaauccgaacgccaauccuaacgcgaaucccaacgcuaaucccaacgccaauccuaacgccaauccgaacgcuaaucccaacgccaacccuaaugcuaaccccaaugccaacccuaaugcgaaccccgccgcuuacauuaaaccuggcuccgccaauaagcccaaagacgaacucgauuacgcuaacgacaucgaggccgcguaugccaaguucguggcugccuggacccugaaggcugccgccugaggacuagucccuguucccagagcccacuuuuuuuucuuuuuuugaaauaaaauagccugucuuucagaucucaaaggcucuuuucagagccaccaaaaaaaaaaaaaaaaaaaaaaaaaaaaaaaaaaaaaaaaaaaaaaaaaaaaaaaaaaaaaaaaaaaaaaaaaaaaaaaaaaaaaaaaaaaaaaaaaaaaagaauu

SEQ ID NO: 7453 - RNA, 1270 nt, Artificial Sequence
  mRNA Design a-1 (hSL-A100-N5) comprising derived and/or modified sequence from Pf(3D7)__XP_001351122.1__HsALB_Pf-CSP(19-272)_L(G4S)_Pf-CSP(310-3 27)_L(G4S)_Pf-CSP(346-375) (opt5)
aggagagucccgcagucggcguccagcggcucugcuuguucgugugugugucguugcaggccuuauucaagcuuaccaugaagugggugaccuucaucagccugcucuuucuguucuccucugccuacagccuuuuucaggaguaucaaugcuacggcuccucuagcaacacaagaguccugaaugaacucaacuaugacaaugcugggacgaaccuguacaaugagcuugaaaugaacuauuacggaaaacaggagaauugguauucccugaagaaaaacucucggagccucggcgaaaaugaugacgggaacaaugaggauaacgagaagcugcgcaaacccaagcacaagaaacugaagcagccugccgacggaaauccggaucccaacgcgaauccuaacguugaccccaacgcuaauccuaacguggaucccaaugccaacccuaauguggacccgaacgccaaucccaacgcuaauccuaacgccaaucccaacgcuaauccuaacgccaaucccaacgcgaacccgaaugccaacccuaaugcuaaccccaaugccaacccuaaugcuaaccccaaugccaaccccaaugcgaacccuaaugccaacccgaaugcuaaccccaacgccaauccuaacgcuaaucccaacgccaauccuaacgucgaucccaaugccaacccgaaugcuaacccuaaugcgaaccccaaugccaacccuaaugcuaaccccaacgccaauccuaacgccaaucccaacgcuaauccgaacgccaauccuaacgcgaaucccaacgcuaaucccaacgccaauccuaacgccaauccgaacgcuaaucccaacgccaacccuaaugcuaaccccaaugccaacccuaaugcgaaccccggcgggggaggcuccgaaccuagcgacaaacauauuaaggaguaccucaauaaaauccagaacucucugggcgggggaggcuccauuaagcccgggagcgccaauaagccgaaagaugaacuugacuacgcuaacgauaucgagaagaaaauuuguaagauggagaaaugcucuugaggacuagucccuguucccagagcccacuuuuuuuucuuuuuuugaaauaaaauagccugucuuucagaucucaaaggcucuuuucagagccaccaaaaaaaaaaaaaaaaaaaaaaaaaaaaaaaaaaaaaaaaaaaaaaaaaaaaaaaaaaaaaaaaaaaaaaaaaaaaaaaaaaaaaaaaaaaaaaaaaaaaagaauu

SEQ ID NO: 7454 - RNA, 1255 nt, Artificial Sequence
  mRNA Design a-1 (hSL-A100-N5) comprising derived and/or modified sequence from Pf(3D7)__XP_001351122.1__HsALB_Pf-CSP(19-272)_L(G4S)_Pf-CSP(310-3 27)_Pf-CSP(346-375) (opt5)
aggagagucccgcagucggcguccagcggcucugcuuguucgugugugugucguugcaggccuuauucaagcuuaccaugaagugggugaccuucaucagccugcucuuucuguucuccucugccuacagccuuuuucaggaguaucaaugcuacggcuccucuagcaacacaagaguccugaaugaacucaacuaugacaaugcugggacgaaccuguacaaugagcuugaaaugaacuauuacggaaaacaggagaauugguauucccugaagaaaaacucucggagccucggcgaaaaugaugacgggaacaaugaggauaacgagaagcugcgcaaacccaagcacaagaaacugaagcagccugccgacggaaauccggaucccaacgcgaauccuaacguugaccccaacgcuaauccuaacguggaucccaaugccaacccuaauguggacccgaacgccaaucccaacgcuaauccuaacgccaaucccaacgcuaauccuaacgccaaucccaacgcgaacccgaaugccaacccuaaugcuaaccccaaugccaacccuaaugcuaaccccaaugccaaccccaaugcgaacccuaaugccaacccgaaugcuaaccccaacgccaauccuaacgcuaaucccaacgccaauccuaacgucgaucccaaugccaacccgaaugcuaacccuaaugcgaaccccaaugccaacccuaaugcuaaccccaacgccaauccuaacgccaaucccaacgcuaauccgaacgccaauccuaacgcgaaucccaacgcuaaucccaacgccaauccuaacgccaauccgaacgcuaaucccaacgccaacccuaaugcuaaccccaaugccaacccuaaugcgaaccccggcgggggaggcuccgaaccuagcgacaaacauauuaaggaguaccucaauaaaauccagaacucucugauuaagcccggcuccgccaauaagccgaaagaugaacuugacuacgcuaacgauaucgagaagaaaauuuguaagauggagaaaugcagcugaggacuagucccuguucccagagcccacuuuuuuuucuuuuuuugaaauaaaauagccugucuuucagaucucaaaggcucuuuucagagccaccaaaaaaaaaaaaaaaaaaaaaaaaaaaaaaaaaaaaaaaaaaaaaaaaaaaaaaaaaaaaaaaaaaaaaaaaaaaaaaaaaaaaaaaaaaaaaaaaaaaaagaauu

SEQ ID NO: 7455 - RNA, 1255 nt, Artificial Sequence
  mRNA Design a-1 (hSL-A100-N5) comprising derived and/or modified sequence from Pf(3D7)__XP_001351122.1__HsALB_Pf-CSP(19-325) (opt5)
aggagagucccgcagucggcguccagcggcucugcuuguucgugugugugucguugcaggccuuauucaagcuuaccaugaagugggugaccuucaucagccugcucuuucuguucuccucugccuacagccuuuuucaggaguaucaaugcuacggcuccucuagcaacacaagaguccugaaugaacucaacuaugacaaugcugggacgaaccuguacaaugagcuugaaaugaacuauuacggaaaacaggagaauugguauucccugaagaaaaacucucggagccucggcgaaaaugaugacgggaacaaugaggauaacgagaagcugcgcaaacccaagcacaagaaacugaagcagccugccgacggaaauccggaucccaacgcgaauccuaacguugaccccaacgcuaauccuaacguggaucccaaugccaacccuaauguggacccgaacgccaaucccaacgcuaauccuaacgccaaucccaacgcuaauccuaacgccaaucccaacgcgaacccgaaugccaacccuaaugcuaaccccaaugccaacccuaaugcuaaccccaaugccaaccccaaugcgaacccuaaugccaacccgaaugcuaaccccaacgccaauccuaacgcuaaucccaacgccaauccuaacgucgaucccaaugccaacccgaaugcuaacccuaaugcgaaccccaaugccaacccuaaugcuaaccccaacgccaauccuaacgccaaucccaacgcuaauccgaacgccaauccuaacgcgaaucccaacgcuaaucccaacgccaauccuaacgccaauccgaacgcuaaucccaacgccaacccuaaugcuaaccccaaugccaacccuaaugcgaaccccaauaaaaacaaucagggcaacgggcaaggacauaauaugccuaacgaccccaauagaaacguggaugaaaaugccaacgcuaacuccgccguuaagaauaacaauaacgaggaaccgagcgacaaacacauuaaggaguaccucaauaagauccagaacugaggacuagucccuguucccagagcccacuuuuuuuucuuuuuuugaaauaaaauagccugucuuucagaucucaaaggcucuuuucagagccaccaaaaaaaaaaaaaaaaaaaaaaaaaaaaaaaaaaaaaaaaaaaaaaaaaaaaaaaaaaaaaaaaaaaaaaaaaaaaaaaaaaaaaaaaaaaaaaaaaaaaagaauu

SEQ ID NO: 7456 - RNA, 1432 nt, Artificial Sequence
  mRNA Design a-1 (hSL-A100-N5) comprising derived and/or modified sequence from Pf(3D7)__XP_001351122.1__HsALB_Pf-CSP(19-384) (opt5)
aggagagucccgcagucggcguccagcggcucugcuuguucgugugugugucguugcaggccuuauucaagcuuaccaugaagugggugaccuucaucagccugcucuuucuguucuccucugccuacagccuuuuucaggaguaucaaugcuacggcuccucuagcaacacaagagugcugaaugaacucaacuaugacaaugcugggacgaaccuguacaaugagcuugaaaugaacuauuacggaaaacaggagaauugguauucccugaagaaaaacucucggagccucggcgaaaaugaugacgggaacaaugaggauaacgagaagcugcgcaaacccaagcacaagaaacugaagcagccugccgacggaaauccggaucccaacgcgaauccuaacguugaccccaacgcuaauccuaacguggaucccaaugccaacccuaauguggacccgaacgccaaucccaacgcuaauccuaacgccaaucccaacgcuaauccuaacgccaaucccaacgcgaacccgaaugccaacccuaaugcuaaccccaaugccaacccuaaugcuaaccccaaugccaaccccaaugcgaacccuaaugccaacccgaaugcuaaccccaacgccaauccuaacgcuaaucccaacgccaauccuaacgucgaucccaaugccaacccgaaugcuaacccuaaugcgaaccccaaugccaacccuaaugcuaaccccaacgccaauccuaacgccaaucccaacgcuaauccgaacgccaauccuaacgcgaaucccaacgcuaaucccaacgccaauccuaacgccaauccgaacgcuaaucccaacgccaacccuaaugcuaaccccaaugccaacccuaaugcgaaccccaauaaaaacaaucagggcaacgggcaaggacauaauaugccuaacgaccccaauagaaacguggaugaaaaugccaacgcuaacuccgccguuaagaauaacaauaacgaggaaccgagcgacaaacacauuaaggaguaccucaauaagauccagaacucucuguccaccgaguggagcccuuguucugugacaugcggcaauggcauucagguccggaucaaacccggguccgcuaacaagccuaaagaugaacuugacuacgccaaugacauugagaagaaaaucuguaagauggaaaaaugcagcucuguguucaacguugucaauuccagcugaggacuagucccuguucccagagcccacuuuuuuuucuuuuuuugaaauaaaauagccugucuuucagaucucaaaggcucuuuucagagccaccaaaaaaaaaaaaaaaaaaaaaaaaaaaaaaaaaaaaaaaaaaaaaaaaaaaaaaaaaaaaaaaaaaaaaaaaaaaaaaaaaaaaaaaaaaaaaaaaaaaaagaauu

SEQ ID NO: 7457 - RNA, 1570 nt, Artificial Sequence
  mRNA Design a-1 (hSL-A100-N5) comprising derived and/or modified sequence from Pf(3D7)__XP_001351122.1__HsALB_Pf-CSP(19-384)_TM domain HA (opt5)
aggagagucccgcagucggcguccagcggcucugcuuguucgugugugugucguugcaggccuuauucaagcuuaccaugaagugggugaccuucaucagccugcucuuucuguucuccucugccuacagccuuuuucaggaguaucaaugcuacggcuccucuagcaacacaagaguccugaaugaacucaacuaugacaaugcugggacgaaccuguacaaugagcuugaaaugaacuauuacggaaaacaggagaauugguauucccugaagaaaaacucucggagccucggcgaaaaugaugacgggaacaaugaggauaacgagaagcugcgcaaacccaagcacaagaaacugaagcagccugccgacggaaauccggaucccaacgcgaauccuaacguugaccccaacgcuaauccuaacguggaucccaaugccaacccuaauguggacccgaacgccaaucccaacgcuaauccuaacgccaaucccaacgcuaauccuaacgccaaucccaacgcgaacccgaaugccaacccuaaugcuaaccccaaugccaacccuaaugcuaaccccaaugccaaccccaaugcgaacccuaaugccaacccgaaugcuaaccccaacgccaauccuaacgcuaaucccaacgccaauccuaacgucgaucccaaugccaacccgaaugcuaacccuaaugcgaaccccaaugccaacccuaaugcuaaccccaacgccaauccuaacgccaaucccaacgcuaauccgaacgccaauccuaacgcgaaucccaacgcuaaucccaacgccaauccuaacgccaauccgaacgcuaaucccaacgccaacccuaaugcuaaccccaaugccaacccuaaugcgaaccccaauaaaaacaaucagggcaacgggcaaggacauaauaugccuaacgaccccaauagaaacguggaugaaaaugccaacgcuaacuccgccguuaagaauaacaauaacgaggaaccgagcgacaaacacauuaaggaguaccucaauaagauccagaacucucuguccaccgaguggagcccuuguucugugacaugcggcaauggcauucagguccggaucaaacccggguccgcuaacaagccuaaagaugaacuugacuacgccaaugacauugagaagaaaaucuguaagauggaaaaaugcagcucuguguucaacguugucaauuccagcaagcuggaguccacccgcaucuaucagauucucgcgaucuacucuacaguggccagcucccuggugcuuguggucagccugggagcuauuucuuuuuggauguguuccaacggcagccuccaaugcagaaucuguauuugaggacuagucccuguucccagagcccacuuuuuuuucuuuuuuugaaauaaaauagccugucuuucagaucucaaaggcucuuuucagagccaccaaaaaaaaaaaaaaaaaaaaaaaaaaaaaaaaaaaaaaaaaaaaaaaaaaaaaaaaaaaaaaaaaaaaaaaaaaaaaaaaaaaaaaaaaaaaaaaaaaaaagaauu

SEQ ID NO: 7458 - RNA, 1282 nt, Artificial Sequence
  mRNA Design a-1 (hSL-A100-N5) comprising derived and/or modified sequence from Pf(3D7)__XP_001351122.1__HsALB_Pf-CSP(82-397) (opt5)
aggagagucccgcagucggcguccagcggcucugcuuguucgugugugugucguugcaggccuuauucaagcuuaccaugaagugggugaccuucaucagccugcucuuucuguucuccucugccuacagcgacaacgagaaacuuagaaagcccaaacacaagaaacugaagcagccugcugauggcaauccggaccccaacgccaauccuaacgucgaucccaaugcgaacccuaauguugaccccaacgcuaauccuaacguggauccgaaugccaaccccaaugccaacccuaaugcuaaccccaacgccaauccuaacgcuaaucccaacgccaauccgaacgcgaauccuaacgccaaucccaacgcuaauccuaacgccaaucccaacgcuaaucccaacgccaacccuaaugcgaacccgaaugccaaccccaaugcuaacccuaaugccaaccccaaugcuaacccuaauguggaccccaacgccaauccgaacgccaauccuaacgcuaaccccaaugcgaacccuaaugccaaccccaaugcuaacccuaaugccaaccccaaugccaacccgaaugcuaacccuaaugccaaccccaaugcgaaccccaacgcuaauccuaacgccaauccgaacgccaaucccaacgcuaauccuaacgccaaucccaacgcuaauccuaacgccaaucccaacaagaauaaccaagggaauggacagggccauaacaugccuaacgaucccaaucggaacgucgacgaaaaugcgaacgccaauuccgcugugaaaaacaauaacaaugaggaaccgucugauaagcacauuaaagaguaucucaacaagauccagaauagccuguccacagaauggucuccuugcagcguuacgugugggaacggcauucaggugcgcaucaaacccggauccgccaauaagccuaaggacgagcuugauuacgcuaacgacauugagaaaaagaucugcaaaauggaaaaguguagcucugucuuuaaugugguuaacuccagcaucgggcugauuauggugcucucuuuccuguuucugaacugaggacuagucccuguucccagagcccacuuuuuuuucuuuuuuugaaauaaaauagccugucuuucagaucucaaaggcucuuuucagagccaccaaaaaaaaaaaaaaaaaaaaaaaaaaaaaaaaaaaaaaaaaaaaaaaaaaaaaaaaaaaaaaaaaaaaaaaaaaaaaaaaaaaaaaaaaaaaaaaaaaaaagaauu

SEQ ID NO: 7459 - RNA, 634 nt, Artificial Sequence
  mRNA Design a-1 (hSL-A100-N5) comprising derived and/or modified sequence from Pf(3D7)__XP_001351122.1__HsALB_Pf-CSP(93-192) (opt5)
aggagagucccgcagucggcguccagcggcucugcuuguucgugugugugucguugcaggccuuauucaagcuuaccaugaagugggugaccuucaucagccugcucuuucuguucuccucugccuacagcaaacuuaagcagcccgcugacggcaacccugauccgaaugccaaccccaaugucgacccuaacgcgaaucccaacguugauccuaaugcuaaccccaauguggacccuaacgccaauccgaacgccaaucccaacgcuaauccuaacgccaaccccaaugcuaacccuaaugccaaccccaaugcgaacccgaaugccaacccuaaugcuaaccccaaugccaacccuaaugcuaaccccaaugccaaccccaacgcgaauccuaacgccaauccgaacgcuaaucccaacgccaauccuugaggacuagucccuguucccagagcccacuuuuuuuucuuuuuuugaaauaaaauagccugucuuucagaucucaaaggcucuuuucagagccaccaaaaaaaaaaaaaaaaaaaaaaaaaaaaaaaaaaaaaaaaaaaaaaaaaaaaaaaaaaaaaaaaaaaaaaaaaaaaaaaaaaaaaaaaaaaaaaaaaaaaagaauu

SEQ ID NO: 7460 - RNA, 874 nt, Artificial Sequence
  mRNA Design a-1 (hSL-A100-N5) comprising derived and/or modified sequence from Pf(3D7)__XP_001351122.1__HsALB_Pf-CSP(93-272) (opt5)
aggagagucccgcagucggcguccagcggcucugcuuguucgugugugugucguugcaggccuuauucaagcuuaccaugaagugggugaccuucaucagccugcucuuucuguucuccucugccuacagcaaacuuaagcagcccgcugacggcaacccugauccgaaugccaaccccaaugucgacccuaacgcgaaucccaacguugauccuaaugcuaaccccaauguggacccuaacgccaauccgaacgccaaucccaacgcuaauccuaacgccaaccccaaugcuaacccuaaugccaaccccaaugcgaacccgaaugccaacccuaaugcuaaccccaaugccaacccuaaugcuaaccccaaugccaaccccaacgcgaauccuaacgccaauccgaacgcuaaucccaacgccaauccuaacgcuaaucccaacguggauccuaaugccaaccccaaugccaacccgaaugcuaacccuaacgcgaaucccaacgccaauccuaacgcuaaucccaacgccaauccuaacgccaaucccaacgcuaauccgaacgccaauccuaacgcgaaucccaacgcuaaccccaaugccaacccuaaugccaacccgaaugcuaaccccaaugccaacccuaaugcuaaccccaaugccaacccuugaggacuagucccuguucccagagcccacuuuuuuuucuuuuuuugaaauaaaauagccugucuuucagaucucaaaggcucuuuucagagccaccaaaaaaaaaaaaaaaaaaaaaaaaaaaaaaaaaaaaaaaaaaaaaaaaaaaaaaaaaaaaaaaaaaaaaaaaaaaaaaaaaaaaaaaaaaaaaaaaaaaaagaauu

SEQ ID NO: 7461 - RNA, 1249 nt, Artificial Sequence
  mRNA Design a-1 (hSL-A100-N5) comprising derived and/or modified sequence from Pf(3D7)__XP_001351122.1__HsALB_Pf-CSP(93-397) (opt5)
aggagagucccgcagucggcguccagcggcucugcuuguucgugugugugucguugcaggccuuauucaagcuuaccaugaagugggugaccuucaucagccugcucuuucuguucuccucugccuacagcaaacuuaagcagcccgcugacggcaacccugauccgaaugccaaccccaaugucgacccuaacgcgaaucccaacguugauccuaaugcuaaccccaauguggacccuaacgccaauccgaacgccaaucccaacgcuaauccuaacgccaaccccaaugcuaacccuaaugccaaccccaaugcgaacccgaaugccaacccuaaugcuaaccccaaugccaacccuaaugcuaaccccaaugccaaccccaacgcgaauccuaacgccaauccgaacgcuaaucccaacgccaauccuaacgcuaaucccaacguggauccuaaugccaaccccaaugccaacccgaaugcuaacccuaacgcgaaucccaacgccaauccuaacgcuaaucccaacgccaauccuaacgccaaucccaacgcuaauccgaacgccaauccuaacgcgaaucccaacgcuaaccccaaugccaacccuaaugccaacccgaaugcuaaccccaaugccaacccuaaugcuaaccccaaugccaacccuaauaaaaacaaucaagggaacggacagggccacaauaugcccaacgacccuaacagaaaugucgaugagaacgcgaaugccaacuccgcugugaagaauaacaauaacgaggaacccucugacaaacauauuaaggaauaucugaauaagauccagaacagccucuccacagaguggucuccgugcagcguuacgugugggaauggcauucaggugcggaucaaaccuggauccgccaacaagcccaaagaugaacuggacuacgcuaaugauauugagaagaaaaucugcaagauggagaaguguagcucugucuuuaacgugguuaauuccagcaucgggcuuauuauggugcugucuuuccucuuucugaacugaggacuagucccuguucccagagcccacuuuuuuuucuuuuuuugaaauaaaauagccugucuuucagaucucaaaggcucuuuucagagccaccaaaaaaaaaaaaaaaaaaaaaaaaaaaaaaaaaaaaaaaaaaaaaaaaaaaaaaaaaaaaaaaaaaaaaaaaaaaaaaaaaaaaaaaaaaaaaaaaaaaaagaauu

SEQ ID NO: 7462 - RNA, 619 nt, Artificial Sequence
  mRNA Design a-1 (hSL-A100-N5) comprising derived and/or modified sequence from Pf(3D7)__XP_001351122.1__HsALB_Pf-CSP(98-192) (opt5)
aggagagucccgcagucggcguccagcggcucugcuuguucgugugugugucguugcaggccuuauucaagcuuaccaugaagugggugaccuucaucagccugcucuuucuguucuccucugccuacagcgcugacggcaaccccgauccuaaugccaacccgaaugucgaccccaacgcgaauccuaacguugaucccaaugcuaacccuaauguggaccccaacgccaauccuaacgccaauccgaacgcuaaucccaacgccaacccuaaugcuaaccccaaugccaacccuaaugcgaaccccaaugccaacccgaaugcuaacccuaaugccaaccccaaugcuaacccuaaugccaaccccaacgcgaaucccaacgccaauccuaacgcuaauccgaacgccaaucccugaggacuagucccuguucccagagcccacuuuuuuuucuuuuuuugaaauaaaauagccugucuuucagaucucaaaggcucuuuucagagccaccaaaaaaaaaaaaaaaaaaaaaaaaaaaaaaaaaaaaaaaaaaaaaaaaaaaaaaaaaaaaaaaaaaaaaaaaaaaaaaaaaaaaaaaaaaaaaaaaaaaaagaauu

SEQ ID NO: 7463 - RNA, 859 nt, Artificial Sequence
  mRNA Design a-1 (hSL-A100-N5) comprising derived and/or modified sequence from Pf(3D7)__XP_001351122.1__HsALB_Pf-CSP(98-272) (opt5)
aggagagucccgcagucggcguccagcggcucugcuuguucgugugugugucguugcaggccuuauucaagcuuaccaugaagugggugaccuucaucagccugcucuuucuguucuccucugccuacagcgcugacggcaaccccgauccuaaugccaacccgaaugucgaccccaacgcgaauccuaacguugaucccaaugcuaacccuaauguggaccccaacgccaauccuaacgccaauccgaacgcuaaucccaacgccaacccuaaugcuaaccccaaugccaacccuaaugcgaaccccaaugccaacccgaaugcuaacccuaaugccaaccccaaugcuaacccuaaugccaaccccaacgcgaaucccaacgccaauccuaacgcuaauccgaacgccaaucccaacgcuaauccuaacguggaucccaaugccaacccuaaugccaaccccaaugcuaacccgaacgcgaauccuaacgccaaucccaacgcuaauccuaacgccaaucccaacgccaauccuaacgcuaaucccaacgccaauccgaacgcgaauccuaacgcuaaccccaaugccaaccccaaugccaacccuaaugcuaacccgaaugccaaccccaaugcuaacccuaaugccaaccccugaggacuagucccuguucccagagcccacuuuuuuuucuuuuuuugaaauaaaauagccugucuuucagaucucaaaggcucuuuucagagccaccaaaaaaaaaaaaaaaaaaaaaaaaaaaaaaaaaaaaaaaaaaaaaaaaaaaaaaaaaaaaaaaaaaaaaaaaaaaaaaaaaaaaaaaaaaaaaaaaaaaaagaauu

SEQ ID NO: 7464 - RNA, 1165 nt, Artificial Sequence
  mRNA Design a-1 (hSL-A100-N5) comprising derived and/or modified sequence from Pf(3D7)__XP_001351122.1__HsALB_Pf-CSP(98-374) (opt5)
aggagagucccgcagucggcguccagcggcucugcuuguucgugugugugucguugcaggccuuauucaagcuuaccaugaagugggugaccuucaucagccugcucuuucuguucuccucugccuacagcgcugacggcaaccccgauccuaaugccaacccgaaugucgaccccaacgcgaauccuaacguugaucccaaugcuaacccuaauguggaccccaacgccaauccuaacgccaauccgaacgcuaaucccaacgccaacccuaaugcuaaccccaaugccaacccuaaugcgaaccccaaugccaacccgaaugcuaacccuaaugccaaccccaaugcuaacccuaaugccaaccccaacgcgaaucccaacgccaauccuaacgcuaauccgaacgccaaucccaacgcuaauccuaacguggaucccaaugccaacccuaaugccaaccccaaugcuaacccgaacgcgaauccuaacgccaaucccaacgcuaauccuaacgccaaucccaacgccaauccuaacgcuaaucccaacgccaauccgaacgcgaauccuaacgcuaaccccaaugccaaccccaaugccaacccuaaugcuaacccgaaugccaaccccaaugcuaacccuaaugccaaccccaauaaaaacaaucaggggaacggacaaggccacaauaugccuaacgaccccaacagaaaugucgaugagaacgcgaaugccaacuccgcugugaagaauaacaauaacgaggaaccuucugacaaacauauuaaggaauaucuuaauaaaauccagaacagccuguccacagaguggucucccugcagcguuacgugugggaauggcauucaggugcggaucaagccgggauccgccaacaagccuaaagaugaacucgacuacgcuaaugauauugagaagaaaaucugcaagauggagaaauguugaggacuagucccuguucccagagcccacuuuuuuuucuuuuuuugaaauaaaauagccugucuuucagaucucaaaggcucuuuucagagccaccaaaaaaaaaaaaaaaaaaaaaaaaaaaaaaaaaaaaaaaaaaaaaaaaaaaaaaaaaaaaaaaaaaaaaaaaaaaaaaaaaaaaaaaaaaaaaaaaaaaaagaauu

SEQ ID NO: 7465 - RNA, 1234 nt, Artificial Sequence
  mRNA Design a-1 (hSL-A100-N5) comprising derived and/or modified sequence from Pf(3D7)__XP_001351122.1__HsALB_Pf-CSP(98-397) (opt5)
aggagagucccgcagucggcguccagcggcucugcuuguucgugugugugucguugcaggccuuauucaagcuuaccaugaagugggugaccuucaucagccugcucuuucuguucuccucugccuacagcgcugacggcaaccccgauccuaaugccaacccgaaugucgaccccaacgcgaauccuaacguugaucccaaugcuaacccuaauguggaccccaacgccaauccuaacgccaauccgaacgcuaaucccaacgccaacccuaaugcuaaccccaaugccaacccuaaugcgaaccccaaugccaacccgaaugcuaacccuaaugccaaccccaaugcuaacccuaaugccaaccccaacgcgaaucccaacgccaauccuaacgcuaauccgaacgccaaucccaacgcuaauccuaacguggaucccaaugccaacccuaaugccaaccccaaugcuaacccgaacgcgaauccuaacgccaaucccaacgcuaauccuaacgccaaucccaacgccaauccuaacgcuaaucccaacgccaauccgaacgcgaauccuaacgcuaaccccaaugccaaccccaaugccaacccuaaugcuaacccgaaugccaaccccaaugcuaacccuaaugccaaccccaauaaaaacaaucaggggaacggacaaggccacaauaugccuaacgaccccaacagaaaugucgaugagaacgcgaaugccaacuccgcugugaagaauaacaauaacgaggaaccuucugacaaacauauuaaggaauaucuuaauaaaauccagaacagccuguccacagaguggucucccugcagcguuacgugugggaauggcauucaggugcggaucaagccgggauccgccaacaagccuaaagaugaacucgacuacgcuaaugauauugagaagaaaaucugcaagauggagaaauguagcucugucuuuaacgugguuaauuccagcaucgggcugauuauggugcuuucuuuccuguuucucaacugaggacuagucccuguucccagagcccacuuuuuuuucuuuuuuugaaauaaaauagccugucuuucagaucucaaaggcucuuuucagagccaccaaaaaaaaaaaaaaaaaaaaaaaaaaaaaaaaaaaaaaaaaaaaaaaaaaaaaaaaaaaaaaaaaaaaaaaaaaaaaaaaaaaaaaaaaaaaaaaaaaaaagaauu

SEQ ID NO: 7466 - RNA, 1561 nt, Artificial Sequence
  mRNA Design a-1 (hSL-A100-N5) comprising derived and/or modified sequence from Pf(3D7)__XP_001351122.1__HsALB_Pf-CSP(199-377)_L(PVTN)_HBsAg (opt5)
aggagagucccgcagucggcguccagcggcucugcuuguucgugugugugucguugcaggccuuauucaagcuuaccaugaagugggugaccuucaucagccugcucuuucuguucuccucugccuacagcgaccccaacgcuaauccuaacgccaauccgaacgcgaaucccaacgcuaauccuaacgccaaucccaacgccaauccuaacgcuaaucccaacgccaauccuaacgcuaacccgaaugccaaccccaaugcgaacccuaaugccaaccccaaugcuaacccuaaugccaaccccaaugcuaacccgaaugccaacccuaaugcgaaccccaacgccaauccuaacaaaaauaaccagggcaaugggcaaggacacaacaugcccaaugaucccaacagaaaugucgacgagaacgcuaaugccaacuccgcuguuaagaauaacaauaacgaggaaccuucugauaaacauauuaaggaauaucuuaacaaaauccagaauagccuguccacagaguggucuccgugcagcgugacguguggcaacgggauucaggugcggaucaagcccggauccgccaauaagccuaaagacgaacucgauuacgccaacgacauugagaagaaaaucugcaagauggagaaauguagcucuguccccgugaccaauauggaaaacaucacauccggcuuucuggggccucuucugguucuccaggcuggauucuuucugcugacccgcauucucacaaucccccaaagccuggauucuugguggaccucccuuaauuuccugggcggcagcccggugugccucgggcagaacucucaguccccuacaagcaaucacucccccaccucuuguccucccauuugcccuggauauagauggaugugucugcggcgcuuuaucauuuuccuuuuuauccugcuccugugccugauuuuccuccugguccuucuggacuaccagggcaugcuccccguguguccgcugaucccugggagcacgaccacaaacaccggacccugcaagacauguaccacgcccgcgcaaggcaauuccauguuuccuagcugcugcuguacaaagccgaccgaugggaacugcacauguauccccauuccuucuuccugggccuucgcuaaauaucuuugggagugggccagcguuagauuuucuuggcugagccuccuggugcccuucguccagugguucgugggacuguccccuaccguguggcucucugccaucuggaugaugugguacuggggccccagccuguauuccauugucagcccuuuuaucccccuucugccgauuuucuuuugccucuggguuuacaucugaggacuagucccuguucccagagcccacuuuuuuuucuuuuuuugaaauaaaauagccugucuuucagaucucaaaggcucuuuucagagccaccaaaaaaaaaaaaaaaaaaaaaaaaaaaaaaaaaaaaaaaaaaaaaaaaaaaaaaaaaaaaaaaaaaaaaaaaaaaaaaaaaaaaaaaaaaaaaaaaaaaaagaauu

SEQ ID NO: 7467 - RNA, 1471 nt, Artificial Sequence
  mRNA Design a-1 (hSL-A100-N5) comprising derived and/or modified sequence from Pf(3D7)__XP_001351122.1__Pf-CSP (opt6)
aggagagucccgcagucggcguccagcggcucugcuuguucgugugugugucguugcaggccuuauucaagcuuaccaugaugagaaaacuugcaauacuaagcguaucuucauuccuauucguagaagcacuauuccaagaauaucaaugcuauggaucaagcuccaacacaagaguacuuaacgaacuaaauuacgacaaugcaggaacaaaccuauacaaugaacuugaaaugaauuacuacggcaaacaagaaaacugguacucccuaaaaaaaaacucaaggucauuaggagaaaacgacgacggaaacaacgaagacaacgaaaaacuacgaaaacccaaacacaaaaaauuaaaacaaccagcagacggaaaccccgacccaaacgcaaacccaaacgucgacccaaacgcaaacccgaacguagacccaaacgcgaacccaaacguagacccaaacgcaaacccaaacgcaaacccaaacgcaaacccaaacgcaaacccaaaugcaaacccaaacgcaaacccaaacgccaauccaaacgccaacccaaacgcaaacccaaacgcaaacccaaacgcaaacccaaacgcaaaccccaacgcaaacccaaacgcuaacccaaacgcaaacccuaaugcaaacccuaacgcaaacccaaacgucgacccgaacgcaaacccaaaugcaaacccaaacgcaaacccaaacgcaaaccccaacgccaacccaaaugcaaacccaaaugcaaauccaaacgcaaacccaaacgcaaacccuaacgcaaacccaaacgcaaaccccaacgcaaacccaaacgcaaacccaaacgccaacccaaacgcaaaccccaaugcaaacccaaacgcaaacccaaacgcaaacccaaacaaaaacaaucaaggcaacggacaaggacacaacaugcccaacgacccaaaccgaaacgucgacgaaaacgccaacgcaaacagcgcaguaaaaaacaacaacaacgaagaacccucagacaaacacauaaaagaauacuuaaacaaaauacaaaacucacuaucuacagaauggucacccuguagcguaaccugcggcaacggaauacaaguaagaauaaaaccaggcucagcaaacaaaccaaaagaugaacuagacuacgccaaugauauagaaaaaaaaauauguaaaauggaaaaauguagcucagucuucaacguagucaacucaucaauaggacuaauaaugguacucuccuuccucuuccuaaauuaaggacuagucccuguucccagagcccacuuuuuuuucuuuuuuugaaauaaaauagccugucuuucagaucucaaaggcucuuuucagagccaccaaaaaaaaaaaaaaaaaaaaaaaaaaaaaaaaaaaaaaaaaaaaaaaaaaaaaaaaaaaaaaaaaaaaaaaaaaaaaaaaaaaaaaaaaaaaaaaaaaaaagaauu

SEQ ID NO: 7468 - RNA, 1402 nt, Artificial Sequence
  mRNA Design a-1 (hSL-A100-N5) comprising derived and/or modified sequence from Pf(3D7)__XP_001351122.1__Pf-CSP(1-374) (opt6)
aggagagucccgcagucggcguccagcggcucugcuuguucgugugugugucguugcaggccuuauucaagcuuaccaugaugagaaaacuagcaauauuaagcguaagcucauuccuauucguugaagcauuauuccaagaauaccaaugcuacggcucaagcucaaacacaagaguauuaaacgaauuaaacuacgacaaugcaggaaccaaccucuacaacgaacuagaaaugaauuauuacggcaaacaagaaaacugguacucacucaaaaaaaacucacgaucccuaggagaaaacgaugacggaaacaaugaagauaacgaaaaauuaagaaaaccaaaacacaaaaaauuaaaacaaccugcagacggaaacccagacccaaacgcaaauccaaauguagacccaaacgcaaaccccaacguagacccaaaugcaaacccaaacguagacccaaacgcaaacccaaaugcaaacccaaacgcaaacccaaacgcaaacccaaacgcaaaccccaacgcaaacccaaacgcaaacccaaacgccaaccccaacgcaaacccaaacgcaaacccgaaugcaaacccaaacgcaaacccaaacgcaaacccaaacgcaaacccaaacgcaaacccaaacgcaaacccaaaugcaaacccaaacguggauccaaacgcaaauccaaacgcaaacccaaacgcaaacccaaacgcaaaccccaacgcaaauccaaacgcaaaccccaaugcaaauccaaacgcaaacccaaacgccaacccaaacgcaaacccgaacgccaauccaaacgcaaacccaaacgcaaacccaaacgcaaacccaaacgccaacccaaacgcaaacccaaacgcaaacccaaacgcaaaccccaacaaaaacaaccaaggaaacggacaaggacacaacaugccaaacgauccaaacagaaacgucgacgaaaacgccaacgcuaacagcgcaguaaaaaacaauaacaacgaagaaccaucagacaaacauauaaaagaauacuuaaacaaaauccaaaacucacuaucaacagaauggucccccuguuccguaacaugcggaaacggaauacaaguacgaaucaaaccaggaucagccaacaaaccgaaagacgaacuagacuaugccaacgauauagaaaaaaaaauaugcaaaauggaaaaaugcugaggacuagucccuguucccagagcccacuuuuuuuucuuuuuuugaaauaaaauagccugucuuucagaucucaaaggcucuuuucagagccaccaaaaaaaaaaaaaaaaaaaaaaaaaaaaaaaaaaaaaaaaaaaaaaaaaaaaaaaaaaaaaaaaaaaaaaaaaaaaaaaaaaaaaaaaaaaaaaaaaaaaagaauu

SEQ ID NO: 7469 - RNA, 1255 nt, Artificial Sequence
  mRNA Design a-1 (hSL-A100-N5) comprising derived and/or modified sequence from Pf(3D7)__XP_001351122.1__Pf-CSP(1-325) (opt6)
aggagagucccgcagucggcguccagcggcucugcuuguucgugugugugucguugcaggccuuauucaagcuuaccaugaugcgaaaauuagcaauacuaagcguaagcucauucuuauucguagaagcacucuuccaagaauaccaaugcuacggaucaagcucaaacacaagaguccuaaacgaauuaaacuaugacaacgcaggaacaaaccuauacaacgaacuagaaaugaacuacuacggaaaacaagaaaacugguacucacucaaaaaaaacagcagaagucuaggagaaaacgacgacggaaacaacgaagacaacgaaaaacuacgaaaaccaaaacacaaaaaacuaaaacaaccagcagacgggaacccagacccaaacgcaaacccaaacguagauccaaacgcaaacccaaauguagacccuaacgcaaacccaaauguagacccaaacgcaaacccuaacgcaaacccaaaugcaaacccaaacgcaaauccaaacgcaaacccaaacgcaaacccaaacgcgaacccaaacgcaaacccaaacgcaaacccaaaugcaaaccccaacgcaaauccaaaugcaaacccaaaugcaaauccaaacgcaaacccaaacgcaaacccaaaugcaaauccaaacgcaaauccaaacguggauccaaacgcaaacccaaacgcaaacccaaacgcaaacccaaacgcaaacccaaacgcaaacccaaacgcaaauccaaacgccaauccaaacgcaaauccaaaugcaaacccaaacgcaaacccaaacgcaaacccaaacgcaaacccaaacgcaaacccaaacgcaaacccaaacgcaaacccaaacgcaaacccaaacgcaaacccaaacgcaaacccaaacaaaaacaaccaaggaaacggacaaggacacaacaugccaaacgacccaaacagaaacguagacgaaaacgccaacgcaaauagcgcagucaaaaacaacaauaacgaagaaccaucggacaaacacauaaaagaauacuuaaacaaaauacaaaacugaggacuagucccuguucccagagcccacuuuuuuuucuuuuuuugaaauaaaauagccugucuuucagaucucaaaggcucuuuucagagccaccaaaaaaaaaaaaaaaaaaaaaaaaaaaaaaaaaaaaaaaaaaaaaaaaaaaaaaaaaaaaaaaaaaaaaaaaaaaaaaaaaaaaaaaaaaaaaaaaaaaaagaauu

SEQ ID NO: 7470 - RNA, 1471 nt, Artificial Sequence
  mRNA Design a-1 (hSL-A100-N5) comprising derived and/or modified sequence from Pf(3D7)__XP_001351122.1__HsALB_Pf-CSP(19-397) (opt6)
aggagagucccgcagucggcguccagcggcucugcuuguucgugugugugucguugcaggccuuauucaagcuuaccaugaaaugggucacauuuauuucacuacuauucuuauucucaagcgcauacucacuauuucaagaauaccaaugcuacggcucauccucaaauacacgaguacuaaaugaacucaacuacgacaacgcaggaaccaaucucuacaacgaauuagaaaugaacuacuacggcaaacaagaaaacugguauucacuaaaaaaaaacaguagaucacuaggagaaaaugacgacggaaacaaugaagacaacgaaaaacuaagaaaaccaaaacacaaaaaauuaaaacaaccagcagacggaaacccagacccaaacgcaaacccuaacguagaucccaaugccaacccaaauguagacccaaacgcaaaccccaacgucgauccaaacgcaaacccaaacgcaaacccaaacgcaaacccaaacgcaaacccaaacgcaaacccaaaugcaaaccccaacgcaaacccaaacgcuaacccaaacgcaaacccaaacgcaaacccaaacgcaaacccaaacgcaaacccaaacgccaacccaaacgccaacccaaacgcaaauccaaacgcaaacccaaaugccaauccaaacguugacccaaacgcaaacccaaacgcaaaccccaacgcaaacccaaacgcaaauccaaacgcgaaccccaacgcaaacccaaacgcaaacccaaaugcaaacccaaacgcuaacccaaaugcaaacccaaacgccaacccaaacgccaacccaaacgcaaaccccaacgcaaacccaaacgcaaacccaaacgccaauccaaacgcaaacccaaaugcaaacccaaacaaaaacaaccaaggaaacggacaaggacacaacaugccaaacgaccccaacagaaacguagaugaaaaugcaaaugcuaacucagccguaaaaaacaauaacaacgaagaaccaucagacaaacacauaaaagaauaccuaaauaaaauacaaaauuccuuaucaacagaaugguccccaugcucaguaacuugcgguaacggcauacaaguaagaauaaaaccaggaucagcaaacaaaccaaaagacgaauuagacuaugcaaacgacauagaaaaaaaaauauguaaaauggaaaaaugcagcucaguauucaacguaguaaauuccucaaucggacucaucaugguauuaucauuccuauuuuuaaauuaaggacuagucccuguucccagagcccacuuuuuuuucuuuuuuugaaauaaaauagccugucuuucagaucucaaaggcucuuuucagagccaccaaaaaaaaaaaaaaaaaaaaaaaaaaaaaaaaaaaaaaaaaaaaaaaaaaaaaaaaaaaaaaaaaaaaaaaaaaaaaaaaaaaaaaaaaaaaaaaaaaaaagaauu

SEQ ID NO: 7471 - RNA, 1489 nt, Artificial Sequence
  mRNA Design a-1 (hSL-A100-N5) comprising derived and/or modified sequence from Pf(3D7)__XP_001351122.1__HsIns-iso1_Pf-CSP(19-397) (opt6)
aggagagucccgcagucggcguccagcggcucugcuuguucgugugugugucguugcaggccuuauucaagcuuaccauggcacuauggaugagacuacuaccacuacuagcacuccuagccuuauggggacccgauccagccgcagcacucuuccaagaauaccaaugcuauggaucauccuccaacacaagaguccuaaacgaauuaaauuacgacaacgcuggaacaaaccuauacaaugaacuagaaaugaauuauuacggaaaacaagaaaauugguacucacuaaaaaaaaacucuagaagccuaggagaaaacgacgacggaaacaacgaagauaacgaaaaacuaagaaaaccaaaacacaaaaaauuaaaacaacccgcagacggcaacccagacccaaaugcaaauccaaacguagacccaaacgcaaauccaaacguagacccaaacgcaaacccaaauguagacccaaacgcaaauccaaacgcaaacccaaaugcaaacccaaaugcaaacccaaacgcaaauccaaacgcaaaucccaacgccaacccaaacgcaaacccaaacgcaaauccaaacgcaaacccaaacgcaaacccaaacgcaaacccaaacgcaaacccaaaugcaaacccaaaugccaauccaaacgccaacccaaacgcaaacccaaacguagacccaaacgcaaacccaaacgccaacccaaacgcaaaccccaaugcaaacccaaacgcaaacccaaacgcaaaccccaacgcaaauccaaacgcaaacccaaacgcaaauccaaacgcaaauccaaacgccaacccaaacgcaaacccaaacgcaaauccaaacgcaaaccccaacgcaaacccaaacgccaacccaaaugcaaacccaaacgcaaaucccaauaaaaacaaccaaggaaacggacaaggacacaacaugccaaacgauccaaacagaaacguagacgaaaacgcaaacgcaaacucagcagucaaaaacaauaacaacgaagaaccaucagacaaacacauaaaagaauaccuaaacaaaauacaaaacucacuauccacagaauggucaccaugcucaguaaccugcggaaacggaauacaaguaagaauaaaaccaggaucagccaacaaaccaaaagacgaacuagacuaugcuaaugacauagaaaaaaaaauaugcaaaauggaaaaaugcuccucaguauucaacgucguaaacucuucaauaggacuaauaaugguacuauccuucuuauuucuaaacuaaggacuagucccuguucccagagcccacuuuuuuuucuuuuuuugaaauaaaauagccugucuuucagaucucaaaggcucuuuucagagccaccaaaaaaaaaaaaaaaaaaaaaaaaaaaaaaaaaaaaaaaaaaaaaaaaaaaaaaaaaaaaaaaaaaaaaaaaaaaaaaaaaaaaaaaaaaaaaaaaaaaaagaauu

SEQ ID NO: 7472 - RNA, 1468 nt, Artificial Sequence
  mRNA Design a-1 (hSL-A100-N5) comprising derived and/or modified sequence from Pf(3D7)__XP_001351122.1__HsSPARC_Pf-CSP(19-397) (opt6)
aggagagucccgcagucggcguccagcggcucugcuuguucgugugugugucguugcaggccuuauucaagcuuaccaugcgcgcauggauauucuuccuccuaugucuagcaggucgagcacuugcacucuuccaagaauaccaauguuacggauccucaagcaacacacgaguacuaaacgaacuaaacuacgauaacgcaggaaccaacuuauacaacgaacuagaaaugaacuacuacggcaaacaagaaaacugguacucacucaaaaaaaacagcagaagccuaggagaaaaugacgacggaaacaacgaagauaacgaaaaauuacgaaaacccaaacacaaaaaauuaaaacaacccgcagauggaaauccagacccgaacgcaaacccaaacguagacccaaacgcaaacccaaacguugacccaaacgcaaacccaaacguagacccaaacgcaaacccuaacgccaacccaaacgcaaacccaaacgcaaacccaaaugcgaacccaaaugcaaacccaaacgccaacccaaaugcaaaccccaacgcaaauccaaacgcaaacccaaaugcaaacccaaacgcaaacccaaacgcaaacccaaacgcaaacccaaacgccaaccccaaugcaaacccaaacgcaaacccaaacgucgacccaaacgcaaacccaaacgcaaacccaaacgcaaauccaaacgcaaauccaaacgcaaacccuaacgcaaacccaaacgcaaacccaaaugcaaauccaaacgcaaacccaaacgcaaacccaaacgcaaauccaaacgcaaacccaaacgcaaacccaaacgcaaacccuaaugcaaacccaaaugcaaauccaaacgcaaacccaaaugcaaaccccaacaaaaacaaccaaggaaacggacaaggacacaauaugccaaacgacccaaacagaaacguagacgaaaacgcaaacgccaacagcgcaguaaaaaacaacaacaacgaagaaccaucagacaaacacauaaaagaauaccuaaacaaaauacaaaacucacuaucaacagaauggucucccugcuccguaacaugcggaaacggcauacaaguacgaauaaaaccuggaucagccaacaaaccaaaagacgaacuagacuaugcaaaugacauagaaaaaaaaauaugcaaaauggaaaaaugcaguucagucuucaacguagucaacagcucaauaggccuaauaaugguacucucauuccuauucuuaaacuaaggacuagucccuguucccagagcccacuuuuuuuucuuuuuuugaaauaaaauagccugucuuucagaucucaaaggcucuuuucagagccaccaaaaaaaaaaaaaaaaaaaaaaaaaaaaaaaaaaaaaaaaaaaaaaaaaaaaaaaaaaaaaaaaaaaaaaaaaaaaaaaaaaaaaaaaaaaaaaaaaaaaagaauu

SEQ ID NO: 7473 - RNA, 1471 nt, Artificial Sequence
  mRNA Design a-1 (hSL-A100-N5) comprising derived and/or modified sequence from Pf(3D7)__XP_001351122.1__IgE_Pf-CSP(19-397) (opt6)
aggagagucccgcagucggcguccagcggcucugcuuguucgugugugugucguugcaggccuuauucaagcuuaccauggauuggacauggauucucuuccucguagcagcagccacaagaguacacucuuuauuucaagaauaccaaugcuacggaucaagcucaaacacacgcguacuaaacgaacuaaacuacgacaacgcaggaacaaacuuauacaacgaacuagaaaugaacuauuauggcaaacaagaaaacugguacucacuaaaaaaaaacuccagaagcuuaggagaaaacgacgacggaaacaacgaagacaacgaaaaacuacgcaaaccuaaacacaaaaaacuaaaacaaccugcagacggaaacccagacccaaacgcgaacccaaacguagauccaaacgcaaacccaaacguagaucccaacgcaaacccgaacguagacccuaacgcaaauccaaacgcaaaccccaacgcaaacccgaacgcaaacccaaacgcaaacccaaacgcaaacccaaacgcaaacccaaacgcaaacccaaacgccaacccaaacgcaaauccaaacgcuaacccaaaugcaaacccuaacgcaaacccaaacgccaacccaaacgcaaacccaaacgcaaacccaaacgcaaaucccaauguagacccaaacgcaaacccaaacgcaaacccaaacgcuaacccaaaugcaaacccaaacgcaaacccaaacgcaaacccaaacgcuaaccccaacgcaaacccgaacgcaaacccaaaugcaaacccaaacgcaaacccaaaugcaaacccaaacgcaaacccaaacgcaaaccccaaugccaacccaaacgcaaauccaaaugccaauccaaacgcaaacccaaacaaaaacaaccaaggaaauggacaaggacauaacaugccaaacgaccccaaccgaaauguagacgaaaacgccaacgcaaauagugcagucaaaaacaauaacaaugaagaacccucagauaaacauauaaaagaauacuuaaacaaaauacaaaacucacuaucaaccgaguggucuccuugcucaguaacauguggaaacggaauacaaguacgaauaaaaccaggaucagcaaacaaaccgaaagacgaacuagacuacgccaacgacauagaaaagaaaauauguaaaauggagaaauguaguucaguauucaacgugguaaacagcucaauaggccuaauaaugguacucucuuuccuauuccuaaacuaaggacuagucccuguucccagagcccacuuuuuuuucuuuuuuugaaauaaaauagccugucuuucagaucucaaaggcucuuuucagagccaccaaaaaaaaaaaaaaaaaaaaaaaaaaaaaaaaaaaaaaaaaaaaaaaaaaaaaaaaaaaaaaaaaaaaaaaaaaaaaaaaaaaaaaaaaaaaaaaaaaaaagaauu

SEQ ID NO: 7474 - RNA, 1636 nt, Artificial Sequence
  mRNA Design a-1 (hSL-A100-N5) comprising derived and/or modified sequence from Pf(3D7)__XP_001351122.1__Pf-CSP_L(G4SG4)_TM domain HA (opt6)
aggagagucccgcagucggcguccagcggcucugcuuguucgugugugugucguugcaggccuuauucaagcuuaccaugaugcguaaacuagcaauacuaucugucaguucauucuuauucguagaagcacuauuccaagaauaccaauguuacggaucuucaucaaacacaagaguacucaacgaauuaaacuacgauaacgcuggaaccaauuuauacaacgaacuagaaaugaacuacuauggaaaacaagaaaacugguauucacuaaaaaaaaacagcagaaguuuaggagaaaaugacgacggaaacaaugaagacaaugaaaaauuacgaaaaccaaaacacaaaaaauuaaaacaacccgccgacggaaauccagacccaaacgcaaacccaaauguagacccaaacgcaaacccaaauguagaucccaacgcaaacccaaacguagaucccaaugcaaacccaaacgcaaacccaaaugcaaaccccaacgcaaacccaaaugcaaacccuaacgcaaacccgaacgcaaacccaaacgcaaaucccaaugcaaaccccaacgcaaauccaaaugcaaacccuaacgcaaauccgaacgcaaauccaaacgcaaacccaaacgcaaacccaaacgcaaacccaaacgcaaacccaaacgucgacccaaacgccaauccaaacgcaaaccccaaugcaaacccaaaugcaaacccaaacgcaaacccaaaugccaacccaaacgcaaacccaaacgcaaacccaaacgcaaacccaaacgcaaacccaaaugcaaacccaaaugcaaacccaaacgccaacccaaacgcaaacccaaacgcaaacccaaacgccaacccaaacgcaaacccuaacgcaaauccaaacaaaaacaaccaagggaacggacaaggacacaacaugccaaacgacccaaacagaaacguagacgaaaacgccaacgcaaacucagcugucaaaaacaauaacaacgaagaacccuccgauaaacacauaaaagaauaccuaaacaaaauccaaaacucccuuucuacagaauggucacccugcucaguaacaugcggcaacggcauacaaguuagaaucaaaccaggaucagcaaauaaaccaaaagacgaauuagacuaugccaacgacauagaaaaaaaaauauguaaaauggaaaaaugcucaucaguuuucaacguaguaaacagcucaaucggauuaauaaugguacuaucauucuuauuuuuaaacggaggaggaggcuccggcggagguggaaaacuagaaucaacuagaauauaccaaauauuagcaauauacucaacaguagcaucaucacucguauuaguaguaucgcuaggagcaauaaguuucuggaugugcucuaacggaagccuacaaugccgaauaugcauauaaggacuagucccuguucccagagcccacuuuuuuuucuuuuuuugaaauaaaauagccugucuuucagaucucaaaggcucuuuucagagccaccaaaaaaaaaaaaaaaaaaaaaaaaaaaaaaaaaaaaaaaaaaaaaaaaaaaaaaaaaaaaaaaaaaaaaaaaaaaaaaaaaaaaaaaaaaaaaaaaaaaaagaauu

SEQ ID NO: 7475 - RNA, 1510 nt, Artificial Sequence
  mRNA Design a-1 (hSL-A100-N5) comprising derived and/or modified sequence from Pf(3D7)__XP_001351122.1__Pf-CSP(199-377)_L(PVTN)_HBsAg (opt6)
aggagagucccgcagucggcguccagcggcucugcuuguucgugugugugucguugcaggccuuauucaagcuuaccauggacccaaacgccaaccccaacgcaaacccaaaugcaaacccaaacgcuaaccccaacgcaaacccaaacgcuaacccuaacgcaaauccaaacgcaaaucccaacgcaaauccaaacgcaaacccaaacgcaaacccaaaugccaacccaaacgcaaacccuaacgcaaaucccaacgcaaauccaaaugcaaaccccaaugcaaacccaaacgcaaauccaaacaaaaauaaucaaggaaauggacaaggacauaacaugccaaacgacccuaaccgaaacgucgacgaaaaugcaaacgcaaacuccgcaguaaaaaacaacaacaacgaagaaccuuccgacaaacacauaaaagaauaccuaaacaaaauacaaaacucucuauccacugaauggucaccaugcucaguaaccugcggaaauggcauacaaguaagaauaaaaccaggaucugcaaauaaaccuaaagacgaacuagauuacgcaaaugacauagaaaaaaaaauaugcaaaauggaaaaaugcucaucagucccaguaacaaacauggaaaacaucacaucaggauucuuaggaccacuacucguauuacaagcaggauucuuucuuuuaacaagaauauuaacaauaccacaaucccuagacucaugguggacaucauuaaacuuccuagguggaucaccagucugccucggacaaaacucacaaucaccaacaucaaaccacucaccaacauccugcccaccaauuuguccaggauacagauggaugugccuacgaagauucauaauauucuuauuuauauuacuacuaugucucauauuuuuacucguacuauuagacuaucagggcauguuacccguauguccacuaauaccaggcucaaccaccacaaacacagguccaugcaaaaccugcaccacaccagcacaaggaaacuccauguuucccucauguugcugcaccaaacccaccgauggaaacugcaccugcauaccaaucccaucuucaugggcauucgcaaaauaucuaugggaaugggcauccguaagauuuucauggcuaucacuauuaguaccauucguacaaugguucguaggauuaucaccaacaguaugguuaucagcaauauggaugaugugguacuggggaccaucacuauacucaauaguauccccuuucauaccauuacucccaauauuuuucugccuuuggguauacauauaaggacuagucccuguucccagagcccacuuuuuuuucuuuuuuugaaauaaaauagccugucuuucagaucucaaaggcucuuuucagagccaccaaaaaaaaaaaaaaaaaaaaaaaaaaaaaaaaaaaaaaaaaaaaaaaaaaaaaaaaaaaaaaaaaaaaaaaaaaaaaaaaaaaaaaaaaaaaaaaaaaaaagaauu

SEQ ID NO: 7476 - RNA, 1552 nt, Artificial Sequence
  mRNA Design a-1 (hSL-A100-N5) comprising derived and/or modified sequence from Pf(3D7)__XP_001351122.1__Pf-CSP(199-387)_L(PVTN)_HBsAg (opt6)
aggagagucccgcagucggcguccagcggcucugcuuguucgugugugugucguugcaggccuuauucaagcuuaccaugauggcaccagauccaaacgcaaacccaaacgcaaacccaaacgcaaauccaaaugcaaacccaaacgcaaaucccaaugcaaacccuaacgcaaacccaaacgccaacccaaaugccaacccaaacgcaaacccaaacgcaaauccaaacgcaaacccaaacgcuaacccaaaugcaaaccccaacgcaaauccaaacgcaaacccaaacgcaaauccaaacgcuaacccaaacaaaaauaaccaaggaaacggacaaggacacaauaugccaaaugacccaaauagaaacguagacgaaaacgcaaacgcaaauucagcagucaaaaacaauaacaacgaagaaccauccgauaaacacauaaaagaauacuuaaacaaaauccaaaacucacuaucaacugaauggucaccuuguucaguaacauguggcaacggaauacaaguaagaauaaaaccagguucagccaacaaaccuaaagacgaacuagacuacgcaaacgacauagaaaaaaaaaucugcaaaauggaaaaaugcucaucaguauuuaauguaguaaacucaucaauaggacuaggcccuguaacaaacauggaaaacauaaccucaggauucuuaggcccacuacuaguacuccaagcaggauucuuucuucuaacaagaauauuaaccauuccucaaucauuagacucaugguggacaucccuuaacuuucuaggaggaagccccguaugcuuaggacaaaacagccaauccccaacauccaaccacuccccaacaucaugccccccaauaugcccaggauacagauggaugugccuaagaagauucaucauauuccuauuuauucucuuacucugcuuaauauucuuacucguauuacucgacuaccaaggaauguuaccaguaugcccacuaauaccaggauccacaacaacaaacacgggaccaugcaaaacaugcacaacaccugcccaaggaaauuccauguucccaucaugcugcugcacaaaaccaaccgacggcaacugcacaugcauaccaauaccaucaagcugggccuucgcaaaauaccuaugggaaugggcaucagugagauucucauggcucucauuacuagucccauucguacaaugguuuguaggauuaucaccaacaguuuggcucagcgcaauauggaugaugugguacuggggccccucuuuauauucaauaguauccccauuuauaccacuacucccaauauucuucuguuuauggguauacauauaaggacuagucccuguucccagagcccacuuuuuuuucuuuuuuugaaauaaaauagccugucuuucagaucucaaaggcucuuuucagagccaccaaaaaaaaaaaaaaaaaaaaaaaaaaaaaaaaaaaaaaaaaaaaaaaaaaaaaaaaaaaaaaaaaaaaaaaaaaaaaaaaaaaaaaaaaaaaaaaaaaaaagaauu

SEQ ID NO: 7477 - RNA, 736 nt, Artificial Sequence
  mRNA Design a-1 (hSL-A100-N5) comprising derived and/or modified sequence from Pf(3D7)__XP_001351122.1__HsALB_Pf-CSP(19-152) (opt6)
aggagagucccgcagucggcguccagcggcucugcuuguucgugugugugucguugcaggccuuauucaagcuuaccaugaaauggguaacauucauaucacuacuauuccuauucuccagcgcauacucacuauuccaagaauaccaaugcuacggaucaagcucaaacacacgaguacuaaacgaacuaaacuacgacaacgcaggaaccaaccuauacaacgaacuagaaaugaacuacuacggaaaacaagaaaacugguacucacuaaaaaaaaacagcagaucacuaggagaaaacgacgacggaaacaacgaagacaacgaaaaacuaagaaaaccaaaacacaaaaaacuaaaacaacccgcagacggaaacccagacccaaacgcaaacccaaacguagacccaaaugcaaacccaaacguagacccaaacgcaaacccaaacguagacccaaacgcaaacccaaacgcaaacccaaacgcaaacccaaacgcaaacccaaacgcaaacccaaacgcaaacccauaaggacuagucccuguucccagagcccacuuuuuuuucuuuuuuugaaauaaaauagccugucuuucagaucucaaaggcucuuuucagagccaccaaaaaaaaaaaaaaaaaaaaaaaaaaaaaaaaaaaaaaaaaaaaaaaaaaaaaaaaaaaaaaaaaaaaaaaaaaaaaaaaaaaaaaaaaaaaaaaaaaaaagaauu

SEQ ID NO: 7478 - RNA, 856 nt, Artificial Sequence
  mRNA Design a-1 (hSL-A100-N5) comprising derived and/or modified sequence from Pf(3D7)__XP_001351122.1__HsALB_Pf-CSP(19-192) (opt6)
aggagagucccgcagucggcguccagcggcucugcuuguucgugugugugucguugcaggccuuauucaagcuuaccaugaaauggguaacauucaucucacuacuauucuuauucucaucagcauacucacuauuccaagaauaccaaugcuacggaucaucaucaaacacacgaguacucaacgaacuaaacuacgacaacgcaggaacaaaccuauacaacgaacuagaaaugaacuacuacggaaaacaagaaaacugguauucacuaaaaaaaaacucaagaucacuaggagaaaacgacgacggaaacaacgaagacaacgaaaaacuaagaaaaccaaaacacaaaaaacuaaaacaaccagcagacggaaacccagacccaaacgcaaacccaaacguagacccaaacgccaacccaaacguagacccaaacgcaaacccaaacguagacccaaacgcaaacccaaacgcaaacccaaacgcaaacccaaacgcaaacccaaacgcaaacccaaacgcaaacccaaacgcaaacccaaacgcaaacccaaacgcaaacccaaacgcaaacccaaacgcaaacccaaacgcaaauccaaacgcaaacccaaacgcaaacccaaacgcaaacccaaacgcaaaccccuaaggacuagucccuguucccagagcccacuuuuuuuucuuuuuuugaaauaaaauagccugucuuucagaucucaaaggcucuuuucagagccaccaaaaaaaaaaaaaaaaaaaaaaaaaaaaaaaaaaaaaaaaaaaaaaaaaaaaaaaaaaaaaaaaaaaaaaaaaaaaaaaaaaaaaaaaaaaaaaaaaaaaagaauu

SEQ ID NO: 7479 - RNA, 1096 nt, Artificial Sequence
  mRNA Design a-1 (hSL-A100-N5) comprising derived and/or modified sequence from Pf(3D7)__XP_001351122.1__HsALB_Pf-CSP(19-272) (opt6)
aggagagucccgcagucggcguccagcggcucugcuuguucgugugugugucguugcaggccuuauucaagcuuaccaugaaauggguaacauucauaucacuacuauuccuauucucaagcgcauauucacuauuccaagaauaccaaugcuacggaucaagcucaaacacaagaguacuuaacgaacuaaacuacgacaacgcaggaacaaaccuauacaacgaacuugaaaugaacuacuacggaaaacaagaaaacugguacucacuaaaaaaaaauagcagaagcuuaggagaaaacgacgacggaaacaacgaagacaacgaaaaauuaagaaaaccuaaacacaaaaaacuaaaacaacccgcagacggaaacccagacccuaacgccaacccaaauguagacccaaacgcaaacccaaacguagacccaaacgcaaaccccaacguagacccaaacgcaaacccaaacgcaaacccaaacgcaaacccaaacgcaaaccccaacgcaaacccaaacgcaaacccaaacgcaaacccaaacgcaaacccaaacgcaaacccaaacgcaaacccaaacgcaaacccaaacgcaaacccaaacgcgaacccaaacgcaaacccaaacgcaaacccaaacgcaaacccaaacgcaaacccaaacguagacccaaaugcaaaccccaacgcaaacccaaacgcaaacccaaaugcaaaccccaacgcaaacccaaacgcaaacccaaacgcaaacccaaacgcaaacccaaaugcaaacccaaacgcaaacccaaacgccaacccaaacgcaaacccaaacgcaaacccaaacgcaaacccaaacgcaaacccgaacgcaaacccaaacgcaaacccaaacgcaaacccauaaggacuagucccuguucccagagcccacuuuuuuuucuuuuuuugaaauaaaauagccugucuuucagaucucaaaggcucuuuucagagccaccaaaaaaaaaaaaaaaaaaaaaaaaaaaaaaaaaaaaaaaaaaaaaaaaaaaaaaaaaaaaaaaaaaaaaaaaaaaaaaaaaaaaaaaaaaaaaaaaaaaaagaauu

SEQ ID NO: 7480 - RNA, 1258 nt, Artificial Sequence
  mRNA Design a-1 (hSL-A100-N5) comprising derived and/or modified sequence from Pf(3D7)__XP_001351122.1__HsALB_Pf-CSP(19-272)_L(AAY)_Pf-CSP(310-3 27)_L(AAY)_Pf-CSP(346-375) (opt6)
aggagagucccgcagucggcguccagcggcucugcuuguucgugugugugucguugcaggccuuauucaagcuuaccaugaaauggguaacauuuauaucacuccuauuccuuuuuucgucagcauacucacuauuccaagaauaucaaugcuacggaucaagcuccaacacaagaguacuaaacgaacuaaacuacgacaacgcaggaacaaaccuauacaacgaacuagaaaugaacuacuacggaaaacaagaaaacugguacucacuaaaaaaaaacagccgaagcuuaggagaaaaugacgacggaaacaacgaagacaacgaaaaauuacgcaaacccaaacacaaaaaacugaaacaaccagcagacggaaacccagacccaaacgcaaacccaaacguagacccaaacgcaaacccaaacguagacccaaacgcaaacccaaacguagacccaaacgcaaacccaaacgcgaacccaaacgccaacccaaacgcaaacccaaacgcaaacccaaacgcaaacccaaacgcaaacccaaacgcaaacccaaacgccaacccgaacgcaaacccaaacgcaaacccaaacgcaaauccaaacgcaaacccaaacgcaaacccaaacgccaacccaaacgcaaacccaaacgcaaacccaaauguggacccaaacgcaaacccaaacgcaaacccaaacgcaaacccaaaugcaaacccaaacgcaaacccaaacgcaaacccaaacgcaaacccaaacgcaaacccaaaugcaaacccaaacgcaaauccaaacgcaaacccaaacgcaaacccaaacgcaaacccaaacgcaaacccuaacgcaaacccaaacgcaaacccaaacgccaaccccaaugcaaacccagcagcauacgaaccaucagacaaacacauaaaagaauaccuaaacaaaauacaaaacucacucgcagcauauauaaagccaggaagcgccaacaaaccaaaagacgaacuagauuacgcaaacgacauagaaaaaaaaaucuguaaaauggaaaaaugcucauaaggacuagucccuguucccagagcccacuuuuuuuucuuuuuuugaaauaaaauagccugucuuucagaucucaaaggcucuuuucagagccaccaaaaaaaaaaaaaaaaaaaaaaaaaaaaaaaaaaaaaaaaaaaaaaaaaaaaaaaaaaaaaaaaaaaaaaaaaaaaaaaaaaaaaaaaaaaaaaaaaaaaagaauu

SEQ ID NO: 7481 - RNA, 1219 nt, Artificial Sequence
  mRNA Design a-1 (hSL-A100-N5) comprising derived and/or modified sequence from Pf(3D7)__XP_001351122.1__HsALB_Pf-CSP(19-272)_L(AAY)_Pf-CSP(346-3 65)_L(AAY)_P2 (opt6)
aggagagucccgcagucggcguccagcggcucugcuuguucgugugugugucguugcaggccuuauucaagcuuaccaugaaauggguaacauucauaucacuauuauuccuuuucucaucagcuuacucacuauuccaagaauaccaaugcuacggaucauccucaaacacaagaguacuaaacgaacuaaacuacgacaacgccggaaccaaccuauacaacgaacucgaaaugaacuacuacggaaaacaagaaaacugguacucacuaaaaaaaaacagccgaucccuaggagaaaacgacgacggaaauaacgaagacaaugaaaaauuaagaaaaccaaaacacaaaaaacuaaaacaaccagcagacggaaacccagacccaaacgcaaacccaaacguagauccaaacgcaaacccaaacguagacccaaacgcaaacccaaacguagacccaaacgcuaacccaaacgcaaacccaaacgcaaacccaaacgcaaacccaaacgcaaacccaaacgcaaacccgaacgcaaaccccaacgcaaacccaaacgcaaacccaaacgcaaaccccaacgcaaacccaaacgcaaacccgaacgcaaacccaaacgcaaacccaaacgcaaacccaaacgcaaacccaaacgcaaacccaaacguagacccaaacgccaacccaaacgcaaacccaaacgcaaacccaaacgcaaacccaaacgcaaacccaaacgcaaacccaaacgcaaacccaaacgcaaacccaaacgcaaacccaaacgcaaaccccaacgcaaacccaaaugcaaacccaaacgcaaacccaaaugcaaaccccaacgcaaacccaaaugccaauccaaacgcaaacccaaacgcaaacccagccgcauacauaaaaccaggauccgcaaacaaaccaaaagacgaacuagacuacgcaaacgacauagaagcagcauaccaauauauaaaagccaacuccaaauucauagguauaacagaacucuaaggacuagucccuguucccagagcccacuuuuuuuucuuuuuuugaaauaaaauagccugucuuucagaucucaaaggcucuuuucagagccaccaaaaaaaaaaaaaaaaaaaaaaaaaaaaaaaaaaaaaaaaaaaaaaaaaaaaaaaaaaaaaaaaaaaaaaaaaaaaaaaaaaaaaaaaaaaaaaaaaaaaagaauu

SEQ ID NO: 7482 - RNA, 1213 nt, Artificial Sequence
  mRNA Design a-1 (hSL-A100-N5) comprising derived and/or modified sequence from Pf(3D7)__XP_001351122.1__HsALB_Pf-CSP(19-272)_L(AAY)_Pf-CSP(346-3 65)_L(AAY)_PADRE (opt6)
aggagagucccgcagucggcguccagcggcucugcuuguucgugugugugucguugcaggccuuauucaagcuuaccaugaaauggguaaccuucauaucacuacuauucuuauucucaucagcauacucacucuuccaagaauaccaaugcuacggcucaagcucaaacacaagaguacuaaacgaauuaaacuaugacaacgccggaacaaaccuauacaaugaauuagaaaugaacuacuacggcaaacaagaaaacugguacucacucaaaaaaaacuccagaaguuuaggagaaaaugacgacggaaacaaugaagacaaugaaaaauuacgaaaaccaaaacacaaaaaacuaaaacaacccgccgacggaaaccccgacccgaacgcaaacccaaacguagacccaaacgcaaacccaaacguagacccaaaugcaaacccaaacguagacccaaacgcaaacccaaacgcaaacccaaacgcaaauccaaacgcaaacccaaaugcaaacccaaaugcaaauccaaacgcaaaccccaacgcaaacccaaacgcaaacccaaaugcaaauccaaacgccaacccaaaugcaaacccaaacgcaaauccaaacgcaaacccaaacgcaaauccaaacgcaaacccaaaugcaaacccaaacguagauccaaacgcaaacccaaacgccaacccaaacgcaaacccgaacgcaaacccaaacgcaaacccaaacgccaacccaaacgccaacccaaacgccaacccaaacgcaaacccaaacgcaaacccaaacgcaaacccaaacgcaaacccaaaugcaaacccuaacgcaaacccaaacgcaaacccaaacgcaaacccaaacgccaacccaaacgcaaauccagcagcauacauaaaaccaggaucagcaaacaaaccaaaagaugaacuagacuacgcaaaugacaucgaagcagccuacgcuaaauucguagcagccuggacacuaaaagcagcagccuaaggacuagucccuguucccagagcccacuuuuuuuucuuuuuuugaaauaaaauagccugucuuucagaucucaaaggcucuuuucagagccaccaaaaaaaaaaaaaaaaaaaaaaaaaaaaaaaaaaaaaaaaaaaaaaaaaaaaaaaaaaaaaaaaaaaaaaaaaaaaaaaaaaaaaaaaaaaaaaaaaaaaagaauu

SEQ ID NO: 7483 - RNA, 1270 nt, Artificial Sequence
  mRNA Design a-1 (hSL-A100-N5) comprising derived and/or modified sequence from Pf(3D7)__XP_001351122.1__HsALB_Pf-CSP(19-272)_L(G4S)_Pf-CSP(310-3 27)_L(G4S)_Pf-CSP(346-375) (opt6)
aggagagucccgcagucggcguccagcggcucugcuuguucgugugugugucguugcaggccuuauucaagcuuaccaugaaauggguaaccuucaucucacuacuauuccuauucucaagcgcauacucacucuuucaagaauaccaaugcuacggcucaagcucaaacacacgaguacuaaacgaacuaaacuacgacaacgcaggaacaaaccuauauaacgaacucgaaaugaacuacuacggcaaacaagaaaauugguacucacuaaaaaaaaacagcagaagcuuaggagaaaacgacgacggaaacaacgaagauaacgaaaaacuaagaaaaccaaaacacaaaaaacuaaaacaacccgcagacggaaacccagacccaaacgcaaauccaaauguagacccgaacgcaaacccaaacguagacccaaaugcgaacccaaacgucgacccaaacgcaaacccaaaugcaaacccaaaugcgaacccaaacgcaaacccaaacgcaaauccaaacgcaaauccaaaugcaaacccaaacgcgaauccaaacgcaaacccaaacgcaaacccaaacgcaaacccaaacgcaaacccaaacgcaaacccaaacgcaaacccgaacgcuaacccaaacgcaaacccaaacgcaaacccaaacguagauccaaacgcgaacccaaacgcaaacccaaaugcaaacccaaacgcaaacccaaacgcaaacccaaacgcaaacccaaacgcaaacccaaacgcaaacccaaacgcgaacccaaacgcaaauccaaaugcaaacccaaacgcaaacccaaacgcaaacccaaacgcaaacccaaaugcaaacccaaacgcaaacccaaaugcaaacccaaacgcaaacccaggaggaggaggaucagaacccucagacaaacacauaaaagaauaccuaaacaaaauacaaaacucacuaggaggaggaggaucgaucaaaccaggaagcgcaaacaaaccaaaagacgaacucgacuacgcaaacgauauagaaaaaaaaauaugcaaaauggaaaaaugcucguaaggacuagucccuguucccagagcccacuuuuuuuucuuuuuuugaaauaaaauagccugucuuucagaucucaaaggcucuuuucagagccaccaaaaaaaaaaaaaaaaaaaaaaaaaaaaaaaaaaaaaaaaaaaaaaaaaaaaaaaaaaaaaaaaaaaaaaaaaaaaaaaaaaaaaaaaaaaaaaaaaaaaagaauu

SEQ ID NO: 7484 - RNA, 1255 nt, Artificial Sequence
  mRNA Design a-1 (hSL-A100-N5) comprising derived and/or modified sequence from Pf(3D7)__XP_001351122.1__HsALB_Pf-CSP(19-272)_L(G4S)_Pf-CSP(310-3 27)_Pf-CSP(346-375) (opt6)
aggagagucccgcagucggcguccagcggcucugcuuguucgugugugugucguugcaggccuuauucaagcuuaccaugaaauggguaacauucauaucacuccuauuccuauucuccucagcauacucccucuuccaagaauaccaaugcuacggcucaagcucaaacacacgaguacuaaacgaacuaaauuacgacaacgccggaacaaaccuauauaaugaacuagaaaugaauuacuacggaaaacaagaaaacugguacucacuuaaaaaaaacucaagaucauuaggagaaaacgacgacggcaacaacgaagacaacgaaaaacuaagaaaaccaaaacacaaaaaacuaaaacaacccgcagacggaaauccagauccaaacgcaaacccaaacguagacccaaacgcaaacccaaacguagacccaaacgcaaacccaaacgucgacccaaacgccaacccaaacgcaaacccaaacgcaaacccaaacgcaaacccaaacgccaacccaaacgcaaacccaaacgcaaacccaaacgcaaacccaaacgcaaacccaaacgcaaacccaaacgcaaacccgaacgcaaacccaaacgcaaauccuaacgcaaacccaaacgcaaacccaaacgcaaauccgaacgcaaacccaaacguagacccaaacgcaaacccaaacgcaaacccaaacgcaaacccaaacgcaaacccaaacgcaaacccuaacgcaaacccaaaugcaaacccaaacgcgaacccaaaugcaaacccaaaugcaaacccaaacgcaaacccaaacgcaaacccaaacgcaaauccaaacgcaaauccaaacgcaaacccaaacgcaaacccaaacgcaaacccaaacgccaacccaggaggagguggaagcgaaccauccgacaaacacauaaaagaauaccuaaacaaaauacaaaacucacuaauaaaacccggcucagcaaacaaaccaaaagacgaacuagacuacgccaacgacauagaaaaaaaaauauguaaaauggaaaaaugcucauaaggacuagucccuguucccagagcccacuuuuuuuucuuuuuuugaaauaaaauagccugucuuucagaucucaaaggcucuuuucagagccaccaaaaaaaaaaaaaaaaaaaaaaaaaaaaaaaaaaaaaaaaaaaaaaaaaaaaaaaaaaaaaaaaaaaaaaaaaaaaaaaaaaaaaaaaaaaaaaaaaaaaagaauu

SEQ ID NO: 7485 - RNA, 1255 nt, Artificial Sequence
  mRNA Design a-1 (hSL-A100-N5) comprising derived and/or modified sequence from Pf(3D7)__XP_001351122.1__HsALB_Pf-CSP(19-325) (opt6)
aggagagucccgcagucggcguccagcggcucugcuuguucgugugugugucguugcaggccuuauucaagcuuaccaugaaauggguaacauucauaucacuccuauuccuauucucaagcgcauacucauuauuccaagaauaccaaugcuacggaucaucaucuaacacaagaguacucaacgaacuaaacuacgacaacgcaggaacuaaucucuacaacgaacuagaaaugaacuacuacggaaaacaagaaaacugguauucacuaaaaaaaaacagccgaucauuaggagaaaacgacgacggcaacaacgaagacaacgaaaaacuacgaaaaccaaaacacaaaaaauuaaaacagccagccgacggaaacccagacccaaacgcaaacccaaacguagacccaaacgcaaacccaaacguagacccaaacgcaaacccaaacguagacccaaacgcaaacccaaacgcaaacccaaacgcaaauccaaacgcaaacccaaacgccaacccaaacgcaaacccaaacgcaaaccccaacgcaaacccaaacgcaaacccaaacgcaaacccaaaugccaacccaaacgcaaacccaaacgcaaacccaaacgcaaacccaaacgcaaacccaaaugcaaacccaaacgcaaacccaaacguagacccaaacgcaaacccaaaugcaaacccaaacgcaaaccccaacgcaaacccaaacgcaaacccaaacgcaaacccaaacgcaaacccaaacgccaacccaaacgcaaacccaaacgcaaacccaaacgcaaacccaaacgcaaacccaaacgcaaauccaaacgcaaacccaaacgcaaacccaaacgcaaacccaaacgcaaacccaaacgcaaacccaaauaaaaacaaucaaggaaacggacaaggacacaacaugccaaacgauccaaaucgcaacguagacgaaaacgcaaacgcaaacagcgcagucaaaaacaacaacaacgaagaaccaucagacaaacacauaaaagaauaccuaaauaaaauacaaaacuagggacuagucccuguucccagagcccacuuuuuuuucuuuuuuugaaauaaaauagccugucuuucagaucucaaaggcucuuuucagagccaccaaaaaaaaaaaaaaaaaaaaaaaaaaaaaaaaaaaaaaaaaaaaaaaaaaaaaaaaaaaaaaaaaaaaaaaaaaaaaaaaaaaaaaaaaaaaaaaaaaaaagaauu

SEQ ID NO: 7486 - RNA, 1432 nt, Artificial Sequence
  mRNA Design a-1 (hSL-A100-N5) comprising derived and/or modified sequence from Pf(3D7)__XP_001351122.1__HsALB_Pf-CSP(19-384) (opt6)
aggagagucccgcagucggcguccagcggcucugcuuguucgugugugugucguugcaggccuuauucaagcuuaccaugaaauggguaaccuuuauaucacucuuauuccuauuuucaucagcauacucacucuuccaagaauaucaaugcuacggaucaucaucaaacacaagaguccucaaugaauuaaacuaugacaaugcaggaaccaaccuauacaacgaauuagaaaugaacuacuacggcaaacaagaaaacugguacucacucaaaaaaaacucaagauccuuaggagaaaaugaugacggaaacaacgaagacaacgaaaaacuccgaaaaccaaaacacaaaaaacuaaaacaacccgccgacggaaacccagaccccaacgcaaacccaaauguagaccccaacgcaaacccaaacguagacccaaacgcaaacccaaacguagacccaaacgcaaauccaaacgccaacccaaacgcaaacccaaacgccaacccaaacgcaaacccaaacgcaaacccaaacgcaaacccaaacgcaaacccaaaugcaaacccaaaugcaaacccaaacgcaaacccaaacgcaaacccaaacgcaaacccaaacgcaaacccaaaugcaaacccaaacgcaaacccaaacgcaaacccaaacguagacccaaaugcaaacccaaacgcaaacccaaacgcaaauccaaaugcaaauccaaacgcaaauccaaacgcaaacccaaacgcaaacccaaacgcaaacccaaacgcaaauccaaaugcaaacccaaacgcaaacccaaacgcaaacccaaacgcuaacccaaacgccaauccaaacgcaaacccaaacgcaaacccuaaugcaaacccaaacgccaacccaaauaaaaauaaccaaggaaacggacaaggacacaacaugccaaacgacccaaacagaaacgucgaugaaaacgcaaacgcaaauuccgcagucaaaaacaacaacaacgaagaaccaucagacaaacacauaaaagaauaccucaacaaaauacaaaacucccuaucaacagaauggucacccugcuccguuacaugcgguaacggcauacaaguaagaauaaaaccaggaucagcuaacaaacccaaagacgaacuagacuacgccaacgacauagaaaaaaaaauaugcaaaauggaaaaaugcuccucaguauucaacguaguaaacucaucauaaggacuagucccuguucccagagcccacuuuuuuuucuuuuuuugaaauaaaauagccugucuuucagaucucaaaggcucuuuucagagccaccaaaaaaaaaaaaaaaaaaaaaaaaaaaaaaaaaaaaaaaaaaaaaaaaaaaaaaaaaaaaaaaaaaaaaaaaaaaaaaaaaaaaaaaaaaaaaaaaaaaaagaauu

SEQ ID NO: 7487 - RNA, 1570 nt, Artificial Sequence
  mRNA Design a-1 (hSL-A100-N5) comprising derived and/or modified sequence from Pf(3D7)__XP_001351122.1__HsALB_Pf-CSP(19-384)_TM domain HA (opt6)
aggagagucccgcagucggcguccagcggcucugcuuguucgugugugugucguugcaggccuuauucaagcuuaccaugaaauggguaacauuuauaucacuacuuuuccuauucucaucagcauacucacucuuccaagaauaucaaugcuauggauccucaucaaacacaagaguacucaacgaauuaaacuacgauaaugccggaacaaaccuauauaacgaacuagaaaugaacuacuacggaaaacaagaaaauugguacucauuaaaaaaaaacuccagaucccuuggagaaaacgacgauggaaacaacgaagauaacgaaaaauuaagaaaaccaaaacacaaaaaauugaaacaaccagcagacgguaacccagacccaaacgccaacccaaacguagacccaaacgcgaauccaaacgucgacccaaacgcaaaucccaacguagacccaaaugcaaauccaaaugccaauccaaacgcaaacccaaacgcaaacccaaaugcaaacccaaacgccaacccaaacgcaaauccaaacgcaaacccaaacgcaaacccaaacgccaacccaaacgccaaccccaaugcaaacccaaaugcaaacccaaacgcaaacccaaacgcaaauccaaacgcaaacccaaacgccaacccaaacguagacccaaacgcaaauccaaacgcaaacccaaacgccaauccaaacgcaaacccaaacgccaacccaaaugcaaaucccaacgcaaacccaaacgcaaauccaaaugcaaaccccaacgcaaauccaaacgcaaacccaaacgcaaauccaaacgcaaauccaaaugcaaacccaaacgcaaacccuaaugcaaacccaaacgcaaacccaaacgccaacccaaacaaaaacaaccaaggaaacggacaaggucacaauaugccaaaugacccaaaccgaaacguagacgaaaacgcaaaugccaauagcgcaguaaaaaacaauaacaacgaagaaccuucagauaaacacauaaaagaauaccuaaacaaaauacaaaacucccuaucaacagaauggucaccuuguucagucacauguggaaacggaauacaaguaagaauaaaaccaggaucagcaaacaaaccaaaagacgaacuagauuacgcaaacgauauagaaaaaaaaauauguaaaauggaaaaaugcuccucagucuucaacguagucaacaguuccaaacuagaaucaaccagaaucuaccaaauacuagcaauauauuccacaguagcaagcucacucguauuaguagucucccuaggagcaauaucauucuggaugugcucaaacggaagcuuacaaugccgaauauguauauaaggacuagucccuguucccagagcccacuuuuuuuucuuuuuuugaaauaaaauagccugucuuucagaucucaaaggcucuuuucagagccaccaaaaaaaaaaaaaaaaaaaaaaaaaaaaaaaaaaaaaaaaaaaaaaaaaaaaaaaaaaaaaaaaaaaaaaaaaaaaaaaaaaaaaaaaaaaaaaaaaaaaagaauu

SEQ ID NO: 7488 - RNA, 1282 nt, Artificial Sequence
  mRNA Design a-1 (hSL-A100-N5) comprising derived and/or modified sequence from Pf(3D7)__XP_001351122.1__HsALB_Pf-CSP(82-397) (opt6)
aggagagucccgcagucggcguccagcggcucugcuuguucgugugugugucguugcaggccuuauucaagcuuaccaugaaauggguaacauucauaucacuacuauuccucuucaguucagccuauagcgauaacgaaaaacuaagaaaaccaaaacacaaaaaacucaaacaaccagcagacggaaacccagacccaaacgcaaacccaaacguagacccaaacgcaaacccaaacguagacccaaacgcaaauccaaacguagacccaaaugcaaaccccaacgcaaacccaaacgcaaacccaaacgcaaacccaaacgcaaacccaaaugcgaacccaaaugcaaauccaaacgcaaacccaaacgcaaacccaaacgcaaacccaaacgcuaacccaaacgcaaacccaaacgcaaacccaaaugcaaacccaaacgcaaacccaaacgcaaaccccaacgcaaacccaaacguagacccaaacgcaaacccaaacgcaaacccaaacgcaaacccaaacgccaacccaaaugccaacccaaacgcaaacccaaaugcaaaccccaacgcaaacccaaacgccaacccaaacgcaaacccaaacgcaaacccaaacgcaaaccccaaugcaaacccaaacgcaaacccaaaugcaaauccaaacgcaaacccaaacgcaaacccaaacgcaaacccaaacaaaaacaaccaaggaaacggacaaggacacaacaugccaaacgacccaaaucgaaacgucgaugaaaacgccaacgcaaacucagcaguaaaaaacaacaacaacgaagaaccaucugacaaacacauaaaagaauaccuaaacaaaauacaaaacucauuauccaccgaauggucaccauguucaguaacaugcggcaacggaauacaagucagaauaaaaccaggcucagcaaauaaaccaaaagacgaacuagacuacgcaaacgacauagaaaaaaaaauaugcaaaauggaaaaauguucaucagucuucaacguaguaaacucaucaauaggacucauaaugguacuaucauuccuauucuuaaacuaaggacuagucccuguucccagagcccacuuuuuuuucuuuuuuugaaauaaaauagccugucuuucagaucucaaaggcucuuuucagagccaccaaaaaaaaaaaaaaaaaaaaaaaaaaaaaaaaaaaaaaaaaaaaaaaaaaaaaaaaaaaaaaaaaaaaaaaaaaaaaaaaaaaaaaaaaaaaaaaaaaaaagaauu

SEQ ID NO: 7489 - RNA, 634 nt, Artificial Sequence
  mRNA Design a-1 (hSL-A100-N5) comprising derived and/or modified sequence from Pf(3D7)__XP_001351122.1__HsALB_Pf-CSP(93-192) (opt6)
aggagagucccgcagucggcguccagcggcucugcuuguucgugugugugucguugcaggccuuauucaagcuuaccaugaaauggguaacauucaucucacuacuauuccuauucucaagcgcauacucaaaacuaaaacaaccagcagacggaaacccagacccaaacgcaaacccaaacguagacccaaacgcaaacccaaacguagacccaaacgcaaacccaaacguagacccaaacgcaaacccaaacgcaaacccaaacgcaaacccaaacgcaaacccaaacgcaaacccaaacgcaaacccaaacgcaaacccaaacgcaaacccaaacgcaaacccaaacgcaaacccaaacgcaaacccaaacgcaaacccaaacgcaaacccaaacgcaaacccaaacgcaaacccaaacgcaaacccauaaggacuagucccuguucccagagcccacuuuuuuuucuuuuuuugaaauaaaauagccugucuuucagaucucaaaggcucuuuucagagccaccaaaaaaaaaaaaaaaaaaaaaaaaaaaaaaaaaaaaaaaaaaaaaaaaaaaaaaaaaaaaaaaaaaaaaaaaaaaaaaaaaaaaaaaaaaaaaaaaaaaaagaauu

SEQ ID NO: 7490 - RNA, 874 nt, Artificial Sequence
  mRNA Design a-1 (hSL-A100-N5) comprising derived and/or modified sequence from Pf(3D7)__XP_001351122.1__HsALB_Pf-CSP(93-272) (opt6)
aggagagucccgcagucggcguccagcggcucugcuuguucgugugugugucguugcaggccuuauucaagcuuaccaugaaaugggucacauucauaucacuccuauuccuauucucaagcgcauacucaaaacuaaaacaaccagcagacggaaacccagacccaaacgcaaacccaaacguagacccaaacgcaaacccaaacguagacccaaacgcaaacccaaacguagacccaaacgcaaacccaaacgcaaacccaaacgccaacccaaacgcaaacccaaacgcaaacccaaacgcaaacccaaacgcaaacccaaacgcaaacccaaacgcaaacccaaacgcaaacccaaacgcaaacccaaacgcaaacccaaacgcaaauccaaacgcaaacccaaacgccaacccaaacgcaaacccaaacgcaaacccaaacguagacccaaacgcaaacccaaacgcaaacccaaacgcaaacccaaacgcaaacccaaacgcaaacccaaacgcaaacccaaacgcaaacccaaacgcaaacccaaacgcaaauccaaacgcaaacccaaacgcaaacccaaacgcaaacccaaacgcaaacccaaacgcaaacccaaacgcaaacccaaacgcaaacccaaacgcaaacccaaacgcaaacccauaaggacuagucccuguucccagagcccacuuuuuuuucuuuuuuugaaauaaaauagccugucuuucagaucucaaaggcucuuuucagagccaccaaaaaaaaaaaaaaaaaaaaaaaaaaaaaaaaaaaaaaaaaaaaaaaaaaaaaaaaaaaaaaaaaaaaaaaaaaaaaaaaaaaaaaaaaaaaaaaaaaaaagaauu

SEQ ID NO: 7491 - RNA, 1249 nt, Artificial Sequence
  mRNA Design a-1 (hSL-A100-N5) comprising derived and/or modified sequence from Pf(3D7)__XP_001351122.1__HsALB_Pf-CSP(93-397) (opt6)
aggagagucccgcagucggcguccagcggcucugcuuguucgugugugugucguugcaggccuuauucaagcuuaccaugaaauggguaacauucauaucacuccuauuccuauucucaucagcauacucaaaacuaaaacaacccgcagacggaaacccagacccaaacgccaacccaaacguagacccaaacgcaaacccgaacguagacccaaacgcaaaccccaacguagacccaaacgcaaacccaaaugcaaacccaaacgcaaacccaaacgcaaacccaaacgcaaacccaaacgcaaacccaaacgcaaacccaaacgcaaacccaaacgcaaacccaaacgcgaaucccaacgcaaauccaaacgcaaacccaaacgcaaauccaaacgcaaacccgaacgcaaacccaaacgcaaacccaaacgcaaacccaaacguagauccaaacgcaaauccaaacgcaaacccaaacgcaaauccaaacgcaaacccaaacgcaaacccaaacgcaaaccccaacgcaaacccaaacgcaaacccaaacgcaaacccaaacgcaaauccaaacgccaacccaaacgcaaacccaaacgcaaacccaaacgcgaacccaaacgcgaacccaaacgcaaacccaaacgcaaacccaaacgcaaacccaaacaaaaacaaccaagggaacggacaaggacacaacaugccaaacgauccaaacagaaacguagacgaaaacgcaaacgcaaacucagcaguaaaaaacaacaacaacgaagaaccaucagacaaacacauaaaagaauaccuaaacaaaauacaaaacucacucucaacagaauggucaccaugcaguguaacaugcggaaauggaauacaaguacguauaaaaccaggaucagcaaacaaaccaaaagacgaauuagacuacgccaacgauauagaaaaaaaaauaugcaaaauggaaaaaugcagcucagucuucaacguagucaacagcucaauaggacuaauaaugguccucucauucuuauuucuaaacugaggacuagucccuguucccagagcccacuuuuuuuucuuuuuuugaaauaaaauagccugucuuucagaucucaaaggcucuuuucagagccaccaaaaaaaaaaaaaaaaaaaaaaaaaaaaaaaaaaaaaaaaaaaaaaaaaaaaaaaaaaaaaaaaaaaaaaaaaaaaaaaaaaaaaaaaaaaaaaaaaaaaagaauu

SEQ ID NO: 7492 - RNA, 619 nt, Artificial Sequence
  mRNA Design a-1 (hSL-A100-N5) comprising derived and/or modified sequence from Pf(3D7)__XP_001351122.1__HsALB_Pf-CSP(98-192) (opt6)
aggagagucccgcagucggcguccagcggcucugcuuguucgugugugugucguugcaggccuuauucaagcuuaccaugaaauggguaacauucauaagccuacuauuccuauucagcucagcauacagcgcagacggaaacccagacccaaacgcaaacccaaacguagacccaaacgcaaacccaaacguagacccaaacgcaaacccaaacguagacccaaacgcaaacccaaacgcaaacccaaacgcaaacccaaacgcaaacccaaacgcaaacccaaacgcaaacccaaacgcaaacccaaacgcaaacccaaacgcaaacccaaacgcaaacccaaacgcaaacccaaacgcaaacccaaacgcaaacccaaacgcaaacccaaacgcaaacccaaacgcaaacccauaaggacuagucccuguucccagagcccacuuuuuuuucuuuuuuugaaauaaaauagccugucuuucagaucucaaaggcucuuuucagagccaccaaaaaaaaaaaaaaaaaaaaaaaaaaaaaaaaaaaaaaaaaaaaaaaaaaaaaaaaaaaaaaaaaaaaaaaaaaaaaaaaaaaaaaaaaaaaaaaaaaaaagaauu

SEQ ID NO: 7493 - RNA, 859 nt, Artificial Sequence
  mRNA Design a-1 (hSL-A100-N5) comprising derived and/or modified sequence from Pf(3D7)__XP_001351122.1__HsALB_Pf-CSP(98-272) (opt6)
aggagagucccgcagucggcguccagcggcucugcuuguucgugugugugucguugcaggccuuauucaagcuuaccaugaaauggguaacauucauaucacuacuauuccuauucagcucagccuacagcgcagacggaaacccagacccaaacgcaaacccaaacguagacccaaacgcaaacccaaacgucgacccaaacgcaaacccaaacguagacccaaacgcaaacccaaacgcaaacccaaacgcaaacccaaacgcaaacccaaacgcaaacccaaacgcaaacccaaacgcaaacccaaacgcaaacccaaacgcaaacccaaacgcaaacccaaacgcaaacccaaacgcaaacccaaacgcaaacccaaacgcaaacccaaacgcaaacccaaacgcaaacccaaacgcaaacccaaacguagacccaaaugcaaacccaaacgcaaacccaaacgcaaacccaaacgcaaacccaaacgcaaacccaaacgcaaacccaaacgcaaacccaaacgcaaacccaaacgcaaacccaaacgcaaacccaaacgcaaacccaaacgcgaacccaaacgcaaacccaaacgcaaacccaaacgcaaacccaaacgcaaacccaaaugcaaacccaaacgcaaacccauaaggacuagucccuguucccagagcccacuuuuuuuucuuuuuuugaaauaaaauagccugucuuucagaucucaaaggcucuuuucagagccaccaaaaaaaaaaaaaaaaaaaaaaaaaaaaaaaaaaaaaaaaaaaaaaaaaaaaaaaaaaaaaaaaaaaaaaaaaaaaaaaaaaaaaaaaaaaaaaaaaaaaagaauu

SEQ ID NO: 7494 - RNA, 1165 nt, Artificial Sequence
  mRNA Design a-1 (hSL-A100-N5) comprising derived and/or modified sequence from Pf(3D7)__XP_001351122.1__HsALB_Pf-CSP(98-374) (opt6)
aggagagucccgcagucggcguccagcggcucugcuuguucgugugugugucguugcaggccuuauucaagcuuaccaugaaaugggucacauucauaucccuacuauuccuauucucaucagcauauucagcagauggaaacccagacccaaacgccaacccaaacguagacccaaacgcaaacccaaacguagacccaaacgcaaacccaaacguagacccaaacgcaaacccaaacgcaaacccaaacgcaaacccaaacgcaaacccaaacgcaaacccaaacgcaaacccaaacgcaaacccaaacgcaaacccaaacgcaaacccaaacgcaaacccaaacgcaaacccaaaugcaaauccaaacgcaaauccaaacgcaaacccaaacgccaacccaaacgcaaauccaaacgcaaacccaaacguagacccgaacgcaaacccgaacgcaaacccaaacgcaaacccaaaugcaaacccaaacgcaaacccaaacgccaacccaaacgcaaacccaaacgcaaacccaaaugcaaacccaaacgcaaacccaaacgccaacccaaacgcaaacccaaacgcaaacccaaacgcaaacccaaacgcaaacccaaaugcaaacccaaacgcaaacccaaacgcaaacccaaacaaaaacaaccaaggaaauggacaaggccacaacaugccaaacgacccaaacagaaacguagacgaaaacgcaaacgcaaacuccgcagucaaaaacaacaacaacgaagaaccauccgacaaacacauaaaagaauaccucaauaaaauacaaaacucacuaucaacagaaugguccccaugcucaguaacaugcggaaacggaauacaaguaagaauaaaaccaggauccgcaaacaaaccaaaagacgaacuagacuacgcaaacgauauagaaaaaaaaauaugcaaaauggaaaaaugcuaaggacuagucccuguucccagagcccacuuuuuuuucuuuuuuugaaauaaaauagccugucuuucagaucucaaaggcucuuuucagagccaccaaaaaaaaaaaaaaaaaaaaaaaaaaaaaaaaaaaaaaaaaaaaaaaaaaaaaaaaaaaaaaaaaaaaaaaaaaaaaaaaaaaaaaaaaaaaaaaaaaaaagaauu

SEQ ID NO: 7495 - RNA, 1234 nt, Artificial Sequence
  mRNA Design a-1 (hSL-A100-N5) comprising derived and/or modified sequence from Pf(3D7)__XP_001351122.1__HsALB_Pf-CSP(98-397) (opt6)
aggagagucccgcagucggcguccagcggcucugcuuguucgugugugugucguugcaggccuuauucaagcuuaccaugaaauggguaaccuucauaucauuacuauuccuuuucagcucggcauacucagcagacggcaacccagacccaaacgcaaacccaaacgucgacccaaaugcgaacccaaacguagacccaaacgcaaacccaaacguagauccaaacgcaaacccaaacgcaaacccaaacgcaaacccaaacgcaaacccaaacgccaacccaaaugcaaacccaaacgcaaaccccaacgcaaacccaaacgcaaacccaaacgcaaacccaaacgcaaaucccaacgcaaauccaaacgcaaacccaaaugcaaacccaaacgccaacccaaacgcaaacccaaacgcaaaccccaaugucgacccaaacgcaaacccaaacgcaaacccaaacgcaaacccaaacgcaaauccaaacgcaaaccccaacgcaaacccaaacgcaaacccaaacgcaaacccaaacgcaaacccaaacgcaaacccaaacgcaaacccaaacgcaaacccaaacgcaaacccaaacgcaaacccaaacgcaaauccaaacgcaaacccaaacgcaaacccaaacgcaaacccaaacaaaaacaaccaaggaaauggacaaggacacaacaugccaaaugaccccaacagaaacgucgacgaaaacgccaacgcaaacagcgcaguaaaaaacaacaacaaugaagaaccaucagacaaacacauaaaagaauaccuaaacaaaauucaaaacucacuaucaaccgaaugguccccaugcucaguaacaugcggaaacgguauacaaguacgaauaaaaccaggaucagcaaacaaaccaaaagacgaacuagacuacgcaaacgacauagaaaaaaaaauaugcaaaauggaaaaaugcucaucaguuuuuaacguagucaauagcucaaucggacucauaaugguacuaucauuucucuuccuaaauuaaggacuagucccuguucccagagcccacuuuuuuuucuuuuuuugaaauaaaauagccugucuuucagaucucaaaggcucuuuucagagccaccaaaaaaaaaaaaaaaaaaaaaaaaaaaaaaaaaaaaaaaaaaaaaaaaaaaaaaaaaaaaaaaaaaaaaaaaaaaaaaaaaaaaaaaaaaaaaaaaaaaaagaauu

SEQ ID NO: 7496 - RNA, 1561 nt, Artificial Sequence
  mRNA Design a-1 (hSL-A100-N5) comprising derived and/or modified sequence from Pf(3D7)__XP_001351122.1__HsALB_Pf-CSP(199-377)_L(PVTN)_HBsAg (opt6)
aggagagucccgcagucggcguccagcggcucugcuuguucgugugugugucguugcaggccuuauucaagcuuaccaugaaauggguaacauuuauauccuuacuauuucucuucuccucagcuuacucugacccaaacgcaaaucccaacgcaaacccaaaugcaaacccaaacgcaaauccaaacgcaaacccaaaugcuaaucccaacgcaaacccaaacgcaaaccccaaugccaacccaaacgcuaacccaaacgcaaacccaaacgccaacccaaaugcaaacccaaacgcaaacccaaacgcaaauccaaaugcaaacccaaacgcaaauccaaacgcaaacccaaacaaaaacaaccaaggaaacggacaaggccauaauaugccuaaugaccccaacagaaacguagacgaaaaugcuaacgccaacucagcaguaaaaaacaacaauaacgaagaaccaucagauaaacacauaaaagaauacuuaaacaaaauacaaaauucauuaucaacagaauggucaccaugcucagucaccugcggaaacgguauacaaguacgcauaaaaccaggcucagcaaauaaaccaaaagacgaacuagauuacgcuaacgacauagaaaaaaaaauaugcaaaauggaaaaaugcucaucaguaccaguaacaaauauggaaaacauaacaucaggauuccuaggcccacucuuaguacuacaagcaggauuuuuucuucuaacaagaaucuuaacuauaccccaaucacucgacucaugguggaccucacuaaauuuccucggaggaucuccaguaugccucggacaaaauucacaaucaccaacauccaaucacucacccaccuccugcccaccaaucugcccaggauacagauggaugugcuuacgaagauucauaauauuccuauucauacuacuucuaugcuuaauauuccuucucguccuacucgacuaucaaggaaugcucccuguaugcccacucauaccaggauccacaacaacuaacacaggacccuguaaaacaugcacaacacccgcccaaggaaauucaauguuccccucuugcugcugcacaaaaccaacagacggaaauugcacaugcauuccaauuccaucaucuugggcauuugcaaaauacuuaugggaaugggcaucaguccgauucucgugguuaucuuuacuaguaccauucguucaaugguuuguaggacuuucaccuacaguaugguuaucugcaauauggaugaugugguacuggggaccaucauuauacucaaucguaucaccauuuauaccacuacuacccauauuuuucugccuauggguauacauauaaggacuagucccuguucccagagcccacuuuuuuuucuuuuuuugaaauaaaauagccugucuuucagaucucaaaggcucuuuucagagccaccaaaaaaaaaaaaaaaaaaaaaaaaaaaaaaaaaaaaaaaaaaaaaaaaaaaaaaaaaaaaaaaaaaaaaaaaaaaaaaaaaaaaaaaaaaaaaaaaaaaaagaauu

SEQ ID NO: 7497 - RNA, 1471 nt, Artificial Sequence
  mRNA Design a-1 (hSL-A100-N5) comprising derived and/or modified sequence from Pf(3D7)__XP_001351122.1__Pf-CSP (opt11)
aggagagucccgcagucggcguccagcggcucugcuuguucgugugugugucguugcaggccuuauucaagcuuaccaugaugcgaaagcuugcgauccucagcgucuccucauuccuauucguagaagcacuauuccaagaauaccaaugcuacggcucauccucaaacacacgcguacucaacgaacucaacuacgacaacgcaggaacaaaccucuacaacgaacuagagaugaacuacuacggcaaacaagaaaacugguacucucucaaaaaaaacucacgaagccucggcgagaacgacgacggaaacaacgaagacaacgaaaaacuccgcaaaccaaaacacaaaaaacucaaacaacccgccgacggaaacccagacccaaacgcaaacccaaacguagacccaaacgccaaccccaacguagaccccaacgccaacccuaacgucgaccccaaugcaaaccccaacgcgaacccaaacgcaaaccccaacgcaaaccccaacgcaaacccaaacgccaaccccaacgcaaacccaaacgcaaacccuaacgccaacccaaacgccaacccaaacgccaacccaaacgcaaacccgaacgccaaccccaacgccaacccaaacgcaaacccaaacgcaaaccccaacgccaaccccaacguagaccccaacgcaaaccccaacgcaaacccaaacgccaaccccaacgccaaccccaacgccaaccccaacgccaaccccaaugccaacccaaacgcgaaccccaacgcaaacccgaacgcaaacccaaacgcgaacccaaacgcgaacccaaacgccaaccccaacgccaaccccaacgcaaacccaaacgcgaacccaaacgcaaaccccaacgccaacccaaacaaaaacaaccaaggaaacggacaaggccacaacaugccaaacgaccccaaccgcaacguagacgaaaacgccaacgccaacuccgcugucaagaacaacaacaacgaagaaccauccgacaaacacauaaaagaauaccuaaacaaaauccaaaacucccucucaaccgaauggucccccugcuccgucacaugcggaaacggcauccaaguccgaaucaaaccaggcuccgccaacaaacccaaagacgaacuggacuacgccaacgacaucgaaaaaaaaaucugcaaaauggaaaaaugcucauccgucuucaacguggucaacuccuccaucggacuaauaaugguccucuccuuccuauuccuaaacuaaggacuagucccuguucccagagcccacuuuuuuuucuuuuuuugaaauaaaauagccugucuuucagaucucaaaggcucuuuucagagccaccaaaaaaaaaaaaaaaaaaaaaaaaaaaaaaaaaaaaaaaaaaaaaaaaaaaaaaaaaaaaaaaaaaaaaaaaaaaaaaaaaaaaaaaaaaaaaaaaaaaaagaauu

SEQ ID NO: 7498 - RNA, 1402 nt, Artificial Sequence
  mRNA Design a-1 (hSL-A100-N5) comprising derived and/or modified sequence from Pf(3D7)__XP_001351122.1__Pf-CSP(1-374) (opt11)
aggagagucccgcagucggcguccagcggcucugcuuguucgugugugugucguugcaggccuuauucaagcuuaccaugaugcgcaaacucgcaauccucuccgucucaucguuccuauucguagaagcacucuuccaagaauaccaaugcuacggcucaagcuccaacacaagaguacucaacgaacucaacuacgacaaugccggaacaaaccuauacaacgagcuagaaaugaacuacuacggcaaacaagaaaacugguacucgcuaaaaaaaaacagcagaagccuaggugaaaacgacgacggaaacaacgaagacaacgaaaaacugcgcaaaccaaaacacaaaaaacuaaaacaacccgcagacggcaacccagacccaaacgcaaacccaaacguagaccccaacgccaacccaaacguagacccaaacgccaacccaaacguagacccaaacgcaaacccgaacgcaaacccaaacgcaaacccaaacgcaaacccaaacgcaaacccaaacgccaaccccaacgcaaauccaaacgcaaaccccaacgcaaaccccaacgccaacccaaacgcaaaccccaacgcgaacccaaacgccaaccccaacgccaacccaaacgcaaacccaaacgcaaacccaaacgccaaccccaacgucgacccaaacgccaacccaaacgcaaaccccaacgccaaccccaacgcaaacccaaacgccaacccgaacgcaaacccgaacgcaaacccaaacgcaaaccccaacgcaaaccccaacgcaaacccaaacgcaaaccccaacgccaaccccaacgccaaccccaacgcaaacccaaacgcaaacccgaacgcaaaccccaacgcaaaccccaacgccaaucccaacaaaaacaaccaaggcaacggacaaggacacaacaugccaaacgaccccaaccgcaacgucgacgaaaacgccaacgccaacuccgcggucaaaaacaacaacaacgaagagcccucagacaaacacauaaaagaauaccuaaacaaaauccaaaacucccucucgacagaauggucccccugcagcgucaccugcggaaacggcauacaaguacgaauaaaacccggcucagccaacaaaccaaaagacgaacuagacuacgccaacgacauagaaaaaaaaauaugcaaaauggaaaaaugcugaggacuagucccuguucccagagcccacuuuuuuuucuuuuuuugaaauaaaauagccugucuuucagaucucaaaggcucuuuucagagccaccaaaaaaaaaaaaaaaaaaaaaaaaaaaaaaaaaaaaaaaaaaaaaaaaaaaaaaaaaaaaaaaaaaaaaaaaaaaaaaaaaaaaaaaaaaaaaaaaaaaaagaauu

SEQ ID NO: 7499 - RNA, 1255 nt, Artificial Sequence
  mRNA Design a-1 (hSL-A100-N5) comprising derived and/or modified sequence from Pf(3D7)__XP_001351122.1__Pf-CSP(1-325) (opt11)
aggagagucccgcagucggcguccagcggcucugcuuguucgugugugugucguugcaggccuuauucaagcuuaccaugaugcgcaaacucgcaauccuaucaguaagcucauuccuguucguagaagcacuauuccaagaauaccaaugcuacggcucauccucaaacacaagaguacuaaacgaacuaaacuacgacaacgccggaaccaaccuauacaacgaacucgaaaugaacuacuacggcaaacaagaaaacugguacucacuaaagaaaaacagcagaagccucggcgaaaacgacgacggcaacaacgaagacaacgagaaacugagaaaaccaaaacacaagaaacuaaaacaacccgcggacgggaacccagacccaaaugcaaacccaaacgucgacccaaacgcaaacccaaacguagacccaaacgcaaaccccaacguagaccccaacgcaaacccaaacgcaaacccaaacgcaaacccaaacgcaaacccaaacgcaaaccccaacgcaaacccaaacgcaaacccaaacgcaaaccccaacgccaacccaaacgccaaccccaacgcaaacccaaacgcaaacccaaacgcaaaccccaacgccaacccgaacgcaaacccaaacgcaaacccaaacgcaaaccccaacguagacccaaacgcaaacccaaacgccaaccccaacgcaaacccaaacgcaaacccgaacgcaaaccccaacgcaaaccccaacgcaaacccaaacgcaaaccccaacgcaaauccaaacgcaaacccaaacgcaaacccaaacgccaacccaaacgcaaaucccaacgcaaacccaaacgcaaaccccaacgcaaacccaaacgcaaacccaaacgcaaacccaaacaaaaacaaccaaggaaacggccaaggacacaacaugccaaacgacccaaaccgaaacguagacgaaaacgccaacgccaacagcgcagucaaaaacaacaauaaugaagaacccuccgacaaacacauaaaagaauaccuaaacaaaauccaaaacugaggacuagucccuguucccagagcccacuuuuuuuucuuuuuuugaaauaaaauagccugucuuucagaucucaaaggcucuuuucagagccaccaaaaaaaaaaaaaaaaaaaaaaaaaaaaaaaaaaaaaaaaaaaaaaaaaaaaaaaaaaaaaaaaaaaaaaaaaaaaaaaaaaaaaaaaaaaaaaaaaaaaagaauu

SEQ ID NO: 7500 - RNA, 1471 nt, Artificial Sequence
  mRNA Design a-1 (hSL-A100-N5) comprising derived and/or modified sequence from Pf(3D7)__XP_001351122.1__HsALB_Pf-CSP(19-397) (opt11)
aggagagucccgcagucggcguccagcggcucugcuuguucgugugugugucguugcaggccuuauucaagcuuaccaugaaaugggucaccuucauaucccuccuauuccucuucucaucagccuacucccucuuccaggaauaccaaugcuacggaucguccucaaacacuagaguacucaaugaauuaaacuacgacaacgccggcaccaaccucuacaacgaacucgaaaugaacuacuacggaaaacaagaaaacugguacucacucaaaaaaaacucucgaucccucggcgaaaacgacgacggcaacaacgaagacaacgagaaacuacgcaaaccaaaacacaaaaaauuaaaacaacccgccgacggcaaccccgaccccaacgccaaccccaacguagaccccaacgcgaaccccaacgucgacccaaacgccaaccccaacguggaccccaacgccaacccaaacgccaaccccaacgccaacccaaacgcaaaccccaacgccaacccaaacgccaaccccaacgcaaacccaaacgcgaacccaaacgcaaacccaaacgccaacccaaacgcaaacccaaacgcgaacccaaacgccaacccaaacgccaaccccaacgcaaacccaaacgccaacccaaacgccaacccaaacguagacccaaacgcgaaccccaacgcuaacccaaacgcaaacccaaacgccaacccaaacgccaacccuaacgcaaacccaaacgccaaccccaacgccaaccccaacgccaaccccaacgcaaacccaaacgccaacccaaacgccaaccccaacgccaacccaaacgcaaacccaaacgcaaacccaaacgcaaaccccaacgccaacccaaacgccaacccaaacaaaaauaaccaaggcaaugggcaaggccacaacaugccaaacgaccccaaccgcaaugucgacgaaaacgccaacgccaacucugcaguaaaaaacaauaacaacgaagaacccucagacaaacacaucaaagaauaccucaacaagauccaaaauucccucuccacagaauggucccccugcagcguaaccugcggcaacggcauccaaguccgcaucaaacccggcuccgccaacaaaccgaaagacgaacuagacuacgccaacgacauagaaaaaaaaaucugcaaaauggaaaaaugcagcuccgucuucaacgucgucaacagcuccaucggccucaucaugguccucuccuuccuguuccucaacuaaggacuagucccuguucccagagcccacuuuuuuuucuuuuuuugaaauaaaauagccugucuuucagaucucaaaggcucuuuucagagccaccaaaaaaaaaaaaaaaaaaaaaaaaaaaaaaaaaaaaaaaaaaaaaaaaaaaaaaaaaaaaaaaaaaaaaaaaaaaaaaaaaaaaaaaaaaaaaaaaaaaaagaauu

SEQ ID NO: 7501 - RNA, 1489 nt, Artificial Sequence
  mRNA Design a-1 (hSL-A100-N5) comprising derived and/or modified sequence from Pf(3D7)__XP_001351122.1__HsIns-iso1_Pf-CSP(19-397) (opt11)
aggagagucccgcagucggcguccagcggcucugcuuguucgugugugugucguugcaggccuuauucaagcuuaccauggcacucuggaugagacuccucccccuccucgcacuccucgcccuauggggcccagacccagcggcagcccucuuccaagaauaccaaugcuacggcucauccuccaacacccgaguccucaaugaacuaaacuacgacaacgccggcaccaaccuauacaacgaacuagaaaugaacuacuacggcaaacaagaaaacugguacucccucaaaaaaaauucacgcucccuaggugagaacgacgacggaaacaacgaagacaacgaaaaacuccgaaaacccaaacacaaaaaacuaaaacaaccagcagacggcaaccccgaccccaacgcaaaccccaacguagacccaaacgcgaaccccaacgucgauccaaacgccaacccaaacguugaccccaacgcgaaccccaacgcaaacccaaacgcaaacccuaacgcgaaccccaacgcaaaccccaacgccaaccccaacgccaaccccaacgccaacccaaacgcaaaccccaacgccaaccccaacgcaaacccaaacgcaaacccgaacgcaaaccccaacgccaacccaaacgcaaacccaaacgccaacccaaacgcaaaccccaacguagacccaaacgccaaucccaacgcgaaccccaacgcaaacccaaacgcgaacccaaacgccaacccaaacgcaaacccgaacgccaacccaaacgccaaccccaacgcaaaccccaacgcaaacccaaacgccaacccaaacgcaaacccaaacgcaaaccccaacgccaaccccaacgcaaacccaaaugccaaccccaacgccaaccccaacgcaaacccaaacaaaaacaaccaaggaaacggccaaggccacaacaugccgaacgaccccaaccgaaacgucgacgaaaacgcaaacgccaacucagcggucaaaaacaacaacaacgaagaacccucagacaaacacaucaaagaauaccuaaacaagauccagaacucucucucaacagaauggucccccugcuccguaacaugcggcaacggcauccaaguacgaaucaaaccgggaucagccaauaaacccaaagacgaacucgacuacgccaacgacaucgaaaaaaaaauaugcaaaauggaaaaaugcagcucagucuucaacguagucaacagcuccauaggccucaucaugguacucuccuuccuguuccuaaacuaaggacuagucccuguucccagagcccacuuuuuuuucuuuuuuugaaauaaaauagccugucuuucagaucucaaaggcucuuuucagagccaccaaaaaaaaaaaaaaaaaaaaaaaaaaaaaaaaaaaaaaaaaaaaaaaaaaaaaaaaaaaaaaaaaaaaaaaaaaaaaaaaaaaaaaaaaaaaaaaaaaaaagaauu

SEQ ID NO: 7502 - RNA, 1468 nt, Artificial Sequence
  mRNA Design a-1 (hSL-A100-N5) comprising derived and/or modified sequence from Pf(3D7)__XP_001351122.1__HsSPARC_Pf-CSP(19-397) (opt11)
aggagagucccgcagucggcguccagcggcucugcuuguucgugugugugucguugcaggccuuauucaagcuuaccaugcgcgccuggauauucuuccuccuaugccuagcaggacgcgcccucgcacucuuccaagaauaccaaugcuacggcucauccucaaacacccgcguacuuaacgaacuaaacuacgacaacgccggaaccaaccuauacaacgaacucgaaaugaacuacuacgguaaacaagaaaacugguacucccucaaaaaaaacagccgaagccuaggagaaaacgacgacggaaacaacgaagacaacgaaaaacugcgcaaacccaaacacaaaaaacucaaacaacccgcagacgggaacccagacccaaacgcaaacccaaacguggacccaaacgccaacccuaacguagaccccaacgcaaaccccaacgucgacccuaaugcaaacccaaacgccaaccccaacgcgaacccaaacgcaaaccccaacgcuaacccgaacgccaaccccaacgccaacccgaacgcaaacccaaacgcaaacccaaacgcgaacccaaacgcaaacccaaacgccaaccccaacgcgaacccaaacgccaauccaaacgccaacccaaacgcaaacccaaacgccaaccccaacguagacccaaacgccaacccaaacgcgaacccaaacgcaaaccccaacgcaaacccaaacgcaaacccaaacgccaacccuaacgcaaacccaaacgccaaccccaacgccaacccaaacgcaaacccaaacgccaacccaaacgccaaccccaacgcaaacccgaacgcaaaccccaacgcaaacccaaacgcaaacccaaacgcgaacccgaacgccaacccaaauaagaacaaccaaggaaacggacaaggccacaacaugccaaacgaccccaaccgcaacgucgacgaaaacgcaaaugccaacuccgcagucaaaaacaacaauaacgaagaacccucggacaaacacaucaaagaauaccucaacaagauccaaaacucacucuccaccgaauggucacccugcagcguaacuugcggcaacggcauccaaguccgcauaaaaccaggcuccgcaaacaaacccaaagacgaacucgacuaugccaacgacaucgaaaaaaaaauaugcaaaauggaaaaaugcagcucagucuucaacguagucaacagcucuaucggacuaauaaugguacucuccuuccuauucuuaaacuaaggacuagucccuguucccagagcccacuuuuuuuucuuuuuuugaaauaaaauagccugucuuucagaucucaaaggcucuuuucagagccaccaaaaaaaaaaaaaaaaaaaaaaaaaaaaaaaaaaaaaaaaaaaaaaaaaaaaaaaaaaaaaaaaaaaaaaaaaaaaaaaaaaaaaaaaaaaaaaaaaaaaagaauu

SEQ ID NO: 7503 - RNA, 1471 nt, Artificial Sequence
  mRNA Design a-1 (hSL-A100-N5) comprising derived and/or modified sequence from Pf(3D7)__XP_001351122.1__IgE_Pf-CSP(19-397) (opt11)
aggagagucccgcagucggcguccagcggcucugcuuguucgugugugugucguugcaggccuuauucaagcuuaccauggacuggacauggauccucuuccucgucgccgcggccacacgcguacacucacucuuccaagaauaucaaugcuacggcucaagcucgaacacgcgcguacucaacgaacuaaacuacgacaacgccggcaccaaccuauacaacgaacucgaaaugaacuacuacggcaaacaagaaaacugguacucacuuaagaaaaauucacgaucccucggagaaaacgacgaugggaacaacgaagacaacgaaaaacuacgcaaacccaaacacaagaaacuuaaacaacccgcagacggcaacccagacccaaacgcaaaccccaacguagaccccaacgcaaacccaaacguagacccaaacgccaacccaaacguagacccaaacgcgaacccaaacgccaacccaaacgccaaccccaacgcaaacccaaacgcaaauccaaacgcaaacccaaaugcaaacccgaacgccaauccaaacgcaaaccccaacgcaaacccaaacgcaaaccccaaugccaacccaaacgcaaaccccaacgcaaaccccaacgcaaaccccaacgcaaacccaaacgcgaacccaaacguagaccccaacgccaaccccaacgccaacccaaacgcaaacccaaacgccaacccaaacgccaaccccaacgcaaaccccaacgcaaacccgaacgcaaacccaaacgcaaacccaaacgcaaacccgaacgcaaacccuaacgcgaaccccaacgccaaccccaacgcaaacccaaacgcaaacccaaacgccaacccaaacgcaaacccaaacgcaaacccaaacaaaaacaaccaaggaaacgggcaaggacauaacaugccgaacgaccccaaccgcaacguagacgaaaacgccaacgccaacagcgcagucaaaaacaacaacaacgaagaacccuccgacaaacacaucaaagaauaccuaaacaaaauccagaacucacuauccaccgaauggucccccugcagcgugaccugcggcaacggcauacaaguccgcauaaaaccaggcuccgccaacaaacccaaagacgaacuagacuacgccaacgacauagaaaagaaaauaugcaaaauggaaaaaugcagcucagucuucaauguagucaacuccuccaucggacucauaaugguccuaucauuccucuuccuaaacuaaggacuagucccuguucccagagcccacuuuuuuuucuuuuuuugaaauaaaauagccugucuuucagaucucaaaggcucuuuucagagccaccaaaaaaaaaaaaaaaaaaaaaaaaaaaaaaaaaaaaaaaaaaaaaaaaaaaaaaaaaaaaaaaaaaaaaaaaaaaaaaaaaaaaaaaaaaaaaaaaaaaaagaauu

SEQ ID NO: 7504 - RNA, 1636 nt, Artificial Sequence
  mRNA Design a-1 (hSL-A100-N5) comprising derived and/or modified sequence from Pf(3D7)__XP_001351122.1__Pf-CSP_L(G4SG4)_TM domain HA (opt11)
aggagagucccgcagucggcguccagcggcucugcuuguucgugugugugucguugcaggccuuauucaagcuuaccaugaugcgcaaacucgccauccucagcgucagcucguuccucuucgucgaagcacuauuccaagaauaccaguguuacggcucauccucaaacacacgcgugcucaacgaacuaaacuacgacaacgccggcaccaaccucuacaacgaacuagaaaugaacuauuacggcaagcaagaaaacugguacucacucaaaaaaaacagccgaagccuaggcgagaacgacgacgggaacaacgaagacaacgaaaaacuacgcaaacccaagcacaaaaaacugaaacaaccagccgacggaaauccagaccccaacgcaaacccgaacguagaccccaacgcgaaccccaacguggacccgaacgcaaacccgaacguagacccaaacgcaaacccaaacgcgaacccaaacgcaaacccaaacgcuaacccaaacgcaaaccccaacgccaaccccaacgcgaacccaaacgcaaacccaaacgcaaacccaaacgcaaacccgaacgcaaacccaaacgccaacccaaacgcgaacccaaacgccaacccaaacgcaaacccaaacgcaaacccaaacgcaaacccaaacguagacccgaacgccaacccgaaugcaaacccaaacgcaaacccgaacgcaaacccaaacgcgaacccgaacgccaacccaaacgcaaacccgaacgcaaaccccaacgccaacccaaacgcaaaccccaacgcaaaccccaacgcaaacccgaacgcaaacccaaacgcaaacccaaacgccaaccccaacgccaaccccaacgcaaacccgaacgccaacccaaacaaaaacaaccaaggcaacgggcaaggacacaacaugccaaacgaccccaaccgaaacgucgacgaaaacgccaacgccaacuccgcagucaaaaacaacaacaacgaagaacccucagacaaacacauaaaagaauaccucaacaaaauccaaaacucacucucaaccgaguggucacccugcagugugaccuguggcaacggaauacaaguacgcauaaaacccggaucagccaacaaaccgaaagacgaacuagacuacgccaacgacauagaaaaaaaaauaugcaaaauggagaaaugcagcucugucuucaacgucgucaacagcucaaucggacucauaaugguccucuccuuccuauuccucaacggcggagggggcucaggcggcggaggaaaauuagaauccaccagaaucuaucagauucucgccauauacagcacagucgcaagcucgcuuguccuugucguaucacuaggcgcaaucucauucuggaugugcuccaacggaagccugcaaugccgcauuugcauauaaggacuagucccuguucccagagcccacuuuuuuuucuuuuuuugaaauaaaauagccugucuuucagaucucaaaggcucuuuucagagccaccaaaaaaaaaaaaaaaaaaaaaaaaaaaaaaaaaaaaaaaaaaaaaaaaaaaaaaaaaaaaaaaaaaaaaaaaaaaaaaaaaaaaaaaaaaaaaaaaaaaaagaauu

SEQ ID NO: 7505 - RNA, 1510 nt, Artificial Sequence
  mRNA Design a-1 (hSL-A100-N5) comprising derived and/or modified sequence from Pf(3D7)__XP_001351122.1__Pf-CSP(199-377)_L(PVTN)_HBsAg (opt11)
aggagagucccgcagucggcguccagcggcucugcuuguucgugugugugucguugcaggccuuauucaagcuuaccauggaccccaacgccaaccccaacgccaaccccaacgccaaucccaacgcuaaccccaacgccaaccccaacgcaaaccccaacgccaacccaaacgccaaccccaacgcaaaccccaacgccaaucccaaugccaaccccaacgccaaccccaacgcgaaccccaacgccaaccccaacgcaaacccaaacgccaaccccaacgccaaccccaacgccaaccccaacaaaaacaaccaaggcaacggccaaggccacaacaugcccaacgaccccaaccgcaacguagacgagaacgccaacgccaacagcgcugucaaaaacaacaacaacgaggaacccuccgacaaacacaucaaagaauaccuuaacaaaauccaaaacucucucuccaccgaguggucccccugcucagucacaugcggcaacggcauacaaguucguaucaaacccggcucagcaaacaaacccaaagacgaacucgacuacgcaaacgacauagaaaagaaaaucugcaaaauggaaaaauguucauccguccccgucaccaacauggaaaacaucacuuccggauuccucgguccccuacucguacuccaagccggcuucuuccuccucacccgcauccucaccaucccccaaucacuugacuccugguggaccucccucaacuuccucggcggcucccccgucugccuaggccaaaacagccaaucccccacuagcaaccacucccccacauccugcccacccaucugccccggauaucgauggaugugccuucgccgauucauaaucuuccucuucauccuccuacucugccucaucuuccuccucguccuucuagauuaccaaggcaugcuccccgucugcccccuuauccccggcuccaccaccacaaacaccggccccugcaaaaccugcacaacccccgcccaaggcaauagcauguuccccuccugcugcugcacuaaaccaacagacggcaacuguaccugcaucccaaucccaucaucaugggccuucgccaaauaccucugggaaugggcaucuguacgauucuccuggcucucccuucucguacccuucguccagugguucgucggccucucccccaccguauggcuauccgccaucuggaugaugugguacuggggccccucccuauacuccaucgucuccccauucauaccacuccuacccaucuucuucugccucugggucuacaucugaggacuagucccuguucccagagcccacuuuuuuuucuuuuuuugaaauaaaauagccugucuuucagaucucaaaggcucuuuucagagccaccaaaaaaaaaaaaaaaaaaaaaaaaaaaaaaaaaaaaaaaaaaaaaaaaaaaaaaaaaaaaaaaaaaaaaaaaaaaaaaaaaaaaaaaaaaaaaaaaaaaaagaauu

SEQ ID NO: 7506 - RNA, 1552 nt, Artificial Sequence
  mRNA Design a-1 (hSL-A100-N5) comprising derived and/or modified sequence from Pf(3D7)__XP_001351122.1__Pf-CSP(199-387)_L(PVTN)_HBsAg (opt11)
aggagagucccgcagucggcguccagcggcucugcuuguucgugugugugucguugcaggccuuauucaagcuuaccaugauggcccccgaccccaacgcaaauccaaacgcaaaccccaacgccaacccuaacgcaaaccccaacgccaacccaaacgccaaucccaacgccaacccuaacgccaaccccaacgcaaaccccaacgccaaccccaacgccaacccuaacgcaaaccccaacgccaacccaaacgcaaaccccaacgccaaccccaacgccaaccccaacgcaaacccaaacgcaaaccccaacaaaaacaaccaaggaaacggacaaggccacaacaugccuaacgaccccaaucgcaacgucgacgaaaacgcaaacgccaacuccgccgucaaaaacaacaacaacgaagaacccucugacaaacacaucaaagaauaccucaacaagauccaaaacucccuauccaccgaauggucccccugcuccgucacuugcgguaauggcauccaaguccgcauaaaaccaggauccgcaaacaaacccaaagacgaacuagacuacgccaacgacauagaaaagaaaaucugcaaaauggaaaaaugcuccucagucuucaaugucguaaacuccuccauuggccuaggccccgucaccaacauggaaaacauuaccuccggauuccucgguccucuccucguccuccaagccggauucuuucuccucacacgaauccucacuaucccucaaucccuggacucaugguggaccucccucaacuuccugggcggcucccccgucugccucggccaaaacagccaauccccaaccuccaaucacucccccacaagcugcccucccauaugccccggcuaccgcuggaugugccuccgucgcuucaucauauuccucuucauacuucuccucugccucaucuuccuccuuguccugcuagacuaccaaggcaugcuccccgucugcccacucauccccgguuccaccacaacaaacaccggccccugcaaaacaugcaccacacccgcccaagguaacuccauguuccccuccugcugcugcaccaaaccaaccgacggcaacugcacuugcauucccauccccucauccugggccuucgccaaauaccucugggaaugggcauccguccguuucucauggcuaucucuccuaguaccauucguacaaugguucguuggccucucccccaccguauggcucuccgccauauggaugaugugguacuggggcccuucacuuuacuccaucgucucacccuucaucccacuccuacccaucuucuucugccuuuggguauacaucuaaggacuagucccuguucccagagcccacuuuuuuuucuuuuuuugaaauaaaauagccugucuuucagaucucaaaggcucuuuucagagccaccaaaaaaaaaaaaaaaaaaaaaaaaaaaaaaaaaaaaaaaaaaaaaaaaaaaaaaaaaaaaaaaaaaaaaaaaaaaaaaaaaaaaaaaaaaaaaaaaaaaaagaauu

SEQ ID NO: 7507 - RNA, 736 nt, Artificial Sequence
  mRNA Design a-1 (hSL-A100-N5) comprising derived and/or modified sequence from Pf(3D7)__XP_001351122.1__HsALB_Pf-CSP(19-152) (opt11)
aggagagucccgcagucggcguccagcggcucugcuuguucgugugugugucguugcaggccuuauucaagcuuaccaugaaaugggucaccuucaucucccuccucuuccucuucuccagcgcauacucccucuuccaagaauaccaaugcuacggcuccuccuccaacacccgcguccucaacgaacucaacuacgacaacgccggcaccaaccucuacaacgaacucgaaaugaacuacuacggcaaacaagaaaacugguacucccucaaaaaaaacucccgcucccuaggcgaaaacgacgacggaaacaacgaagacaacgaaaaacuccgcaaacccaaacacaaaaaacucaaacaacccgccgacggaaaccccgaccccaacgccaacccaaacgucgaccccaacgccaaccccaacgucgaccccaacgccaaccccaacgucgaccccaacgccaaccccaacgcaaacccaaacgcaaacccaaacgccaaccccaacgccaaccccaacgccaaccccuaaggacuagucccuguucccagagcccacuuuuuuuucuuuuuuugaaauaaaauagccugucuuucagaucucaaaggcucuuuucagagccaccaaaaaaaaaaaaaaaaaaaaaaaaaaaaaaaaaaaaaaaaaaaaaaaaaaaaaaaaaaaaaaaaaaaaaaaaaaaaaaaaaaaaaaaaaaaaaaaaaaaaagaauu

SEQ ID NO: 7508 - RNA, 856 nt, Artificial Sequence
  mRNA Design a-1 (hSL-A100-N5) comprising derived and/or modified sequence from Pf(3D7)__XP_001351122.1__HsALB_Pf-CSP(19-192) (opt11)
aggagagucccgcagucggcguccagcggcucugcuuguucgugugugugucguugcaggccuuauucaagcuuaccaugaaauggguaaccuucauaucccuccucuuccuauucucgagcgccuacucccucuuccaagaauaccaaugcuacggcucauccuccaacacccgcguccucaacgaacucaacuacgacaacgccggcaccaaccucuacaacgaacuagagaugaacuacuacggcaaacaagaaaacugguacucacucaaaaaaaacucccgaucccuaggagaaaacgacgacggcaacaacgaagacaacgaaaaacuacgaaaacccaaacacaaaaaacucaaacaacccgccgacggcaaccccgaccccaacgccaaccccaacgucgaccccaacgccaacccaaacguagaccccaacgccaaccccaacgucgacccaaacgccaaccccaacgccaaccccaacgccaacccaaacgcaaacccaaacgcaaacccaaacgccaacccaaacgccaaccccaacgccaaccccaacgcaaaccccaacgcaaaccccaacgccaacccaaacgcaaaccccaacgccaacccaaacgccaacccaaacgccaaccccaacgcaaaccccuaaggacuagucccuguucccagagcccacuuuuuuuucuuuuuuugaaauaaaauagccugucuuucagaucucaaaggcucuuuucagagccaccaaaaaaaaaaaaaaaaaaaaaaaaaaaaaaaaaaaaaaaaaaaaaaaaaaaaaaaaaaaaaaaaaaaaaaaaaaaaaaaaaaaaaaaaaaaaaaaaaaaaagaauu

SEQ ID NO: 7509 - RNA, 1096 nt, Artificial Sequence
  mRNA Design a-1 (hSL-A100-N5) comprising derived and/or modified sequence from Pf(3D7)__XP_001351122.1__HsALB_Pf-CSP(19-272) (opt11)
aggagagucccgcagucggcguccagcggcucugcuuguucgugugugugucguugcaggccuuauucaagcuuaccaugaaauggguaaccuucaucucccuccucuuccuauucucaucagcauacucacucuuccaagaauaccaaugcuacggcucgagcucaaacacacgcguacucaacgaacugaacuacgacaacgccggaaccaaccucuacaaugaacucgaaaugaacuacuacggcaaacaagagaacugguacucacucaaaaaaaacagcagaagccucggagaaaacgacgacggaaacaacgaagacaacgaaaaacuccgcaaacccaagcacaaaaaacuaaaacaacccgcagacggaaaccccgaccccaacgcaaacccgaacgucgacccaaacgccaacccaaacguagaccccaacgcgaacccaaacguagacccaaacgccaacccaaacgcaaaccccaacgccaaccccaacgcaaacccaaacgccaacccaaacgcaaaccccaaugcaaaccccaacgcaaacccaaacgccaaccccaacgcaaacccaaacgcaaacccaaacgcaaacccaaacgcaaacccaaacgcgaacccaaacgcaaacccaaacgcaaacccgaacgcaaacccaaacguagacccaaacgcaaaccccaacgccaacccaaacgcaaacccaaacgcaaacccaaacgcaaacccaaacgcgaacccaaacgccaacccaaacgcaaacccaaacgcaaacccaaacgcaaacccaaacgcaaacccaaacgcaaacccaaacgcaaacccgaacgcgaacccaaacgcaaacccaaacgcgaacccgaacgcaaaccccaacgcaaacccauaaggacuagucccuguucccagagcccacuuuuuuuucuuuuuuugaaauaaaauagccugucuuucagaucucaaaggcucuuuucagagccaccaaaaaaaaaaaaaaaaaaaaaaaaaaaaaaaaaaaaaaaaaaaaaaaaaaaaaaaaaaaaaaaaaaaaaaaaaaaaaaaaaaaaaaaaaaaaaaaaaaaaagaauu

SEQ ID NO: 7510 - RNA, 1258 nt, Artificial Sequence
  mRNA Design a-1 (hSL-A100-N5) comprising derived and/or modified sequence from Pf(3D7)__XP_001351122.1__HsALB_Pf-CSP(19-272)_L(AAY)_Pf-CSP(310-3 27)_L(AAY)_Pf-CSP(346-375) (opt11)
aggagagucccgcagucggcguccagcggcucugcuuguucgugugugugucguugcaggccuuauucaagcuuaccaugaaaugggucaccuucaucucacuccuauuccuauucuccuccgcauacucacucuuccaagaauaccagugcuacggaucaagcuccaacacacgcguacuaaacgaacugaacuacgacaacgccggaaccaaccucuacaacgaacucgaaaugaauuacuacggcaaacaagagaacugguacucacucaaaaaaaacagcagaucccuaggcgaaaacgacgacggaaacaacgaagacaacgaaaaacuacgcaaacccaaacacaaaaaacuaaaacaacccgcagacggaaacccagauccaaacgcaaacccaaacguagacccaaacgccaacccaaacguagacccaaacgcaaacccaaacguagaccccaacgcaaacccaaacgcaaacccgaacgccaacccaaacgcaaaccccaacgccaacccaaacgcaaacccaaacgcaaacccaaacgcaaacccaaacgccaaccccaacgcgaacccaaacgcaaacccuaacgccaacccaaacgcaaacccaaacgcaaacccgaacgcaaacccaaacgcaaacccaaacgcaaacccgaacguagacccaaacgcaaacccaaacgcaaacccaaacgcaaacccaaacgccaacccaaacgccaacccaaacgcaaaccccaacgcaaaccccaacgcgaacccaaacgccaaccccaacgcaaacccaaacgccaacccaaacgccaacccgaacgcaaacccaaacgccaacccaaacgccaacccgaacgcaaacccaaacgccaacccaaacgccaacccagccgcguacgaacccucagauaaacacauaaaagaauaccucaacaaaauccaaaacucacuagcagccuacaucaaaccaggauccgccaacaaacccaaggacgaacucgacuacgcaaacgacaucgaaaaaaaaaucugcaaaauggaaaaaugcucaugaggacuagucccuguucccagagcccacuuuuuuuucuuuuuuugaaauaaaauagccugucuuucagaucucaaaggcucuuuucagagccaccaaaaaaaaaaaaaaaaaaaaaaaaaaaaaaaaaaaaaaaaaaaaaaaaaaaaaaaaaaaaaaaaaaaaaaaaaaaaaaaaaaaaaaaaaaaaaaaaaaaaagaauu

SEQ ID NO: 7511 - RNA, 1219 nt, Artificial Sequence
  mRNA Design a-1 (hSL-A100-N5) comprising derived and/or modified sequence from Pf(3D7)__XP_001351122.1__HsALB_Pf-CSP(19-272)_L(AAY)_Pf-CSP(346-3 65)_L(AAY)_P2 (opt11)
aggagagucccgcagucggcguccagcggcucugcuuguucgugugugugucguugcaggccuuauucaagcuuaccaugaaaugggucaccuucaucucacuccuauuccuauucucgagcgcauacucacucuuccaagaauaccaaugcuauggcuccagcucaaacacacgcguccuaaacgaacucaacuacgacaacgccggaacaaaccucuacaacgaacucgaaaugaacuacuacggcaaacaagaaaacugguacucgcucaaaaaaaacucccgaagucuaggcgaaaacgacgacggaaacaacgaagacaacgaaaaacuacgcaaacccaaacacaaaaaacuaaaacaacccgcagacggaaaccccgacccaaacgcaaaccccaacguagacccaaacgcaaaccccaacguagacccaaacgcaaacccgaacguagacccaaacgccaacccaaacgccaaccccaacgcaaacccaaacgccaaccccaacgcaaacccaaacgcaaacccaaacgcaaacccaaacgcaaacccaaacgccaaccccaacgccaacccaaacgccaaccccaacgcgaaccccaacgcgaacccaaacgccaacccaaacgcaaaccccaacgcaaacccaaacgcaaacccaaacgucgacccaaacgcaaacccaaacgcaaacccgaacgcaaacccaaacgcaaaccccaacgccaacccaaacgcgaacccaaacgccaacccaaacgccaacccaaacgcaaacccaaacgccaacccaaacgcaaacccaaacgcaaaccccaacgcaaaccccaacgcaaacccaaacgccaaccccaacgcaaaccccaacgcaaacccaaacgccaacccagccgcauacauaaaacccggcuccgccaacaaaccaaaagacgaacuagacuacgccaacgacauagaagcagccuaccaauacaucaaagccaacagcaaauucauaggaauaaccgagcuauaaggacuagucccuguucccagagcccacuuuuuuuucuuuuuuugaaauaaaauagccugucuuucagaucucaaaggcucuuuucagagccaccaaaaaaaaaaaaaaaaaaaaaaaaaaaaaaaaaaaaaaaaaaaaaaaaaaaaaaaaaaaaaaaaaaaaaaaaaaaaaaaaaaaaaaaaaaaaaaaaaaaaagaauu

SEQ ID NO: 7512 - RNA, 1213 nt, Artificial Sequence
  mRNA Design a-1 (hSL-A100-N5) comprising derived and/or modified sequence from Pf(3D7)__XP_001351122.1__HsALB_Pf-CSP(19-272)_L(AAY)_Pf-CSP(346-3 65)_L(AAY)_PADRE (opt11)
aggagagucccgcagucggcguccagcggcucugcuuguucgugugugugucguugcaggccuuauucaagcuuaccaugaaauggguaaccuucaucucgcuacuguuccucuucucauccgcauacucccucuuccaagaauaccaaugcuacggcucauccucaaacacacgaguacuaaacgaacucaacuacgacaacgccggaaccaaccuauacaacgaacucgaaaugaacuacuacggcaaacaagaaaacugguacucacucaaaaaaaacucccgaucccucggcgaaaacgacgacggaaacaacgaagacaacgaaaaacugagaaaacccaaacacaaaaaacuaaaacaaccagccgacggcaacccagaccccaacgcaaaccccaacguagacccaaacgccaaccccaacguagacccaaacgcaaacccaaacguagaccccaacgccaacccaaacgccaacccaaacgccaaccccaacgcaaacccaaacgcaaacccaaacgcaaacccaaacgccaacccaaacgcaaacccaaacgccaacccgaacgcaaaccccaacgcaaacccaaacgcaaaccccaacgccaacccaaacgcaaacccaaacgcaaaccccaacgcaaacccaaaugcgaacccaaacguggacccgaacgcaaaccccaacgccaacccaaacgcaaaccccaacgccaaccccaacgccaaccccaacgcaaaccccaacgccaaccccaacgccaacccaaacgccaacccaaacgcgaacccaaacgcaaaccccaacgcaaacccaaacgcaaacccaaacgcaaacccaaacgcaaaccccaacgcaaacccaaacgcaaacccaaacgcaaaccccgcagccuacauuaaaccaggcuccgccaacaaacccaaagacgaacucgacuacgccaacgacauagaagcagccuacgccaaauucguagccgcauggacacucaaagccgcagccuaaggacuagucccuguucccagagcccacuuuuuuuucuuuuuuugaaauaaaauagccugucuuucagaucucaaaggcucuuuucagagccaccaaaaaaaaaaaaaaaaaaaaaaaaaaaaaaaaaaaaaaaaaaaaaaaaaaaaaaaaaaaaaaaaaaaaaaaaaaaaaaaaaaaaaaaaaaaaaaaaaaaaagaauu

SEQ ID NO: 7513 - RNA, 1270 nt, Artificial Sequence
  mRNA Design a-1 (hSL-A100-N5) comprising derived and/or modified sequence from Pf(3D7)__XP_001351122.1__HsALB_Pf-CSP(19-272)_L(G4S)_Pf-CSP(310-3 27)_L(G4S)_Pf-CSP(346-375) (opt11)
aggagagucccgcagucggcguccagcggcucugcuuguucgugugugugucguugcaggccuuauucaagcuuaccaugaaaugggucaccuucaucucccuacuauuccucuucucaucagccuacucacucuuccaagaguaccaaugcuacggcucaagcucaaacacacgcguacucaacgaacuaaacuacgacaacgcaggcaccaaccucuacaacgaacucgagaugaacuacuacggcaaacaagaaaacugguacucacucaaaaaaaacucccgcagccucggcgaaaacgacgacggcaacaacgaagauaacgagaaacuacgcaaacccaaacacaaaaaacuaaaacaacccgccgacggaaacccagacccaaacgccaacccaaacguagacccaaacgcaaacccaaacguagacccaaacgccaaccccaacguagacccaaacgccaacccaaacgccaacccaaacgcaaacccaaacgcaaacccaaacgcgaacccaaacgcaaaccccaacgccaacccaaacgcaaacccaaacgccaaccccaacgcaaacccaaacgcaaaccccaacgcaaacccaaacgccaaccccaacgcaaaccccaacgcaaacccaaacgcaaacccaaacgcaaacccaaacgucgacccaaacgcaaaccccaacgcaaacccaaacgcaaacccaaacgccaacccaaacgcaaacccaaacgccaacccaaacgcaaaccccaacgcaaaccccaacgccaacccaaacgcaaaccccaacgcgaacccaaacgcaaacccaaacgcaaacccaaacgcaaaccccaacgcaaaccccaacgcaaacccaaacgcaaacccaaacgcaaacccaggcggcggcggaagcgaacccucggacaaacacauaaaagaauaccucaacaaaauccaaaacucccucggaggcggaggcuccaucaaacccggaagcgcaaacaaacccaaagacgaacucgacuacgcaaacgacaucgagaaaaaaauaugcaaaauggaaaaaugcucauaaggacuagucccuguucccagagcccacuuuuuuuucuuuuuuugaaauaaaauagccugucuuucagaucucaaaggcucuuuucagagccaccaaaaaaaaaaaaaaaaaaaaaaaaaaaaaaaaaaaaaaaaaaaaaaaaaaaaaaaaaaaaaaaaaaaaaaaaaaaaaaaaaaaaaaaaaaaaaaaaaaaaagaauu

SEQ ID NO: 7514 - RNA, 1255 nt, Artificial Sequence
  mRNA Design a-1 (hSL-A100-N5) comprising derived and/or modified sequence from Pf(3D7)__XP_001351122.1__HsALB_Pf-CSP(19-272)_L(G4S)_Pf-CSP(310-3 27)_Pf-CSP(346-375) (opt11)
aggagagucccgcagucggcguccagcggcucugcuuguucgugugugugucguugcaggccuuauucaagcuuaccaugaaauggguaaccuucaucucacuccuauuccucuucuccuccgcauacucgcucuuccaagaauaccaaugcuacggcucaagcucaaacacccgcguccucaacgaacucaacuacgacaacgccgguaccaaccuauacaacgaacucgaaaugaacuacuacggcaaacaagaaaacugguacucacucaaaaaaaacuccaggucccuaggagaaaacgacgauggcaacaacgaagacaacgaaaaacuccgaaagccaaaacacaaaaaacuaaaacagcccgcagacggcaacccagacccaaacgcaaacccaaacguagacccaaacgcgaaccccaacguagacccaaacgcaaacccaaacguagacccaaacgcaaaccccaacgcaaacccaaacgcaaaccccaacgcaaaccccaacgcaaacccaaacgcaaacccaaacgcaaacccaaacgcaaacccaaacgcaaaccccaacgccaaccccaacgcaaacccaaacgcaaacccaaacgcaaacccaaacgcaaacccaaacgcaaaccccaacgccaacccaaacgcaaacccaaacguagacccaaacgcaaacccaaacgcaaacccaaacgcaaaccccaacgccaacccaaacgcaaacccaaacgcaaacccaaacgcaaacccaaacgcaaauccaaacgcuaacccaaacgcaaacccgaacgcaaaccccaaugcaaaccccaacgcaaacccaaacgccaacccaaacgcaaacccaaacgcgaacccaaacgcaaacccaaacgcaaacccaggcggaggcggauccgaacccuccgacaaacacauaaaagaauaccuaaacaaaauccaaaacucucucauaaaacccggaucagccaacaaaccaaaagacgaacuagacuacgccaaugacauagaaaaaaaaauaugcaagauggaaaaaugcagcuaaggacuagucccuguucccagagcccacuuuuuuuucuuuuuuugaaauaaaauagccugucuuucagaucucaaaggcucuuuucagagccaccaaaaaaaaaaaaaaaaaaaaaaaaaaaaaaaaaaaaaaaaaaaaaaaaaaaaaaaaaaaaaaaaaaaaaaaaaaaaaaaaaaaaaaaaaaaaaaaaaaaaagaauu

SEQ ID NO: 7515 - RNA, 1255 nt, Artificial Sequence
  mRNA Design a-1 (hSL-A100-N5) comprising derived and/or modified sequence from Pf(3D7)__XP_001351122.1__HsALB_Pf-CSP(19-325) (opt11)
aggagagucccgcagucggcguccagcggcucugcuuguucgugugugugucguugcaggccuuauucaagcuuaccaugaaauggguaaccuucaucucacuccuguuccuauucucauccgcauacucacucuuccaagaauaccaaugcuacggcucgucuucaaacacccgcguacucaacgaacucaacuacgacaacgccggaaccaaccucuacaacgaacucgaaaugaacuacuacggcaaacaagaaaacugguacucacucaaaaaaaacagccgaagccuaggcgaaaacgacgacggaaacaaugaagacaacgaaaaacuccgcaaacccaaacacaaaaaacucaaacaaccagcagacggaaaccccgacccgaacgcaaacccaaacguagacccaaacgcaaacccaaacguagacccaaacgcgaacccaaacguagaccccaacgcaaacccaaacgcaaacccaaacgcaaacccaaacgccaaccccaacgccaacccaaacgccaacccaaacgcaaacccgaacgcgaacccaaacgcaaaccccaacgcaaacccaaacgcaaacccaaacgcgaacccaaacgccaacccaaacgccaacccaaacgcaaacccaaacgccaacccaaacgcaaaccccaacguggaccccaacgcaaacccaaacgcaaacccaaacgccaaccccaacgcaaacccaaacgcaaacccuaacgcaaacccaaacgcaaaccccaacgcgaacccaaacgcaaacccaaacgcaaacccaaacgcaaaccccaacgcaaacccaaacgccaacccaaacgccaacccaaacgcgaauccaaacgcaaaccccaacgcaaacccaaacgcaaacccgaacaaaaacaaccaagggaacggacaaggacacaacaugccaaacgaccccaaccgcaacgucgacgaaaacgccaacgccaacuccgcaguaaaaaacaacaacaacgaagaacccuccgacaaacacauaaaagaauaccucaacaagauacaaaacuagggacuagucccuguucccagagcccacuuuuuuuucuuuuuuugaaauaaaauagccugucuuucagaucucaaaggcucuuuucagagccaccaaaaaaaaaaaaaaaaaaaaaaaaaaaaaaaaaaaaaaaaaaaaaaaaaaaaaaaaaaaaaaaaaaaaaaaaaaaaaaaaaaaaaaaaaaaaaaaaaaaaagaauu

SEQ ID NO: 7516 - RNA, 1432 nt, Artificial Sequence
  mRNA Design a-1 (hSL-A100-N5) comprising derived and/or modified sequence from Pf(3D7)__XP_001351122.1__HsALB_Pf-CSP(19-384) (opt11)
aggagagucccgcagucggcguccagcggcucugcuuguucgugugugugucguugcaggccuuauucaagcuuaccaugaaauggguaaccuucaucucacuacucuuccuauucucaagcgcguacucacucuuccaagaauaccaaugcuacggcucgagcucaaacacccgcguucucaacgaacuaaacuacgacaacgccggaaccaaccuauacaacgaacuugaaaugaacuacuacggcaaacaagaaaacugguacucgcucaaaaaaaacuccaggagccuaggcgaaaacgacgacggaaacaacgaagacaacgagaaacuaagaaaacccaaacacaaaaaacucaaacagcccgcggacggaaaccccgacccaaacgcaaaccccaacguagacccgaacgccaacccaaacguagacccaaacgcaaacccaaacguagaccccaacgcaaacccgaacgccaacccaaacgcaaacccaaaugcgaaccccaacgcgaacccaaacgcaaacccgaacgcaaaccccaacgccaacccaaacgcaaacccaaacgcaaaccccaacgcaaacccaaacgcgaacccaaacgcaaacccaaacgcgaacccgaacgcaaacccaaacgcaaacccgaacgcaaacccaaacguagacccaaacgccaacccaaacgcaaacccaaacgcaaaccccaacgcaaacccaaacgcaaacccgaacgcaaacccaaacgcaaacccaaacgcgaacccaaacgcaaaccccaacgcaaacccaaacgcaaacccuaacgcaaacccgaacgcaaacccaaacgccaacccaaacgcgaaccccaacgcaaacccaaacgccaacccaaacgccaacccgaacaaaaacaaccaaggaaacggacaaggacacaacaugccaaacgaccccaaccgaaacgucgacgaaaacgcaaacgccaacagugccgucaaaaacaacaacaaugaagaacccucagacaaacacauaaaagaauaccuaaacaaaauccagaacucgcucucaaccgaauggucacccugcagcgucaccugcggcaacggaauacaaguacgcaucaaaccaggcucggccaacaaaccaaaagacgaauuagacuacgcaaacgacaucgaaaaaaaaauaugcaaaauggaaaaaugcagcucagucuucaacguagucaauagcucauaaggacuagucccuguucccagagcccacuuuuuuuucuuuuuuugaaauaaaauagccugucuuucagaucucaaaggcucuuuucagagccaccaaaaaaaaaaaaaaaaaaaaaaaaaaaaaaaaaaaaaaaaaaaaaaaaaaaaaaaaaaaaaaaaaaaaaaaaaaaaaaaaaaaaaaaaaaaaaaaaaaaaagaauu

SEQ ID NO: 7517 - RNA, 1570 nt, Artificial Sequence
  mRNA Design a-1 (hSL-A100-N5) comprising derived and/or modified sequence from Pf(3D7)__XP_001351122.1__HsALB_Pf-CSP(19-384)_TM domain HA (opt11)
aggagagucccgcagucggcguccagcggcucugcuuguucgugugugugucguugcaggccuuauucaagcuuaccaugaagugggucaccuucaucucccuccuauuccucuucucuagcgcguacucacucuuccaagaauaccaaugcuacggauccagcucaaacacacgcguccucaaugaacugaacuacgauaacgccggaaccaaccucuacaacgaacucgaaaugaacuacuacggcaaacaagaaaacugguacucacuaaagaaaaauagcaggucccucggcgaaaacgacgacgggaacaacgaagauaacgaaaaacuacgcaaacccaagcacaagaaacuaaaacagccagcagacggaaacccagaccccaacgccaacccaaacgucgaccccaacgcaaacccaaacguagauccgaacgcaaacccaaacgucgauccaaacgcaaacccaaacgcaaacccaaacgcuaaccccaacgccaacccaaacgcaaacccgaacgcaaaccccaacgcgaacccgaacgcaaacccaaacgcaaacccaaacgccaacccaaacgcaaacccaaacgcaaacccaaacgccaacccaaacgcaaaccccaacgcgaaccccaacgcaaaccccaacgcaaacccaaacgucgacccaaacgcaaaccccaacgcaaaccccaacgcaaaccccaaugcaaacccaaacgcgaaccccaacgcaaacccaaacgcgaacccaaaugcaaaccccaacgccaaccccaacgccaacccgaacgcaaacccaaacgccaacccaaacgccaacccaaacgcaaaucccaacgccaacccaaacgcgaacccgaacgcaaacccaaacgcaaacccgaacaaaaacaaccaaggaaacggucaaggacacaacaugccaaacgaccccaaccgcaacgucgacgaaaacgccaaugccaacagcgccgucaaaaacaacaacaacgaagaacccucagacaaacacaucaaagaguaccuaaacaagauccaaaacucccucuccaccgaauggucccccugcagcguaaccugcggaaacggcauccaaguccgcauaaaaccaggcucagccaacaaaccaaaagaugaacucgacuacgcaaacgacauagaaaagaaaaucugcaaaauggaaaaaugcagcuccguauucaacgugguuaacuccucaaaacuagaauccacccgcaucuaccaaauacucgcaauauacagcacaguagccagcucacucguccuagucgucucccucggagccaucagcuucuggaugugcuccaacggaaguuuacaaugucgcauaugcauauaaggacuagucccuguucccagagcccacuuuuuuuucuuuuuuugaaauaaaauagccugucuuucagaucucaaaggcucuuuucagagccaccaaaaaaaaaaaaaaaaaaaaaaaaaaaaaaaaaaaaaaaaaaaaaaaaaaaaaaaaaaaaaaaaaaaaaaaaaaaaaaaaaaaaaaaaaaaaaaaaaaaaagaauu

SEQ ID NO: 7518 - RNA, 1282 nt, Artificial Sequence
  mRNA Design a-1 (hSL-A100-N5) comprising derived and/or modified sequence from Pf(3D7)__XP_001351122.1__HsALB_Pf-CSP(82-397) (opt11)
aggagagucccgcagucggcguccagcggcucugcuuguucgugugugugucguugcaggccuuauucaagcuuaccaugaaaugggucaccuucaucucacuccuguuccucuucucauccgccuacagcgacaacgaaaaacugcgcaaacccaaacacaagaaacucaaacaaccagccgacggcaaccccgaccccaacgccaacccaaacguagaccccaacgccaaccccaacguagacccaaacgccaacccaaacguggaccccaacgcaaacccaaacgccaacccaaacgccaauccaaacgccaacccaaacgcaaacccaaacgcaaaccccaacgccaacccuaacgccaaccccaacgcaaacccaaacgccaaccccaacgccaaccccaacgcaaaccccaacgcaaacccuaacgccaaccccaacgccaaccccaacgcaaacccaaacgccaaccccaacguagacccaaacgccaaccccaacgcaaaccccaacgccaacccaaacgcaaacccaaacgccaaccccaacgccaaccccaacgcaaacccaaacgcaaacccaaaugcaaaccccaacgccaaccccaacgccaaccccaacgcaaaccccaacgcaaaccccaacgcaaacccgaacgccaacccaaacgccaacccaaacgccaaccccaacgcaaaccccaacaaaaacaaccaaggcaacggacaaggacacaacaugcccaacgaccccaaccgcaacgucgacgaaaacgccaacgccaacuccgccgucaaaaacaacaacaacgaagaacccuccgacaaacacaucaaagaauaccucaacaaaauccaaaacucccucucaaccgaauggucacccugcuccguaaccugcggcaacggcauccaaguccgcaucaaacccggcucagccaacaaacccaaagacgaacucgacuacgccaaugacaucgaaaagaaaauaugcaaaauggaaaaaugcuccuccgucuucaacgucgucaacuccuccaucggccucaucaugguccucucguuccuauuccuaaacuaaggacuagucccuguucccagagcccacuuuuuuuucuuuuuuugaaauaaaauagccugucuuucagaucucaaaggcucuuuucagagccaccaaaaaaaaaaaaaaaaaaaaaaaaaaaaaaaaaaaaaaaaaaaaaaaaaaaaaaaaaaaaaaaaaaaaaaaaaaaaaaaaaaaaaaaaaaaaaaaaaaaaagaauu

SEQ ID NO: 7519 - RNA, 634 nt, Artificial Sequence
  mRNA Design a-1 (hSL-A100-N5) comprising derived and/or modified sequence from Pf(3D7)__XP_001351122.1__HsALB_Pf-CSP(93-192) (opt11)
aggagagucccgcagucggcguccagcggcucugcuuguucgugugugugucguugcaggccuuauucaagcuuaccaugaaauggguaaccuucaucucacuccuauuccuauucucaagcgcauacucaaaacuaaaacaacccgcagacggaaacccagacccaaacgcaaacccaaacguagacccaaacgcaaacccaaacguagacccaaacgcaaacccaaacguagacccaaacgcaaacccaaacgcaaacccaaacgcaaacccaaacgcaaacccaaacgcaaaccccaacgcaaacccaaacgcaaacccaaacgcaaacccaaacgcaaacccaaacgcaaacccaaacgcaaacccaaacgcaaacccaaacgcaaacccaaacgcaaacccaaacgccaacccaaacgcaaacccauaaggacuagucccuguucccagagcccacuuuuuuuucuuuuuuugaaauaaaauagccugucuuucagaucucaaaggcucuuuucagagccaccaaaaaaaaaaaaaaaaaaaaaaaaaaaaaaaaaaaaaaaaaaaaaaaaaaaaaaaaaaaaaaaaaaaaaaaaaaaaaaaaaaaaaaaaaaaaaaaaaaaaagaauu

SEQ ID NO: 7520 - RNA, 874 nt, Artificial Sequence
  mRNA Design a-1 (hSL-A100-N5) comprising derived and/or modified sequence from Pf(3D7)__XP_001351122.1__HsALB_Pf-CSP(93-272) (opt11)
aggagagucccgcagucggcguccagcggcucugcuuguucgugugugugucguugcaggccuuauucaagcuuaccaugaaaugggucaccuucaucucacuccuauuccuauucucauccgcauacucaaaacuaaaacaacccgccgacggaaacccagacccaaacgcaaacccaaacguagacccaaacgcaaacccaaacguagacccaaacgcaaacccaaacguagacccaaacgcaaacccaaacgccaacccaaacgcaaauccaaacgcaaacccaaacgcaaacccaaacgcaaacccaaacgcaaacccaaacgccaacccaaacgccaacccaaacgcaaacccaaacgcaaacccaaacgcaaacccaaacgcaaacccaaacgcaaacccaaacgccaaccccaacgcaaacccaaacgcaaaccccaacguagacccaaacgcaaacccaaacgccaaccccaacgcaaaccccaacgccaaccccaacgccaacccaaacgccaacccaaacgcaaacccaaacgcaaacccaaacgcaaacccaaacgcaaacccaaacgcaaacccaaacgcaaacccaaacgcaaacccaaacgcaaacccaaacgccaacccaaacgcaaacccaaacgcaaacccgaacgcaaacccauaaggacuagucccuguucccagagcccacuuuuuuuucuuuuuuugaaauaaaauagccugucuuucagaucucaaaggcucuuuucagagccaccaaaaaaaaaaaaaaaaaaaaaaaaaaaaaaaaaaaaaaaaaaaaaaaaaaaaaaaaaaaaaaaaaaaaaaaaaaaaaaaaaaaaaaaaaaaaaaaaaaaaagaauu

SEQ ID NO: 7521 - RNA, 1249 nt, Artificial Sequence
  mRNA Design a-1 (hSL-A100-N5) comprising derived and/or modified sequence from Pf(3D7)__XP_001351122.1__HsALB_Pf-CSP(93-397) (opt11)
aggagagucccgcagucggcguccagcggcucugcuuguucgugugugugucguugcaggccuuauucaagcuuaccaugaaaugggucacauucaucucacuccuauuccuauucucaagcgccuacuccaaacucaaacaacccgccgacggcaacccagacccaaacgccaaccccaacgucgacccaaacgccaacccaaacgucgacccaaacgcaaacccaaacgucgaccccaacgccaaccccaacgccaaccccaacgccaacccaaacgccaaucccaacgccaaccccaacgccaacccaaacgcaaaccccaacgccaauccaaacgccaaccccaacgcaaaccccaacgccaaccccaacgcaaacccaaacgcaaacccaaacgcaaaccccaacgccaaccccaacgcaaaccccaacgccaaccccaacgucgaccccaacgccaacccaaacgccaacccaaacgccaaccccaacgccaaccccaacgcaaacccaaacgcgaaccccaacgcaaaccccaacgccaacccgaacgccaacccgaacgcaaacccaaacgccaaccccaacgcaaaccccaacgcaaacccaaacgcgaaccccaacgccaacccaaacgccaacccaaacgcgaacccaaacgccaaccccaacaaaaacaaccaagggaacggacaaggccacaacaugcccaacgaccccaaccgcaacgucgacgaaaacgccaacgccaacuccgccgucaaaaacaacaacaacgaagaacccuccgacaaacacauaaaagaauaccuaaacaaaauccaaaacucacucucuacugaauggucccccugcucagucaccugcggcaacggcauacaaguccgcauaaaacccggcucggccaacaaaccaaaagacgaacuagacuacgcaaacgacaucgaaaaaaaaauaugcaaaauggaaaaaugcuccucagucuucaacguaguaaacuccuccaucggccucauaaugguccucuccuuccuauuccucaacuaaggacuagucccuguucccagagcccacuuuuuuuucuuuuuuugaaauaaaauagccugucuuucagaucucaaaggcucuuuucagagccaccaaaaaaaaaaaaaaaaaaaaaaaaaaaaaaaaaaaaaaaaaaaaaaaaaaaaaaaaaaaaaaaaaaaaaaaaaaaaaaaaaaaaaaaaaaaaaaaaaaaaagaauu

SEQ ID NO: 7522 - RNA, 619 nt, Artificial Sequence
  mRNA Design a-1 (hSL-A100-N5) comprising derived and/or modified sequence from Pf(3D7)__XP_001351122.1__HsALB_Pf-CSP(98-192) (opt11)
aggagagucccgcagucggcguccagcggcucugcuuguucgugugugugucguugcaggccuuauucaagcuuaccaugaaaugggucacauucauaagccuacucuuccucuucagcucagccuacuccgcagacggaaacccagacccaaacgcaaacccaaacguagacccaaacgcaaacccaaacguagacccaaacgcaaacccaaacguagacccaaacgcaaacccaaacgcaaacccaaacgcaaacccaaacgcaaacccaaacgcaaacccaaacgcaaacccaaacgcaaacccaaacgcaaacccaaacgcaaacccaaacgcaaaccccaacgcaaacccaaacgcaaacccaaacgcaaacccaaacgcaaacccaaacgcaaacccaaacgcaaacccauaaggacuagucccuguucccagagcccacuuuuuuuucuuuuuuugaaauaaaauagccugucuuucagaucucaaaggcucuuuucagagccaccaaaaaaaaaaaaaaaaaaaaaaaaaaaaaaaaaaaaaaaaaaaaaaaaaaaaaaaaaaaaaaaaaaaaaaaaaaaaaaaaaaaaaaaaaaaaaaaaaaaaagaauu

SEQ ID NO: 7523 - RNA, 859 nt, Artificial Sequence
  mRNA Design a-1 (hSL-A100-N5) comprising derived and/or modified sequence from Pf(3D7)__XP_001351122.1__HsALB_Pf-CSP(98-272) (opt11)
aggagagucccgcagucggcguccagcggcucugcuuguucgugugugugucguugcaggccuuauucaagcuuaccaugaaauggguaaccuucauaagccuacucuuccuauucucaucagccuacagcgcagacggaaacccagaccccaacgcaaacccaaacguagacccaaacgcaaacccaaacguagaccccaacgcaaacccaaacguagacccaaacgccaacccaaacgcaaacccaaacgcaaacccaaacgccaacccaaacgcaaacccaaacgccaacccaaacgcaaacccaaacgcaaacccaaacgcaaacccaaacgcaaacccaaacgcaaacccaaacgcaaacccaaacgccaacccaaacgcaaacccaaacgcaaacccaaacgcaaacccaaacgccaaccccaacguagacccaaacgccaaccccaacgcaaacccaaacgcaaacccaaacgcaaacccaaacgcaaacccaaacgcaaacccaaacgcaaacccaaacgcaaacccaaacgcaaacccgaacgccaacccaaacgcaaacccaaacgcaaacccaaacgcaaacccaaacgcaaacccaaacgcaaaccccaacgcaaacccaaacgcaaacccaaacgcaaacccauaaggacuagucccuguucccagagcccacuuuuuuuucuuuuuuugaaauaaaauagccugucuuucagaucucaaaggcucuuuucagagccaccaaaaaaaaaaaaaaaaaaaaaaaaaaaaaaaaaaaaaaaaaaaaaaaaaaaaaaaaaaaaaaaaaaaaaaaaaaaaaaaaaaaaaaaaaaaaaaaaaaaaagaauu

SEQ ID NO: 7524 - RNA, 1165 nt, Artificial Sequence
  mRNA Design a-1 (hSL-A100-N5) comprising derived and/or modified sequence from Pf(3D7)__XP_001351122.1__HsALB_Pf-CSP(98-374) (opt11)
aggagagucccgcagucggcguccagcggcucugcuuguucgugugugugucguugcaggccuuauucaagcuuaccaugaaauggguaaccuucauaucccuacucuuccuuuucuccucggccuacuccgcagacggaaacccagacccaaacgcaaaccccaacguagacccaaacgcaaacccaaauguagacccaaacgcaaacccaaacguggacccaaacgcgaaccccaacgcaaaccccaacgcaaacccaaacgccaacccaaacgcaaacccaaacgccaacccaaacgcaaaccccaacgccaaccccaacgccaacccaaacgcaaacccaaacgcaaaccccaacgcaaacccaaacgccaacccaaacgccaacccaaacgccaaccccaacgcaaacccaaacgccaacccaaacguagacccaaacgcaaacccaaacgcaaacccaaacgcaaaccccaacgcaaaccccaacgcaaacccaaacgcaaacccaaacgcaaacccaaacgcaaacccaaacgccaacccaaacgcgaaccccaacgccaacccaaacgcaaacccaaacgccaacccaaacgccaacccaaacgcaaaccccaacgcaaacccaaacgcaaacccaaacgccaacccgaacaaaaacaaccaaggcaacggccaaggacacaacaugccaaacgaccccaaccgcaacguagacgaaaacgccaacgcaaacuccgcagucaaaaacaacaacaacgaagaacccuccgacaaacacauaaaagaauaccuaaacaaaauccaaaacucgcucucaaccgaauggucccccugcuccgucaccugcggcaacggcauccaaguacgcaucaaaccaggcucagcaaacaaaccaaaagacgaacucgacuacgccaacgacauagaaaaaaaaauaugcaaaauggagaaaugcuaaggacuagucccuguucccagagcccacuuuuuuuucuuuuuuugaaauaaaauagccugucuuucagaucucaaaggcucuuuucagagccaccaaaaaaaaaaaaaaaaaaaaaaaaaaaaaaaaaaaaaaaaaaaaaaaaaaaaaaaaaaaaaaaaaaaaaaaaaaaaaaaaaaaaaaaaaaaaaaaaaaaaagaauu

SEQ ID NO: 7525 - RNA, 1234 nt, Artificial Sequence
  mRNA Design a-1 (hSL-A100-N5) comprising derived and/or modified sequence from Pf(3D7)__XP_001351122.1__HsALB_Pf-CSP(98-397) (opt11)
aggagagucccgcagucggcguccagcggcucugcuuguucgugugugugucguugcaggccuuauucaagcuuaccaugaaauggguaaccuucaucagccuacuauuccuauucagcuccgccuacagcgccgacggaaacccagacccaaacgccaaccccaacgucgacccaaacgccaaccccaacguagacccaaacgccaaccccaacgucgaccccaacgccaaccccaacgccaacccaaacgccaacccuaacgccaacccaaacgccaacccgaacgccaaccccaacgcgaacccaaacgccaacccaaacgcaaaccccaacgccaaccccaacgccaaccccaacgcaaaccccaacgcaaacccaaacgccaacccaaacgccaaccccaacgccaaccccaaugcaaacccaaacgucgaccccaacgccaacccaaacgccaaccccaacgccaaccccaacgccaaccccaacgcaaaccccaacgccaaccccaacgcgaaccccaacgccaaccccaacgccaacccaaacgccaaccccaacgccaaccccaacgccaaccccaacgcuaaccccaacgcaaacccaaacgccaacccaaacgccaacccaaacgccaaccccaacgccaacccaaacaaaaacaaccaaggcaacggacaaggacacaacaugccaaacgaccccaaccgcaacgucgacgaaaaugccaacgccaacuccgccgucaaaaacaacaacaacgaagaacccuccgacaaacacaucaaagaauaccuaaacaaaauacaaaacucucucucaaccgaauggucccccugcuccgucacaugcggcaacggcauccaaguccgcaucaaaccaggaucagccaauaaacccaaagacgaacucgacuacgccaacgacauagaaaaaaaaaucugcaaaauggaaaaaugcagcucagucuucaacgucgucaacuccucaaucggacuuauaaugguccuauccuuccucuuccuuaacuaaggacuagucccuguucccagagcccacuuuuuuuucuuuuuuugaaauaaaauagccugucuuucagaucucaaaggcucuuuucagagccaccaaaaaaaaaaaaaaaaaaaaaaaaaaaaaaaaaaaaaaaaaaaaaaaaaaaaaaaaaaaaaaaaaaaaaaaaaaaaaaaaaaaaaaaaaaaaaaaaaaaaagaauu

SEQ ID NO: 7526 - RNA, 1561 nt, Artificial Sequence
  mRNA Design a-1 (hSL-A100-N5) comprising derived and/or modified sequence from Pf(3D7)__XP_001351122.1__HsALB_Pf-CSP(199-377)_L(PVTN)_HBsAg (opt11)
aggagagucccgcagucggcguccagcggcucugcuuguucgugugugugucguugcaggccuuauucaagcuuaccaugaaaugggucacauucaucucgcuccucuuccuauucuccuccgccuacuccgacccuaacgccaaucccaacgccaaccccaacgccaaccccaacgccaaccccaacgccaaccccaaugcaaacccaaacgcaaaccccaacgccaaccccaacgcaaacccaaaugcaaaccccaacgcaaaccccaacgccaaccccaaugccaaccccaacgcuaaccccaacgccaauccaaacgccaaccccaacgcaaaccccaacgccaacccuaacaaaaauaaccaaggcaacggccaaggacacaacaugcccaacgaccccaaccgaaaugucgacgaaaacgcuaacgcuaacagcgccgucaaaaacaacaacaacgaagaacccuccgacaaacacauuaaagaauaccucaacaaaauccaaaacucccucuccaccgaauggucccccugcucuguaacuugcggcaacggcauccaaguccgcauaaaacccggaucagcaaacaaacccaaagacgaacucgacuacgcaaacgacauugagaagaaaaucugcaaaauggaaaaaugcucaucaguacccgucacuaacauggaaaacaucaccuccggcuuccucggcccccuccuaguccuacaagccgguuucuuccuucuuacacgcauccuaaccaucccacaaucccuagacuccugguggacaucuuuaaacuuccuuggaggauccccugucugccucggccaaaacucccaauccccaaccucuaaccacucucccacauccugcccucccauaugccccgguuaccgcuggaugugccuccgccgcuucaucaucuuccucuucauacuccucuuaugccucaucuuccuccucguacuacucgacuaccaagguaugcuacccguaugcccucucauccccggcuccaccacaaccaacaccggccccugcaaaacaugcaccacccccgcacagggcaauuccauguuccccuccugcuguugcaccaaacccacagacggcaacuguaccugcauccccauccccuccucuugggcauuugccaaauaccucugggaaugggccuccguccgauucucuuggcuuucacuccucguucccuucguacaaugguucgucggccuaucacccaccgucuggcucuccgccaucuggaugaugugguacuggggcccuucacuuuacuccauagucagccccuucauaccacuccuccccaucuucuucugccuauggguauacaucuaaggacuagucccuguucccagagcccacuuuuuuuucuuuuuuugaaauaaaauagccugucuuucagaucucaaaggcucuuuucagagccaccaaaaaaaaaaaaaaaaaaaaaaaaaaaaaaaaaaaaaaaaaaaaaaaaaaaaaaaaaaaaaaaaaaaaaaaaaaaaaaaaaaaaaaaaaaaaaaaaaaaaagaauu

SEQ ID NO: 7527 - RNA, 1568 nt, Artificial Sequence
  mRNA Design a-3 (hSL-A100-N5) comprising derived and/or modified sequence from Pf(3D7)__XP_001351122.1__Pf-CSP (wt)
aggagagggcgcuuggcuugcaaggacccugagcugcggcauugaagcacacccaacccaacucgacugaagucagccucacugaaccggaucugagaaucuucucucucugggcuugccagggcucuccgaaccuagcuagcauccucuucaauuccaacuagaaagcuuaccaugaugagaaaauuagcuauuuuaucuguuucuuccuuuuuauuuguugaggccuuauuccaggaauaccagugcuauggaaguucgucaaacacaaggguucuaaaugaauuaaauuaugauaaugcaggcacuaauuuauauaaugaauuagaaaugaauuauuaugggaaacaggaaaauugguauagucuuaaaaaaaauaguagaucacuuggagaaaaugaugauggaaauaacgaagacaacgagaaauuaaggaaaccaaaacauaaaaaauuaaagcaaccagcggaugguaauccugauccaaaugcaaacccaaauguagaucccaaugccaacccaaauguagauccaaaugcaaacccaaauguagauccaaaugcaaacccaaaugcaaacccaaaugcaaacccaaaugcaaacccaaaugcaaacccaaaugcaaacccaaaugcaaacccaaaugcaaacccaaaugcaaacccaaaugcaaacccaaaugcaaacccaaaugcaaacccaaaugcaaacccaaaugcaaaccccaaugcaaauccuaaugcaaacccaaaugcaaacccaaacguagauccuaaugcaaauccaaaugcaaacccaaacgcaaaccccaaugcaaauccuaaugcaaaccccaaugcaaauccuaaugcaaauccuaaugccaauccaaaugcaaauccaaaugcaaacccaaacgcaaaccccaaugcaaauccuaaugccaauccaaaugcaaauccaaaugcaaacccaaaugcaaacccaaaugcaaaccccaaugcaaauccuaauaaaaacaaucaagguaauggacaaggucacaauaugccaaaugacccaaaccgaaauguagaugaaaaugcuaaugccaacagugcuguaaaaaauaauaauaacgaagaaccaagugauaagcacauaaaagaauauuuaaacaaaauacaaaauucucuuucaacugaaugguccccauguaguguaacuuguggaaaugguauucaaguuagaauaaagccuggcucugcuaauaaaccuaaagacgaauuagauuaugcaaaugauauugaaaaaaaaauuuguaaaauggaaaaauguuccaguguguuuaaugucguaaauaguucaauaggauuaauaaugguauuauccuucuuguuccuuaauuagggacuagucccuguucccagagcccacuuuuuuuucuuuuuuugaaauaaaauagccugucuuucagaucucaaaggcucuuuucagagccaccaaaaaaaaaaaaaaaaaaaaaaaaaaaaaaaaaaaaaaaaaaaaaaaaaaaaaaaaaaaaaaaaaaaaaaaaaaaaaaaaaaaaaaaaaaaaaaaaaaaaagaauu

SEQ ID NO: 7528 - RNA, 1499 nt, Artificial Sequence
  mRNA Design a-3 (hSL-A100-N5) comprising derived and/or modified sequence from Pf(3D7)__XP_001351122.1__Pf-CSP(1-374) (wt)
aggagagggcgcuuggcuugcaaggacccugagcugcggcauugaagcacacccaacccaacucgacugaagucagccucacugaaccggaucugagaaucuucucucucugggcuugccagggcucuccgaaccuagcuagcauccucuucaauuccaacuagaaagcuuaccaugaugagaaaauuagcuauuuuaucuguuucuuccuuuuuauuuguugaggccuuauuccaggaauaccagugcuauggaaguucgucaaacacaaggguucuaaaugaauuaaauuaugauaaugcaggcacuaauuuauauaaugaauuagaaaugaauuauuaugggaaacaggaaaauugguauagucuuaaaaaaaauaguagaucacuuggagaaaaugaugauggaaauaacgaagacaacgagaaauuaaggaaaccaaaacauaaaaaauuaaagcaaccagcggaugguaauccugauccaaaugcaaacccaaauguagaucccaaugccaacccaaauguagauccaaaugcaaacccaaauguagauccaaaugcaaacccaaaugcaaacccaaaugcaaacccaaaugcaaacccaaaugcaaacccaaaugcaaacccaaaugcaaacccaaaugcaaacccaaaugcaaacccaaaugcaaacccaaaugcaaacccaaaugcaaacccaaaugcaaacccaaaugcaaaccccaaugcaaauccuaaugcaaacccaaaugcaaacccaaacguagauccuaaugcaaauccaaaugcaaacccaaacgcaaaccccaaugcaaauccuaaugcaaaccccaaugcaaauccuaaugcaaauccuaaugccaauccaaaugcaaauccaaaugcaaacccaaacgcaaaccccaaugcaaauccuaaugccaauccaaaugcaaauccaaaugcaaacccaaaugcaaacccaaaugcaaaccccaaugcaaauccuaauaaaaacaaucaagguaauggacaaggucacaauaugccaaaugacccaaaccgaaauguagaugaaaaugcuaaugccaacagugcuguaaaaaauaauaauaacgaagaaccaagugauaagcacauaaaagaauauuuaaacaaaauacaaaauucucuuucaacugaaugguccccauguaguguaacuuguggaaaugguauucaaguuagaauaaagccuggcucugcuaauaaaccuaaagacgaauuagauuaugcaaaugauauugaaaaaaaaauuuguaaaauggaaaaauguugaggacuagucccuguucccagagcccacuuuuuuuucuuuuuuugaaauaaaauagccugucuuucagaucucaaaggcucuuuucagagccaccaaaaaaaaaaaaaaaaaaaaaaaaaaaaaaaaaaaaaaaaaaaaaaaaaaaaaaaaaaaaaaaaaaaaaaaaaaaaaaaaaaaaaaaaaaaaaaaaaaaaagaauu

SEQ ID NO: 7529 - RNA, 1352 nt, Artificial Sequence
  mRNA Design a-3 (hSL-A100-N5) comprising derived and/or modified sequence from Pf(3D7)__XP_001351122.1__Pf-CSP(1-325) (wt)
aggagagggcgcuuggcuugcaaggacccugagcugcggcauugaagcacacccaacccaacucgacugaagucagccucacugaaccggaucugagaaucuucucucucugggcuugccagggcucuccgaaccuagcuagcauccucuucaauuccaacuagaaagcuuaccaugaugagaaaauuagcuauuuuaucuguuucuuccuuuuuauuuguugaggccuuauuccaggaauaccagugcuauggaaguucgucaaacacaaggguucuaaaugaauuaaauuaugauaaugcaggcacuaauuuauauaaugaauuagaaaugaauuauuaugggaaacaggaaaauugguauagucuuaaaaaaaauaguagaucacuuggagaaaaugaugauggaaauaacgaagacaacgagaaauuaaggaaaccaaaacauaaaaaauuaaagcaaccagcggaugguaauccugauccaaaugcaaacccaaauguagaucccaaugccaacccaaauguagauccaaaugcaaacccaaauguagauccaaaugcaaacccaaaugcaaacccaaaugcaaacccaaaugcaaacccaaaugcaaacccaaaugcaaacccaaaugcaaacccaaaugcaaacccaaaugcaaacccaaaugcaaacccaaaugcaaacccaaaugcaaacccaaaugcaaacccaaaugcaaaccccaaugcaaauccuaaugcaaacccaaaugcaaacccaaacguagauccuaaugcaaauccaaaugcaaacccaaacgcaaaccccaaugcaaauccuaaugcaaaccccaaugcaaauccuaaugcaaauccuaaugccaauccaaaugcaaauccaaaugcaaacccaaacgcaaaccccaaugcaaauccuaaugccaauccaaaugcaaauccaaaugcaaacccaaaugcaaacccaaaugcaaaccccaaugcaaauccuaauaaaaacaaucaagguaauggacaaggucacaauaugccaaaugacccaaaccgaaauguagaugaaaaugcuaaugccaacagugcuguaaaaaauaauaauaacgaagaaccaagugauaagcacauaaaagaauauuuaaacaaaauacaaaauugaggacuagucccuguucccagagcccacuuuuuuuucuuuuuuugaaauaaaauagccugucuuucagaucucaaaggcucuuuucagagccaccaaaaaaaaaaaaaaaaaaaaaaaaaaaaaaaaaaaaaaaaaaaaaaaaaaaaaaaaaaaaaaaaaaaaaaaaaaaaaaaaaaaaaaaaaaaaaaaaaaaaagaauu

SEQ ID NO: 7530 - RNA, 1568 nt, Artificial Sequence
  mRNA Design a-3 (hSL-A100-N5) comprising derived and/or modified sequence from Pf(3D7)__XP_001351122.1__Pf-CSP (opt1) R8985
aggagagggcgcuuggcuugcaaggacccugagcugcggcauugaagcacacccaacccaacucgacugaagucagccucacugaaccggaucugagaaucuucucucucugggcuugccagggcucuccgaaccuagcuagcauccucuucaauuccaacuagaaagcuuaccaugaugcgcaagcuggccauccucagcguguccagcuuccuguucgucgaggcccuguuccaggaguaccagugcuacggcuccagcuccaacacccgggugcucaacgagcugaacuacgacaacgcggggaccaaccuguacaacgagcucgagaugaacuacuacggcaagcaggagaacugguacagccugaagaagaacucccgcagccugggggagaacgacgacggcaacaacgaggacaacgagaagcuccggaagcccaagcacaagaagcugaagcagccggccgacgggaaccccgaccccaacgccaaccccaacguggacccgaacgccaaccccaacgucgaccccaacgccaaccccaacguggacccgaacgcgaaccccaacgccaaccccaacgccaaccccaacgccaacccgaacgcgaaccccaacgccaaccccaacgccaaccccaacgccaacccgaacgccaaccccaacgcgaaccccaacgccaaccccaacgccaacccgaacgccaaccccaacgccaaccccaacgcgaaccccaacgccaacccgaacgccaaccccaacguggaccccaacgccaaccccaacgccaacccgaacgcgaaccccaacgccaaccccaacgccaacccgaacgccaaccccaacgccaaccccaacgcgaaccccaacgccaacccgaacgccaaccccaacgccaaccccaacgcgaaccccaacgccaacccgaacgccaaccccaacgccaaccccaacgccaaccccaacgcgaacccgaacgccaaccccaacaagaacaaccagggcaacggccaggggcacaacaugcccaacgaccccaaccgcaacgucgacgagaacgccaacgccaacuccgccgugaagaacaacaacaacgaggagccgagcgacaagcacaucaaggaguaccugaacaagauccagaacucccucagcacggaguggucccccugcagcgugaccugcggcaacgggauccagguccggaucaagcccggcuccgcgaacaagcccaaggacgagcuggacuacgccaacgacaucgagaagaagaucugcaagauggagaagugcagcuccguguucaacguggucaacagcuccaucgggcugaucauggugcucagcuuccuguuccugaacugaggacuagucccuguucccagagcccacuuuuuuuucuuuuuuugaaauaaaauagccugucuuucagaucucaaaggcucuuuucagagccaccaaaaaaaaaaaaaaaaaaaaaaaaaaaaaaaaaaaaaaaaaaaaaaaaaaaaaaaaaaaaaaaaaaaaaaaaaaaaaaaaaaaaaaaaaaaaaaaaaaaaagaauu

SEQ ID NO: 7531 - RNA, 1499 nt, Artificial Sequence
  mRNA Design a-3 (hSL-A100-N5) comprising derived and/or modified sequence from Pf(3D7)__XP_001351122.1__Pf-CSP(1-374) (opt1)
aggagagggcgcuuggcuugcaaggacccugagcugcggcauugaagcacacccaacccaacucgacugaagucagccucacugaaccggaucugagaaucuucucucucugggcuugccagggcucuccgaaccuagcuagcauccucuucaauuccaacuagaaagcuuaccaugaugcgcaagcuggccauccucagcguguccagcuuccuguucgucgaggcccuguuccaggaguaccagugcuacggcuccagcuccaacacccgggugcucaacgagcugaacuacgacaacgcggggaccaaccuguacaacgagcucgagaugaacuacuacggcaagcaggagaacugguacagccugaagaagaacucccgcagccugggggagaacgacgacggcaacaacgaggacaacgagaagcuccggaagcccaagcacaagaagcugaagcagccggccgacgggaaccccgaccccaacgccaaccccaacguggacccgaacgccaaccccaacgucgaccccaacgccaaccccaacguggacccgaacgcgaaccccaacgccaaccccaacgccaaccccaacgccaacccgaacgcgaaccccaacgccaaccccaacgccaaccccaacgccaacccgaacgccaaccccaacgcgaaccccaacgccaaccccaacgccaacccgaacgccaaccccaacgccaaccccaacgcgaaccccaacgccaacccgaacgccaaccccaacguggaccccaacgccaaccccaacgccaacccgaacgcgaaccccaacgccaaccccaacgccaacccgaacgccaaccccaacgccaaccccaacgcgaaccccaacgccaacccgaacgccaaccccaacgccaaccccaacgcgaaccccaacgccaacccgaacgccaaccccaacgccaaccccaacgccaaccccaacgcgaacccgaacgccaaccccaacaagaacaaccagggcaacggccaggggcacaacaugcccaacgaccccaaccgcaacgucgacgagaacgccaacgccaacuccgccgugaagaacaacaacaacgaggagccgagcgacaagcacaucaaggaguaccugaacaagauccagaacucccucagcacggaguggucccccugcagcgugaccugcggcaacgggauccagguccggaucaagcccggcuccgcgaacaagcccaaggacgagcuggacuacgccaacgacaucgagaagaagaucugcaagauggagaagugcugaggacuagucccuguucccagagcccacuuuuuuuucuuuuuuugaaauaaaauagccugucuuucagaucucaaaggcucuuuucagagccaccaaaaaaaaaaaaaaaaaaaaaaaaaaaaaaaaaaaaaaaaaaaaaaaaaaaaaaaaaaaaaaaaaaaaaaaaaaaaaaaaaaaaaaaaaaaaaaaaaaaaagaauu

SEQ ID NO: 7532 - RNA, 1352 nt, Artificial Sequence
  mRNA Design a-3 (hSL-A100-N5) comprising derived and/or modified sequence from Pf(3D7)__XP_001351122.1__Pf-CSP(1-325) (opt1)
aggagagggcgcuuggcuugcaaggacccugagcugcggcauugaagcacacccaacccaacucgacugaagucagccucacugaaccggaucugagaaucuucucucucugggcuugccagggcucuccgaaccuagcuagcauccucuucaauuccaacuagaaagcuuaccaugaugcgcaagcuggccauccucagcguguccagcuuccuguucgucgaggcccuguuccaggaguaccagugcuacggcuccagcuccaacacccgggugcucaacgagcugaacuacgacaacgcggggaccaaccuguacaacgagcucgagaugaacuacuacggcaagcaggagaacugguacagccugaagaagaacucccgcagccugggggagaacgacgacggcaacaacgaggacaacgagaagcuccggaagcccaagcacaagaagcugaagcagccggccgacgggaaccccgaccccaacgccaaccccaacguggacccgaacgccaaccccaacgucgaccccaacgccaaccccaacguggacccgaacgcgaaccccaacgccaaccccaacgccaaccccaacgccaacccgaacgcgaaccccaacgccaaccccaacgccaaccccaacgccaacccgaacgccaaccccaacgcgaaccccaacgccaaccccaacgccaacccgaacgccaaccccaacgccaaccccaacgcgaaccccaacgccaacccgaacgccaaccccaacguggaccccaacgccaaccccaacgccaacccgaacgcgaaccccaacgccaaccccaacgccaacccgaacgccaaccccaacgccaaccccaacgcgaaccccaacgccaacccgaacgccaaccccaacgccaaccccaacgcgaaccccaacgccaacccgaacgccaaccccaacgccaaccccaacgccaaccccaacgcgaacccgaacgccaaccccaacaagaacaaccagggcaacggccaggggcacaacaugcccaacgaccccaaccgcaacgucgacgagaacgccaacgccaacuccgccgugaagaacaacaacaacgaggagccgagcgacaagcacaucaaggaguaccugaacaagauccagaacugaggacuagucccuguucccagagcccacuuuuuuuucuuuuuuugaaauaaaauagccugucuuucagaucucaaaggcucuuuucagagccaccaaaaaaaaaaaaaaaaaaaaaaaaaaaaaaaaaaaaaaaaaaaaaaaaaaaaaaaaaaaaaaaaaaaaaaaaaaaaaaaaaaaaaaaaaaaaaaaaaaaaagaauu

SEQ ID NO: 7533 - RNA, 1568 nt, Artificial Sequence
  mRNA Design a-3 (hSL-A100-N5) comprising derived and/or modified sequence from Pf(3D7)__XP_001351122.1__HsALB_Pf-CSP(19-397) (opt1) R8986
aggagagggcgcuuggcuugcaaggacccugagcugcggcauugaagcacacccaacccaacucgacugaagucagccucacugaaccggaucugagaaucuucucucucugggcuugccagggcucuccgaaccuagcuagcauccucuucaauuccaacuagaaagcuuaccaugaagugggugaccuucaucagccugcucuuccuguucuccagcgccuacucccuguuccaggaguaccagugcuacggcuccagcuccaacacccgggugcucaacgagcugaacuacgacaacgcggggaccaaccuguacaacgagcucgagaugaacuacuacggcaagcaggagaacugguacagccugaagaagaacucccgcagccugggggagaacgacgacggcaacaacgaggacaacgagaagcuccggaagcccaagcacaagaagcugaagcagccggccgacgggaaccccgaccccaacgccaaccccaacguggacccgaacgccaaccccaacgucgaccccaacgccaaccccaacguggacccgaacgcgaaccccaacgccaaccccaacgccaaccccaacgccaacccgaacgcgaaccccaacgccaaccccaacgccaaccccaacgccaacccgaacgccaaccccaacgcgaaccccaacgccaaccccaacgccaacccgaacgccaaccccaacgccaaccccaacgcgaaccccaacgccaacccgaacgccaaccccaacguggaccccaacgccaaccccaacgccaacccgaacgcgaaccccaacgccaaccccaacgccaacccgaacgccaaccccaacgccaaccccaacgcgaaccccaacgccaacccgaacgccaaccccaacgccaaccccaacgcgaaccccaacgccaacccgaacgccaaccccaacgccaaccccaacgccaaccccaacgcgaacccgaacgccaaccccaacaagaacaaccagggcaacggccaggggcacaacaugcccaacgaccccaaccgcaacgucgacgagaacgccaacgccaacuccgccgugaagaacaacaacaacgaggagccgagcgacaagcacaucaaggaguaccugaacaagauccagaacucccucagcacggaguggucccccugcagcgugaccugcggcaacgggauccagguccggaucaagcccggcuccgcgaacaagcccaaggacgagcuggacuacgccaacgacaucgagaagaagaucugcaagauggagaagugcagcuccguguucaacguggucaacagcuccaucgggcugaucauggugcucagcuuccuguuccugaacugaggacuagucccuguucccagagcccacuuuuuuuucuuuuuuugaaauaaaauagccugucuuucagaucucaaaggcucuuuucagagccaccaaaaaaaaaaaaaaaaaaaaaaaaaaaaaaaaaaaaaaaaaaaaaaaaaaaaaaaaaaaaaaaaaaaaaaaaaaaaaaaaaaaaaaaaaaaaaaaaaaaaagaauu

SEQ ID NO: 7534 - RNA, 1586 nt, Artificial Sequence
  mRNA Design a-3 (hSL-A100-N5) comprising derived and/or modified sequence from Pf(3D7)__XP_001351122.1__HsIns-iso1_Pf-CSP(19-397) (opt1)
aggagagggcgcuuggcuugcaaggacccugagcugcggcauugaagcacacccaacccaacucgacugaagucagccucacugaaccggaucugagaaucuucucucucugggcuugccagggcucuccgaaccuagcuagcauccucuucaauuccaacuagaaagcuuaccauggcccuguggaugcgccuccugccccugcucgcccugcuggcgcucuggggcccggaccccgccgccgcccuguuccaggaguaccagugcuacggcuccagcuccaacacccgggugcucaacgagcugaacuacgacaacgcggggaccaaccuguacaacgagcucgagaugaacuacuacggcaagcaggagaacugguacagccugaagaagaacucccgcagccugggggagaacgacgacggcaacaacgaggacaacgagaagcuccggaagcccaagcacaagaagcugaagcagccggccgacgggaaccccgaccccaacgccaaccccaacguggacccgaacgccaaccccaacgucgaccccaacgccaaccccaacguggacccgaacgcgaaccccaacgccaaccccaacgccaaccccaacgccaacccgaacgcgaaccccaacgccaaccccaacgccaaccccaacgccaacccgaacgccaaccccaacgcgaaccccaacgccaaccccaacgccaacccgaacgccaaccccaacgccaaccccaacgcgaaccccaacgccaacccgaacgccaaccccaacguggaccccaacgccaaccccaacgccaacccgaacgcgaaccccaacgccaaccccaacgccaacccgaacgccaaccccaacgccaaccccaacgcgaaccccaacgccaacccgaacgccaaccccaacgccaaccccaacgcgaaccccaacgccaacccgaacgccaaccccaacgccaaccccaacgccaaccccaacgcgaacccgaacgccaaccccaacaagaacaaccagggcaacggccaggggcacaacaugcccaacgaccccaaccgcaacgucgacgagaacgccaacgccaacuccgccgugaagaacaacaacaacgaggagccgagcgacaagcacaucaaggaguaccugaacaagauccagaacucccucagcacggaguggucccccugcagcgugaccugcggcaacgggauccagguccggaucaagcccggcuccgcgaacaagcccaaggacgagcuggacuacgccaacgacaucgagaagaagaucugcaagauggagaagugcagcuccguguucaacguggucaacagcuccaucgggcugaucauggugcucagcuuccuguuccugaacugaggacuagucccuguucccagagcccacuuuuuuuucuuuuuuugaaauaaaauagccugucuuucagaucucaaaggcucuuuucagagccaccaaaaaaaaaaaaaaaaaaaaaaaaaaaaaaaaaaaaaaaaaaaaaaaaaaaaaaaaaaaaaaaaaaaaaaaaaaaaaaaaaaaaaaaaaaaaaaaaaaaaagaauu

SEQ ID NO: 7535 - RNA, 1565 nt, Artificial Sequence
  mRNA Design a-3 (hSL-A100-N5) comprising derived and/or modified sequence from Pf(3D7)__XP_001351122.1__HsSPARC_Pf-CSP(19-397) (opt1)
aggagagggcgcuuggcuugcaaggacccugagcugcggcauugaagcacacccaacccaacucgacugaagucagccucacugaaccggaucugagaaucuucucucucugggcuugccagggcucuccgaaccuagcuagcauccucuucaauuccaacuagaaagcuuaccaugcgcgccuggaucuucuuccugcucugccuggccggccgggcccuggcccuguuccaggaguaccagugcuacggcuccagcuccaacacccgggugcucaacgagcugaacuacgacaacgcggggaccaaccuguacaacgagcucgagaugaacuacuacggcaagcaggagaacugguacagccugaagaagaacucccgcagccugggggagaacgacgacggcaacaacgaggacaacgagaagcuccggaagcccaagcacaagaagcugaagcagccggccgacgggaaccccgaccccaacgccaaccccaacguggacccgaacgccaaccccaacgucgaccccaacgccaaccccaacguggacccgaacgcgaaccccaacgccaaccccaacgccaaccccaacgccaacccgaacgcgaaccccaacgccaaccccaacgccaaccccaacgccaacccgaacgccaaccccaacgcgaaccccaacgccaaccccaacgccaacccgaacgccaaccccaacgccaaccccaacgcgaaccccaacgccaacccgaacgccaaccccaacguggaccccaacgccaaccccaacgccaacccgaacgcgaaccccaacgccaaccccaacgccaacccgaacgccaaccccaacgccaaccccaacgcgaaccccaacgccaacccgaacgccaaccccaacgccaaccccaacgcgaaccccaacgccaacccgaacgccaaccccaacgccaaccccaacgccaaccccaacgcgaacccgaacgccaaccccaacaagaacaaccagggcaacggccaggggcacaacaugcccaacgaccccaaccgcaacgucgacgagaacgccaacgccaacuccgccgugaagaacaacaacaacgaggagccgagcgacaagcacaucaaggaguaccugaacaagauccagaacucccucagcacggaguggucccccugcagcgugaccugcggcaacgggauccagguccggaucaagcccggcuccgcgaacaagcccaaggacgagcuggacuacgccaacgacaucgagaagaagaucugcaagauggagaagugcagcuccguguucaacguggucaacagcuccaucgggcugaucauggugcucagcuuccuguuccugaacugaggacuagucccuguucccagagcccacuuuuuuuucuuuuuuugaaauaaaauagccugucuuucagaucucaaaggcucuuuucagagccaccaaaaaaaaaaaaaaaaaaaaaaaaaaaaaaaaaaaaaaaaaaaaaaaaaaaaaaaaaaaaaaaaaaaaaaaaaaaaaaaaaaaaaaaaaaaaaaaaaaaaagaauu

SEQ ID NO: 7536 - RNA, 1568 nt, Artificial Sequence
  mRNA Design a-3 (hSL-A100-N5) comprising derived and/or modified sequence from Pf(3D7)__XP_001351122.1__IgE_Pf-CSP(19-397) (opt1)
aggagagggcgcuuggcuugcaaggacccugagcugcggcauugaagcacacccaacccaacucgacugaagucagccucacugaaccggaucugagaaucuucucucucugggcuugccagggcucuccgaaccuagcuagcauccucuucaauuccaacuagaaagcuuaccauggacuggaccuggauccuguuccucguggccgccgcgacccgcguccacagccuguuccaggaguaccagugcuacggcuccagcuccaacacccgggugcucaacgagcugaacuacgacaacgcggggaccaaccuguacaacgagcucgagaugaacuacuacggcaagcaggagaacugguacagccugaagaagaacucccgcagccugggggagaacgacgacggcaacaacgaggacaacgagaagcuccggaagcccaagcacaagaagcugaagcagccggccgacgggaaccccgaccccaacgccaaccccaacguggacccgaacgccaaccccaacgucgaccccaacgccaaccccaacguggacccgaacgcgaaccccaacgccaaccccaacgccaaccccaacgccaacccgaacgcgaaccccaacgccaaccccaacgccaaccccaacgccaacccgaacgccaaccccaacgcgaaccccaacgccaaccccaacgccaacccgaacgccaaccccaacgccaaccccaacgcgaaccccaacgccaacccgaacgccaaccccaacguggaccccaacgccaaccccaacgccaacccgaacgcgaaccccaacgccaaccccaacgccaacccgaacgccaaccccaacgccaaccccaacgcgaaccccaacgccaacccgaacgccaaccccaacgccaaccccaacgcgaaccccaacgccaacccgaacgccaaccccaacgccaaccccaacgccaaccccaacgcgaacccgaacgccaaccccaacaagaacaaccagggcaacggccaggggcacaacaugcccaacgaccccaaccgcaacgucgacgagaacgccaacgccaacuccgccgugaagaacaacaacaacgaggagccgagcgacaagcacaucaaggaguaccugaacaagauccagaacucccucagcacggaguggucccccugcagcgugaccugcggcaacgggauccagguccggaucaagcccggcuccgcgaacaagcccaaggacgagcuggacuacgccaacgacaucgagaagaagaucugcaagauggagaagugcagcuccguguucaacguggucaacagcuccaucgggcugaucauggugcucagcuuccuguuccugaacugaggacuagucccuguucccagagcccacuuuuuuuucuuuuuuugaaauaaaauagccugucuuucagaucucaaaggcucuuuucagagccaccaaaaaaaaaaaaaaaaaaaaaaaaaaaaaaaaaaaaaaaaaaaaaaaaaaaaaaaaaaaaaaaaaaaaaaaaaaaaaaaaaaaaaaaaaaaaaaaaaaaaagaauu

SEQ ID NO: 7537 - RNA, 1733 nt, Artificial Sequence
  mRNA Design a-3 (hSL-A100-N5) comprising derived and/or modified sequence from Pf(3D7)__XP_001351122.1__Pf-CSP_L(G4SG4)_TM domain HA (opt1)
aggagagggcgcuuggcuugcaaggacccugagcugcggcauugaagcacacccaacccaacucgacugaagucagccucacugaaccggaucugagaaucuucucucucugggcuugccagggcucuccgaaccuagcuagcauccucuucaauuccaacuagaaagcuuaccaugaugcgcaagcuggccauccucagcguguccagcuuccuguucgucgaggcccuguuccaggaguaccagugcuacggcuccagcuccaacacccgggugcucaacgagcugaacuacgacaacgcggggaccaaccuguacaacgagcucgagaugaacuacuacggcaagcaggagaacugguacagccugaagaagaacucccgcagccugggggagaacgacgacggcaacaacgaggacaacgagaagcuccggaagcccaagcacaagaagcugaagcagccggccgacgggaaccccgaccccaacgccaaccccaacguggacccgaacgccaaccccaacgucgaccccaacgccaaccccaacguggacccgaacgcgaaccccaacgccaaccccaacgccaaccccaacgccaacccgaacgcgaaccccaacgccaaccccaacgccaaccccaacgccaacccgaacgccaaccccaacgcgaaccccaacgccaaccccaacgccaacccgaacgccaaccccaacgccaaccccaacgcgaaccccaacgccaacccgaacgccaaccccaacguggaccccaacgccaaccccaacgccaacccgaacgcgaaccccaacgccaaccccaacgccaacccgaacgccaaccccaacgccaaccccaacgcgaaccccaacgccaacccgaacgccaaccccaacgccaaccccaacgcgaaccccaacgccaacccgaacgccaaccccaacgccaaccccaacgccaaccccaacgcgaacccgaacgccaaccccaacaagaacaaccagggcaacggccaggggcacaacaugcccaacgaccccaaccgcaacgucgacgagaacgccaacgccaacuccgccgugaagaacaacaacaacgaggagccgagcgacaagcacaucaaggaguaccugaacaagauccagaacucccucagcacggaguggucccccugcagcgugaccugcggcaacgggauccagguccggaucaagcccggcuccgcgaacaagcccaaggacgagcuggacuacgccaacgacaucgagaagaagaucugcaagauggagaagugcagcuccguguucaacguggucaacagcuccaucgggcugaucauggugcucagcuuccuguuccugaacggcgggggcgggagcggcgggggcggcaagcucgaguccacgcggaucuaccagauccuggcgaucuacagcaccgucgccagcucccuggugcucguggucagccugggggccaucuccuucuggaugugcagcaacggcucccugcagugccgcaucugcaucugaggacuagucccuguucccagagcccacuuuuuuuucuuuuuuugaaauaaaauagccugucuuucagaucucaaaggcucuuuucagagccaccaaaaaaaaaaaaaaaaaaaaaaaaaaaaaaaaaaaaaaaaaaaaaaaaaaaaaaaaaaaaaaaaaaaaaaaaaaaaaaaaaaaaaaaaaaaaaaaaaaaaagaauu

SEQ ID NO: 7538 - RNA, 1607 nt, Artificial Sequence
  mRNA Design a-3 (hSL-A100-N5) comprising derived and/or modified sequence from Pf(3D7)__XP_001351122.1__Pf-CSP(199-377)_L(PVTN)_HBsAg (opt1)
aggagagggcgcuuggcuugcaaggacccugagcugcggcauugaagcacacccaacccaacucgacugaagucagccucacugaaccggaucugagaaucuucucucucugggcuugccagggcucuccgaaccuagcuagcauccucuucaauuccaacuagaaagcuuaccauggaccccaacgccaaccccaacgccaacccgaacgcgaaccccaacgccaaccccaacgccaacccgaacgccaaccccaacgccaaccccaacgcgaaccccaacgccaacccgaacgccaaccccaacgccaaccccaacgcgaaccccaacgccaacccgaacgccaaccccaacgccaaccccaacgccaaccccaacgcgaacccgaacgccaaccccaacaagaacaaccagggcaacggccaggggcacaacaugcccaacgaccccaaccgcaacgucgacgagaacgccaacgccaacuccgccgugaagaacaacaacaacgaggagccgagcgacaagcacaucaaggaguaccugaacaagauccagaacucccucagcacggaguggucccccugcagcgugaccugcggcaacgggauccagguccggaucaagcccggcuccgcgaacaagcccaaggacgagcuggacuacgccaacgacaucgagaagaagaucugcaagauggagaagugcagcuccgugccggugacgaacauggagaacaucaccagcggcuuccuggggccccuccuggugcugcaggccggcuucuuccuccugacccgcauccugaccaucccgcagucccucgacagcugguggaccucccugaacuuccucgggggcagccccgucugccuggggcagaacucccagagccccaccuccaaccacagccccaccuccugcccgcccaucugccccggcuaccgguggaugugccugcgccgguucaucaucuuccuguucauccuccugcugugccucaucuuccugcuggugcuccuggacuaccagggcaugcugcccgugugcccgcucauccccgggagcacgaccaccaacaccggccccugcaagacgugcaccacccccgcccaggggaacuccauguucccgagcugcugcugcaccaagcccacggacggcaacugcacgugcauccccauccccuccagcugggcguucgccaaguaccugugggagugggccuccguccgcuucagcuggcugucccuccuggugccguucgugcagugguucgucgggcugagccccaccguguggcucuccgccaucuggaugaugugguacuggggccccagccuguacagcaucgugucccccuucaucccgcugcuccccaucuucuucugccugugggucuacaucugaggacuagucccuguucccagagcccacuuuuuuuucuuuuuuugaaauaaaauagccugucuuucagaucucaaaggcucuuuucagagccaccaaaaaaaaaaaaaaaaaaaaaaaaaaaaaaaaaaaaaaaaaaaaaaaaaaaaaaaaaaaaaaaaaaaaaaaaaaaaaaaaaaaaaaaaaaaaaaaaaaaaagaauu

SEQ ID NO: 7539 - RNA, 1649 nt, Artificial Sequence
  mRNA Design a-3 (hSL-A100-N5) comprising derived and/or modified sequence from Pf(3D7)__XP_001351122.1__Pf-CSP(199-387)_L(PVTN)_HBsAg (opt1)
aggagagggcgcuuggcuugcaaggacccugagcugcggcauugaagcacacccaacccaacucgacugaagucagccucacugaaccggaucugagaaucuucucucucugggcuugccagggcucuccgaaccuagcuagcauccucuucaauuccaacuagaaagcuuaccaugauggccccggaccccaacgccaaccccaacgccaacccgaacgcgaaccccaacgccaaccccaacgccaacccgaacgccaaccccaacgccaaccccaacgcgaaccccaacgccaacccgaacgccaaccccaacgccaaccccaacgcgaaccccaacgccaacccgaacgccaaccccaacgccaaccccaacgccaaccccaacgcgaacccgaacgccaaccccaacaagaacaaccagggcaacggccaggggcacaacaugcccaacgaccccaaccgcaacgucgacgagaacgccaacgccaacuccgccgugaagaacaacaacaacgaggagccgagcgacaagcacaucaaggaguaccugaacaagauccagaacucccucagcacggaguggucccccugcagcgugaccugcggcaacgggauccagguccggaucaagcccggcuccgcgaacaagcccaaggacgagcuggacuacgccaacgacaucgagaagaagaucugcaagauggagaagugcagcuccguguucaacguggucaacagcuccaucgggcuggggccggugacgaacauggagaacaucaccagcggcuuccuggggccccuccuggugcugcaggccggcuucuuccuccugacccgcauccugaccaucccgcagucccucgacagcugguggaccucccugaacuuccucgggggcagccccgucugccuggggcagaacucccagagccccaccuccaaccacagccccaccuccugcccgcccaucugccccggcuaccgguggaugugccugcgccgguucaucaucuuccuguucauccuccugcugugccucaucuuccugcuggugcuccuggacuaccagggcaugcugcccgugugcccgcucauccccgggagcacgaccaccaacaccggccccugcaagacgugcaccacccccgcccaggggaacuccauguucccgagcugcugcugcaccaagcccacggacggcaacugcacgugcauccccauccccuccagcugggcguucgccaaguaccugugggagugggccuccguccgcuucagcuggcugucccuccuggugccguucgugcagugguucgucgggcugagccccaccguguggcucuccgccaucuggaugaugugguacuggggccccagccuguacagcaucgugucccccuucaucccgcugcuccccaucuucuucugccugugggucuacaucugaggacuagucccuguucccagagcccacuuuuuuuucuuuuuuugaaauaaaauagccugucuuucagaucucaaaggcucuuuucagagccaccaaaaaaaaaaaaaaaaaaaaaaaaaaaaaaaaaaaaaaaaaaaaaaaaaaaaaaaaaaaaaaaaaaaaaaaaaaaaaaaaaaaaaaaaaaaaaaaaaaaaagaauu

SEQ ID NO: 7540 - RNA, 833 nt, Artificial Sequence
  mRNA Design a-3 (hSL-A100-N5) comprising derived and/or modified sequence from Pf(3D7)__XP_001351122.1__HsALB_Pf-CSP(19-152) (opt1)
aggagagggcgcuuggcuugcaaggacccugagcugcggcauugaagcacacccaacccaacucgacugaagucagccucacugaaccggaucugagaaucuucucucucugggcuugccagggcucuccgaaccuagcuagcauccucuucaauuccaacuagaaagcuuaccaugaagugggugaccuucaucagccugcucuuccuguucuccagcgccuacucccuguuccaggaguaccagugcuacggcuccagcuccaacacccgggugcucaacgagcugaacuacgacaacgcggggaccaaccuguacaacgagcucgagaugaacuacuacggcaagcaggagaacugguacagccugaagaagaacucccgcagccugggggagaacgacgacggcaacaacgaggacaacgagaagcuccggaagcccaagcacaagaagcugaagcagccggccgacgggaaccccgaccccaacgccaaccccaacguggacccgaacgccaaccccaacgucgaccccaacgccaaccccaacguggacccgaacgcgaaccccaacgccaaccccaacgccaaccccaacgccaacccgaacgcgaaccccaacgccaaccccugaggacuagucccuguucccagagcccacuuuuuuuucuuuuuuugaaauaaaauagccugucuuucagaucucaaaggcucuuuucagagccaccaaaaaaaaaaaaaaaaaaaaaaaaaaaaaaaaaaaaaaaaaaaaaaaaaaaaaaaaaaaaaaaaaaaaaaaaaaaaaaaaaaaaaaaaaaaaaaaaaaaaagaauu

SEQ ID NO: 7541 - RNA, 953 nt, Artificial Sequence
  mRNA Design a-3 (hSL-A100-N5) comprising derived and/or modified sequence from Pf(3D7)__XP_001351122.1__HsALB_Pf-CSP(19-192) (opt1)
aggagagggcgcuuggcuugcaaggacccugagcugcggcauugaagcacacccaacccaacucgacugaagucagccucacugaaccggaucugagaaucuucucucucugggcuugccagggcucuccgaaccuagcuagcauccucuucaauuccaacuagaaagcuuaccaugaagugggugaccuucaucagccugcucuuccuguucuccagcgccuacucccuguuccaggaguaccagugcuacggcuccagcuccaacacccgggugcucaacgagcugaacuacgacaacgcggggaccaaccuguacaacgagcucgagaugaacuacuacggcaagcaggagaacugguacagccugaagaagaacucccgcagccugggggagaacgacgacggcaacaacgaggacaacgagaagcuccggaagcccaagcacaagaagcugaagcagccggccgacgggaaccccgaccccaacgccaaccccaacguggacccgaacgccaaccccaacgucgaccccaacgccaaccccaacguggacccgaacgcgaaccccaacgccaaccccaacgccaaccccaacgccaacccgaacgcgaaccccaacgccaaccccaacgccaaccccaacgccaacccgaacgccaaccccaacgcgaaccccaacgccaaccccaacgccaacccgaacgccaaccccaacgccaaccccaacgcgaaccccaacgccaacccgugaggacuagucccuguucccagagcccacuuuuuuuucuuuuuuugaaauaaaauagccugucuuucagaucucaaaggcucuuuucagagccaccaaaaaaaaaaaaaaaaaaaaaaaaaaaaaaaaaaaaaaaaaaaaaaaaaaaaaaaaaaaaaaaaaaaaaaaaaaaaaaaaaaaaaaaaaaaaaaaaaaaaagaauu

SEQ ID NO: 7542 - RNA, 1193 nt, Artificial Sequence
  mRNA Design a-3 (hSL-A100-N5) comprising derived and/or modified sequence from Pf(3D7)__XP_001351122.1__HsALB_Pf-CSP(19-272) (opt1)
aggagagggcgcuuggcuugcaaggacccugagcugcggcauugaagcacacccaacccaacucgacugaagucagccucacugaaccggaucugagaaucuucucucucugggcuugccagggcucuccgaaccuagcuagcauccucuucaauuccaacuagaaagcuuaccaugaagugggugaccuucaucagccugcucuuccuguucuccagcgccuacucccuguuccaggaguaccagugcuacggcuccagcuccaacacccgggugcucaacgagcugaacuacgacaacgcggggaccaaccuguacaacgagcucgagaugaacuacuacggcaagcaggagaacugguacagccugaagaagaacucccgcagccugggggagaacgacgacggcaacaacgaggacaacgagaagcuccggaagcccaagcacaagaagcugaagcagccggccgacgggaaccccgaccccaacgccaaccccaacguggacccgaacgccaaccccaacgucgaccccaacgccaaccccaacguggacccgaacgcgaaccccaacgccaaccccaacgccaaccccaacgccaacccgaacgcgaaccccaacgccaaccccaacgccaaccccaacgccaacccgaacgccaaccccaacgcgaaccccaacgccaaccccaacgccaacccgaacgccaaccccaacgccaaccccaacgcgaaccccaacgccaacccgaacgccaaccccaacguggaccccaacgccaaccccaacgccaacccgaacgcgaaccccaacgccaaccccaacgccaacccgaacgccaaccccaacgccaaccccaacgcgaaccccaacgccaacccgaacgccaaccccaacgccaaccccaacgcgaaccccaacgccaacccgaacgccaaccccaacgccaaccccaacgccaaccccaacgcgaacccgaacgccaaccccugaggacuagucccuguucccagagcccacuuuuuuuucuuuuuuugaaauaaaauagccugucuuucagaucucaaaggcucuuuucagagccaccaaaaaaaaaaaaaaaaaaaaaaaaaaaaaaaaaaaaaaaaaaaaaaaaaaaaaaaaaaaaaaaaaaaaaaaaaaaaaaaaaaaaaaaaaaaaaaaaaaaaagaauu

SEQ ID NO: 7543 - RNA, 1355 nt, Artificial Sequence
  mRNA Design a-3 (hSL-A100-N5) comprising derived and/or modified sequence from Pf(3D7)__XP_001351122.1__HsALB_Pf-CSP(19-272)_L(AAY)_Pf-CSP(310-3 27)_L(AAY)_Pf-CSP(346-375) (opt1)
aggagagggcgcuuggcuugcaaggacccugagcugcggcauugaagcacacccaacccaacucgacugaagucagccucacugaaccggaucugagaaucuucucucucugggcuugccagggcucuccgaaccuagcuagcauccucuucaauuccaacuagaaagcuuaccaugaagugggugaccuucaucagccugcucuuccuguucuccagcgccuacucccuguuccaggaguaccagugcuacggcuccagcuccaacacccgggugcucaacgagcugaacuacgacaacgcggggaccaaccuguacaacgagcucgagaugaacuacuacggcaagcaggagaacugguacagccugaagaagaacucccgcagccugggggagaacgacgacggcaacaacgaggacaacgagaagcuccggaagcccaagcacaagaagcugaagcagccggccgacgggaaccccgaccccaacgccaaccccaacguggacccgaacgccaaccccaacgucgaccccaacgccaaccccaacguggacccgaacgcgaaccccaacgccaaccccaacgccaaccccaacgccaacccgaacgcgaaccccaacgccaaccccaacgccaaccccaacgccaacccgaacgccaaccccaacgcgaaccccaacgccaaccccaacgccaacccgaacgccaaccccaacgccaaccccaacgcgaaccccaacgccaacccgaacgccaaccccaacguggaccccaacgccaaccccaacgccaacccgaacgcgaaccccaacgccaaccccaacgccaacccgaacgccaaccccaacgccaaccccaacgcgaaccccaacgccaacccgaacgccaaccccaacgccaaccccaacgcgaaccccaacgccaacccgaacgccaaccccaacgccaaccccaacgccaaccccaacgcgaacccgaacgccaaccccgccgcguaugagccgagcgacaagcacaucaaggaguaccugaacaagauccagaacucccucgcggccuacaucaagcccggcuccgcgaacaagcccaaggacgagcuggacuacgccaacgacaucgagaagaagaucugcaagauggagaagugcagcugaggacuagucccuguucccagagcccacuuuuuuuucuuuuuuugaaauaaaauagccugucuuucagaucucaaaggcucuuuucagagccaccaaaaaaaaaaaaaaaaaaaaaaaaaaaaaaaaaaaaaaaaaaaaaaaaaaaaaaaaaaaaaaaaaaaaaaaaaaaaaaaaaaaaaaaaaaaaaaaaaaaaagaauu

SEQ ID NO: 7544 - RNA, 1316 nt, Artificial Sequence
  mRNA Design a-3 (hSL-A100-N5) comprising derived and/or modified sequence from Pf(3D7)__XP_001351122.1__HsALB_Pf-CSP(19-272)_L(AAY)_Pf-CSP(346-3 65)_L(AAY)_P2 (opt1)
aggagagggcgcuuggcuugcaaggacccugagcugcggcauugaagcacacccaacccaacucgacugaagucagccucacugaaccggaucugagaaucuucucucucugggcuugccagggcucuccgaaccuagcuagcauccucuucaauuccaacuagaaagcuuaccaugaagugggugaccuucaucagccugcucuuccuguucuccagcgccuacucccuguuccaggaguaccagugcuacggcuccagcuccaacacccgggugcucaacgagcugaacuacgacaacgcggggaccaaccuguacaacgagcucgagaugaacuacuacggcaagcaggagaacugguacagccugaagaagaacucccgcagccugggggagaacgacgacggcaacaacgaggacaacgagaagcuccggaagcccaagcacaagaagcugaagcagccggccgacgggaaccccgaccccaacgccaaccccaacguggacccgaacgccaaccccaacgucgaccccaacgccaaccccaacguggacccgaacgcgaaccccaacgccaaccccaacgccaaccccaacgccaacccgaacgcgaaccccaacgccaaccccaacgccaaccccaacgccaacccgaacgccaaccccaacgcgaaccccaacgccaaccccaacgccaacccgaacgccaaccccaacgccaaccccaacgcgaaccccaacgccaacccgaacgccaaccccaacguggaccccaacgccaaccccaacgccaacccgaacgcgaaccccaacgccaaccccaacgccaacccgaacgccaaccccaacgccaaccccaacgcgaaccccaacgccaacccgaacgccaaccccaacgccaaccccaacgcgaaccccaacgccaacccgaacgccaaccccaacgccaaccccaacgccaaccccaacgcgaacccgaacgccaaccccgccgcguauaucaagcccggcuccgcgaacaagcccaaggacgagcuggacuacgccaacgacaucgaggcggccuaccaguacaucaaggccaacagcaaguucaucggcaucaccgagcugugaggacuagucccuguucccagagcccacuuuuuuuucuuuuuuugaaauaaaauagccugucuuucagaucucaaaggcucuuuucagagccaccaaaaaaaaaaaaaaaaaaaaaaaaaaaaaaaaaaaaaaaaaaaaaaaaaaaaaaaaaaaaaaaaaaaaaaaaaaaaaaaaaaaaaaaaaaaaaaaaaaaaagaauu

SEQ ID NO: 7545 - RNA, 1310 nt, Artificial Sequence
  mRNA Design a-3 (hSL-A100-N5) comprising derived and/or modified sequence from Pf(3D7)__XP_001351122.1__HsALB_Pf-CSP(19-272)_L(AAY)_Pf-CSP(346-3 65)_L(AAY)_PADRE (opt1)
aggagagggcgcuuggcuugcaaggacccugagcugcggcauugaagcacacccaacccaacucgacugaagucagccucacugaaccggaucugagaaucuucucucucugggcuugccagggcucuccgaaccuagcuagcauccucuucaauuccaacuagaaagcuuaccaugaagugggugaccuucaucagccugcucuuccuguucuccagcgccuacucccuguuccaggaguaccagugcuacggcuccagcuccaacacccgggugcucaacgagcugaacuacgacaacgcggggaccaaccuguacaacgagcucgagaugaacuacuacggcaagcaggagaacugguacagccugaagaagaacucccgcagccugggggagaacgacgacggcaacaacgaggacaacgagaagcuccggaagcccaagcacaagaagcugaagcagccggccgacgggaaccccgaccccaacgccaaccccaacguggacccgaacgccaaccccaacgucgaccccaacgccaaccccaacguggacccgaacgcgaaccccaacgccaaccccaacgccaaccccaacgccaacccgaacgcgaaccccaacgccaaccccaacgccaaccccaacgccaacccgaacgccaaccccaacgcgaaccccaacgccaaccccaacgccaacccgaacgccaaccccaacgccaaccccaacgcgaaccccaacgccaacccgaacgccaaccccaacguggaccccaacgccaaccccaacgccaacccgaacgcgaaccccaacgccaaccccaacgccaacccgaacgccaaccccaacgccaaccccaacgcgaaccccaacgccaacccgaacgccaaccccaacgccaaccccaacgcgaaccccaacgccaacccgaacgccaaccccaacgccaaccccaacgccaaccccaacgcgaacccgaacgccaaccccgccgcguauaucaagcccggcuccgcgaacaagcccaaggacgagcuggacuacgccaacgacaucgaggcggccuacgccaaguucguggccgccuggacccugaaggcggccgccugaggacuagucccuguucccagagcccacuuuuuuuucuuuuuuugaaauaaaauagccugucuuucagaucucaaaggcucuuuucagagccaccaaaaaaaaaaaaaaaaaaaaaaaaaaaaaaaaaaaaaaaaaaaaaaaaaaaaaaaaaaaaaaaaaaaaaaaaaaaaaaaaaaaaaaaaaaaaaaaaaaaaagaauu

SEQ ID NO: 7546 - RNA, 1367 nt, Artificial Sequence
  mRNA Design a-3 (hSL-A100-N5) comprising derived and/or modified sequence from Pf(3D7)__XP_001351122.1__HsALB_Pf-CSP(19-272)_L(G4S)_Pf-CSP(310-3 27)_L(G4S)_Pf-CSP(346-375) (opt1)
aggagagggcgcuuggcuugcaaggacccugagcugcggcauugaagcacacccaacccaacucgacugaagucagccucacugaaccggaucugagaaucuucucucucugggcuugccagggcucuccgaaccuagcuagcauccucuucaauuccaacuagaaagcuuaccaugaagugggugaccuucaucagccugcucuuccuguucuccagcgccuacucccuguuccaggaguaccagugcuacggcuccagcuccaacacccgggugcucaacgagcugaacuacgacaacgcggggaccaaccuguacaacgagcucgagaugaacuacuacggcaagcaggagaacugguacagccugaagaagaacucccgcagccugggggagaacgacgacggcaacaacgaggacaacgagaagcuccggaagcccaagcacaagaagcugaagcagccggccgacgggaaccccgaccccaacgccaaccccaacguggacccgaacgccaaccccaacgucgaccccaacgccaaccccaacguggacccgaacgcgaaccccaacgccaaccccaacgccaaccccaacgccaacccgaacgcgaaccccaacgccaaccccaacgccaaccccaacgccaacccgaacgccaaccccaacgcgaaccccaacgccaaccccaacgccaacccgaacgccaaccccaacgccaaccccaacgcgaaccccaacgccaacccgaacgccaaccccaacguggaccccaacgccaaccccaacgccaacccgaacgcgaaccccaacgccaaccccaacgccaacccgaacgccaaccccaacgccaaccccaacgcgaaccccaacgccaacccgaacgccaaccccaacgccaaccccaacgcgaaccccaacgccaacccgaacgccaaccccaacgccaaccccaacgccaaccccaacgcgaacccgaacgccaaccccggaggcggaggaucugagccgagcgacaagcacaucaaggaguaccugaacaagauccagaacucccucggcggagguggaaguaucaagcccggcuccgcgaacaagcccaaggacgagcuggacuacgccaacgacaucgagaagaagaucugcaagauggagaagugcagcugaggacuagucccuguucccagagcccacuuuuuuuucuuuuuuugaaauaaaauagccugucuuucagaucucaaaggcucuuuucagagccaccaaaaaaaaaaaaaaaaaaaaaaaaaaaaaaaaaaaaaaaaaaaaaaaaaaaaaaaaaaaaaaaaaaaaaaaaaaaaaaaaaaaaaaaaaaaaaaaaaaaaagaauu

SEQ ID NO: 7547 - RNA, 1352 nt, Artificial Sequence
  mRNA Design a-3 (hSL-A100-N5) comprising derived and/or modified sequence from Pf(3D7)__XP_001351122.1__HsALB_Pf-CSP(19-272)_L(G4S)_Pf-CSP(310-3 27)_Pf-CSP(346-375) (opt1)
aggagagggcgcuuggcuugcaaggacccugagcugcggcauugaagcacacccaacccaacucgacugaagucagccucacugaaccggaucugagaaucuucucucucugggcuugccagggcucuccgaaccuagcuagcauccucuucaauuccaacuagaaagcuuaccaugaagugggugaccuucaucagccugcucuuccuguucuccagcgccuacucccuguuccaggaguaccagugcuacggcuccagcuccaacacccgggugcucaacgagcugaacuacgacaacgcggggaccaaccuguacaacgagcucgagaugaacuacuacggcaagcaggagaacugguacagccugaagaagaacucccgcagccugggggagaacgacgacggcaacaacgaggacaacgagaagcuccggaagcccaagcacaagaagcugaagcagccggccgacgggaaccccgaccccaacgccaaccccaacguggacccgaacgccaaccccaacgucgaccccaacgccaaccccaacguggacccgaacgcgaaccccaacgccaaccccaacgccaaccccaacgccaacccgaacgcgaaccccaacgccaaccccaacgccaaccccaacgccaacccgaacgccaaccccaacgcgaaccccaacgccaaccccaacgccaacccgaacgccaaccccaacgccaaccccaacgcgaaccccaacgccaacccgaacgccaaccccaacguggaccccaacgccaaccccaacgccaacccgaacgcgaaccccaacgccaaccccaacgccaacccgaacgccaaccccaacgccaaccccaacgcgaaccccaacgccaacccgaacgccaaccccaacgccaaccccaacgcgaaccccaacgccaacccgaacgccaaccccaacgccaaccccaacgccaaccccaacgcgaacccgaacgccaaccccggaggcggaggaucugagccgagcgacaagcacaucaaggaguaccugaacaagauccagaacucccucaucaagcccggcuccgcgaacaagcccaaggacgagcuggacuacgccaacgacaucgagaagaagaucugcaagauggagaagugcagcugaggacuagucccuguucccagagcccacuuuuuuuucuuuuuuugaaauaaaauagccugucuuucagaucucaaaggcucuuuucagagccaccaaaaaaaaaaaaaaaaaaaaaaaaaaaaaaaaaaaaaaaaaaaaaaaaaaaaaaaaaaaaaaaaaaaaaaaaaaaaaaaaaaaaaaaaaaaaaaaaaaaaagaauu

SEQ ID NO: 7548 - RNA, 1352 nt, Artificial Sequence
  mRNA Design a-3 (hSL-A100-N5) comprising derived and/or modified sequence from Pf(3D7)__XP_001351122.1__HsALB_Pf-CSP(19-325) (opt1)
aggagagggcgcuuggcuugcaaggacccugagcugcggcauugaagcacacccaacccaacucgacugaagucagccucacugaaccggaucugagaaucuucucucucugggcuugccagggcucuccgaaccuagcuagcauccucuucaauuccaacuagaaagcuuaccaugaagugggugaccuucaucagccugcucuuccuguucuccagcgccuacucccuguuccaggaguaccagugcuacggcuccagcuccaacacccgggugcucaacgagcugaacuacgacaacgcggggaccaaccuguacaacgagcucgagaugaacuacuacggcaagcaggagaacugguacagccugaagaagaacucccgcagccugggggagaacgacgacggcaacaacgaggacaacgagaagcuccggaagcccaagcacaagaagcugaagcagccggccgacgggaaccccgaccccaacgccaaccccaacguggacccgaacgccaaccccaacgucgaccccaacgccaaccccaacguggacccgaacgcgaaccccaacgccaaccccaacgccaaccccaacgccaacccgaacgcgaaccccaacgccaaccccaacgccaaccccaacgccaacccgaacgccaaccccaacgcgaaccccaacgccaaccccaacgccaacccgaacgccaaccccaacgccaaccccaacgcgaaccccaacgccaacccgaacgccaaccccaacguggaccccaacgccaaccccaacgccaacccgaacgcgaaccccaacgccaaccccaacgccaacccgaacgccaaccccaacgccaaccccaacgcgaaccccaacgccaacccgaacgccaaccccaacgccaaccccaacgcgaaccccaacgccaacccgaacgccaaccccaacgccaaccccaacgccaaccccaacgcgaacccgaacgccaaccccaacaagaacaaccagggcaacggccaggggcacaacaugcccaacgaccccaaccgcaacgucgacgagaacgccaacgccaacuccgccgugaagaacaacaacaacgaggagccgagcgacaagcacaucaaggaguaccugaacaagauccagaacugaggacuagucccuguucccagagcccacuuuuuuuucuuuuuuugaaauaaaauagccugucuuucagaucucaaaggcucuuuucagagccaccaaaaaaaaaaaaaaaaaaaaaaaaaaaaaaaaaaaaaaaaaaaaaaaaaaaaaaaaaaaaaaaaaaaaaaaaaaaaaaaaaaaaaaaaaaaaaaaaaaaaagaauu

SEQ ID NO: 7549 - RNA, 1529 nt, Artificial Sequence
  mRNA Design a-3 (hSL-A100-N5) comprising derived and/or modified sequence from Pf(3D7)__XP_001351122.1__HsALB_Pf-CSP(19-384) (opt1)
aggagagggcgcuuggcuugcaaggacccugagcugcggcauugaagcacacccaacccaacucgacugaagucagccucacugaaccggaucugagaaucuucucucucugggcuugccagggcucuccgaaccuagcuagcauccucuucaauuccaacuagaaagcuuaccaugaagugggugaccuucaucagccugcucuuccuguucuccagcgccuacucccuguuccaggaguaccagugcuacggcuccagcuccaacacccgggugcucaacgagcugaacuacgacaacgcggggaccaaccuguacaacgagcucgagaugaacuacuacggcaagcaggagaacugguacagccugaagaagaacucccgcagccugggggagaacgacgacggcaacaacgaggacaacgagaagcuccggaagcccaagcacaagaagcugaagcagccggccgacgggaaccccgaccccaacgccaaccccaacguggacccgaacgccaaccccaacgucgaccccaacgccaaccccaacguggacccgaacgcgaaccccaacgccaaccccaacgccaaccccaacgccaacccgaacgcgaaccccaacgccaaccccaacgccaaccccaacgccaacccgaacgccaaccccaacgcgaaccccaacgccaaccccaacgccaacccgaacgccaaccccaacgccaaccccaacgcgaaccccaacgccaacccgaacgccaaccccaacguggaccccaacgccaaccccaacgccaacccgaacgcgaaccccaacgccaaccccaacgccaacccgaacgccaaccccaacgccaaccccaacgcgaaccccaacgccaacccgaacgccaaccccaacgccaaccccaacgcgaaccccaacgccaacccgaacgccaaccccaacgccaaccccaacgccaaccccaacgcgaacccgaacgccaaccccaacaagaacaaccagggcaacggccaggggcacaacaugcccaacgaccccaaccgcaacgucgacgagaacgccaacgccaacuccgccgugaagaacaacaacaacgaggagccgagcgacaagcacaucaaggaguaccugaacaagauccagaacucccucagcacggaguggucccccugcagcgugaccugcggcaacgggauccagguccggaucaagcccggcuccgcgaacaagcccaaggacgagcuggacuacgccaacgacaucgagaagaagaucugcaagauggagaagugcagcuccguguucaacguggucaacagcuccugaggacuagucccuguucccagagcccacuuuuuuuucuuuuuuugaaauaaaauagccugucuuucagaucucaaaggcucuuuucagagccaccaaaaaaaaaaaaaaaaaaaaaaaaaaaaaaaaaaaaaaaaaaaaaaaaaaaaaaaaaaaaaaaaaaaaaaaaaaaaaaaaaaaaaaaaaaaaaaaaaaaaagaauu

SEQ ID NO: 7550 - RNA, 1667 nt, Artificial Sequence
  mRNA Design a-3 (hSL-A100-N5) comprising derived and/or modified sequence from Pf(3D7)__XP_001351122.1__HsALB_Pf-CSP(19-384)_TM domain HA (opt1)
aggagagggcgcuuggcuugcaaggacccugagcugcggcauugaagcacacccaacccaacucgacugaagucagccucacugaaccggaucugagaaucuucucucucugggcuugccagggcucuccgaaccuagcuagcauccucuucaauuccaacuagaaagcuuaccaugaagugggugaccuucaucagccugcucuuccuguucuccagcgccuacucccuguuccaggaguaccagugcuacggcuccagcuccaacacccgggugcucaacgagcugaacuacgacaacgcggggaccaaccuguacaacgagcucgagaugaacuacuacggcaagcaggagaacugguacagccugaagaagaacucccgcagccugggggagaacgacgacggcaacaacgaggacaacgagaagcuccggaagcccaagcacaagaagcugaagcagccggccgacgggaaccccgaccccaacgccaaccccaacguggacccgaacgccaaccccaacgucgaccccaacgccaaccccaacguggacccgaacgcgaaccccaacgccaaccccaacgccaaccccaacgccaacccgaacgcgaaccccaacgccaaccccaacgccaaccccaacgccaacccgaacgccaaccccaacgcgaaccccaacgccaaccccaacgccaacccgaacgccaaccccaacgccaaccccaacgcgaaccccaacgccaacccgaacgccaaccccaacguggaccccaacgccaaccccaacgccaacccgaacgcgaaccccaacgccaaccccaacgccaacccgaacgccaaccccaacgccaaccccaacgcgaaccccaacgccaacccgaacgccaaccccaacgccaaccccaacgcgaaccccaacgccaacccgaacgccaaccccaacgccaaccccaacgccaaccccaacgcgaacccgaacgccaaccccaacaagaacaaccagggcaacggccaggggcacaacaugcccaacgaccccaaccgcaacgucgacgagaacgccaacgccaacuccgccgugaagaacaacaacaacgaggagccgagcgacaagcacaucaaggaguaccugaacaagauccagaacucccucagcacggaguggucccccugcagcgugaccugcggcaacgggauccagguccggaucaagcccggcuccgcgaacaagcccaaggacgagcuggacuacgccaacgacaucgagaagaagaucugcaagauggagaagugcagcuccguguucaacguggucaacagcuccaagcucgaguccacgcggaucuaccagauccuggcgaucuacagcaccgucgccagcucccuggugcucguggucagccugggggccaucuccuucuggaugugcagcaacggcucccugcagugccgcaucugcaucugaggacuagucccuguucccagagcccacuuuuuuuucuuuuuuugaaauaaaauagccugucuuucagaucucaaaggcucuuuucagagccaccaaaaaaaaaaaaaaaaaaaaaaaaaaaaaaaaaaaaaaaaaaaaaaaaaaaaaaaaaaaaaaaaaaaaaaaaaaaaaaaaaaaaaaaaaaaaaaaaaaaaagaauu

SEQ ID NO: 7551 - RNA, 1379 nt, Artificial Sequence
  mRNA Design a-3 (hSL-A100-N5) comprising derived and/or modified sequence from Pf(3D7)__XP_001351122.1__HsALB_Pf-CSP(82-397) (opt1)
aggagagggcgcuuggcuugcaaggacccugagcugcggcauugaagcacacccaacccaacucgacugaagucagccucacugaaccggaucugagaaucuucucucucugggcuugccagggcucuccgaaccuagcuagcauccucuucaauuccaacuagaaagcuuaccaugaagugggugaccuucaucagccugcucuuccuguucuccagcgccuacuccgacaacgagaagcuccggaagcccaagcacaagaagcugaagcagccggccgacgggaaccccgaccccaacgccaaccccaacguggacccgaacgccaaccccaacgucgaccccaacgccaaccccaacguggacccgaacgcgaaccccaacgccaaccccaacgccaaccccaacgccaacccgaacgcgaaccccaacgccaaccccaacgccaaccccaacgccaacccgaacgccaaccccaacgcgaaccccaacgccaaccccaacgccaacccgaacgccaaccccaacgccaaccccaacgcgaaccccaacgccaacccgaacgccaaccccaacguggaccccaacgccaaccccaacgccaacccgaacgcgaaccccaacgccaaccccaacgccaacccgaacgccaaccccaacgccaaccccaacgcgaaccccaacgccaacccgaacgccaaccccaacgccaaccccaacgcgaaccccaacgccaacccgaacgccaaccccaacgccaaccccaacgccaaccccaacgcgaacccgaacgccaaccccaacaagaacaaccagggcaacggccaggggcacaacaugcccaacgaccccaaccgcaacgucgacgagaacgccaacgccaacuccgccgugaagaacaacaacaacgaggagccgagcgacaagcacaucaaggaguaccugaacaagauccagaacucccucagcacggaguggucccccugcagcgugaccugcggcaacgggauccagguccggaucaagcccggcuccgcgaacaagcccaaggacgagcuggacuacgccaacgacaucgagaagaagaucugcaagauggagaagugcagcuccguguucaacguggucaacagcuccaucgggcugaucauggugcucagcuuccuguuccugaacugaggacuagucccuguucccagagcccacuuuuuuuucuuuuuuugaaauaaaauagccugucuuucagaucucaaaggcucuuuucagagccaccaaaaaaaaaaaaaaaaaaaaaaaaaaaaaaaaaaaaaaaaaaaaaaaaaaaaaaaaaaaaaaaaaaaaaaaaaaaaaaaaaaaaaaaaaaaaaaaaaaaaagaauu

SEQ ID NO: 7552 - RNA, 731 nt, Artificial Sequence
  mRNA Design a-3 (hSL-A100-N5) comprising derived and/or modified sequence from Pf(3D7)__XP_001351122.1__HsALB_Pf-CSP(93-192) (opt1)
aggagagggcgcuuggcuugcaaggacccugagcugcggcauugaagcacacccaacccaacucgacugaagucagccucacugaaccggaucugagaaucuucucucucugggcuugccagggcucuccgaaccuagcuagcauccucuucaauuccaacuagaaagcuuaccaugaagugggugaccuucaucagccugcucuuccuguucuccagcgccuacuccaagcugaagcagccggccgacgggaaccccgaccccaacgccaaccccaacguggacccgaacgccaaccccaacgucgaccccaacgccaaccccaacguggacccgaacgcgaaccccaacgccaaccccaacgccaaccccaacgccaacccgaacgcgaaccccaacgccaaccccaacgccaaccccaacgccaacccgaacgccaaccccaacgcgaaccccaacgccaaccccaacgccaacccgaacgccaaccccaacgccaaccccaacgcgaaccccaacgccaacccgugaggacuagucccuguucccagagcccacuuuuuuuucuuuuuuugaaauaaaauagccugucuuucagaucucaaaggcucuuuucagagccaccaaaaaaaaaaaaaaaaaaaaaaaaaaaaaaaaaaaaaaaaaaaaaaaaaaaaaaaaaaaaaaaaaaaaaaaaaaaaaaaaaaaaaaaaaaaaaaaaaaaaagaauu

SEQ ID NO: 7553 - RNA, 971 nt, Artificial Sequence
  mRNA Design a-3 (hSL-A100-N5) comprising derived and/or modified sequence from Pf(3D7)__XP_001351122.1__HsALB_Pf-CSP(93-272) (opt1)
aggagagggcgcuuggcuugcaaggacccugagcugcggcauugaagcacacccaacccaacucgacugaagucagccucacugaaccggaucugagaaucuucucucucugggcuugccagggcucuccgaaccuagcuagcauccucuucaauuccaacuagaaagcuuaccaugaagugggugaccuucaucagccugcucuuccuguucuccagcgccuacuccaagcugaagcagccggccgacgggaaccccgaccccaacgccaaccccaacguggacccgaacgccaaccccaacgucgaccccaacgccaaccccaacguggacccgaacgcgaaccccaacgccaaccccaacgccaaccccaacgccaacccgaacgcgaaccccaacgccaaccccaacgccaaccccaacgccaacccgaacgccaaccccaacgcgaaccccaacgccaaccccaacgccaacccgaacgccaaccccaacgccaaccccaacgcgaaccccaacgccaacccgaacgccaaccccaacguggaccccaacgccaaccccaacgccaacccgaacgcgaaccccaacgccaaccccaacgccaacccgaacgccaaccccaacgccaaccccaacgcgaaccccaacgccaacccgaacgccaaccccaacgccaaccccaacgcgaaccccaacgccaacccgaacgccaaccccaacgccaaccccaacgccaaccccaacgcgaacccgaacgccaaccccugaggacuagucccuguucccagagcccacuuuuuuuucuuuuuuugaaauaaaauagccugucuuucagaucucaaaggcucuuuucagagccaccaaaaaaaaaaaaaaaaaaaaaaaaaaaaaaaaaaaaaaaaaaaaaaaaaaaaaaaaaaaaaaaaaaaaaaaaaaaaaaaaaaaaaaaaaaaaaaaaaaaaagaauu

SEQ ID NO: 7554 - RNA, 1346 nt, Artificial Sequence
  mRNA Design a-3 (hSL-A100-N5) comprising derived and/or modified sequence from Pf(3D7)__XP_001351122.1__HsALB_Pf-CSP(93-397) (opt1)
aggagagggcgcuuggcuugcaaggacccugagcugcggcauugaagcacacccaacccaacucgacugaagucagccucacugaaccggaucugagaaucuucucucucugggcuugccagggcucuccgaaccuagcuagcauccucuucaauuccaacuagaaagcuuaccaugaagugggugaccuucaucagccugcucuuccuguucuccagcgccuacuccaagcugaagcagccggccgacgggaaccccgaccccaacgccaaccccaacguggacccgaacgccaaccccaacgucgaccccaacgccaaccccaacguggacccgaacgcgaaccccaacgccaaccccaacgccaaccccaacgccaacccgaacgcgaaccccaacgccaaccccaacgccaaccccaacgccaacccgaacgccaaccccaacgcgaaccccaacgccaaccccaacgccaacccgaacgccaaccccaacgccaaccccaacgcgaaccccaacgccaacccgaacgccaaccccaacguggaccccaacgccaaccccaacgccaacccgaacgcgaaccccaacgccaaccccaacgccaacccgaacgccaaccccaacgccaaccccaacgcgaaccccaacgccaacccgaacgccaaccccaacgccaaccccaacgcgaaccccaacgccaacccgaacgccaaccccaacgccaaccccaacgccaaccccaacgcgaacccgaacgccaaccccaacaagaacaaccagggcaacggccaggggcacaacaugcccaacgaccccaaccgcaacgucgacgagaacgccaacgccaacuccgccgugaagaacaacaacaacgaggagccgagcgacaagcacaucaaggaguaccugaacaagauccagaacucccucagcacggaguggucccccugcagcgugaccugcggcaacgggauccagguccggaucaagcccggcuccgcgaacaagcccaaggacgagcuggacuacgccaacgacaucgagaagaagaucugcaagauggagaagugcagcuccguguucaacguggucaacagcuccaucgggcugaucauggugcucagcuuccuguuccugaacugaggacuagucccuguucccagagcccacuuuuuuuucuuuuuuugaaauaaaauagccugucuuucagaucucaaaggcucuuuucagagccaccaaaaaaaaaaaaaaaaaaaaaaaaaaaaaaaaaaaaaaaaaaaaaaaaaaaaaaaaaaaaaaaaaaaaaaaaaaaaaaaaaaaaaaaaaaaaaaaaaaaaagaauu

SEQ ID NO: 7555 - RNA, 716 nt, Artificial Sequence
  mRNA Design a-3 (hSL-A100-N5) comprising derived and/or modified sequence from Pf(3D7)__XP_001351122.1__HsALB_Pf-CSP(98-192) (opt1)
aggagagggcgcuuggcuugcaaggacccugagcugcggcauugaagcacacccaacccaacucgacugaagucagccucacugaaccggaucugagaaucuucucucucugggcuugccagggcucuccgaaccuagcuagcauccucuucaauuccaacuagaaagcuuaccaugaagugggugaccuucaucagccugcucuuccuguucuccagcgccuacuccgccgacgggaaccccgaccccaacgccaaccccaacguggacccgaacgccaaccccaacgucgaccccaacgccaaccccaacguggacccgaacgcgaaccccaacgccaaccccaacgccaaccccaacgccaacccgaacgcgaaccccaacgccaaccccaacgccaaccccaacgccaacccgaacgccaaccccaacgcgaaccccaacgccaaccccaacgccaacccgaacgccaaccccaacgccaaccccaacgcgaaccccaacgccaacccgugaggacuagucccuguucccagagcccacuuuuuuuucuuuuuuugaaauaaaauagccugucuuucagaucucaaaggcucuuuucagagccaccaaaaaaaaaaaaaaaaaaaaaaaaaaaaaaaaaaaaaaaaaaaaaaaaaaaaaaaaaaaaaaaaaaaaaaaaaaaaaaaaaaaaaaaaaaaaaaaaaaaaagaauu

SEQ ID NO: 7556 - RNA, 956 nt, Artificial Sequence
  mRNA Design a-3 (hSL-A100-N5) comprising derived and/or modified sequence from Pf(3D7)__XP_001351122.1__HsALB_Pf-CSP(98-272) (opt1)
aggagagggcgcuuggcuugcaaggacccugagcugcggcauugaagcacacccaacccaacucgacugaagucagccucacugaaccggaucugagaaucuucucucucugggcuugccagggcucuccgaaccuagcuagcauccucuucaauuccaacuagaaagcuuaccaugaagugggugaccuucaucagccugcucuuccuguucuccagcgccuacuccgccgacgggaaccccgaccccaacgccaaccccaacguggacccgaacgccaaccccaacgucgaccccaacgccaaccccaacguggacccgaacgcgaaccccaacgccaaccccaacgccaaccccaacgccaacccgaacgcgaaccccaacgccaaccccaacgccaaccccaacgccaacccgaacgccaaccccaacgcgaaccccaacgccaaccccaacgccaacccgaacgccaaccccaacgccaaccccaacgcgaaccccaacgccaacccgaacgccaaccccaacguggaccccaacgccaaccccaacgccaacccgaacgcgaaccccaacgccaaccccaacgccaacccgaacgccaaccccaacgccaaccccaacgcgaaccccaacgccaacccgaacgccaaccccaacgccaaccccaacgcgaaccccaacgccaacccgaacgccaaccccaacgccaaccccaacgccaaccccaacgcgaacccgaacgccaaccccugaggacuagucccuguucccagagcccacuuuuuuuucuuuuuuugaaauaaaauagccugucuuucagaucucaaaggcucuuuucagagccaccaaaaaaaaaaaaaaaaaaaaaaaaaaaaaaaaaaaaaaaaaaaaaaaaaaaaaaaaaaaaaaaaaaaaaaaaaaaaaaaaaaaaaaaaaaaaaaaaaaaaagaauu

SEQ ID NO: 7557 - RNA, 1262 nt, Artificial Sequence
  mRNA Design a-3 (hSL-A100-N5) comprising derived and/or modified sequence from Pf(3D7)__XP_001351122.1__HsALB_Pf-CSP(98-374) (opt1)
aggagagggcgcuuggcuugcaaggacccugagcugcggcauugaagcacacccaacccaacucgacugaagucagccucacugaaccggaucugagaaucuucucucucugggcuugccagggcucuccgaaccuagcuagcauccucuucaauuccaacuagaaagcuuaccaugaagugggugaccuucaucagccugcucuuccuguucuccagcgccuacuccgccgacgggaaccccgaccccaacgccaaccccaacguggacccgaacgccaaccccaacgucgaccccaacgccaaccccaacguggacccgaacgcgaaccccaacgccaaccccaacgccaaccccaacgccaacccgaacgcgaaccccaacgccaaccccaacgccaaccccaacgccaacccgaacgccaaccccaacgcgaaccccaacgccaaccccaacgccaacccgaacgccaaccccaacgccaaccccaacgcgaaccccaacgccaacccgaacgccaaccccaacguggaccccaacgccaaccccaacgccaacccgaacgcgaaccccaacgccaaccccaacgccaacccgaacgccaaccccaacgccaaccccaacgcgaaccccaacgccaacccgaacgccaaccccaacgccaaccccaacgcgaaccccaacgccaacccgaacgccaaccccaacgccaaccccaacgccaaccccaacgcgaacccgaacgccaaccccaacaagaacaaccagggcaacggccaggggcacaacaugcccaacgaccccaaccgcaacgucgacgagaacgccaacgccaacuccgccgugaagaacaacaacaacgaggagccgagcgacaagcacaucaaggaguaccugaacaagauccagaacucccucagcacggaguggucccccugcagcgugaccugcggcaacgggauccagguccggaucaagcccggcuccgcgaacaagcccaaggacgagcuggacuacgccaacgacaucgagaagaagaucugcaagauggagaagugcugaggacuagucccuguucccagagcccacuuuuuuuucuuuuuuugaaauaaaauagccugucuuucagaucucaaaggcucuuuucagagccaccaaaaaaaaaaaaaaaaaaaaaaaaaaaaaaaaaaaaaaaaaaaaaaaaaaaaaaaaaaaaaaaaaaaaaaaaaaaaaaaaaaaaaaaaaaaaaaaaaaaaagaauu

SEQ ID NO: 7558 - RNA, 1331 nt, Artificial Sequence
  mRNA Design a-3 (hSL-A100-N5) comprising derived and/or modified sequence from Pf(3D7)__XP_001351122.1__HsALB_Pf-CSP(98-397) (opt1)
aggagagggcgcuuggcuugcaaggacccugagcugcggcauugaagcacacccaacccaacucgacugaagucagccucacugaaccggaucugagaaucuucucucucugggcuugccagggcucuccgaaccuagcuagcauccucuucaauuccaacuagaaagcuuaccaugaagugggugaccuucaucagccugcucuuccuguucuccagcgccuacuccgccgacgggaaccccgaccccaacgccaaccccaacguggacccgaacgccaaccccaacgucgaccccaacgccaaccccaacguggacccgaacgcgaaccccaacgccaaccccaacgccaaccccaacgccaacccgaacgcgaaccccaacgccaaccccaacgccaaccccaacgccaacccgaacgccaaccccaacgcgaaccccaacgccaaccccaacgccaacccgaacgccaaccccaacgccaaccccaacgcgaaccccaacgccaacccgaacgccaaccccaacguggaccccaacgccaaccccaacgccaacccgaacgcgaaccccaacgccaaccccaacgccaacccgaacgccaaccccaacgccaaccccaacgcgaaccccaacgccaacccgaacgccaaccccaacgccaaccccaacgcgaaccccaacgccaacccgaacgccaaccccaacgccaaccccaacgccaaccccaacgcgaacccgaacgccaaccccaacaagaacaaccagggcaacggccaggggcacaacaugcccaacgaccccaaccgcaacgucgacgagaacgccaacgccaacuccgccgugaagaacaacaacaacgaggagccgagcgacaagcacaucaaggaguaccugaacaagauccagaacucccucagcacggaguggucccccugcagcgugaccugcggcaacgggauccagguccggaucaagcccggcuccgcgaacaagcccaaggacgagcuggacuacgccaacgacaucgagaagaagaucugcaagauggagaagugcagcuccguguucaacguggucaacagcuccaucgggcugaucauggugcucagcuuccuguuccugaacugaggacuagucccuguucccagagcccacuuuuuuuucuuuuuuugaaauaaaauagccugucuuucagaucucaaaggcucuuuucagagccaccaaaaaaaaaaaaaaaaaaaaaaaaaaaaaaaaaaaaaaaaaaaaaaaaaaaaaaaaaaaaaaaaaaaaaaaaaaaaaaaaaaaaaaaaaaaaaaaaaaaaagaauu

SEQ ID NO: 7559 - RNA, 1658 nt, Artificial Sequence
  mRNA Design a-3 (hSL-A100-N5) comprising derived and/or modified sequence from Pf(3D7)__XP_001351122.1__HsALB_Pf-CSP(199-377)_L(PVTN)_HBsAg (opt1)
aggagagggcgcuuggcuugcaaggacccugagcugcggcauugaagcacacccaacccaacucgacugaagucagccucacugaaccggaucugagaaucuucucucucugggcuugccagggcucuccgaaccuagcuagcauccucuucaauuccaacuagaaagcuuaccaugaaguggguaaccuuuauuucccuucuuuuucucuuuagcucggcuuauuccgaccccaacgccaaccccaacgccaacccgaacgcgaaccccaacgccaaccccaacgccaacccgaacgccaaccccaacgccaaccccaacgcgaaccccaacgccaacccgaacgccaaccccaacgccaaccccaacgcgaaccccaacgccaacccgaacgccaaccccaacgccaaccccaacgccaaccccaacgcgaacccgaacgccaaccccaacaagaacaaccagggcaacggccaggggcacaacaugcccaacgaccccaaccgcaacgucgacgagaacgccaacgccaacuccgccgugaagaacaacaacaacgaggagccgagcgacaagcacaucaaggaguaccugaacaagauccagaacucccucagcacggaguggucccccugcagcgugaccugcggcaacgggauccagguccggaucaagcccggcuccgcgaacaagcccaaggacgagcuggacuacgccaacgacaucgagaagaagaucugcaagauggagaagugcagcuccgugccggugacgaacauggagaacaucaccagcggcuuccuggggccccuccuggugcugcaggccggcuucuuccuccugacccgcauccugaccaucccgcagucccucgacagcugguggaccucccugaacuuccucgggggcagccccgucugccuggggcagaacucccagagccccaccuccaaccacagccccaccuccugcccgcccaucugccccggcuaccgguggaugugccugcgccgguucaucaucuuccuguucauccuccugcugugccucaucuuccugcuggugcuccuggacuaccagggcaugcugcccgugugcccgcucauccccgggagcacgaccaccaacaccggccccugcaagacgugcaccacccccgcccaggggaacuccauguucccgagcugcugcugcaccaagcccacggacggcaacugcacgugcauccccauccccuccagcugggcguucgccaaguaccugugggagugggccuccguccgcuucagcuggcugucccuccuggugccguucgugcagugguucgucgggcugagccccaccguguggcucuccgccaucuggaugaugugguacuggggccccagccuguacagcaucgugucccccuucaucccgcugcuccccaucuucuucugccugugggucuacaucugaggacuagucccuguucccagagcccacuuuuuuuucuuuuuuugaaauaaaauagccugucuuucagaucucaaaggcucuuuucagagccaccaaaaaaaaaaaaaaaaaaaaaaaaaaaaaaaaaaaaaaaaaaaaaaaaaaaaaaaaaaaaaaaaaaaaaaaaaaaaaaaaaaaaaaaaaaaaaaaaaaaaagaauu

SEQ ID NO: 7560 - RNA, 1568 nt, Artificial Sequence; identical to SEQ ID NO: 7530
  mRNA Design a-3 (hSL-A100-N5) comprising derived and/or modified sequence from Pf(3D7)__XP_001351122.1__Pf-CSP (opt1)

SEQ ID NO: 7561 - RNA, 1499 nt, Artificial Sequence; identical to SEQ ID NO: 7531
  mRNA Design a-3 (hSL-A100-N5) comprising derived and/or modified sequence from Pf(3D7)__XP_001351122.1__Pf-CSP(1-374) (opt1)

SEQ ID NO: 7562 - RNA, 1352 nt, Artificial Sequence; identical to SEQ ID NO: 7532
  mRNA Design a-3 (hSL-A100-N5) comprising derived and/or modified sequence from Pf(3D7)__XP_001351122.1__Pf-CSP(1-325) (opt1)

SEQ ID NO: 7563 - RNA, 1568 nt, Artificial Sequence
  mRNA Design a-3 (hSL-A100-N5) comprising derived and/or modified sequence from Pf(3D7)__XP_001351122.1__HsALB_Pf-CSP(19-397) (opt1)
aggagagggcgcuuggcuugcaaggacccugagcugcggcauugaagcacacccaacccaacucgacugaagucagccucacugaaccggaucugagaaucuucucucucugggcuugccagggcucuccgaaccuagcuagcauccucuucaauuccaacuagaaagcuuaccaugaagugggugaccuucaucagccuccuguuccuguucuccagcgccuacucccuguuccaggaguaccagugcuacggcagcuccagcaacacccgcguccucaacgagcugaacuacgacaacgccgggacgaaccuguacaacgagcucgagaugaacuacuacggcaagcaggagaacugguacucccugaagaagaacagccggucccugggggagaacgacgacggcaacaacgaggacaacgagaagcuccgcaagcccaagcacaagaagcugaagcagccggcggacgggaaccccgaccccaacgccaaccccaacguggacccgaacgccaaccccaacguggaccccaacgccaaccccaacgucgacccgaacgccaaccccaacgcgaaccccaacgccaaccccaacgccaacccgaacgccaaccccaacgcgaaccccaacgccaaccccaacgccaacccgaacgccaaccccaacgccaaccccaacgcgaaccccaacgccaacccgaacgccaaccccaacgccaaccccaacgccaaccccaacgcgaacccgaacgccaaccccaacguggaccccaacgccaaccccaacgccaacccgaacgccaaccccaacgcgaaccccaacgccaacccgaacgccaaccccaacgccaaccccaacgccaaccccaacgcgaacccgaacgccaaccccaacgccaaccccaacgccaaccccaacgcgaacccgaacgccaaccccaacgccaaccccaacgccaaccccaacgccaacccgaacgcgaaccccaacaagaacaaccagggcaacggccaggggcacaacaugcccaacgaccccaaccggaacguggacgagaacgccaacgccaacagcgccgucaagaacaacaacaacgaggagccguccgacaagcacaucaaggaguaccugaacaagauccagaacagccucuccaccgaguggagccccugcuccgugaccugcggcaacgggauccaggugcgcaucaagcccggcagcgccaacaagcccaaggacgagcuggacuacgcgaacgacaucgagaagaagaucugcaagauggagaagugcuccagcgucuucaacguggugaacuccagcaucgggcugaucaugguccucagcuuccuguuccugaacugaggacuagucccuguucccagagcccacuuuuuuuucuuuuuuugaaauaaaauagccugucuuucagaucucaaaggcucuuuucagagccaccaaaaaaaaaaaaaaaaaaaaaaaaaaaaaaaaaaaaaaaaaaaaaaaaaaaaaaaaaaaaaaaaaaaaaaaaaaaaaaaaaaaaaaaaaaaaaaaaaaaaagaauu

SEQ ID NO: 7564 - RNA, 1586 nt, Artificial Sequence
  mRNA Design a-3 (hSL-A100-N5) comprising derived and/or modified sequence from Pf(3D7)__XP_001351122.1__HsIns-iso1_Pf-CSP(19-397) (opt1)
aggagagggcgcuuggcuugcaaggacccugagcugcggcauugaagcacacccaacccaacucgacugaagucagccucacugaaccggaucugagaaucuucucucucugggcuugccagggcucuccgaaccuagcuagcauccucuucaauuccaacuagaaagcuuaccauggcccuguggaugcgccuccugccccugcucgcccugcuggcgcucuggggcccggaccccgccgccgcccuguuccaggaguaccagugcuacgggagcuccagcaacacccgggugcugaacgagcucaacuacgacaacgccggcaccaaccuguacaacgagcuggagaugaacuacuacgggaagcaggagaacugguacucccucaagaagaacagccgcucccugggcgagaacgacgacgggaacaacgaggacaacgagaagcugcggaagcccaagcacaagaagcucaagcagcccgcggacggcaacccggaccccaacgccaaccccaacgucgaccccaacgccaacccgaacguggaccccaacgccaaccccaacguggaccccaacgcgaacccgaacgccaaccccaacgccaaccccaacgccaaccccaacgccaacccgaacgcgaaccccaacgccaaccccaacgccaaccccaacgccaacccgaacgccaaccccaacgcgaaccccaacgccaaccccaacgccaacccgaacgccaaccccaacgccaaccccaacgcgaaccccaacgccaacccgaacgucgaccccaacgccaaccccaacgccaacccgaacgccaaccccaacgcgaaccccaacgccaaccccaacgccaacccgaacgccaaccccaacgcgaaccccaacgccaaccccaacgccaacccgaacgccaaccccaacgccaaccccaacgcgaaccccaacgccaacccgaacgccaaccccaacgccaaccccaacgccaaccccaacgcgaacccgaacaagaacaaccagggcaacgggcagggccacaacaugcccaacgaccccaaccgcaacguggacgagaacgccaacgccaacagcgccgugaagaacaacaacaacgaggagcccuccgacaagcacaucaaggaguaccugaacaagauccagaacagccuguccacggaguggagcccgugcuccgugaccugcgggaacggcauccagguccggaucaagcccgggagcgccaacaagcccaaggacgagcucgacuacgcgaacgacaucgagaagaagaucugcaagauggagaagugcuccagcguguucaacgucgugaacuccagcaucggccugaucauggugcuguccuuccucuuccugaacugaggacuagucccuguucccagagcccacuuuuuuuucuuuuuuugaaauaaaauagccugucuuucagaucucaaaggcucuuuucagagccaccaaaaaaaaaaaaaaaaaaaaaaaaaaaaaaaaaaaaaaaaaaaaaaaaaaaaaaaaaaaaaaaaaaaaaaaaaaaaaaaaaaaaaaaaaaaaaaaaaaaaagaauu

SEQ ID NO: 7565 - RNA, 1565 nt, Artificial Sequence
  mRNA Design a-3 (hSL-A100-N5) comprising derived and/or modified sequence from Pf(3D7)__XP_001351122.1__HsSPARC_Pf-CSP(19-397) (opt1)
aggagagggcgcuuggcuugcaaggacccugagcugcggcauugaagcacacccaacccaacucgacugaagucagccucacugaaccggaucugagaaucuucucucucugggcuugccagggcucuccgaaccuagcuagcauccucuucaauuccaacuagaaagcuuaccaugcgcgccuggaucuucuuccugcucugccuggccggccgggcgcuggcccucuuccaggaguaccagugcuacgggagcuccagcaacacccgcgugcugaacgagcugaacuacgacaacgccggcaccaaccucuacaacgagcuggagaugaacuacuacgggaagcaggagaacugguacucccugaagaagaacagccggucccucggcgagaacgacgacgggaacaacgaggacaacgagaagcugcgcaagcccaagcacaagaagcugaagcagccggccgacggcaaccccgaccccaacgccaaccccaacgucgacccgaacgcgaaccccaacguggaccccaacgccaaccccaacguggacccgaacgccaaccccaacgccaaccccaacgcgaaccccaacgccaacccgaacgccaaccccaacgccaaccccaacgccaaccccaacgcgaacccgaacgccaaccccaacgccaaccccaacgccaaccccaacgccaacccgaacgcgaaccccaacgccaaccccaacgccaaccccaacgccaacccgaacgccaaccccaacgucgaccccaacgcgaaccccaacgccaacccgaacgccaaccccaacgccaaccccaacgccaacccgaacgcgaaccccaacgccaaccccaacgccaaccccaacgccaacccgaacgcgaaccccaacgccaaccccaacgccaaccccaacgccaacccgaacgccaaccccaacgcgaaccccaacgccaaccccaacgccaacccgaacgccaaccccaacaagaacaaccagggcaacgggcagggccacaacaugcccaacgaccccaaccggaacguggacgagaacgccaacgcgaacagcgccgugaagaacaacaacaacgaggagccguccgacaagcacaucaaggaguaccucaacaagauccagaacagccuguccacggaguggagccccugcuccgugaccugcgggaacggcauccagguccgcaucaagcccgggagcgccaacaagcccaaggacgagcuggacuacgccaacgacaucgagaagaagaucugcaagauggagaagugcuccagcguguucaacgucgugaacuccagcaucggccucaucauggugcuguccuuccuguuccucaacugaggacuagucccuguucccagagcccacuuuuuuuucuuuuuuugaaauaaaauagccugucuuucagaucucaaaggcucuuuucagagccaccaaaaaaaaaaaaaaaaaaaaaaaaaaaaaaaaaaaaaaaaaaaaaaaaaaaaaaaaaaaaaaaaaaaaaaaaaaaaaaaaaaaaaaaaaaaaaaaaaaaaagaauu

SEQ ID NO: 7566 - RNA, 1568 nt, Artificial Sequence
  mRNA Design a-3 (hSL-A100-N5) comprising derived and/or modified sequence from Pf(3D7)__XP_001351122.1__IgE_Pf-CSP(19-397) (opt1)
aggagagggcgcuuggcuugcaaggacccugagcugcggcauugaagcacacccaacccaacucgacugaagucagccucacugaaccggaucugagaaucuucucucucugggcuugccagggcucuccgaaccuagcuagcauccucuucaauuccaacuagaaagcuuaccauggacuggaccuggauccuguuccucguggccgccgcgacccgcguccacagccuguuccaggaguaccagugcuacggcuccagcuccaacacgcgggugcugaacgagcucaacuacgacaacgccgggaccaaccuguacaacgagcuggagaugaacuacuacggcaagcaggagaacugguacagccucaagaagaacucccgcagccugggggagaacgacgacggcaacaacgaggacaacgagaagcugcggaagcccaagcacaagaagcucaagcagccggccgacgggaaccccgaccccaacgccaaccccaacguggacccgaacgccaaccccaacgucgaccccaacgcgaaccccaacguggacccgaacgccaaccccaacgccaaccccaacgccaaccccaacgcgaacccgaacgccaaccccaacgccaaccccaacgccaaccccaacgccaacccgaacgcgaaccccaacgccaaccccaacgccaaccccaacgccaacccgaacgccaaccccaacgcgaaccccaacgccaaccccaacgccaacccgaacgccaaccccaacguggaccccaacgccaaccccaacgcgaacccgaacgccaaccccaacgccaaccccaacgccaacccgaacgccaaccccaacgcgaaccccaacgccaaccccaacgccaacccgaacgccaaccccaacgcgaaccccaacgccaaccccaacgccaacccgaacgccaaccccaacgccaaccccaacgcgaaccccaacgccaacccgaacgccaaccccaacaagaacaaccagggcaacggccaggggcacaacaugcccaacgaccccaaccgcaacgucgacgagaacgccaacgccaacuccgcggugaagaacaacaacaacgaggagccgagcgacaagcacaucaaggaguaccugaacaagauccagaacucccugagcaccgaguggucccccugcagcgugaccugcggcaacgggauccagguccggaucaagcccggcuccgccaacaagcccaaggacgagcucgacuacgccaacgacaucgagaagaagaucugcaagauggagaagugcagcuccguguucaacguggucaacagcuccaucgggcugaucauggugcugagcuuccucuuccugaacugaggacuagucccuguucccagagcccacuuuuuuuucuuuuuuugaaauaaaauagccugucuuucagaucucaaaggcucuuuucagagccaccaaaaaaaaaaaaaaaaaaaaaaaaaaaaaaaaaaaaaaaaaaaaaaaaaaaaaaaaaaaaaaaaaaaaaaaaaaaaaaaaaaaaaaaaaaaaaaaaaaaaagaauu

SEQ ID NO: 7567 - RNA, 1733 nt, Artificial Sequence
  mRNA Design a-3 (hSL-A100-N5) comprising derived and/or modified sequence from Pf(3D7)__XP_001351122.1__Pf-CSP_L(G4SG4)_TM domain HA (opt1)
aggagagggcgcuuggcuugcaaggacccugagcugcggcauugaagcacacccaacccaacucgacugaagucagccucacugaaccggaucugagaaucuucucucucugggcuugccagggcucuccgaaccuagcuagcauccucuucaauuccaacuagaaagcuuaccaugaugcgcaagcuggccauccucagcguguccagcuuccuguucgucgaggcccuguuccaggaguaccagugcuacggcuccagcuccaacacccgggugcucaacgagcugaacuacgacaacgcggggaccaaccuguacaacgagcucgagaugaacuacuacggcaagcaggagaacugguacagccugaagaagaacucccgcagccugggggagaacgacgacggcaacaacgaggacaacgagaagcuccggaagcccaagcacaagaagcugaagcagccggccgacgggaaccccgaccccaacgccaaccccaacguggacccgaacgccaaccccaacgucgaccccaacgccaaccccaacguggacccgaacgcgaaccccaacgccaaccccaacgccaaccccaacgccaacccgaacgcgaaccccaacgccaaccccaacgccaaccccaacgccaacccgaacgccaaccccaacgcgaaccccaacgccaaccccaacgccaacccgaacgccaaccccaacgccaaccccaacgcgaaccccaacgccaacccgaacgccaaccccaacguggaccccaacgccaaccccaacgccaacccgaacgcgaaccccaacgccaaccccaacgccaacccgaacgccaaccccaacgccaaccccaacgcgaaccccaacgccaacccgaacgccaaccccaacgccaaccccaacgcgaaccccaacgccaacccgaacgccaaccccaacgccaaccccaacgccaaccccaacgcgaacccgaacgccaaccccaacaagaacaaccagggcaacggccaggggcacaacaugcccaacgaccccaaccgcaacgucgacgagaacgccaacgccaacuccgccgugaagaacaacaacaacgaggagccgagcgacaagcacaucaaggaguaccugaacaagauccagaacucccucagcacggaguggucccccugcagcgugaccugcggcaacgggauccagguccggaucaagcccggcuccgcgaacaagcccaaggacgagcuggacuacgccaacgacaucgagaagaagaucugcaagauggagaagugcagcuccguguucaacguggucaacagcuccaucgggcugaucauggugcucagcuuccuguuccugaacggcggcgggggcagcgggggcggcgggaagcucgaguccacccgcaucuaccagauccuggccaucuacagcaccguggccuccagccugguccucguggugucccugggcgccaucagcuucuggaugugcuccaacgggagccugcagugccggaucugcaucugaggacuagucccuguucccagagcccacuuuuuuuucuuuuuuugaaauaaaauagccugucuuucagaucucaaaggcucuuuucagagccaccaaaaaaaaaaaaaaaaaaaaaaaaaaaaaaaaaaaaaaaaaaaaaaaaaaaaaaaaaaaaaaaaaaaaaaaaaaaaaaaaaaaaaaaaaaaaaaaaaaaaagaauu

SEQ ID NO: 7568 - RNA, 1607 nt, Artificial Sequence
  mRNA Design a-3 (hSL-A100-N5) comprising derived and/or modified sequence from Pf(3D7)__XP_001351122.1__Pf-CSP(199-377)_L(PVTN)_HBsAg (opt1)
aggagagggcgcuuggcuugcaaggacccugagcugcggcauugaagcacacccaacccaacucgacugaagucagccucacugaaccggaucugagaaucuucucucucugggcuugccagggcucuccgaaccuagcuagcauccucuucaauuccaacuagaaagcuuaccauggaccccaacgccaacccgaacgccaaccccaacgcgaaccccaacgccaaccccaacgccaacccgaacgccaaccccaacgccaaccccaacgcgaaccccaacgccaacccgaacgccaaccccaacgccaaccccaacgcgaaccccaacgccaacccgaacgccaaccccaacgccaaccccaacgccaaccccaacgcgaacccgaacgccaaccccaacaagaacaaccagggcaacgggcagggccacaacaugcccaacgaccccaaccgcaacguggacgagaacgccaacgccaacagcgccgucaagaacaacaacaacgaggagccguccgacaagcacaucaaggaguaccugaacaagauccagaacagccucuccaccgaguggagccccugcuccgugaccugcgggaacggcauccaggugcggaucaagcccgggagcgcgaacaagcccaaggacgagcuggacuacgccaacgacaucgagaagaagaucugcaagauggagaagugcuccagcgucccggugacgaacauggagaacaucaccuccggcuuccugggcccccuccuggugcugcaggccggguucuuccuccugacccgcauccugaccaucccccagagccucgacuccugguggacgagccugaacuuccugggcgggucccccgucugccucggccagaacagccaguccccgaccagcaaccacucccccaccagcugcccgcccaucugccccggguaccgguggaugugccugcgccgguucaucaucuuccuguucauccuccugcugugccucaucuuccugcuggugcuccuggacuaccagggcaugcugcccgugugcccccucaucccgggcuccaccacgaccaacaccgggcccugcaagaccugcacgacccccgcccagggcaacagcauguuccccagcugcugcugcaccaagccgaccgacgggaacugcacgugcauccccauccccuccagcugggccuucgcgaaguaccugugggagugggccuccguccgcuucagcuggcugucccuccuggugcccuucgugcagugguucgucggccugagcccgaccguguggcucuccgccaucuggaugaugugguacuggggccccagccuguacuccaucgugagccccuucaucccccugcucccgaucuucuucugccugugggucuacaucugaggacuagucccuguucccagagcccacuuuuuuuucuuuuuuugaaauaaaauagccugucuuucagaucucaaaggcucuuuucagagccaccaaaaaaaaaaaaaaaaaaaaaaaaaaaaaaaaaaaaaaaaaaaaaaaaaaaaaaaaaaaaaaaaaaaaaaaaaaaaaaaaaaaaaaaaaaaaaaaaaaaaagaauu

SEQ ID NO: 7569 - RNA, 1649 nt, Artificial Sequence
  mRNA Design a-3 (hSL-A100-N5) comprising derived and/or modified sequence from Pf(3D7)__XP_001351122.1__Pf-CSP(199-387)_L(PVTN)_HBsAg (opt1)
aggagagggcgcuuggcuugcaaggacccugagcugcggcauugaagcacacccaacccaacucgacugaagucagccucacugaaccggaucugagaaucuucucucucugggcuugccagggcucuccgaaccuagcuagcauccucuucaauuccaacuagaaagcuuaccaugauggcccccgacccgaacgccaaccccaacgcgaaccccaacgccaaccccaacgccaacccgaacgccaaccccaacgccaaccccaacgcgaaccccaacgccaacccgaacgccaaccccaacgccaaccccaacgcgaaccccaacgccaacccgaacgccaaccccaacgccaaccccaacgccaaccccaacgcgaacccgaacgccaaccccaacgccaaccccaacaagaacaaccagggcaacgggcagggccacaacaugcccaacgacccgaaccgcaacguggacgagaacgccaacgccaacagcgcggucaagaacaacaacaacgaggagcccuccgacaagcacaucaaggaguaccugaacaagauccagaacagccucuccaccgaguggagccccugcuccgugaccugcgggaacggcauccaggugcggaucaagcccgggagcgccaacaagccgaaggacgagcuggacuacgccaacgacaucgagaagaagaucugcaagauggagaagugcuccagcgucuucaacguggugaacuccagcaucggccugggccccgucacgaacauggagaacaucaccuccggguuccucggcccccugcuggugcuccaggccggguucuuccugcugacccgcauccucaccaucccccagagccuggacuccugguggacgagccugaacuuccucggcggguccccggugugccugggccagaacagccagucccccaccagcaaccacucccccaccagcugcccgcccaucugccccggcuaccgguggaugugccugcgccgguucaucaucuuccucuucauccugcugcucugccugaucuuccugcucguccugcuggacuaccaggggaugcuccccgugugcccgcugauccccggcagcaccacgaccaacaccgggcccugcaagaccugcacgacccccgcccagggcaacuccauguucccgagcugcugcugcaccaagcccaccgacggcaacugcacgugcauccccauccccuccagcugggcguucgccaaguaccugugggagugggccuccgugcgcuucagcuggcucucccugcuggucccguucgugcagugguucguggggcucagccccaccgucuggcuguccgccaucuggaugaugugguacuggggccccagccuguacuccaucgugagccccuucaucccgcuccugcccaucuucuucugccuguggguguacaucugaggacuagucccuguucccagagcccacuuuuuuuucuuuuuuugaaauaaaauagccugucuuucagaucucaaaggcucuuuucagagccaccaaaaaaaaaaaaaaaaaaaaaaaaaaaaaaaaaaaaaaaaaaaaaaaaaaaaaaaaaaaaaaaaaaaaaaaaaaaaaaaaaaaaaaaaaaaaaaaaaaaaagaauu

SEQ ID NO: 7570 - RNA, 833 nt, Artificial Sequence
  mRNA Design a-3 (hSL-A100-N5) comprising derived and/or modified sequence from Pf(3D7)__XP_001351122.1__HsALB_Pf-CSP(19-152) (opt1)
aggagagggcgcuuggcuugcaaggacccugagcugcggcauugaagcacacccaacccaacucgacugaagucagccucacugaaccggaucugagaaucuucucucucugggcuugccagggcucuccgaaccuagcuagcauccucuucaauuccaacuagaaagcuuaccaugaagugggugaccuucaucagccuccuguuccuguucuccagcgccuacucccuguuccaggaguaccagugcuacggcagcuccagcaacacccgcguccucaacgagcugaacuacgacaacgccgggacgaaccuguacaacgagcucgagaugaacuacuacggcaagcaggagaacugguacucccugaagaagaacagccggucccugggggagaacgacgacggcaacaacgaggacaacgagaagcuccgcaagcccaagcacaagaagcugaagcagccggcggacgggaaccccgaccccaacgccaaccccaacguggacccgaacgccaaccccaacguggaccccaacgccaaccccaacgucgacccgaacgccaaccccaacgcgaaccccaacgccaaccccaacgccaacccgaacgccaaccccaacgcgaaccccugaggacuagucccuguucccagagcccacuuuuuuuucuuuuuuugaaauaaaauagccugucuuucagaucucaaaggcucuuuucagagccaccaaaaaaaaaaaaaaaaaaaaaaaaaaaaaaaaaaaaaaaaaaaaaaaaaaaaaaaaaaaaaaaaaaaaaaaaaaaaaaaaaaaaaaaaaaaaaaaaaaaaagaauu

SEQ ID NO: 7571 - RNA, 953 nt, Artificial Sequence
  mRNA Design a-3 (hSL-A100-N5) comprising derived and/or modified sequence from Pf(3D7)__XP_001351122.1__HsALB_Pf-CSP(19-192) (opt1)
aggagagggcgcuuggcuugcaaggacccugagcugcggcauugaagcacacccaacccaacucgacugaagucagccucacugaaccggaucugagaaucuucucucucugggcuugccagggcucuccgaaccuagcuagcauccucuucaauuccaacuagaaagcuuaccaugaagugggugaccuucaucagccuccuguuccuguucuccagcgccuacucccuguuccaggaguaccagugcuacggcagcuccagcaacacccgcguccucaacgagcugaacuacgacaacgccgggacgaaccuguacaacgagcucgagaugaacuacuacggcaagcaggagaacugguacucccugaagaagaacagccggucccugggggagaacgacgacggcaacaacgaggacaacgagaagcuccgcaagcccaagcacaagaagcugaagcagccggcggacgggaaccccgaccccaacgccaaccccaacguggacccgaacgccaaccccaacguggaccccaacgccaaccccaacgucgacccgaacgccaaccccaacgcgaaccccaacgccaaccccaacgccaacccgaacgccaaccccaacgcgaaccccaacgccaaccccaacgccaacccgaacgccaaccccaacgccaaccccaacgcgaaccccaacgccaacccgaacgccaaccccaacgccaaccccaacgccaaccccaacgcgaacccgugaggacuagucccuguucccagagcccacuuuuuuuucuuuuuuugaaauaaaauagccugucuuucagaucucaaaggcucuuuucagagccaccaaaaaaaaaaaaaaaaaaaaaaaaaaaaaaaaaaaaaaaaaaaaaaaaaaaaaaaaaaaaaaaaaaaaaaaaaaaaaaaaaaaaaaaaaaaaaaaaaaaaagaauu

SEQ ID NO: 7572 - RNA, 1193 nt, Artificial Sequence
  mRNA Design a-3 (hSL-A100-N5) comprising derived and/or modified sequence from Pf(3D7)__XP_001351122.1__HsALB_Pf-CSP(19-272) (opt1)
aggagagggcgcuuggcuugcaaggacccugagcugcggcauugaagcacacccaacccaacucgacugaagucagccucacugaaccggaucugagaaucuucucucucugggcuugccagggcucuccgaaccuagcuagcauccucuucaauuccaacuagaaagcuuaccaugaagugggugaccuucaucagccuccuguuccuguucuccagcgccuacucccuguuccaggaguaccagugcuacggcagcuccagcaacacccgcguccucaacgagcugaacuacgacaacgccgggacgaaccuguacaacgagcucgagaugaacuacuacggcaagcaggagaacugguacucccugaagaagaacagccggucccugggggagaacgacgacggcaacaacgaggacaacgagaagcuccgcaagcccaagcacaagaagcugaagcagccggcggacgggaaccccgaccccaacgccaaccccaacguggacccgaacgccaaccccaacguggaccccaacgccaaccccaacgucgacccgaacgccaaccccaacgcgaaccccaacgccaaccccaacgccaacccgaacgccaaccccaacgcgaaccccaacgccaaccccaacgccaacccgaacgccaaccccaacgccaaccccaacgcgaaccccaacgccaacccgaacgccaaccccaacgccaaccccaacgccaaccccaacgcgaacccgaacgccaaccccaacguggaccccaacgccaaccccaacgccaacccgaacgccaaccccaacgcgaaccccaacgccaacccgaacgccaaccccaacgccaaccccaacgccaaccccaacgcgaacccgaacgccaaccccaacgccaaccccaacgccaaccccaacgcgaacccgaacgccaaccccaacgccaaccccaacgccaaccccaacgccaacccgaacgcgaaccccugaggacuagucccuguucccagagcccacuuuuuuuucuuuuuuugaaauaaaauagccugucuuucagaucucaaaggcucuuuucagagccaccaaaaaaaaaaaaaaaaaaaaaaaaaaaaaaaaaaaaaaaaaaaaaaaaaaaaaaaaaaaaaaaaaaaaaaaaaaaaaaaaaaaaaaaaaaaaaaaaaaaaagaauu

SEQ ID NO: 7573 - RNA, 1355 nt, Artificial Sequence
  mRNA Design a-3 (hSL-A100-N5) comprising derived and/or modified sequence from Pf(3D7)__XP_001351122.1__HsALB_Pf-CSP(19-272)_L(AAY)_Pf-CSP(310-3 27)_L(AAY)_Pf-CSP(346-375) (opt1)
aggagagggcgcuuggcuugcaaggacccugagcugcggcauugaagcacacccaacccaacucgacugaagucagccucacugaaccggaucugagaaucuucucucucugggcuugccagggcucuccgaaccuagcuagcauccucuucaauuccaacuagaaagcuuaccaugaagugggugaccuucaucagccuccuguuccuguucuccagcgccuacucccuguuccaggaguaccagugcuacggcagcuccagcaacacccgcguccucaacgagcugaacuacgacaacgccgggacgaaccuguacaacgagcucgagaugaacuacuacggcaagcaggagaacugguacucccugaagaagaacagccggucccugggggagaacgacgacggcaacaacgaggacaacgagaagcuccgcaagcccaagcacaagaagcugaagcagccggcggacgggaaccccgaccccaacgccaaccccaacguggacccgaacgccaaccccaacguggaccccaacgccaaccccaacgucgacccgaacgccaaccccaacgcgaaccccaacgccaaccccaacgccaacccgaacgccaaccccaacgcgaaccccaacgccaaccccaacgccaacccgaacgccaaccccaacgccaaccccaacgcgaaccccaacgccaacccgaacgccaaccccaacgccaaccccaacgccaaccccaacgcgaacccgaacgccaaccccaacguggaccccaacgccaaccccaacgccaacccgaacgccaaccccaacgcgaaccccaacgccaacccgaacgccaaccccaacgccaaccccaacgccaaccccaacgcgaacccgaacgccaaccccaacgccaaccccaacgccaaccccaacgcgaacccgaacgccaaccccaacgccaaccccaacgccaaccccaacgccaacccgaacgcgaaccccgccgccuacgagcccagcgacaagcacaucaaggaguaccugaacaagauccagaacucccucgccgccuacaucaagcccggcagcgcgaacaagccgaaggacgagcuggacuacgccaacgacaucgagaagaagaucugcaagauggagaagugcuccugaggacuagucccuguucccagagcccacuuuuuuuucuuuuuuugaaauaaaauagccugucuuucagaucucaaaggcucuuuucagagccaccaaaaaaaaaaaaaaaaaaaaaaaaaaaaaaaaaaaaaaaaaaaaaaaaaaaaaaaaaaaaaaaaaaaaaaaaaaaaaaaaaaaaaaaaaaaaaaaaaaaaagaauu

SEQ ID NO: 7574 - RNA, 1316 nt, Artificial Sequence
  mRNA Design a-3 (hSL-A100-N5) comprising derived and/or modified sequence from Pf(3D7)__XP_001351122.1__HsALB_Pf-CSP(19-272)_L(AAY)_Pf-CSP(346-3 65)_L(AAY)_P2 (opt1)
aggagagggcgcuuggcuugcaaggacccugagcugcggcauugaagcacacccaacccaacucgacugaagucagccucacugaaccggaucugagaaucuucucucucugggcuugccagggcucuccgaaccuagcuagcauccucuucaauuccaacuagaaagcuuaccaugaagugggugaccuucaucagccuccuguuccuguucuccagcgccuacucccuguuccaggaguaccagugcuacggcagcuccagcaacacccgcguccucaacgagcugaacuacgacaacgccgggacgaaccuguacaacgagcucgagaugaacuacuacggcaagcaggagaacugguacucccugaagaagaacagccggucccugggggagaacgacgacggcaacaacgaggacaacgagaagcuccgcaagcccaagcacaagaagcugaagcagccggcggacgggaaccccgaccccaacgccaaccccaacguggacccgaacgccaaccccaacguggaccccaacgccaaccccaacgucgacccgaacgccaaccccaacgcgaaccccaacgccaaccccaacgccaacccgaacgccaaccccaacgcgaaccccaacgccaaccccaacgccaacccgaacgccaaccccaacgccaaccccaacgcgaaccccaacgccaacccgaacgccaaccccaacgccaaccccaacgccaaccccaacgcgaacccgaacgccaaccccaacguggaccccaacgccaaccccaacgccaacccgaacgccaaccccaacgcgaaccccaacgccaacccgaacgccaaccccaacgccaaccccaacgccaaccccaacgcgaacccgaacgccaaccccaacgccaaccccaacgccaaccccaacgcgaacccgaacgccaaccccaacgccaaccccaacgccaaccccaacgccaacccgaacgcgaaccccgccgccuacaucaagcccggcagcgccaacaagcccaaggacgagcuggacuacgccaacgacaucgaggcggccuaccaguacaucaaggccaacuccaaguucaucggcaucaccgagcucugaggacuagucccuguucccagagcccacuuuuuuuucuuuuuuugaaauaaaauagccugucuuucagaucucaaaggcucuuuucagagccaccaaaaaaaaaaaaaaaaaaaaaaaaaaaaaaaaaaaaaaaaaaaaaaaaaaaaaaaaaaaaaaaaaaaaaaaaaaaaaaaaaaaaaaaaaaaaaaaaaaaaagaauu

SEQ ID NO: 7575 - RNA, 1310 nt, Artificial Sequence
  mRNA Design a-3 (hSL-A100-N5) comprising derived and/or modified sequence from Pf(3D7)__XP_001351122.1__HsALB_Pf-CSP(19-272)_L(AAY)_Pf-CSP(346-3 65)_L(AAY)_PADRE (opt1)
aggagagggcgcuuggcuugcaaggacccugagcugcggcauugaagcacacccaacccaacucgacugaagucagccucacugaaccggaucugagaaucuucucucucugggcuugccagggcucuccgaaccuagcuagcauccucuucaauuccaacuagaaagcuuaccaugaagugggugaccuucaucagccuccuguuccuguucuccagcgccuacucccuguuccaggaguaccagugcuacggcagcuccagcaacacccgcguccucaacgagcugaacuacgacaacgccgggacgaaccuguacaacgagcucgagaugaacuacuacggcaagcaggagaacugguacucccugaagaagaacagccggucccugggggagaacgacgacggcaacaacgaggacaacgagaagcuccgcaagcccaagcacaagaagcugaagcagccggcggacgggaaccccgaccccaacgccaaccccaacguggacccgaacgccaaccccaacguggaccccaacgccaaccccaacgucgacccgaacgccaaccccaacgcgaaccccaacgccaaccccaacgccaacccgaacgccaaccccaacgcgaaccccaacgccaaccccaacgccaacccgaacgccaaccccaacgccaaccccaacgcgaaccccaacgccaacccgaacgccaaccccaacgccaaccccaacgccaaccccaacgcgaacccgaacgccaaccccaacguggaccccaacgccaaccccaacgccaacccgaacgccaaccccaacgcgaaccccaacgccaacccgaacgccaaccccaacgccaaccccaacgccaaccccaacgcgaacccgaacgccaaccccaacgccaaccccaacgccaaccccaacgcgaacccgaacgccaaccccaacgccaaccccaacgccaaccccaacgccaacccgaacgcgaaccccgccgccuacaucaagcccggcagcgccaacaagcccaaggacgagcuggacuacgccaacgacaucgaggcggccuacgccaaguucguggccgccuggacccucaaggcggccgccugaggacuagucccuguucccagagcccacuuuuuuuucuuuuuuugaaauaaaauagccugucuuucagaucucaaaggcucuuuucagagccaccaaaaaaaaaaaaaaaaaaaaaaaaaaaaaaaaaaaaaaaaaaaaaaaaaaaaaaaaaaaaaaaaaaaaaaaaaaaaaaaaaaaaaaaaaaaaaaaaaaaaagaauu

SEQ ID NO: 7576 - RNA, 1367 nt, Artificial Sequence
  mRNA Design a-3 (hSL-A100-N5) comprising derived and/or modified sequence from Pf(3D7)__XP_001351122.1__HsALB_Pf-CSP(19-272)_L(G4S)_Pf-CSP(310-3 27)_L(G4S)_Pf-CSP(346-375) (opt1)
aggagagggcgcuuggcuugcaaggacccugagcugcggcauugaagcacacccaacccaacucgacugaagucagccucacugaaccggaucugagaaucuucucucucugggcuugccagggcucuccgaaccuagcuagcauccucuucaauuccaacuagaaagcuuaccaugaagugggugaccuucaucagccuccuguuccuguucuccagcgccuacucccuguuccaggaguaccagugcuacggcagcuccagcaacacccgcguccucaacgagcugaacuacgacaacgccgggacgaaccuguacaacgagcucgagaugaacuacuacggcaagcaggagaacugguacucccugaagaagaacagccggucccugggggagaacgacgacggcaacaacgaggacaacgagaagcuccgcaagcccaagcacaagaagcugaagcagccggcggacgggaaccccgaccccaacgccaaccccaacguggacccgaacgccaaccccaacguggaccccaacgccaaccccaacgucgacccgaacgccaaccccaacgcgaaccccaacgccaaccccaacgccaacccgaacgccaaccccaacgcgaaccccaacgccaaccccaacgccaacccgaacgccaaccccaacgccaaccccaacgcgaaccccaacgccaacccgaacgccaaccccaacgccaaccccaacgccaaccccaacgcgaacccgaacgccaaccccaacguggaccccaacgccaaccccaacgccaacccgaacgccaaccccaacgcgaaccccaacgccaacccgaacgccaaccccaacgccaaccccaacgccaaccccaacgcgaacccgaacgccaaccccaacgccaaccccaacgccaaccccaacgcgaacccgaacgccaaccccaacgccaaccccaacgccaaccccaacgccaacccgaacgcgaaccccggcggcgggggcagcgagcccuccgacaagcacaucaaggaguaccugaacaagauccagaacagccucgggggcgggggcuccaucaagcccggcagcgccaacaagccgaaggacgagcuggacuacgccaacgacaucgagaagaagaucugcaagauggagaagugcuccugaggacuagucccuguucccagagcccacuuuuuuuucuuuuuuugaaauaaaauagccugucuuucagaucucaaaggcucuuuucagagccaccaaaaaaaaaaaaaaaaaaaaaaaaaaaaaaaaaaaaaaaaaaaaaaaaaaaaaaaaaaaaaaaaaaaaaaaaaaaaaaaaaaaaaaaaaaaaaaaaaaaaagaauu

SEQ ID NO: 7577 - RNA, 1352 nt, Artificial Sequence
  mRNA Design a-3 (hSL-A100-N5) comprising derived and/or modified sequence from Pf(3D7)__XP_001351122.1__HsALB_Pf-CSP(19-272)_L(G4S)_Pf-CSP(310-3 27)_Pf-CSP(346-375) (opt1)
aggagagggcgcuuggcuugcaaggacccugagcugcggcauugaagcacacccaacccaacucgacugaagucagccucacugaaccggaucugagaaucuucucucucugggcuugccagggcucuccgaaccuagcuagcauccucuucaauuccaacuagaaagcuuaccaugaagugggugaccuucaucagccuccuguuccuguucuccagcgccuacucccuguuccaggaguaccagugcuacggcagcuccagcaacacccgcguccucaacgagcugaacuacgacaacgccgggacgaaccuguacaacgagcucgagaugaacuacuacggcaagcaggagaacugguacucccugaagaagaacagccggucccugggggagaacgacgacggcaacaacgaggacaacgagaagcuccgcaagcccaagcacaagaagcugaagcagccggcggacgggaaccccgaccccaacgccaaccccaacguggacccgaacgccaaccccaacguggaccccaacgccaaccccaacgucgacccgaacgccaaccccaacgcgaaccccaacgccaaccccaacgccaacccgaacgccaaccccaacgcgaaccccaacgccaaccccaacgccaacccgaacgccaaccccaacgccaaccccaacgcgaaccccaacgccaacccgaacgccaaccccaacgccaaccccaacgccaaccccaacgcgaacccgaacgccaaccccaacguggaccccaacgccaaccccaacgccaacccgaacgccaaccccaacgcgaaccccaacgccaacccgaacgccaaccccaacgccaaccccaacgccaaccccaacgcgaacccgaacgccaaccccaacgccaaccccaacgccaaccccaacgcgaacccgaacgccaaccccaacgccaaccccaacgccaaccccaacgccaacccgaacgcgaaccccggcggcgggggcagcgagcccuccgacaagcacaucaaggaguaccugaacaagauccagaacagccucaucaagcccggguccgccaacaagccgaaggacgagcuggacuacgccaacgacaucgagaagaagaucugcaagauggagaagugcagcugaggacuagucccuguucccagagcccacuuuuuuuucuuuuuuugaaauaaaauagccugucuuucagaucucaaaggcucuuuucagagccaccaaaaaaaaaaaaaaaaaaaaaaaaaaaaaaaaaaaaaaaaaaaaaaaaaaaaaaaaaaaaaaaaaaaaaaaaaaaaaaaaaaaaaaaaaaaaaaaaaaaaagaauu

SEQ ID NO: 7578 - RNA, 1352 nt, Artificial Sequence
  mRNA Design a-3 (hSL-A100-N5) comprising derived and/or modified sequence from Pf(3D7)__XP_001351122.1__HsALB_Pf-CSP(19-325) (opt1)
aggagagggcgcuuggcuugcaaggacccugagcugcggcauugaagcacacccaacccaacucgacugaagucagccucacugaaccggaucugagaaucuucucucucugggcuugccagggcucuccgaaccuagcuagcauccucuucaauuccaacuagaaagcuuaccaugaagugggugaccuucaucagccuccuguuccuguucuccagcgccuacucccuguuccaggaguaccagugcuacggcagcuccagcaacacccgcguccucaacgagcugaacuacgacaacgccgggacgaaccuguacaacgagcucgagaugaacuacuacggcaagcaggagaacugguacucccugaagaagaacagccggucccugggggagaacgacgacggcaacaacgaggacaacgagaagcuccgcaagcccaagcacaagaagcugaagcagccggcggacgggaaccccgaccccaacgccaaccccaacguggacccgaacgccaaccccaacguggaccccaacgccaaccccaacgucgacccgaacgccaaccccaacgcgaaccccaacgccaaccccaacgccaacccgaacgccaaccccaacgcgaaccccaacgccaaccccaacgccaacccgaacgccaaccccaacgccaaccccaacgcgaaccccaacgccaacccgaacgccaaccccaacgccaaccccaacgccaaccccaacgcgaacccgaacgccaaccccaacguggaccccaacgccaaccccaacgccaacccgaacgccaaccccaacgcgaaccccaacgccaacccgaacgccaaccccaacgccaaccccaacgccaaccccaacgcgaacccgaacgccaaccccaacgccaaccccaacgccaaccccaacgcgaacccgaacgccaaccccaacgccaaccccaacgccaaccccaacgccaacccgaacgcgaaccccaacaagaacaaccagggcaacggccaggggcacaacaugcccaacgaccccaaccggaacguggacgagaacgccaacgccaacagcgccgucaagaacaacaacaacgaggagccguccgacaagcacaucaaggaguaccugaacaagauccagaacugaggacuagucccuguucccagagcccacuuuuuuuucuuuuuuugaaauaaaauagccugucuuucagaucucaaaggcucuuuucagagccaccaaaaaaaaaaaaaaaaaaaaaaaaaaaaaaaaaaaaaaaaaaaaaaaaaaaaaaaaaaaaaaaaaaaaaaaaaaaaaaaaaaaaaaaaaaaaaaaaaaaaagaauu

SEQ ID NO: 7579 - RNA, 1529 nt, Artificial Sequence
  mRNA Design a-3 (hSL-A100-N5) comprising derived and/or modified sequence from Pf(3D7)__XP_001351122.1__HsALB_Pf-CSP(19-384) (opt1)
aggagagggcgcuuggcuugcaaggacccugagcugcggcauugaagcacacccaacccaacucgacugaagucagccucacugaaccggaucugagaaucuucucucucugggcuugccagggcucuccgaaccuagcuagcauccucuucaauuccaacuagaaagcuuaccaugaagugggugaccuucaucagccuccuguuccuguucuccagcgccuacucccuguuccaggaguaccagugcuacggcagcuccagcaacacccgcguccucaacgagcugaacuacgacaacgccgggacgaaccuguacaacgagcucgagaugaacuacuacggcaagcaggagaacugguacucccugaagaagaacagccggucccugggggagaacgacgacggcaacaacgaggacaacgagaagcuccgcaagcccaagcacaagaagcugaagcagccggcggacgggaaccccgaccccaacgccaaccccaacguggacccgaacgccaaccccaacguggaccccaacgccaaccccaacgucgacccgaacgccaaccccaacgcgaaccccaacgccaaccccaacgccaacccgaacgccaaccccaacgcgaaccccaacgccaaccccaacgccaacccgaacgccaaccccaacgccaaccccaacgcgaaccccaacgccaacccgaacgccaaccccaacgccaaccccaacgccaaccccaacgcgaacccgaacgccaaccccaacguggaccccaacgccaaccccaacgccaacccgaacgccaaccccaacgcgaaccccaacgccaacccgaacgccaaccccaacgccaaccccaacgccaaccccaacgcgaacccgaacgccaaccccaacgccaaccccaacgccaaccccaacgcgaacccgaacgccaaccccaacgccaaccccaacgccaaccccaacgccaacccgaacgcgaaccccaacaagaacaaccagggcaacggccaggggcacaacaugcccaacgaccccaaccggaacguggacgagaacgccaacgccaacagcgccgucaagaacaacaacaacgaggagccguccgacaagcacaucaaggaguaccugaacaagauccagaacagccucuccaccgaguggagccccugcuccgugaccugcggcaacgggauccaggugcgcaucaagcccggcagcgccaacaagcccaaggacgagcuggacuacgcgaacgacaucgagaagaagaucugcaagauggagaagugcuccagcgucuucaacguggugaacuccagcugaggacuagucccuguucccagagcccacuuuuuuuucuuuuuuugaaauaaaauagccugucuuucagaucucaaaggcucuuuucagagccaccaaaaaaaaaaaaaaaaaaaaaaaaaaaaaaaaaaaaaaaaaaaaaaaaaaaaaaaaaaaaaaaaaaaaaaaaaaaaaaaaaaaaaaaaaaaaaaaaaaaaagaauu

SEQ ID NO: 7580 - RNA, 1667 nt, Artificial Sequence
  mRNA Design a-3 (hSL-A100-N5) comprising derived and/or modified sequence from Pf(3D7)__XP_001351122.1__HsALB_Pf-CSP(19-384)_TM domain HA (opt1)
aggagagggcgcuuggcuugcaaggacccugagcugcggcauugaagcacacccaacccaacucgacugaagucagccucacugaaccggaucugagaaucuucucucucugggcuugccagggcucuccgaaccuagcuagcauccucuucaauuccaacuagaaagcuuaccaugaagugggugaccuucaucagccuccuguuccuguucuccagcgccuacucccuguuccaggaguaccagugcuacggcagcuccagcaacacccgcguccucaacgagcugaacuacgacaacgccgggacgaaccuguacaacgagcucgagaugaacuacuacggcaagcaggagaacugguacucccugaagaagaacagccggucccugggggagaacgacgacggcaacaacgaggacaacgagaagcuccgcaagcccaagcacaagaagcugaagcagccggcggacgggaaccccgaccccaacgccaaccccaacguggacccgaacgccaaccccaacguggaccccaacgccaaccccaacgucgacccgaacgccaaccccaacgcgaaccccaacgccaaccccaacgccaacccgaacgccaaccccaacgcgaaccccaacgccaaccccaacgccaacccgaacgccaaccccaacgccaaccccaacgcgaaccccaacgccaacccgaacgccaaccccaacgccaaccccaacgccaaccccaacgcgaacccgaacgccaaccccaacguggaccccaacgccaaccccaacgccaacccgaacgccaaccccaacgcgaaccccaacgccaacccgaacgccaaccccaacgccaaccccaacgccaaccccaacgcgaacccgaacgccaaccccaacgccaaccccaacgccaaccccaacgcgaacccgaacgccaaccccaacgccaaccccaacgccaaccccaacgccaacccgaacgcgaaccccaacaagaacaaccagggcaacggccaggggcacaacaugcccaacgaccccaaccggaacguggacgagaacgccaacgccaacagcgccgucaagaacaacaacaacgaggagccguccgacaagcacaucaaggaguaccugaacaagauccagaacagccucuccaccgaguggagccccugcuccgugaccugcggcaacgggauccaggugcgcaucaagcccggcagcgccaacaagcccaaggacgagcuggacuacgcgaacgacaucgagaagaagaucugcaagauggagaagugcuccagcgucuucaacguggugaacuccagcaagcuggagagcacccggaucuaccagauccucgccaucuacuccacggucgccagcucccuggugcugguggucagccucggggccaucuccuucuggaugugcagcaacggcucccugcagugccgcaucugcaucugaggacuagucccuguucccagagcccacuuuuuuuucuuuuuuugaaauaaaauagccugucuuucagaucucaaaggcucuuuucagagccaccaaaaaaaaaaaaaaaaaaaaaaaaaaaaaaaaaaaaaaaaaaaaaaaaaaaaaaaaaaaaaaaaaaaaaaaaaaaaaaaaaaaaaaaaaaaaaaaaaaaaagaauu

SEQ ID NO: 7581 - RNA, 1379 nt, Artificial Sequence
  mRNA Design a-3 (hSL-A100-N5) comprising derived and/or modified sequence from Pf(3D7)__XP_001351122.1__HsALB_Pf-CSP(82-397) (opt1)
aggagagggcgcuuggcuugcaaggacccugagcugcggcauugaagcacacccaacccaacucgacugaagucagccucacugaaccggaucugagaaucuucucucucugggcuugccagggcucuccgaaccuagcuagcauccucuucaauuccaacuagaaagcuuaccaugaagugggugaccuucaucagccuccuguuccuguucuccagcgccuacuccgacaacgagaagcugcgcaagcccaagcacaagaagcucaagcagccggccgacggcaaccccgaccccaacgcgaaccccaacgucgacccgaacgccaaccccaacguggaccccaacgccaaccccaacguggacccgaacgccaaccccaacgccaaccccaacgcgaaccccaacgccaacccgaacgccaaccccaacgccaaccccaacgcgaaccccaacgccaacccgaacgccaaccccaacgccaaccccaacgccaaccccaacgcgaacccgaacgccaaccccaacgccaaccccaacgccaaccccaacgccaacccgaacgcgaaccccaacgucgaccccaacgccaaccccaacgccaacccgaacgccaaccccaacgccaaccccaacgcgaacccgaacgccaaccccaacgccaaccccaacgccaaccccaacgccaacccgaacgcgaaccccaacgccaaccccaacgccaaccccaacgccaacccgaacgcgaaccccaacgccaaccccaacgccaaccccaacgccaacccgaacgccaaccccaacaagaacaaccaggggaacggccaggggcacaacaugcccaacgaccccaaccggaacguggacgagaacgcgaacgccaacagcgccgugaagaacaacaacaacgaggagccguccgacaagcacaucaaggaguaccugaacaagauccagaacagccuguccaccgaguggagccccugcuccgucacgugcggcaacgggauccaggugcgcaucaagcccggcagcgccaacaagcccaaggacgagcucgacuacgccaacgacaucgagaagaagaucugcaagauggagaagugcuccagcguguucaacgucgugaacuccagcaucggccugaucauggugcuguccuuccucuuccugaacugaggacuagucccuguucccagagcccacuuuuuuuucuuuuuuugaaauaaaauagccugucuuucagaucucaaaggcucuuuucagagccaccaaaaaaaaaaaaaaaaaaaaaaaaaaaaaaaaaaaaaaaaaaaaaaaaaaaaaaaaaaaaaaaaaaaaaaaaaaaaaaaaaaaaaaaaaaaaaaaaaaaaagaauu

SEQ ID NO: 7582 - RNA, 731 nt, Artificial Sequence
  mRNA Design a-3 (hSL-A100-N5) comprising derived and/or modified sequence from Pf(3D7)__XP_001351122.1__HsALB_Pf-CSP(93-192) (opt1)
aggagagggcgcuuggcuugcaaggacccugagcugcggcauugaagcacacccaacccaacucgacugaagucagccucacugaaccggaucugagaaucuucucucucugggcuugccagggcucuccgaaccuagcuagcauccucuucaauuccaacuagaaagcuuaccaugaagugggugaccuucaucagccuccuguuccuguucuccagcgccuacuccaagcugaagcagcccgccgacggcaacccggaccccaacgcgaaccccaacgucgaccccaacgccaacccgaacguggaccccaacgccaaccccaacguggaccccaacgccaacccgaacgccaaccccaacgcgaaccccaacgccaaccccaacgccaacccgaacgccaaccccaacgcgaaccccaacgccaaccccaacgccaacccgaacgccaaccccaacgccaaccccaacgcgaaccccaacgccaacccgaacgccaaccccaacgccaaccccaacgccaaccccugaggacuagucccuguucccagagcccacuuuuuuuucuuuuuuugaaauaaaauagccugucuuucagaucucaaaggcucuuuucagagccaccaaaaaaaaaaaaaaaaaaaaaaaaaaaaaaaaaaaaaaaaaaaaaaaaaaaaaaaaaaaaaaaaaaaaaaaaaaaaaaaaaaaaaaaaaaaaaaaaaaaaagaauu

SEQ ID NO: 7583 - RNA, 971 nt, Artificial Sequence
  mRNA Design a-3 (hSL-A100-N5) comprising derived and/or modified sequence from Pf(3D7)__XP_001351122.1__HsALB_Pf-CSP(93-272) (opt1)
aggagagggcgcuuggcuugcaaggacccugagcugcggcauugaagcacacccaacccaacucgacugaagucagccucacugaaccggaucugagaaucuucucucucugggcuugccagggcucuccgaaccuagcuagcauccucuucaauuccaacuagaaagcuuaccaugaagugggugaccuucaucagccuccuguuccuguucuccagcgccuacuccaagcugaagcagcccgccgacggcaacccggaccccaacgcgaaccccaacgucgaccccaacgccaacccgaacguggaccccaacgccaaccccaacguggaccccaacgccaacccgaacgccaaccccaacgcgaaccccaacgccaaccccaacgccaacccgaacgccaaccccaacgcgaaccccaacgccaaccccaacgccaacccgaacgccaaccccaacgccaaccccaacgcgaaccccaacgccaacccgaacgccaaccccaacgccaaccccaacgccaaccccaacgcgaacccgaacgucgaccccaacgccaaccccaacgccaaccccaacgccaacccgaacgccaaccccaacgcgaaccccaacgccaacccgaacgccaaccccaacgccaaccccaacgccaaccccaacgcgaacccgaacgccaaccccaacgccaaccccaacgccaaccccaacgcgaacccgaacgccaaccccaacgccaaccccaacgccaaccccaacgccaacccgugaggacuagucccuguucccagagcccacuuuuuuuucuuuuuuugaaauaaaauagccugucuuucagaucucaaaggcucuuuucagagccaccaaaaaaaaaaaaaaaaaaaaaaaaaaaaaaaaaaaaaaaaaaaaaaaaaaaaaaaaaaaaaaaaaaaaaaaaaaaaaaaaaaaaaaaaaaaaaaaaaaaaagaauu

SEQ ID NO: 7584 - RNA, 1346 nt, Artificial Sequence
  mRNA Design a-3 (hSL-A100-N5) comprising derived and/or modified sequence from Pf(3D7)__XP_001351122.1__HsALB_Pf-CSP(93-397) (opt1)
aggagagggcgcuuggcuugcaaggacccugagcugcggcauugaagcacacccaacccaacucgacugaagucagccucacugaaccggaucugagaaucuucucucucugggcuugccagggcucuccgaaccuagcuagcauccucuucaauuccaacuagaaagcuuaccaugaagugggugaccuucaucagccuccuguuccuguucuccagcgccuacuccaagcugaagcagcccgccgacggcaacccggaccccaacgcgaaccccaacgucgaccccaacgccaacccgaacguggaccccaacgccaaccccaacguggaccccaacgccaacccgaacgccaaccccaacgcgaaccccaacgccaaccccaacgccaacccgaacgccaaccccaacgcgaaccccaacgccaaccccaacgccaacccgaacgccaaccccaacgccaaccccaacgcgaaccccaacgccaacccgaacgccaaccccaacgccaaccccaacgccaaccccaacgcgaacccgaacgucgaccccaacgccaaccccaacgccaaccccaacgccaacccgaacgccaaccccaacgcgaaccccaacgccaacccgaacgccaaccccaacgccaaccccaacgccaaccccaacgcgaacccgaacgccaaccccaacgccaaccccaacgccaaccccaacgcgaacccgaacgccaaccccaacgccaaccccaacgccaaccccaacgccaacccgaacaagaacaaccaggggaacggccaggggcacaacaugcccaacgaccccaaccgcaacguggacgagaacgcgaacgccaacagcgccgugaagaacaacaacaacgaggagcccuccgacaagcacaucaaggaguaccucaacaagauccagaacagccuguccaccgaguggagcccgugcuccgucacgugcggcaacgggauccaggugcggaucaagcccggcagcgccaacaagcccaaggacgagcuggacuacgccaacgacaucgagaagaagaucugcaagauggagaagugcuccagcguguucaacgucgugaacuccagcaucggccucaucauggugcuguccuuccuguuccucaacugaggacuagucccuguucccagagcccacuuuuuuuucuuuuuuugaaauaaaauagccugucuuucagaucucaaaggcucuuuucagagccaccaaaaaaaaaaaaaaaaaaaaaaaaaaaaaaaaaaaaaaaaaaaaaaaaaaaaaaaaaaaaaaaaaaaaaaaaaaaaaaaaaaaaaaaaaaaaaaaaaaaaagaauu

SEQ ID NO: 7585 - RNA, 716 nt, Artificial Sequence
  mRNA Design a-3 (hSL-A100-N5) comprising derived and/or modified sequence from Pf(3D7)__XP_001351122.1__HsALB_Pf-CSP(98-192) (opt1)
aggagagggcgcuuggcuugcaaggacccugagcugcggcauugaagcacacccaacccaacucgacugaagucagccucacugaaccggaucugagaaucuucucucucugggcuugccagggcucuccgaaccuagcuagcauccucuucaauuccaacuagaaagcuuaccaugaagugggugaccuucaucagccuccuguuccuguucuccagcgccuacuccgccgacggcaaccccgacccgaacgcgaaccccaacgucgaccccaacgccaaccccaacguggacccgaacgccaaccccaacguggaccccaacgccaaccccaacgccaacccgaacgcgaaccccaacgccaaccccaacgccaaccccaacgccaacccgaacgcgaaccccaacgccaaccccaacgccaaccccaacgccaacccgaacgccaaccccaacgcgaaccccaacgccaaccccaacgccaacccgaacgccaaccccaacgccaaccccugaggacuagucccuguucccagagcccacuuuuuuuucuuuuuuugaaauaaaauagccugucuuucagaucucaaaggcucuuuucagagccaccaaaaaaaaaaaaaaaaaaaaaaaaaaaaaaaaaaaaaaaaaaaaaaaaaaaaaaaaaaaaaaaaaaaaaaaaaaaaaaaaaaaaaaaaaaaaaaaaaaaaagaauu

SEQ ID NO: 7586 - RNA, 956 nt, Artificial Sequence
  mRNA Design a-3 (hSL-A100-N5) comprising derived and/or modified sequence from Pf(3D7)__XP_001351122.1__HsALB_Pf-CSP(98-272) (opt1)
aggagagggcgcuuggcuugcaaggacccugagcugcggcauugaagcacacccaacccaacucgacugaagucagccucacugaaccggaucugagaaucuucucucucugggcuugccagggcucuccgaaccuagcuagcauccucuucaauuccaacuagaaagcuuaccaugaagugggugaccuucaucagccuccuguuccuguucuccagcgccuacuccgccgacggcaaccccgacccgaacgcgaaccccaacgucgaccccaacgccaaccccaacguggacccgaacgccaaccccaacguggaccccaacgccaaccccaacgccaacccgaacgcgaaccccaacgccaaccccaacgccaaccccaacgccaacccgaacgcgaaccccaacgccaaccccaacgccaaccccaacgccaacccgaacgccaaccccaacgcgaaccccaacgccaaccccaacgccaacccgaacgccaaccccaacgccaaccccaacgcgaaccccaacgucgacccgaacgccaaccccaacgccaaccccaacgccaaccccaacgccaacccgaacgcgaaccccaacgccaaccccaacgccaacccgaacgccaaccccaacgccaaccccaacgcgaaccccaacgccaacccgaacgccaaccccaacgccaaccccaacgcgaaccccaacgccaacccgaacgccaaccccaacgccaaccccaacgccaaccccugaggacuagucccuguucccagagcccacuuuuuuuucuuuuuuugaaauaaaauagccugucuuucagaucucaaaggcucuuuucagagccaccaaaaaaaaaaaaaaaaaaaaaaaaaaaaaaaaaaaaaaaaaaaaaaaaaaaaaaaaaaaaaaaaaaaaaaaaaaaaaaaaaaaaaaaaaaaaaaaaaaaaagaauu

SEQ ID NO: 7587 - RNA, 1262 nt, Artificial Sequence
  mRNA Design a-3 (hSL-A100-N5) comprising derived and/or modified sequence from Pf(3D7)__XP_001351122.1__HsALB_Pf-CSP(98-374) (opt1)
aggagagggcgcuuggcuugcaaggacccugagcugcggcauugaagcacacccaacccaacucgacugaagucagccucacugaaccggaucugagaaucuucucucucugggcuugccagggcucuccgaaccuagcuagcauccucuucaauuccaacuagaaagcuuaccaugaagugggugaccuucaucagccuccuguuccuguucuccagcgccuacuccgccgacggcaaccccgacccgaacgcgaaccccaacgucgaccccaacgccaaccccaacguggacccgaacgccaaccccaacguggaccccaacgccaaccccaacgccaacccgaacgcgaaccccaacgccaaccccaacgccaaccccaacgccaacccgaacgcgaaccccaacgccaaccccaacgccaaccccaacgccaacccgaacgccaaccccaacgcgaaccccaacgccaaccccaacgccaacccgaacgccaaccccaacgccaaccccaacgcgaaccccaacgucgacccgaacgccaaccccaacgccaaccccaacgccaaccccaacgccaacccgaacgcgaaccccaacgccaaccccaacgccaacccgaacgccaaccccaacgccaaccccaacgcgaaccccaacgccaacccgaacgccaaccccaacgccaaccccaacgcgaaccccaacgccaacccgaacgccaaccccaacgccaaccccaacgccaaccccaacaagaacaaccaggggaacggccaggggcacaacaugccgaacgaccccaaccgcaacguggacgagaacgcgaacgccaacagcgccgugaagaacaacaacaacgaggagcccuccgacaagcacaucaaggaguaccugaacaagauccagaacagccucuccaccgaguggagccccugcuccgucacgugcggcaacgggauccaggugcggaucaagccgggcagcgccaacaagcccaaggacgagcuggacuacgccaacgacaucgagaagaagaucugcaagauggagaagugcugaggacuagucccuguucccagagcccacuuuuuuuucuuuuuuugaaauaaaauagccugucuuucagaucucaaaggcucuuuucagagccaccaaaaaaaaaaaaaaaaaaaaaaaaaaaaaaaaaaaaaaaaaaaaaaaaaaaaaaaaaaaaaaaaaaaaaaaaaaaaaaaaaaaaaaaaaaaaaaaaaaaaagaauu

SEQ ID NO: 7588 - RNA, 1331 nt, Artificial Sequence
  mRNA Design a-3 (hSL-A100-N5) comprising derived and/or modified sequence from Pf(3D7)__XP_001351122.1__HsALB_Pf-CSP(98-397) (opt1)
aggagagggcgcuuggcuugcaaggacccugagcugcggcauugaagcacacccaacccaacucgacugaagucagccucacugaaccggaucugagaaucuucucucucugggcuugccagggcucuccgaaccuagcuagcauccucuucaauuccaacuagaaagcuuaccaugaagugggugaccuucaucagccuccuguuccuguucuccagcgccuacuccgccgacggcaaccccgacccgaacgcgaaccccaacgucgaccccaacgccaaccccaacguggacccgaacgccaaccccaacguggaccccaacgccaaccccaacgccaacccgaacgcgaaccccaacgccaaccccaacgccaaccccaacgccaacccgaacgcgaaccccaacgccaaccccaacgccaaccccaacgccaacccgaacgccaaccccaacgcgaaccccaacgccaaccccaacgccaacccgaacgccaaccccaacgccaaccccaacgcgaaccccaacgucgacccgaacgccaaccccaacgccaaccccaacgccaaccccaacgccaacccgaacgcgaaccccaacgccaaccccaacgccaacccgaacgccaaccccaacgccaaccccaacgcgaaccccaacgccaacccgaacgccaaccccaacgccaaccccaacgcgaaccccaacgccaacccgaacgccaaccccaacgccaaccccaacgccaaccccaacaagaacaaccaggggaacggccaggggcacaacaugccgaacgaccccaaccgcaacguggacgagaacgcgaacgccaacagcgccgugaagaacaacaacaacgaggagcccuccgacaagcacaucaaggaguaccugaacaagauccagaacagccucuccaccgaguggagccccugcuccgucacgugcggcaacgggauccaggugcggaucaagccgggcagcgccaacaagcccaaggacgagcuggacuacgccaacgacaucgagaagaagaucugcaagauggagaagugcuccagcguguucaacgucgugaacuccagcaucggccugaucauggugcucuccuuccuguuccugaacugaggacuagucccuguucccagagcccacuuuuuuuucuuuuuuugaaauaaaauagccugucuuucagaucucaaaggcucuuuucagagccaccaaaaaaaaaaaaaaaaaaaaaaaaaaaaaaaaaaaaaaaaaaaaaaaaaaaaaaaaaaaaaaaaaaaaaaaaaaaaaaaaaaaaaaaaaaaaaaaaaaaaagaauu

SEQ ID NO: 7589 - RNA, 1658 nt, Artificial Sequence
  mRNA Design a-3 (hSL-A100-N5) comprising derived and/or modified sequence from Pf(3D7)__XP_001351122.1__HsALB_Pf-CSP(199-377)_L(PVTN)_HBsAg (opt1)
aggagagggcgcuuggcuugcaaggacccugagcugcggcauugaagcacacccaacccaacucgacugaagucagccucacugaaccggaucugagaaucuucucucucugggcuugccagggcucuccgaaccuagcuagcauccucuucaauuccaacuagaaagcuuaccaugaagugggugaccuucaucagccuccuguuccuguucuccagcgccuacuccgaccccaacgccaacccgaacgcgaaccccaacgccaaccccaacgccaaccccaacgccaacccgaacgccaaccccaacgcgaaccccaacgccaaccccaacgccaacccgaacgccaaccccaacgcgaaccccaacgccaaccccaacgccaacccgaacgccaaccccaacgccaaccccaacgcgaaccccaacgccaacccgaacgccaaccccaacaagaacaaccagggcaacgggcagggccacaacaugcccaacgaccccaaccgcaacgucgacgagaacgccaacgccaacagcgcggugaagaacaacaacaacgaggagccguccgacaagcacaucaaggaguaccugaacaagauccagaacagccucuccaccgaguggagccccugcuccgugaccugcgggaacggcauccagguccggaucaagcccgggagcgccaacaagcccaaggacgagcuggacuacgccaacgacaucgagaagaagaucugcaagauggagaagugcuccagcgugccggugaccaacauggagaacaucaccuccggcuuccugggcccccuccugguccugcaggccggguucuuccuccugacccgcauccugacgaucccccagagccucgacuccugguggaccagccugaacuuccugggcgggucccccgugugccucggccagaacagccaguccccgaccagcaaccacagccccaccuccugcccgcccaucugccccggguaccgguggaugugccugcgccgguucaucaucuuccuguucauccuccugcugugccucaucuuccugcuggugcuccuggacuaccagggcaugcugcccgucugcccccucaucccgggcagcacgaccaccaacaccgggcccugcaagacgugcaccacccccgcccagggcaacuccauguuccccagcugcugcugcaccaagccgacggacgggaacugcacgugcauccccauccccuccagcugggcguucgccaaguaccugugggagugggccuccgugcgcuucagcuggcugucccuccuggugcccuucguccagugguucgugggccugagcccgaccguguggcucuccgccaucuggaugaugugguacuggggccccagccuguacuccaucgucagccccuucaucccccugcucccgaucuucuucugccuguggguguacaucugaggacuagucccuguucccagagcccacuuuuuuuucuuuuuuugaaauaaaauagccugucuuucagaucucaaaggcucuuuucagagccaccaaaaaaaaaaaaaaaaaaaaaaaaaaaaaaaaaaaaaaaaaaaaaaaaaaaaaaaaaaaaaaaaaaaaaaaaaaaaaaaaaaaaaaaaaaaaaaaaaaaaagaauu

SEQ ID NO: 7590 - RNA, 1568 nt, Artificial Sequence
  mRNA Design a-3 (hSL-A100-N5) comprising derived and/or modified sequence from Pf(3D7)__XP_001351122.1__Pf-CSP (opt2)
aggagagggcgcuuggcuugcaaggacccugagcugcggcauugaagcacacccaacccaacucgacugaagucagccucacugaaccggaucugagaaucuucucucucugggcuugccagggcucuccgaaccuagcuagcauccucuucaauuccaacuagaaagcuuaccaugaugcgcaagcucgccauccucuccgucuccuccuuccucuucgucgaggcccucuuccaggaguaccagugcuacggcuccuccuccaacacccgcguccucaacgagcucaacuacgacaacgccggcaccaaccucuacaacgagcucgagaugaacuacuacggcaagcaggagaacugguacucccucaagaagaacucccgcucccucggcgagaacgacgacggcaacaacgaggacaacgagaagcuccgcaagcccaagcacaagaagcucaagcagcccgccgacggcaaccccgaccccaacgccaaccccaacgucgaccccaacgccaaccccaacgucgaccccaacgccaaccccaacgucgaccccaacgccaaccccaacgccaaccccaacgccaaccccaacgccaaccccaacgccaaccccaacgccaaccccaacgccaaccccaacgccaaccccaacgccaaccccaacgccaaccccaacgccaaccccaacgccaaccccaacgccaaccccaacgccaaccccaacgccaaccccaacgccaaccccaacgccaaccccaacgucgaccccaacgccaaccccaacgccaaccccaacgccaaccccaacgccaaccccaacgccaaccccaacgccaaccccaacgccaaccccaacgccaaccccaacgccaaccccaacgccaaccccaacgccaaccccaacgccaaccccaacgccaaccccaacgccaaccccaacgccaaccccaacgccaaccccaacgccaaccccaacgccaaccccaacaagaacaaccagggcaacggccagggccacaacaugcccaacgaccccaaccgcaacgucgacgagaacgccaacgccaacuccgccgucaagaacaacaacaacgaggagcccuccgacaagcacaucaaggaguaccucaacaagauccagaacucccucuccaccgaguggucccccugcuccgucaccugcggcaacggcauccagguccgcaucaagcccggcuccgccaacaagcccaaggacgagcucgacuacgccaacgacaucgagaagaagaucugcaagauggagaagugcuccuccgucuucaacgucgucaacuccuccaucggccucaucaugguccucuccuuccucuuccucaacugaggacuagucccuguucccagagcccacuuuuuuuucuuuuuuugaaauaaaauagccugucuuucagaucucaaaggcucuuuucagagccaccaaaaaaaaaaaaaaaaaaaaaaaaaaaaaaaaaaaaaaaaaaaaaaaaaaaaaaaaaaaaaaaaaaaaaaaaaaaaaaaaaaaaaaaaaaaaaaaaaaaaagaauu

SEQ ID NO: 7591 - RNA, 1499 nt, Artificial Sequence
  mRNA Design a-3 (hSL-A100-N5) comprising derived and/or modified sequence from Pf(3D7)__XP_001351122.1__Pf-CSP(1-374) (opt2)
aggagagggcgcuuggcuugcaaggacccugagcugcggcauugaagcacacccaacccaacucgacugaagucagccucacugaaccggaucugagaaucuucucucucugggcuugccagggcucuccgaaccuagcuagcauccucuucaauuccaacuagaaagcuuaccaugaugcgcaagcucgccauccucuccgucuccuccuuccucuucgucgaggcccucuuccaggaguaccagugcuacggcuccuccuccaacacccgcguccucaacgagcucaacuacgacaacgccggcaccaaccucuacaacgagcucgagaugaacuacuacggcaagcaggagaacugguacucccucaagaagaacucccgcucccucggcgagaacgacgacggcaacaacgaggacaacgagaagcuccgcaagcccaagcacaagaagcucaagcagcccgccgacggcaaccccgaccccaacgccaaccccaacgucgaccccaacgccaaccccaacgucgaccccaacgccaaccccaacgucgaccccaacgccaaccccaacgccaaccccaacgccaaccccaacgccaaccccaacgccaaccccaacgccaaccccaacgccaaccccaacgccaaccccaacgccaaccccaacgccaaccccaacgccaaccccaacgccaaccccaacgccaaccccaacgccaaccccaacgccaaccccaacgccaaccccaacgccaaccccaacgucgaccccaacgccaaccccaacgccaaccccaacgccaaccccaacgccaaccccaacgccaaccccaacgccaaccccaacgccaaccccaacgccaaccccaacgccaaccccaacgccaaccccaacgccaaccccaacgccaaccccaacgccaaccccaacgccaaccccaacgccaaccccaacgccaaccccaacgccaaccccaacgccaaccccaacaagaacaaccagggcaacggccagggccacaacaugcccaacgaccccaaccgcaacgucgacgagaacgccaacgccaacuccgccgucaagaacaacaacaacgaggagcccuccgacaagcacaucaaggaguaccucaacaagauccagaacucccucuccaccgaguggucccccugcuccgucaccugcggcaacggcauccagguccgcaucaagcccggcuccgccaacaagcccaaggacgagcucgacuacgccaacgacaucgagaagaagaucugcaagauggagaagugcugaggacuagucccuguucccagagcccacuuuuuuuucuuuuuuugaaauaaaauagccugucuuucagaucucaaaggcucuuuucagagccaccaaaaaaaaaaaaaaaaaaaaaaaaaaaaaaaaaaaaaaaaaaaaaaaaaaaaaaaaaaaaaaaaaaaaaaaaaaaaaaaaaaaaaaaaaaaaaaaaaaaaagaauu

SEQ ID NO: 7592 - RNA, 1352 nt, Artificial Sequence
  mRNA Design a-3 (hSL-A100-N5) comprising derived and/or modified sequence from Pf(3D7)__XP_001351122.1__Pf-CSP(1-325) (opt2)
aggagagggcgcuuggcuugcaaggacccugagcugcggcauugaagcacacccaacccaacucgacugaagucagccucacugaaccggaucugagaaucuucucucucugggcuugccagggcucuccgaaccuagcuagcauccucuucaauuccaacuagaaagcuuaccaugaugcgcaagcucgccauccucuccgucuccuccuuccucuucgucgaggcccucuuccaggaguaccagugcuacggcuccuccuccaacacccgcguccucaacgagcucaacuacgacaacgccggcaccaaccucuacaacgagcucgagaugaacuacuacggcaagcaggagaacugguacucccucaagaagaacucccgcucccucggcgagaacgacgacggcaacaacgaggacaacgagaagcuccgcaagcccaagcacaagaagcucaagcagcccgccgacggcaaccccgaccccaacgccaaccccaacgucgaccccaacgccaaccccaacgucgaccccaacgccaaccccaacgucgaccccaacgccaaccccaacgccaaccccaacgccaaccccaacgccaaccccaacgccaaccccaacgccaaccccaacgccaaccccaacgccaaccccaacgccaaccccaacgccaaccccaacgccaaccccaacgccaaccccaacgccaaccccaacgccaaccccaacgccaaccccaacgccaaccccaacgccaaccccaacgucgaccccaacgccaaccccaacgccaaccccaacgccaaccccaacgccaaccccaacgccaaccccaacgccaaccccaacgccaaccccaacgccaaccccaacgccaaccccaacgccaaccccaacgccaaccccaacgccaaccccaacgccaaccccaacgccaaccccaacgccaaccccaacgccaaccccaacgccaaccccaacgccaaccccaacaagaacaaccagggcaacggccagggccacaacaugcccaacgaccccaaccgcaacgucgacgagaacgccaacgccaacuccgccgucaagaacaacaacaacgaggagcccuccgacaagcacaucaaggaguaccucaacaagauccagaacugaggacuagucccuguucccagagcccacuuuuuuuucuuuuuuugaaauaaaauagccugucuuucagaucucaaaggcucuuuucagagccaccaaaaaaaaaaaaaaaaaaaaaaaaaaaaaaaaaaaaaaaaaaaaaaaaaaaaaaaaaaaaaaaaaaaaaaaaaaaaaaaaaaaaaaaaaaaaaaaaaaaaagaauu

SEQ ID NO: 7593 - RNA, 1568 nt, Artificial Sequence
  mRNA Design a-3 (hSL-A100-N5) comprising derived and/or modified sequence from Pf(3D7)__XP_001351122.1__HsALB_Pf-CSP(19-397) (opt2)
aggagagggcgcuuggcuugcaaggacccugagcugcggcauugaagcacacccaacccaacucgacugaagucagccucacugaaccggaucugagaaucuucucucucugggcuugccagggcucuccgaaccuagcuagcauccucuucaauuccaacuagaaagcuuaccaugaagugggucaccuucaucucccuccucuuccucuucuccuccgccuacucccucuuccaggaguaccagugcuacggcuccuccuccaacacccgcguccucaacgagcucaacuacgacaacgccggcaccaaccucuacaacgagcucgagaugaacuacuacggcaagcaggagaacugguacucccucaagaagaacucccgcucccucggcgagaacgacgacggcaacaacgaggacaacgagaagcuccgcaagcccaagcacaagaagcucaagcagcccgccgacggcaaccccgaccccaacgccaaccccaacgucgaccccaacgccaaccccaacgucgaccccaacgccaaccccaacgucgaccccaacgccaaccccaacgccaaccccaacgccaaccccaacgccaaccccaacgccaaccccaacgccaaccccaacgccaaccccaacgccaaccccaacgccaaccccaacgccaaccccaacgccaaccccaacgccaaccccaacgccaaccccaacgccaaccccaacgccaaccccaacgccaaccccaacgccaaccccaacgucgaccccaacgccaaccccaacgccaaccccaacgccaaccccaacgccaaccccaacgccaaccccaacgccaaccccaacgccaaccccaacgccaaccccaacgccaaccccaacgccaaccccaacgccaaccccaacgccaaccccaacgccaaccccaacgccaaccccaacgccaaccccaacgccaaccccaacgccaaccccaacgccaaccccaacaagaacaaccagggcaacggccagggccacaacaugcccaacgaccccaaccgcaacgucgacgagaacgccaacgccaacuccgccgucaagaacaacaacaacgaggagcccuccgacaagcacaucaaggaguaccucaacaagauccagaacucccucuccaccgaguggucccccugcuccgucaccugcggcaacggcauccagguccgcaucaagcccggcuccgccaacaagcccaaggacgagcucgacuacgccaacgacaucgagaagaagaucugcaagauggagaagugcuccuccgucuucaacgucgucaacuccuccaucggccucaucaugguccucuccuuccucuuccucaacugaggacuagucccuguucccagagcccacuuuuuuuucuuuuuuugaaauaaaauagccugucuuucagaucucaaaggcucuuuucagagccaccaaaaaaaaaaaaaaaaaaaaaaaaaaaaaaaaaaaaaaaaaaaaaaaaaaaaaaaaaaaaaaaaaaaaaaaaaaaaaaaaaaaaaaaaaaaaaaaaaaaaagaauu

SEQ ID NO: 7594 - RNA, 1586 nt, Artificial Sequence
  mRNA Design a-3 (hSL-A100-N5) comprising derived and/or modified sequence from Pf(3D7)__XP_001351122.1__HsIns-iso1_Pf-CSP(19-397) (opt2)
aggagagggcgcuuggcuugcaaggacccugagcugcggcauugaagcacacccaacccaacucgacugaagucagccucacugaaccggaucugagaaucuucucucucugggcuugccagggcucuccgaaccuagcuagcauccucuucaauuccaacuagaaagcuuaccauggcccucuggaugcgccuccucccccuccucgcccuccucgcccucuggggccccgaccccgccgccgcccucuuccaggaguaccagugcuacggcuccuccuccaacacccgcguccucaacgagcucaacuacgacaacgccggcaccaaccucuacaacgagcucgagaugaacuacuacggcaagcaggagaacugguacucccucaagaagaacucccgcucccucggcgagaacgacgacggcaacaacgaggacaacgagaagcuccgcaagcccaagcacaagaagcucaagcagcccgccgacggcaaccccgaccccaacgccaaccccaacgucgaccccaacgccaaccccaacgucgaccccaacgccaaccccaacgucgaccccaacgccaaccccaacgccaaccccaacgccaaccccaacgccaaccccaacgccaaccccaacgccaaccccaacgccaaccccaacgccaaccccaacgccaaccccaacgccaaccccaacgccaaccccaacgccaaccccaacgccaaccccaacgccaaccccaacgccaaccccaacgccaaccccaacgccaaccccaacgucgaccccaacgccaaccccaacgccaaccccaacgccaaccccaacgccaaccccaacgccaaccccaacgccaaccccaacgccaaccccaacgccaaccccaacgccaaccccaacgccaaccccaacgccaaccccaacgccaaccccaacgccaaccccaacgccaaccccaacgccaaccccaacgccaaccccaacgccaaccccaacgccaaccccaacaagaacaaccagggcaacggccagggccacaacaugcccaacgaccccaaccgcaacgucgacgagaacgccaacgccaacuccgccgucaagaacaacaacaacgaggagcccuccgacaagcacaucaaggaguaccucaacaagauccagaacucccucuccaccgaguggucccccugcuccgucaccugcggcaacggcauccagguccgcaucaagcccggcuccgccaacaagcccaaggacgagcucgacuacgccaacgacaucgagaagaagaucugcaagauggagaagugcuccuccgucuucaacgucgucaacuccuccaucggccucaucaugguccucuccuuccucuuccucaacugaggacuagucccuguucccagagcccacuuuuuuuucuuuuuuugaaauaaaauagccugucuuucagaucucaaaggcucuuuucagagccaccaaaaaaaaaaaaaaaaaaaaaaaaaaaaaaaaaaaaaaaaaaaaaaaaaaaaaaaaaaaaaaaaaaaaaaaaaaaaaaaaaaaaaaaaaaaaaaaaaaaaagaauu

SEQ ID NO: 7595 - RNA, 1565 nt, Artificial Sequence
  mRNA Design a-3 (hSL-A100-N5) comprising derived and/or modified sequence from Pf(3D7)__XP_001351122.1__HsSPARC_Pf-CSP(19-397) (opt2)
aggagagggcgcuuggcuugcaaggacccugagcugcggcauugaagcacacccaacccaacucgacugaagucagccucacugaaccggaucugagaaucuucucucucugggcuugccagggcucuccgaaccuagcuagcauccucuucaauuccaacuagaaagcuuaccaugcgcgccuggaucuucuuccuccucugccucgccggccgcgcccucgcccucuuccaggaguaccagugcuacggcuccuccuccaacacccgcguccucaacgagcucaacuacgacaacgccggcaccaaccucuacaacgagcucgagaugaacuacuacggcaagcaggagaacugguacucccucaagaagaacucccgcucccucggcgagaacgacgacggcaacaacgaggacaacgagaagcuccgcaagcccaagcacaagaagcucaagcagcccgccgacggcaaccccgaccccaacgccaaccccaacgucgaccccaacgccaaccccaacgucgaccccaacgccaaccccaacgucgaccccaacgccaaccccaacgccaaccccaacgccaaccccaacgccaaccccaacgccaaccccaacgccaaccccaacgccaaccccaacgccaaccccaacgccaaccccaacgccaaccccaacgccaaccccaacgccaaccccaacgccaaccccaacgccaaccccaacgccaaccccaacgccaaccccaacgccaaccccaacgucgaccccaacgccaaccccaacgccaaccccaacgccaaccccaacgccaaccccaacgccaaccccaacgccaaccccaacgccaaccccaacgccaaccccaacgccaaccccaacgccaaccccaacgccaaccccaacgccaaccccaacgccaaccccaacgccaaccccaacgccaaccccaacgccaaccccaacgccaaccccaacgccaaccccaacaagaacaaccagggcaacggccagggccacaacaugcccaacgaccccaaccgcaacgucgacgagaacgccaacgccaacuccgccgucaagaacaacaacaacgaggagcccuccgacaagcacaucaaggaguaccucaacaagauccagaacucccucuccaccgaguggucccccugcuccgucaccugcggcaacggcauccagguccgcaucaagcccggcuccgccaacaagcccaaggacgagcucgacuacgccaacgacaucgagaagaagaucugcaagauggagaagugcuccuccgucuucaacgucgucaacuccuccaucggccucaucaugguccucuccuuccucuuccucaacugaggacuagucccuguucccagagcccacuuuuuuuucuuuuuuugaaauaaaauagccugucuuucagaucucaaaggcucuuuucagagccaccaaaaaaaaaaaaaaaaaaaaaaaaaaaaaaaaaaaaaaaaaaaaaaaaaaaaaaaaaaaaaaaaaaaaaaaaaaaaaaaaaaaaaaaaaaaaaaaaaaaaagaauu

SEQ ID NO: 7596 - RNA, 1568 nt, Artificial Sequence
  mRNA Design a-3 (hSL-A100-N5) comprising derived and/or modified sequence from Pf(3D7)__XP_001351122.1__IgE_Pf-CSP(19-397) (opt2)
aggagagggcgcuuggcuugcaaggacccugagcugcggcauugaagcacacccaacccaacucgacugaagucagccucacugaaccggaucugagaaucuucucucucugggcuugccagggcucuccgaaccuagcuagcauccucuucaauuccaacuagaaagcuuaccauggacuggaccuggauccucuuccucgucgccgccgccacccgcguccacucccucuuccaggaguaccagugcuacggcuccuccuccaacacccgcguccucaacgagcucaacuacgacaacgccggcaccaaccucuacaacgagcucgagaugaacuacuacggcaagcaggagaacugguacucccucaagaagaacucccgcucccucggcgagaacgacgacggcaacaacgaggacaacgagaagcuccgcaagcccaagcacaagaagcucaagcagcccgccgacggcaaccccgaccccaacgccaaccccaacgucgaccccaacgccaaccccaacgucgaccccaacgccaaccccaacgucgaccccaacgccaaccccaacgccaaccccaacgccaaccccaacgccaaccccaacgccaaccccaacgccaaccccaacgccaaccccaacgccaaccccaacgccaaccccaacgccaaccccaacgccaaccccaacgccaaccccaacgccaaccccaacgccaaccccaacgccaaccccaacgccaaccccaacgccaaccccaacgucgaccccaacgccaaccccaacgccaaccccaacgccaaccccaacgccaaccccaacgccaaccccaacgccaaccccaacgccaaccccaacgccaaccccaacgccaaccccaacgccaaccccaacgccaaccccaacgccaaccccaacgccaaccccaacgccaaccccaacgccaaccccaacgccaaccccaacgccaaccccaacgccaaccccaacaagaacaaccagggcaacggccagggccacaacaugcccaacgaccccaaccgcaacgucgacgagaacgccaacgccaacuccgccgucaagaacaacaacaacgaggagcccuccgacaagcacaucaaggaguaccucaacaagauccagaacucccucuccaccgaguggucccccugcuccgucaccugcggcaacggcauccagguccgcaucaagcccggcuccgccaacaagcccaaggacgagcucgacuacgccaacgacaucgagaagaagaucugcaagauggagaagugcuccuccgucuucaacgucgucaacuccuccaucggccucaucaugguccucuccuuccucuuccucaacugaggacuagucccuguucccagagcccacuuuuuuuucuuuuuuugaaauaaaauagccugucuuucagaucucaaaggcucuuuucagagccaccaaaaaaaaaaaaaaaaaaaaaaaaaaaaaaaaaaaaaaaaaaaaaaaaaaaaaaaaaaaaaaaaaaaaaaaaaaaaaaaaaaaaaaaaaaaaaaaaaaaaagaauu

SEQ ID NO: 7597 - RNA, 1733 nt, Artificial Sequence
  mRNA Design a-3 (hSL-A100-N5) comprising derived and/or modified sequence from Pf(3D7)__XP_001351122.1__Pf-CSP_L(G4SG4)_TM domain HA (opt2)
aggagagggcgcuuggcuugcaaggacccugagcugcggcauugaagcacacccaacccaacucgacugaagucagccucacugaaccggaucugagaaucuucucucucugggcuugccagggcucuccgaaccuagcuagcauccucuucaauuccaacuagaaagcuuaccaugaugcgcaagcucgccauccucuccgucuccuccuuccucuucgucgaggcccucuuccaggaguaccagugcuacggcuccuccuccaacacccgcguccucaacgagcucaacuacgacaacgccggcaccaaccucuacaacgagcucgagaugaacuacuacggcaagcaggagaacugguacucccucaagaagaacucccgcucccucggcgagaacgacgacggcaacaacgaggacaacgagaagcuccgcaagcccaagcacaagaagcucaagcagcccgccgacggcaaccccgaccccaacgccaaccccaacgucgaccccaacgccaaccccaacgucgaccccaacgccaaccccaacgucgaccccaacgccaaccccaacgccaaccccaacgccaaccccaacgccaaccccaacgccaaccccaacgccaaccccaacgccaaccccaacgccaaccccaacgccaaccccaacgccaaccccaacgccaaccccaacgccaaccccaacgccaaccccaacgccaaccccaacgccaaccccaacgccaaccccaacgccaaccccaacgucgaccccaacgccaaccccaacgccaaccccaacgccaaccccaacgccaaccccaacgccaaccccaacgccaaccccaacgccaaccccaacgccaaccccaacgccaaccccaacgccaaccccaacgccaaccccaacgccaaccccaacgccaaccccaacgccaaccccaacgccaaccccaacgccaaccccaacgccaaccccaacgccaaccccaacaagaacaaccagggcaacggccagggccacaacaugcccaacgaccccaaccgcaacgucgacgagaacgccaacgccaacuccgccgucaagaacaacaacaacgaggagcccuccgacaagcacaucaaggaguaccucaacaagauccagaacucccucuccaccgaguggucccccugcuccgucaccugcggcaacggcauccagguccgcaucaagcccggcuccgccaacaagcccaaggacgagcucgacuacgccaacgacaucgagaagaagaucugcaagauggagaagugcuccuccgucuucaacgucgucaacuccuccaucggccucaucaugguccucuccuuccucuuccucaacggcggcggcggcuccggcggcggcggcaagcucgaguccacccgcaucuaccagauccucgccaucuacuccaccgucgccuccucccucguccucgucgucucccucggcgccaucuccuucuggaugugcuccaacggcucccuccagugccgcaucugcaucugaggacuagucccuguucccagagcccacuuuuuuuucuuuuuuugaaauaaaauagccugucuuucagaucucaaaggcucuuuucagagccaccaaaaaaaaaaaaaaaaaaaaaaaaaaaaaaaaaaaaaaaaaaaaaaaaaaaaaaaaaaaaaaaaaaaaaaaaaaaaaaaaaaaaaaaaaaaaaaaaaaaaagaauu

SEQ ID NO: 7598 - RNA, 1607 nt, Artificial Sequence
  mRNA Design a-3 (hSL-A100-N5) comprising derived and/or modified sequence from Pf(3D7)__XP_001351122.1__Pf-CSP(199-377)_L(PVTN)_HBsAg (opt2)
aggagagggcgcuuggcuugcaaggacccugagcugcggcauugaagcacacccaacccaacucgacugaagucagccucacugaaccggaucugagaaucuucucucucugggcuugccagggcucuccgaaccuagcuagcauccucuucaauuccaacuagaaagcuuaccauggaccccaacgccaaccccaacgccaaccccaacgccaaccccaacgccaaccccaacgccaaccccaacgccaaccccaacgccaaccccaacgccaaccccaacgccaaccccaacgccaaccccaacgccaaccccaacgccaaccccaacgccaaccccaacgccaaccccaacgccaaccccaacgccaaccccaacgccaaccccaacgccaaccccaacaagaacaaccagggcaacggccagggccacaacaugcccaacgaccccaaccgcaacgucgacgagaacgccaacgccaacuccgccgucaagaacaacaacaacgaggagcccuccgacaagcacaucaaggaguaccucaacaagauccagaacucccucuccaccgaguggucccccugcuccgucaccugcggcaacggcauccagguccgcaucaagcccggcuccgccaacaagcccaaggacgagcucgacuacgccaacgacaucgagaagaagaucugcaagauggagaagugcuccuccguccccgucaccaacauggagaacaucaccuccggcuuccucggcccccuccucguccuccaggccggcuucuuccuccucacccgcauccucaccaucccccagucccucgacuccugguggaccucccucaacuuccucggcggcucccccgucugccucggccagaacucccagucccccaccuccaaccacucccccaccuccugcccccccaucugccccggcuaccgcuggaugugccuccgccgcuucaucaucuuccucuucauccuccuccucugccucaucuuccuccucguccuccucgacuaccagggcaugcuccccgucugcccccucauccccggcuccaccaccaccaacaccggccccugcaagaccugcaccacccccgcccagggcaacuccauguuccccuccugcugcugcaccaagcccaccgacggcaacugcaccugcauccccauccccuccuccugggccuucgccaaguaccucugggagugggccuccguccgcuucuccuggcucucccuccucguccccuucguccagugguucgucggccucucccccaccgucuggcucuccgccaucuggaugaugugguacuggggccccucccucuacuccaucgucucccccuucaucccccuccuccccaucuucuucugccucugggucuacaucugaggacuagucccuguucccagagcccacuuuuuuuucuuuuuuugaaauaaaauagccugucuuucagaucucaaaggcucuuuucagagccaccaaaaaaaaaaaaaaaaaaaaaaaaaaaaaaaaaaaaaaaaaaaaaaaaaaaaaaaaaaaaaaaaaaaaaaaaaaaaaaaaaaaaaaaaaaaaaaaaaaaaagaauu

SEQ ID NO: 7599 - RNA, 1649 nt, Artificial Sequence
  mRNA Design a-3 (hSL-A100-N5) comprising derived and/or modified sequence from Pf(3D7)__XP_001351122.1__Pf-CSP(199-387)_L(PVTN)_HBsAg (opt2)
aggagagggcgcuuggcuugcaaggacccugagcugcggcauugaagcacacccaacccaacucgacugaagucagccucacugaaccggaucugagaaucuucucucucugggcuugccagggcucuccgaaccuagcuagcauccucuucaauuccaacuagaaagcuuaccaugauggcccccgaccccaacgccaaccccaacgccaaccccaacgccaaccccaacgccaaccccaacgccaaccccaacgccaaccccaacgccaaccccaacgccaaccccaacgccaaccccaacgccaaccccaacgccaaccccaacgccaaccccaacgccaaccccaacgccaaccccaacgccaaccccaacgccaaccccaacgccaaccccaacgccaaccccaacaagaacaaccagggcaacggccagggccacaacaugcccaacgaccccaaccgcaacgucgacgagaacgccaacgccaacuccgccgucaagaacaacaacaacgaggagcccuccgacaagcacaucaaggaguaccucaacaagauccagaacucccucuccaccgaguggucccccugcuccgucaccugcggcaacggcauccagguccgcaucaagcccggcuccgccaacaagcccaaggacgagcucgacuacgccaacgacaucgagaagaagaucugcaagauggagaagugcuccuccgucuucaacgucgucaacuccuccaucggccucggccccgucaccaacauggagaacaucaccuccggcuuccucggcccccuccucguccuccaggccggcuucuuccuccucacccgcauccucaccaucccccagucccucgacuccugguggaccucccucaacuuccucggcggcucccccgucugccucggccagaacucccagucccccaccuccaaccacucccccaccuccugcccccccaucugccccggcuaccgcuggaugugccuccgccgcuucaucaucuuccucuucauccuccuccucugccucaucuuccuccucguccuccucgacuaccagggcaugcuccccgucugcccccucauccccggcuccaccaccaccaacaccggccccugcaagaccugcaccacccccgcccagggcaacuccauguuccccuccugcugcugcaccaagcccaccgacggcaacugcaccugcauccccauccccuccuccugggccuucgccaaguaccucugggagugggccuccguccgcuucuccuggcucucccuccucguccccuucguccagugguucgucggccucucccccaccgucuggcucuccgccaucuggaugaugugguacuggggccccucccucuacuccaucgucucccccuucaucccccuccuccccaucuucuucugccucugggucuacaucugaggacuagucccuguucccagagcccacuuuuuuuucuuuuuuugaaauaaaauagccugucuuucagaucucaaaggcucuuuucagagccaccaaaaaaaaaaaaaaaaaaaaaaaaaaaaaaaaaaaaaaaaaaaaaaaaaaaaaaaaaaaaaaaaaaaaaaaaaaaaaaaaaaaaaaaaaaaaaaaaaaaaagaauu

SEQ ID NO: 7600 - RNA, 833 nt, Artificial Sequence
  mRNA Design a-3 (hSL-A100-N5) comprising derived and/or modified sequence from Pf(3D7)__XP_001351122.1__HsALB_Pf-CSP(19-152) (opt2)
aggagagggcgcuuggcuugcaaggacccugagcugcggcauugaagcacacccaacccaacucgacugaagucagccucacugaaccggaucugagaaucuucucucucugggcuugccagggcucuccgaaccuagcuagcauccucuucaauuccaacuagaaagcuuaccaugaagugggucaccuucaucucccuccucuuccucuucuccuccgccuacucccucuuccaggaguaccagugcuacggcuccuccuccaacacccgcguccucaacgagcucaacuacgacaacgccggcaccaaccucuacaacgagcucgagaugaacuacuacggcaagcaggagaacugguacucccucaagaagaacucccgcucccucggcgagaacgacgacggcaacaacgaggacaacgagaagcuccgcaagcccaagcacaagaagcucaagcagcccgccgacggcaaccccgaccccaacgccaaccccaacgucgaccccaacgccaaccccaacgucgaccccaacgccaaccccaacgucgaccccaacgccaaccccaacgccaaccccaacgccaaccccaacgccaaccccaacgccaaccccaacgccaaccccugaggacuagucccuguucccagagcccacuuuuuuuucuuuuuuugaaauaaaauagccugucuuucagaucucaaaggcucuuuucagagccaccaaaaaaaaaaaaaaaaaaaaaaaaaaaaaaaaaaaaaaaaaaaaaaaaaaaaaaaaaaaaaaaaaaaaaaaaaaaaaaaaaaaaaaaaaaaaaaaaaaaaagaauu

SEQ ID NO: 7601 - RNA, 953 nt, Artificial Sequence
  mRNA Design a-3 (hSL-A100-N5) comprising derived and/or modified sequence from Pf(3D7)__XP_001351122.1__HsALB_Pf-CSP(19-192) (opt2)
aggagagggcgcuuggcuugcaaggacccugagcugcggcauugaagcacacccaacccaacucgacugaagucagccucacugaaccggaucugagaaucuucucucucugggcuugccagggcucuccgaaccuagcuagcauccucuucaauuccaacuagaaagcuuaccaugaagugggucaccuucaucucccuccucuuccucuucuccuccgccuacucccucuuccaggaguaccagugcuacggcuccuccuccaacacccgcguccucaacgagcucaacuacgacaacgccggcaccaaccucuacaacgagcucgagaugaacuacuacggcaagcaggagaacugguacucccucaagaagaacucccgcucccucggcgagaacgacgacggcaacaacgaggacaacgagaagcuccgcaagcccaagcacaagaagcucaagcagcccgccgacggcaaccccgaccccaacgccaaccccaacgucgaccccaacgccaaccccaacgucgaccccaacgccaaccccaacgucgaccccaacgccaaccccaacgccaaccccaacgccaaccccaacgccaaccccaacgccaaccccaacgccaaccccaacgccaaccccaacgccaaccccaacgccaaccccaacgccaaccccaacgccaaccccaacgccaaccccaacgccaaccccaacgccaaccccaacgccaaccccaacgccaaccccugaggacuagucccuguucccagagcccacuuuuuuuucuuuuuuugaaauaaaauagccugucuuucagaucucaaaggcucuuuucagagccaccaaaaaaaaaaaaaaaaaaaaaaaaaaaaaaaaaaaaaaaaaaaaaaaaaaaaaaaaaaaaaaaaaaaaaaaaaaaaaaaaaaaaaaaaaaaaaaaaaaaaagaauu

SEQ ID NO: 7602 - RNA, 1193 nt, Artificial Sequence
  mRNA Design a-3 (hSL-A100-N5) comprising derived and/or modified sequence from Pf(3D7)__XP_001351122.1__HsALB_Pf-CSP(19-272) (opt2)
aggagagggcgcuuggcuugcaaggacccugagcugcggcauugaagcacacccaacccaacucgacugaagucagccucacugaaccggaucugagaaucuucucucucugggcuugccagggcucuccgaaccuagcuagcauccucuucaauuccaacuagaaagcuuaccaugaagugggucaccuucaucucccuccucuuccucuucuccuccgccuacucccucuuccaggaguaccagugcuacggcuccuccuccaacacccgcguccucaacgagcucaacuacgacaacgccggcaccaaccucuacaacgagcucgagaugaacuacuacggcaagcaggagaacugguacucccucaagaagaacucccgcucccucggcgagaacgacgacggcaacaacgaggacaacgagaagcuccgcaagcccaagcacaagaagcucaagcagcccgccgacggcaaccccgaccccaacgccaaccccaacgucgaccccaacgccaaccccaacgucgaccccaacgccaaccccaacgucgaccccaacgccaaccccaacgccaaccccaacgccaaccccaacgccaaccccaacgccaaccccaacgccaaccccaacgccaaccccaacgccaaccccaacgccaaccccaacgccaaccccaacgccaaccccaacgccaaccccaacgccaaccccaacgccaaccccaacgccaaccccaacgccaaccccaacgccaaccccaacgucgaccccaacgccaaccccaacgccaaccccaacgccaaccccaacgccaaccccaacgccaaccccaacgccaaccccaacgccaaccccaacgccaaccccaacgccaaccccaacgccaaccccaacgccaaccccaacgccaaccccaacgccaaccccaacgccaaccccaacgccaaccccaacgccaaccccaacgccaaccccaacgccaaccccugaggacuagucccuguucccagagcccacuuuuuuuucuuuuuuugaaauaaaauagccugucuuucagaucucaaaggcucuuuucagagccaccaaaaaaaaaaaaaaaaaaaaaaaaaaaaaaaaaaaaaaaaaaaaaaaaaaaaaaaaaaaaaaaaaaaaaaaaaaaaaaaaaaaaaaaaaaaaaaaaaaaaagaauu

SEQ ID NO: 7603 - RNA, 1355 nt, Artificial Sequence
  mRNA Design a-3 (hSL-A100-N5) comprising derived and/or modified sequence from Pf(3D7)__XP_001351122.1__HsALB_Pf-CSP(19-272)_L(AAY)_Pf-CSP(310-3 27)_L(AAY)_Pf-CSP(346-375) (opt2)
aggagagggcgcuuggcuugcaaggacccugagcugcggcauugaagcacacccaacccaacucgacugaagucagccucacugaaccggaucugagaaucuucucucucugggcuugccagggcucuccgaaccuagcuagcauccucuucaauuccaacuagaaagcuuaccaugaagugggucaccuucaucucccuccucuuccucuucuccuccgccuacucccucuuccaggaguaccagugcuacggcuccuccuccaacacccgcguccucaacgagcucaacuacgacaacgccggcaccaaccucuacaacgagcucgagaugaacuacuacggcaagcaggagaacugguacucccucaagaagaacucccgcucccucggcgagaacgacgacggcaacaacgaggacaacgagaagcuccgcaagcccaagcacaagaagcucaagcagcccgccgacggcaaccccgaccccaacgccaaccccaacgucgaccccaacgccaaccccaacgucgaccccaacgccaaccccaacgucgaccccaacgccaaccccaacgccaaccccaacgccaaccccaacgccaaccccaacgccaaccccaacgccaaccccaacgccaaccccaacgccaaccccaacgccaaccccaacgccaaccccaacgccaaccccaacgccaaccccaacgccaaccccaacgccaaccccaacgccaaccccaacgccaaccccaacgccaaccccaacgucgaccccaacgccaaccccaacgccaaccccaacgccaaccccaacgccaaccccaacgccaaccccaacgccaaccccaacgccaaccccaacgccaaccccaacgccaaccccaacgccaaccccaacgccaaccccaacgccaaccccaacgccaaccccaacgccaaccccaacgccaaccccaacgccaaccccaacgccaaccccaacgccaaccccgccgccuacgagcccuccgacaagcacaucaaggaguaccucaacaagauccagaacucccucgccgccuacaucaagcccggcuccgccaacaagcccaaggacgagcucgacuacgccaacgacaucgagaagaagaucugcaagauggagaagugcuccugaggacuagucccuguucccagagcccacuuuuuuuucuuuuuuugaaauaaaauagccugucuuucagaucucaaaggcucuuuucagagccaccaaaaaaaaaaaaaaaaaaaaaaaaaaaaaaaaaaaaaaaaaaaaaaaaaaaaaaaaaaaaaaaaaaaaaaaaaaaaaaaaaaaaaaaaaaaaaaaaaaaaagaauu

SEQ ID NO: 7604 - RNA, 1316 nt, Artificial Sequence
  mRNA Design a-3 (hSL-A100-N5) comprising derived and/or modified sequence from Pf(3D7)__XP_001351122.1__HsALB_Pf-CSP(19-272)_L(AAY)_Pf-CSP(346-3 65)_L(AAY)_P2 (opt2)
aggagagggcgcuuggcuugcaaggacccugagcugcggcauugaagcacacccaacccaacucgacugaagucagccucacugaaccggaucugagaaucuucucucucugggcuugccagggcucuccgaaccuagcuagcauccucuucaauuccaacuagaaagcuuaccaugaagugggucaccuucaucucccuccucuuccucuucuccuccgccuacucccucuuccaggaguaccagugcuacggcuccuccuccaacacccgcguccucaacgagcucaacuacgacaacgccggcaccaaccucuacaacgagcucgagaugaacuacuacggcaagcaggagaacugguacucccucaagaagaacucccgcucccucggcgagaacgacgacggcaacaacgaggacaacgagaagcuccgcaagcccaagcacaagaagcucaagcagcccgccgacggcaaccccgaccccaacgccaaccccaacgucgaccccaacgccaaccccaacgucgaccccaacgccaaccccaacgucgaccccaacgccaaccccaacgccaaccccaacgccaaccccaacgccaaccccaacgccaaccccaacgccaaccccaacgccaaccccaacgccaaccccaacgccaaccccaacgccaaccccaacgccaaccccaacgccaaccccaacgccaaccccaacgccaaccccaacgccaaccccaacgccaaccccaacgccaaccccaacgucgaccccaacgccaaccccaacgccaaccccaacgccaaccccaacgccaaccccaacgccaaccccaacgccaaccccaacgccaaccccaacgccaaccccaacgccaaccccaacgccaaccccaacgccaaccccaacgccaaccccaacgccaaccccaacgccaaccccaacgccaaccccaacgccaaccccaacgccaaccccaacgccaaccccgccgccuacaucaagcccggcuccgccaacaagcccaaggacgagcucgacuacgccaacgacaucgaggccgccuaccaguacaucaaggccaacuccaaguucaucggcaucaccgagcucugaggacuagucccuguucccagagcccacuuuuuuuucuuuuuuugaaauaaaauagccugucuuucagaucucaaaggcucuuuucagagccaccaaaaaaaaaaaaaaaaaaaaaaaaaaaaaaaaaaaaaaaaaaaaaaaaaaaaaaaaaaaaaaaaaaaaaaaaaaaaaaaaaaaaaaaaaaaaaaaaaaaaagaauu

SEQ ID NO: 7605 - RNA, 1310 nt, Artificial Sequence
  mRNA Design a-3 (hSL-A100-N5) comprising derived and/or modified sequence from Pf(3D7)__XP_001351122.1__HsALB_Pf-CSP(19-272)_L(AAY)_Pf-CSP(346-3 65)_L(AAY)_PADRE (opt2)
aggagagggcgcuuggcuugcaaggacccugagcugcggcauugaagcacacccaacccaacucgacugaagucagccucacugaaccggaucugagaaucuucucucucugggcuugccagggcucuccgaaccuagcuagcauccucuucaauuccaacuagaaagcuuaccaugaagugggucaccuucaucucccuccucuuccucuucuccuccgccuacucccucuuccaggaguaccagugcuacggcuccuccuccaacacccgcguccucaacgagcucaacuacgacaacgccggcaccaaccucuacaacgagcucgagaugaacuacuacggcaagcaggagaacugguacucccucaagaagaacucccgcucccucggcgagaacgacgacggcaacaacgaggacaacgagaagcuccgcaagcccaagcacaagaagcucaagcagcccgccgacggcaaccccgaccccaacgccaaccccaacgucgaccccaacgccaaccccaacgucgaccccaacgccaaccccaacgucgaccccaacgccaaccccaacgccaaccccaacgccaaccccaacgccaaccccaacgccaaccccaacgccaaccccaacgccaaccccaacgccaaccccaacgccaaccccaacgccaaccccaacgccaaccccaacgccaaccccaacgccaaccccaacgccaaccccaacgccaaccccaacgccaaccccaacgccaaccccaacgucgaccccaacgccaaccccaacgccaaccccaacgccaaccccaacgccaaccccaacgccaaccccaacgccaaccccaacgccaaccccaacgccaaccccaacgccaaccccaacgccaaccccaacgccaaccccaacgccaaccccaacgccaaccccaacgccaaccccaacgccaaccccaacgccaaccccaacgccaaccccaacgccaaccccgccgccuacaucaagcccggcuccgccaacaagcccaaggacgagcucgacuacgccaacgacaucgaggccgccuacgccaaguucgucgccgccuggacccucaaggccgccgccugaggacuagucccuguucccagagcccacuuuuuuuucuuuuuuugaaauaaaauagccugucuuucagaucucaaaggcucuuuucagagccaccaaaaaaaaaaaaaaaaaaaaaaaaaaaaaaaaaaaaaaaaaaaaaaaaaaaaaaaaaaaaaaaaaaaaaaaaaaaaaaaaaaaaaaaaaaaaaaaaaaaaagaauu

SEQ ID NO: 7606 - RNA, 1367 nt, Artificial Sequence
  mRNA Design a-3 (hSL-A100-N5) comprising derived and/or modified sequence from Pf(3D7)__XP_001351122.1__HsALB_Pf-CSP(19-272)_L(G4S)_Pf-CSP(310-3 27)_L(G4S)_Pf-CSP(346-375) (opt2)
aggagagggcgcuuggcuugcaaggacccugagcugcggcauugaagcacacccaacccaacucgacugaagucagccucacugaaccggaucugagaaucuucucucucugggcuugccagggcucuccgaaccuagcuagcauccucuucaauuccaacuagaaagcuuaccaugaagugggucaccuucaucucccuccucuuccucuucuccuccgccuacucccucuuccaggaguaccagugcuacggcuccuccuccaacacccgcguccucaacgagcucaacuacgacaacgccggcaccaaccucuacaacgagcucgagaugaacuacuacggcaagcaggagaacugguacucccucaagaagaacucccgcucccucggcgagaacgacgacggcaacaacgaggacaacgagaagcuccgcaagcccaagcacaagaagcucaagcagcccgccgacggcaaccccgaccccaacgccaaccccaacgucgaccccaacgccaaccccaacgucgaccccaacgccaaccccaacgucgaccccaacgccaaccccaacgccaaccccaacgccaaccccaacgccaaccccaacgccaaccccaacgccaaccccaacgccaaccccaacgccaaccccaacgccaaccccaacgccaaccccaacgccaaccccaacgccaaccccaacgccaaccccaacgccaaccccaacgccaaccccaacgccaaccccaacgccaaccccaacgucgaccccaacgccaaccccaacgccaaccccaacgccaaccccaacgccaaccccaacgccaaccccaacgccaaccccaacgccaaccccaacgccaaccccaacgccaaccccaacgccaaccccaacgccaaccccaacgccaaccccaacgccaaccccaacgccaaccccaacgccaaccccaacgccaaccccaacgccaaccccaacgccaaccccggcggcggcggcuccgagcccuccgacaagcacaucaaggaguaccucaacaagauccagaacucccucggcggcggcggcuccaucaagcccggcuccgccaacaagcccaaggacgagcucgacuacgccaacgacaucgagaagaagaucugcaagauggagaagugcuccugaggacuagucccuguucccagagcccacuuuuuuuucuuuuuuugaaauaaaauagccugucuuucagaucucaaaggcucuuuucagagccaccaaaaaaaaaaaaaaaaaaaaaaaaaaaaaaaaaaaaaaaaaaaaaaaaaaaaaaaaaaaaaaaaaaaaaaaaaaaaaaaaaaaaaaaaaaaaaaaaaaaaagaauu

SEQ ID NO: 7607 - RNA, 1352 nt, Artificial Sequence
  mRNA Design a-3 (hSL-A100-N5) comprising derived and/or modified sequence from Pf(3D7)__XP_001351122.1__HsALB_Pf-CSP(19-272)_L(G4S)_Pf-CSP(310-3 27)_Pf-CSP(346-375) (opt2)
aggagagggcgcuuggcuugcaaggacccugagcugcggcauugaagcacacccaacccaacucgacugaagucagccucacugaaccggaucugagaaucuucucucucugggcuugccagggcucuccgaaccuagcuagcauccucuucaauuccaacuagaaagcuuaccaugaagugggucaccuucaucucccuccucuuccucuucuccuccgccuacucccucuuccaggaguaccagugcuacggcuccuccuccaacacccgcguccucaacgagcucaacuacgacaacgccggcaccaaccucuacaacgagcucgagaugaacuacuacggcaagcaggagaacugguacucccucaagaagaacucccgcucccucggcgagaacgacgacggcaacaacgaggacaacgagaagcuccgcaagcccaagcacaagaagcucaagcagcccgccgacggcaaccccgaccccaacgccaaccccaacgucgaccccaacgccaaccccaacgucgaccccaacgccaaccccaacgucgaccccaacgccaaccccaacgccaaccccaacgccaaccccaacgccaaccccaacgccaaccccaacgccaaccccaacgccaaccccaacgccaaccccaacgccaaccccaacgccaaccccaacgccaaccccaacgccaaccccaacgccaaccccaacgccaaccccaacgccaaccccaacgccaaccccaacgccaaccccaacgucgaccccaacgccaaccccaacgccaaccccaacgccaaccccaacgccaaccccaacgccaaccccaacgccaaccccaacgccaaccccaacgccaaccccaacgccaaccccaacgccaaccccaacgccaaccccaacgccaaccccaacgccaaccccaacgccaaccccaacgccaaccccaacgccaaccccaacgccaaccccaacgccaaccccggcggcggcggcuccgagcccuccgacaagcacaucaaggaguaccucaacaagauccagaacucccucaucaagcccggcuccgccaacaagcccaaggacgagcucgacuacgccaacgacaucgagaagaagaucugcaagauggagaagugcuccugaggacuagucccuguucccagagcccacuuuuuuuucuuuuuuugaaauaaaauagccugucuuucagaucucaaaggcucuuuucagagccaccaaaaaaaaaaaaaaaaaaaaaaaaaaaaaaaaaaaaaaaaaaaaaaaaaaaaaaaaaaaaaaaaaaaaaaaaaaaaaaaaaaaaaaaaaaaaaaaaaaaaagaauu

SEQ ID NO: 7608 - RNA, 1352 nt, Artificial Sequence
  mRNA Design a-3 (hSL-A100-N5) comprising derived and/or modified sequence from Pf(3D7)__XP_001351122.1__HsALB_Pf-CSP(19-325) (opt2)
aggagagggcgcuuggcuugcaaggacccugagcugcggcauugaagcacacccaacccaacucgacugaagucagccucacugaaccggaucugagaaucuucucucucugggcuugccagggcucuccgaaccuagcuagcauccucuucaauuccaacuagaaagcuuaccaugaagugggucaccuucaucucccuccucuuccucuucuccuccgccuacucccucuuccaggaguaccagugcuacggcuccuccuccaacacccgcguccucaacgagcucaacuacgacaacgccggcaccaaccucuacaacgagcucgagaugaacuacuacggcaagcaggagaacugguacucccucaagaagaacucccgcucccucggcgagaacgacgacggcaacaacgaggacaacgagaagcuccgcaagcccaagcacaagaagcucaagcagcccgccgacggcaaccccgaccccaacgccaaccccaacgucgaccccaacgccaaccccaacgucgaccccaacgccaaccccaacgucgaccccaacgccaaccccaacgccaaccccaacgccaaccccaacgccaaccccaacgccaaccccaacgccaaccccaacgccaaccccaacgccaaccccaacgccaaccccaacgccaaccccaacgccaaccccaacgccaaccccaacgccaaccccaacgccaaccccaacgccaaccccaacgccaaccccaacgccaaccccaacgucgaccccaacgccaaccccaacgccaaccccaacgccaaccccaacgccaaccccaacgccaaccccaacgccaaccccaacgccaaccccaacgccaaccccaacgccaaccccaacgccaaccccaacgccaaccccaacgccaaccccaacgccaaccccaacgccaaccccaacgccaaccccaacgccaaccccaacgccaaccccaacgccaaccccaacaagaacaaccagggcaacggccagggccacaacaugcccaacgaccccaaccgcaacgucgacgagaacgccaacgccaacuccgccgucaagaacaacaacaacgaggagcccuccgacaagcacaucaaggaguaccucaacaagauccagaacugaggacuagucccuguucccagagcccacuuuuuuuucuuuuuuugaaauaaaauagccugucuuucagaucucaaaggcucuuuucagagccaccaaaaaaaaaaaaaaaaaaaaaaaaaaaaaaaaaaaaaaaaaaaaaaaaaaaaaaaaaaaaaaaaaaaaaaaaaaaaaaaaaaaaaaaaaaaaaaaaaaaaagaauu

SEQ ID NO: 7609 - RNA, 1529 nt, Artificial Sequence
  mRNA Design a-3 (hSL-A100-N5) comprising derived and/or modified sequence from Pf(3D7)__XP_001351122.1__HsALB_Pf-CSP(19-384) (opt2)
aggagagggcgcuuggcuugcaaggacccugagcugcggcauugaagcacacccaacccaacucgacugaagucagccucacugaaccggaucugagaaucuucucucucugggcuugccagggcucuccgaaccuagcuagcauccucuucaauuccaacuagaaagcuuaccaugaagugggucaccuucaucucccuccucuuccucuucuccuccgccuacucccucuuccaggaguaccagugcuacggcuccuccuccaacacccgcguccucaacgagcucaacuacgacaacgccggcaccaaccucuacaacgagcucgagaugaacuacuacggcaagcaggagaacugguacucccucaagaagaacucccgcucccucggcgagaacgacgacggcaacaacgaggacaacgagaagcuccgcaagcccaagcacaagaagcucaagcagcccgccgacggcaaccccgaccccaacgccaaccccaacgucgaccccaacgccaaccccaacgucgaccccaacgccaaccccaacgucgaccccaacgccaaccccaacgccaaccccaacgccaaccccaacgccaaccccaacgccaaccccaacgccaaccccaacgccaaccccaacgccaaccccaacgccaaccccaacgccaaccccaacgccaaccccaacgccaaccccaacgccaaccccaacgccaaccccaacgccaaccccaacgccaaccccaacgccaaccccaacgucgaccccaacgccaaccccaacgccaaccccaacgccaaccccaacgccaaccccaacgccaaccccaacgccaaccccaacgccaaccccaacgccaaccccaacgccaaccccaacgccaaccccaacgccaaccccaacgccaaccccaacgccaaccccaacgccaaccccaacgccaaccccaacgccaaccccaacgccaaccccaacgccaaccccaacaagaacaaccagggcaacggccagggccacaacaugcccaacgaccccaaccgcaacgucgacgagaacgccaacgccaacuccgccgucaagaacaacaacaacgaggagcccuccgacaagcacaucaaggaguaccucaacaagauccagaacucccucuccaccgaguggucccccugcuccgucaccugcggcaacggcauccagguccgcaucaagcccggcuccgccaacaagcccaaggacgagcucgacuacgccaacgacaucgagaagaagaucugcaagauggagaagugcuccuccgucuucaacgucgucaacuccuccugaggacuagucccuguucccagagcccacuuuuuuuucuuuuuuugaaauaaaauagccugucuuucagaucucaaaggcucuuuucagagccaccaaaaaaaaaaaaaaaaaaaaaaaaaaaaaaaaaaaaaaaaaaaaaaaaaaaaaaaaaaaaaaaaaaaaaaaaaaaaaaaaaaaaaaaaaaaaaaaaaaaaagaauu

SEQ ID NO: 7610 - RNA, 1667 nt, Artificial Sequence
  mRNA Design a-3 (hSL-A100-N5) comprising derived and/or modified sequence from Pf(3D7)__XP_001351122.1__HsALB_Pf-CSP(19-384)_TM domain HA (opt2)
aggagagggcgcuuggcuugcaaggacccugagcugcggcauugaagcacacccaacccaacucgacugaagucagccucacugaaccggaucugagaaucuucucucucugggcuugccagggcucuccgaaccuagcuagcauccucuucaauuccaacuagaaagcuuaccaugaagugggucaccuucaucucccuccucuuccucuucuccuccgccuacucccucuuccaggaguaccagugcuacggcuccuccuccaacacccgcguccucaacgagcucaacuacgacaacgccggcaccaaccucuacaacgagcucgagaugaacuacuacggcaagcaggagaacugguacucccucaagaagaacucccgcucccucggcgagaacgacgacggcaacaacgaggacaacgagaagcuccgcaagcccaagcacaagaagcucaagcagcccgccgacggcaaccccgaccccaacgccaaccccaacgucgaccccaacgccaaccccaacgucgaccccaacgccaaccccaacgucgaccccaacgccaaccccaacgccaaccccaacgccaaccccaacgccaaccccaacgccaaccccaacgccaaccccaacgccaaccccaacgccaaccccaacgccaaccccaacgccaaccccaacgccaaccccaacgccaaccccaacgccaaccccaacgccaaccccaacgccaaccccaacgccaaccccaacgccaaccccaacgucgaccccaacgccaaccccaacgccaaccccaacgccaaccccaacgccaaccccaacgccaaccccaacgccaaccccaacgccaaccccaacgccaaccccaacgccaaccccaacgccaaccccaacgccaaccccaacgccaaccccaacgccaaccccaacgccaaccccaacgccaaccccaacgccaaccccaacgccaaccccaacgccaaccccaacaagaacaaccagggcaacggccagggccacaacaugcccaacgaccccaaccgcaacgucgacgagaacgccaacgccaacuccgccgucaagaacaacaacaacgaggagcccuccgacaagcacaucaaggaguaccucaacaagauccagaacucccucuccaccgaguggucccccugcuccgucaccugcggcaacggcauccagguccgcaucaagcccggcuccgccaacaagcccaaggacgagcucgacuacgccaacgacaucgagaagaagaucugcaagauggagaagugcuccuccgucuucaacgucgucaacuccuccaagcucgaguccacccgcaucuaccagauccucgccaucuacuccaccgucgccuccucccucguccucgucgucucccucggcgccaucuccuucuggaugugcuccaacggcucccuccagugccgcaucugcaucugaggacuagucccuguucccagagcccacuuuuuuuucuuuuuuugaaauaaaauagccugucuuucagaucucaaaggcucuuuucagagccaccaaaaaaaaaaaaaaaaaaaaaaaaaaaaaaaaaaaaaaaaaaaaaaaaaaaaaaaaaaaaaaaaaaaaaaaaaaaaaaaaaaaaaaaaaaaaaaaaaaaaagaauu

SEQ ID NO: 7611 - RNA, 1379 nt, Artificial Sequence
  mRNA Design a-3 (hSL-A100-N5) comprising derived and/or modified sequence from Pf(3D7)__XP_001351122.1__HsALB_Pf-CSP(82-397) (opt2)
aggagagggcgcuuggcuugcaaggacccugagcugcggcauugaagcacacccaacccaacucgacugaagucagccucacugaaccggaucugagaaucuucucucucugggcuugccagggcucuccgaaccuagcuagcauccucuucaauuccaacuagaaagcuuaccaugaagugggucaccuucaucucccuccucuuccucuucuccuccgccuacuccgacaacgagaagcuccgcaagcccaagcacaagaagcucaagcagcccgccgacggcaaccccgaccccaacgccaaccccaacgucgaccccaacgccaaccccaacgucgaccccaacgccaaccccaacgucgaccccaacgccaaccccaacgccaaccccaacgccaaccccaacgccaaccccaacgccaaccccaacgccaaccccaacgccaaccccaacgccaaccccaacgccaaccccaacgccaaccccaacgccaaccccaacgccaaccccaacgccaaccccaacgccaaccccaacgccaaccccaacgccaaccccaacgccaaccccaacgucgaccccaacgccaaccccaacgccaaccccaacgccaaccccaacgccaaccccaacgccaaccccaacgccaaccccaacgccaaccccaacgccaaccccaacgccaaccccaacgccaaccccaacgccaaccccaacgccaaccccaacgccaaccccaacgccaaccccaacgccaaccccaacgccaaccccaacgccaaccccaacgccaaccccaacaagaacaaccagggcaacggccagggccacaacaugcccaacgaccccaaccgcaacgucgacgagaacgccaacgccaacuccgccgucaagaacaacaacaacgaggagcccuccgacaagcacaucaaggaguaccucaacaagauccagaacucccucuccaccgaguggucccccugcuccgucaccugcggcaacggcauccagguccgcaucaagcccggcuccgccaacaagcccaaggacgagcucgacuacgccaacgacaucgagaagaagaucugcaagauggagaagugcuccuccgucuucaacgucgucaacuccuccaucggccucaucaugguccucuccuuccucuuccucaacugaggacuagucccuguucccagagcccacuuuuuuuucuuuuuuugaaauaaaauagccugucuuucagaucucaaaggcucuuuucagagccaccaaaaaaaaaaaaaaaaaaaaaaaaaaaaaaaaaaaaaaaaaaaaaaaaaaaaaaaaaaaaaaaaaaaaaaaaaaaaaaaaaaaaaaaaaaaaaaaaaaaaagaauu

SEQ ID NO: 7612 - RNA, 731 nt, Artificial Sequence
  mRNA Design a-3 (hSL-A100-N5) comprising derived and/or modified sequence from Pf(3D7)__XP_001351122.1__HsALB_Pf-CSP(93-192) (opt2)
aggagagggcgcuuggcuugcaaggacccugagcugcggcauugaagcacacccaacccaacucgacugaagucagccucacugaaccggaucugagaaucuucucucucugggcuugccagggcucuccgaaccuagcuagcauccucuucaauuccaacuagaaagcuuaccaugaagugggucaccuucaucucccuccucuuccucuucuccuccgccuacuccaagcucaagcagcccgccgacggcaaccccgaccccaacgccaaccccaacgucgaccccaacgccaaccccaacgucgaccccaacgccaaccccaacgucgaccccaacgccaaccccaacgccaaccccaacgccaaccccaacgccaaccccaacgccaaccccaacgccaaccccaacgccaaccccaacgccaaccccaacgccaaccccaacgccaaccccaacgccaaccccaacgccaaccccaacgccaaccccaacgccaaccccaacgccaaccccaacgccaaccccugaggacuagucccuguucccagagcccacuuuuuuuucuuuuuuugaaauaaaauagccugucuuucagaucucaaaggcucuuuucagagccaccaaaaaaaaaaaaaaaaaaaaaaaaaaaaaaaaaaaaaaaaaaaaaaaaaaaaaaaaaaaaaaaaaaaaaaaaaaaaaaaaaaaaaaaaaaaaaaaaaaaaagaauu

SEQ ID NO: 7613 - RNA, 971 nt, Artificial Sequence
  mRNA Design a-3 (hSL-A100-N5) comprising derived and/or modified sequence from Pf(3D7)__XP_001351122.1__HsALB_Pf-CSP(93-272) (opt2)
aggagagggcgcuuggcuugcaaggacccugagcugcggcauugaagcacacccaacccaacucgacugaagucagccucacugaaccggaucugagaaucuucucucucugggcuugccagggcucuccgaaccuagcuagcauccucuucaauuccaacuagaaagcuuaccaugaagugggucaccuucaucucccuccucuuccucuucuccuccgccuacuccaagcucaagcagcccgccgacggcaaccccgaccccaacgccaaccccaacgucgaccccaacgccaaccccaacgucgaccccaacgccaaccccaacgucgaccccaacgccaaccccaacgccaaccccaacgccaaccccaacgccaaccccaacgccaaccccaacgccaaccccaacgccaaccccaacgccaaccccaacgccaaccccaacgccaaccccaacgccaaccccaacgccaaccccaacgccaaccccaacgccaaccccaacgccaaccccaacgccaaccccaacgccaaccccaacgucgaccccaacgccaaccccaacgccaaccccaacgccaaccccaacgccaaccccaacgccaaccccaacgccaaccccaacgccaaccccaacgccaaccccaacgccaaccccaacgccaaccccaacgccaaccccaacgccaaccccaacgccaaccccaacgccaaccccaacgccaaccccaacgccaaccccaacgccaaccccaacgccaaccccugaggacuagucccuguucccagagcccacuuuuuuuucuuuuuuugaaauaaaauagccugucuuucagaucucaaaggcucuuuucagagccaccaaaaaaaaaaaaaaaaaaaaaaaaaaaaaaaaaaaaaaaaaaaaaaaaaaaaaaaaaaaaaaaaaaaaaaaaaaaaaaaaaaaaaaaaaaaaaaaaaaaaagaauu

SEQ ID NO: 7614 - RNA, 1346 nt, Artificial Sequence
  mRNA Design a-3 (hSL-A100-N5) comprising derived and/or modified sequence from Pf(3D7)__XP_001351122.1__HsALB_Pf-CSP(93-397) (opt2)
aggagagggcgcuuggcuugcaaggacccugagcugcggcauugaagcacacccaacccaacucgacugaagucagccucacugaaccggaucugagaaucuucucucucugggcuugccagggcucuccgaaccuagcuagcauccucuucaauuccaacuagaaagcuuaccaugaagugggucaccuucaucucccuccucuuccucuucuccuccgccuacuccaagcucaagcagcccgccgacggcaaccccgaccccaacgccaaccccaacgucgaccccaacgccaaccccaacgucgaccccaacgccaaccccaacgucgaccccaacgccaaccccaacgccaaccccaacgccaaccccaacgccaaccccaacgccaaccccaacgccaaccccaacgccaaccccaacgccaaccccaacgccaaccccaacgccaaccccaacgccaaccccaacgccaaccccaacgccaaccccaacgccaaccccaacgccaaccccaacgccaaccccaacgccaaccccaacgucgaccccaacgccaaccccaacgccaaccccaacgccaaccccaacgccaaccccaacgccaaccccaacgccaaccccaacgccaaccccaacgccaaccccaacgccaaccccaacgccaaccccaacgccaaccccaacgccaaccccaacgccaaccccaacgccaaccccaacgccaaccccaacgccaaccccaacgccaaccccaacgccaaccccaacaagaacaaccagggcaacggccagggccacaacaugcccaacgaccccaaccgcaacgucgacgagaacgccaacgccaacuccgccgucaagaacaacaacaacgaggagcccuccgacaagcacaucaaggaguaccucaacaagauccagaacucccucuccaccgaguggucccccugcuccgucaccugcggcaacggcauccagguccgcaucaagcccggcuccgccaacaagcccaaggacgagcucgacuacgccaacgacaucgagaagaagaucugcaagauggagaagugcuccuccgucuucaacgucgucaacuccuccaucggccucaucaugguccucuccuuccucuuccucaacugaggacuagucccuguucccagagcccacuuuuuuuucuuuuuuugaaauaaaauagccugucuuucagaucucaaaggcucuuuucagagccaccaaaaaaaaaaaaaaaaaaaaaaaaaaaaaaaaaaaaaaaaaaaaaaaaaaaaaaaaaaaaaaaaaaaaaaaaaaaaaaaaaaaaaaaaaaaaaaaaaaaaagaauu

SEQ ID NO: 7615 - RNA, 716 nt, Artificial Sequence
  mRNA Design a-3 (hSL-A100-N5) comprising derived and/or modified sequence from Pf(3D7)__XP_001351122.1__HsALB_Pf-CSP(98-192) (opt2)
aggagagggcgcuuggcuugcaaggacccugagcugcggcauugaagcacacccaacccaacucgacugaagucagccucacugaaccggaucugagaaucuucucucucugggcuugccagggcucuccgaaccuagcuagcauccucuucaauuccaacuagaaagcuuaccaugaagugggucaccuucaucucccuccucuuccucuucuccuccgccuacuccgccgacggcaaccccgaccccaacgccaaccccaacgucgaccccaacgccaaccccaacgucgaccccaacgccaaccccaacgucgaccccaacgccaaccccaacgccaaccccaacgccaaccccaacgccaaccccaacgccaaccccaacgccaaccccaacgccaaccccaacgccaaccccaacgccaaccccaacgccaaccccaacgccaaccccaacgccaaccccaacgccaaccccaacgccaaccccaacgccaaccccaacgccaaccccugaggacuagucccuguucccagagcccacuuuuuuuucuuuuuuugaaauaaaauagccugucuuucagaucucaaaggcucuuuucagagccaccaaaaaaaaaaaaaaaaaaaaaaaaaaaaaaaaaaaaaaaaaaaaaaaaaaaaaaaaaaaaaaaaaaaaaaaaaaaaaaaaaaaaaaaaaaaaaaaaaaaaagaauu

SEQ ID NO: 7616 - RNA, 956 nt, Artificial Sequence
  mRNA Design a-3 (hSL-A100-N5) comprising derived and/or modified sequence from Pf(3D7)__XP_001351122.1__HsALB_Pf-CSP(98-272) (opt2)
aggagagggcgcuuggcuugcaaggacccugagcugcggcauugaagcacacccaacccaacucgacugaagucagccucacugaaccggaucugagaaucuucucucucugggcuugccagggcucuccgaaccuagcuagcauccucuucaauuccaacuagaaagcuuaccaugaagugggucaccuucaucucccuccucuuccucuucuccuccgccuacuccgccgacggcaaccccgaccccaacgccaaccccaacgucgaccccaacgccaaccccaacgucgaccccaacgccaaccccaacgucgaccccaacgccaaccccaacgccaaccccaacgccaaccccaacgccaaccccaacgccaaccccaacgccaaccccaacgccaaccccaacgccaaccccaacgccaaccccaacgccaaccccaacgccaaccccaacgccaaccccaacgccaaccccaacgccaaccccaacgccaaccccaacgccaaccccaacgccaaccccaacgucgaccccaacgccaaccccaacgccaaccccaacgccaaccccaacgccaaccccaacgccaaccccaacgccaaccccaacgccaaccccaacgccaaccccaacgccaaccccaacgccaaccccaacgccaaccccaacgccaaccccaacgccaaccccaacgccaaccccaacgccaaccccaacgccaaccccaacgccaaccccaacgccaaccccugaggacuagucccuguucccagagcccacuuuuuuuucuuuuuuugaaauaaaauagccugucuuucagaucucaaaggcucuuuucagagccaccaaaaaaaaaaaaaaaaaaaaaaaaaaaaaaaaaaaaaaaaaaaaaaaaaaaaaaaaaaaaaaaaaaaaaaaaaaaaaaaaaaaaaaaaaaaaaaaaaaaaagaauu

SEQ ID NO: 7617 - RNA, 1262 nt, Artificial Sequence
  mRNA Design a-3 (hSL-A100-N5) comprising derived and/or modified sequence from Pf(3D7)__XP_001351122.1__HsALB_Pf-CSP(98-374) (opt2)
aggagagggcgcuuggcuugcaaggacccugagcugcggcauugaagcacacccaacccaacucgacugaagucagccucacugaaccggaucugagaaucuucucucucugggcuugccagggcucuccgaaccuagcuagcauccucuucaauuccaacuagaaagcuuaccaugaagugggucaccuucaucucccuccucuuccucuucuccuccgccuacuccgccgacggcaaccccgaccccaacgccaaccccaacgucgaccccaacgccaaccccaacgucgaccccaacgccaaccccaacgucgaccccaacgccaaccccaacgccaaccccaacgccaaccccaacgccaaccccaacgccaaccccaacgccaaccccaacgccaaccccaacgccaaccccaacgccaaccccaacgccaaccccaacgccaaccccaacgccaaccccaacgccaaccccaacgccaaccccaacgccaaccccaacgccaaccccaacgccaaccccaacgucgaccccaacgccaaccccaacgccaaccccaacgccaaccccaacgccaaccccaacgccaaccccaacgccaaccccaacgccaaccccaacgccaaccccaacgccaaccccaacgccaaccccaacgccaaccccaacgccaaccccaacgccaaccccaacgccaaccccaacgccaaccccaacgccaaccccaacgccaaccccaacgccaaccccaacaagaacaaccagggcaacggccagggccacaacaugcccaacgaccccaaccgcaacgucgacgagaacgccaacgccaacuccgccgucaagaacaacaacaacgaggagcccuccgacaagcacaucaaggaguaccucaacaagauccagaacucccucuccaccgaguggucccccugcuccgucaccugcggcaacggcauccagguccgcaucaagcccggcuccgccaacaagcccaaggacgagcucgacuacgccaacgacaucgagaagaagaucugcaagauggagaagugcugaggacuagucccuguucccagagcccacuuuuuuuucuuuuuuugaaauaaaauagccugucuuucagaucucaaaggcucuuuucagagccaccaaaaaaaaaaaaaaaaaaaaaaaaaaaaaaaaaaaaaaaaaaaaaaaaaaaaaaaaaaaaaaaaaaaaaaaaaaaaaaaaaaaaaaaaaaaaaaaaaaaaagaauu

SEQ ID NO: 7618 - RNA, 1331 nt, Artificial Sequence
  mRNA Design a-3 (hSL-A100-N5) comprising derived and/or modified sequence from Pf(3D7)__XP_001351122.1__HsALB_Pf-CSP(98-397) (opt2)
aggagagggcgcuuggcuugcaaggacccugagcugcggcauugaagcacacccaacccaacucgacugaagucagccucacugaaccggaucugagaaucuucucucucugggcuugccagggcucuccgaaccuagcuagcauccucuucaauuccaacuagaaagcuuaccaugaagugggucaccuucaucucccuccucuuccucuucuccuccgccuacuccgccgacggcaaccccgaccccaacgccaaccccaacgucgaccccaacgccaaccccaacgucgaccccaacgccaaccccaacgucgaccccaacgccaaccccaacgccaaccccaacgccaaccccaacgccaaccccaacgccaaccccaacgccaaccccaacgccaaccccaacgccaaccccaacgccaaccccaacgccaaccccaacgccaaccccaacgccaaccccaacgccaaccccaacgccaaccccaacgccaaccccaacgccaaccccaacgccaaccccaacgucgaccccaacgccaaccccaacgccaaccccaacgccaaccccaacgccaaccccaacgccaaccccaacgccaaccccaacgccaaccccaacgccaaccccaacgccaaccccaacgccaaccccaacgccaaccccaacgccaaccccaacgccaaccccaacgccaaccccaacgccaaccccaacgccaaccccaacgccaaccccaacgccaaccccaacaagaacaaccagggcaacggccagggccacaacaugcccaacgaccccaaccgcaacgucgacgagaacgccaacgccaacuccgccgucaagaacaacaacaacgaggagcccuccgacaagcacaucaaggaguaccucaacaagauccagaacucccucuccaccgaguggucccccugcuccgucaccugcggcaacggcauccagguccgcaucaagcccggcuccgccaacaagcccaaggacgagcucgacuacgccaacgacaucgagaagaagaucugcaagauggagaagugcuccuccgucuucaacgucgucaacuccuccaucggccucaucaugguccucuccuuccucuuccucaacugaggacuagucccuguucccagagcccacuuuuuuuucuuuuuuugaaauaaaauagccugucuuucagaucucaaaggcucuuuucagagccaccaaaaaaaaaaaaaaaaaaaaaaaaaaaaaaaaaaaaaaaaaaaaaaaaaaaaaaaaaaaaaaaaaaaaaaaaaaaaaaaaaaaaaaaaaaaaaaaaaaaaagaauu

SEQ ID NO: 7619 - RNA, 1658 nt, Artificial Sequence
  mRNA Design a-3 (hSL-A100-N5) comprising derived and/or modified sequence from Pf(3D7)__XP_001351122.1__HsALB_Pf-CSP(199-377)_L(PVTN)_HBsAg (opt2)
aggagagggcgcuuggcuugcaaggacccugagcugcggcauugaagcacacccaacccaacucgacugaagucagccucacugaaccggaucugagaaucuucucucucugggcuugccagggcucuccgaaccuagcuagcauccucuucaauuccaacuagaaagcuuaccaugaagugggucaccuucaucucccuccucuuccucuucuccuccgccuacuccgaccccaacgccaaccccaacgccaaccccaacgccaaccccaacgccaaccccaacgccaaccccaacgccaaccccaacgccaaccccaacgccaaccccaacgccaaccccaacgccaaccccaacgccaaccccaacgccaaccccaacgccaaccccaacgccaaccccaacgccaaccccaacgccaaccccaacgccaaccccaacgccaaccccaacaagaacaaccagggcaacggccagggccacaacaugcccaacgaccccaaccgcaacgucgacgagaacgccaacgccaacuccgccgucaagaacaacaacaacgaggagcccuccgacaagcacaucaaggaguaccucaacaagauccagaacucccucuccaccgaguggucccccugcuccgucaccugcggcaacggcauccagguccgcaucaagcccggcuccgccaacaagcccaaggacgagcucgacuacgccaacgacaucgagaagaagaucugcaagauggagaagugcuccuccguccccgucaccaacauggagaacaucaccuccggcuuccucggcccccuccucguccuccaggccggcuucuuccuccucacccgcauccucaccaucccccagucccucgacuccugguggaccucccucaacuuccucggcggcucccccgucugccucggccagaacucccagucccccaccuccaaccacucccccaccuccugcccccccaucugccccggcuaccgcuggaugugccuccgccgcuucaucaucuuccucuucauccuccuccucugccucaucuuccuccucguccuccucgacuaccagggcaugcuccccgucugcccccucauccccggcuccaccaccaccaacaccggccccugcaagaccugcaccacccccgcccagggcaacuccauguuccccuccugcugcugcaccaagcccaccgacggcaacugcaccugcauccccauccccuccuccugggccuucgccaaguaccucugggagugggccuccguccgcuucuccuggcucucccuccucguccccuucguccagugguucgucggccucucccccaccgucuggcucuccgccaucuggaugaugugguacuggggccccucccucuacuccaucgucucccccuucaucccccuccuccccaucuucuucugccucugggucuacaucugaggacuagucccuguucccagagcccacuuuuuuuucuuuuuuugaaauaaaauagccugucuuucagaucucaaaggcucuuuucagagccaccaaaaaaaaaaaaaaaaaaaaaaaaaaaaaaaaaaaaaaaaaaaaaaaaaaaaaaaaaaaaaaaaaaaaaaaaaaaaaaaaaaaaaaaaaaaaaaaaaaaaagaauu

SEQ ID NO: 7620 - RNA, 1568 nt, Artificial Sequence
  mRNA Design a-3 (hSL-A100-N5) comprising derived and/or modified sequence from Pf(3D7)__XP_001351122.1__Pf-CSP (opt3)
aggagagggcgcuuggcuugcaaggacccugagcugcggcauugaagcacacccaacccaacucgacugaagucagccucacugaaccggaucugagaaucuucucucucugggcuugccagggcucuccgaaccuagcuagcauccucuucaauuccaacuagaaagcuuaccaugaugagaaagcuggccauccucagcguguccucuuuccuuuuugucgaggcucuguuccaggaauaccaaugcuauggcucaaguagcaacaccaggguuuugaaugaguuaaacuacgacaaugcagggacaaaccuguauaaugaacuagagaugaacuacuauggaaaacaggaaaauugguacucccucaagaaaaacucucggucgcugggugagaaugaugacggcaacaaugaggauaacgaaaaacuucgcaagcccaagcacaagaaacugaagcagccugccgacgggaauccagauccgaacgcgaaucccaacguggacccuaacgcuaauccaaacguagaucccaaugccaacccuaauguggacccaaacgcaaaucccaacgccaauccuaacgcuaauccaaacgcaaauccgaacgccaaucccaacgcuaacccuaaugccaacccaaaugcgaaccccaaugcaaacccuaaugccaacccaaaugcuaaccccaaugccaacccgaaugcaaacccuaaugcuaaccccaacgccaauccaaacgcgaauccuaacgccaaucccaacgucgauccaaaugcaaaccccaaugcuaacccuaaugccaacccaaaugcuaacccgaaugccaaccccaacgcaaauccuaacgccaauccaaacgcuaaucccaacgcgaauccuaacgcaaauccaaacgccaaucccaacgcuaauccgaacgccaauccuaacgcaaauccaaacgccaaccccaaugcuaacccuaaugccaaccccaaugcaaacccaaauaaaaacaaucagggaaacggccaaggucauaauaugccuaacgaccccaaucgaaacguggaugagaaugcgaacgcuaacucagccguuaagaauaacaauaacgaggaaccaagcgacaaacacauuaaggaguauuugaauaagauacagaacagucucuccacugaauggucuccguguagcgugacgugcgggaauggaauccagguccguauuaaaccuggcuccgcaaacaagcccaaagaugagcuggacuacgccaaugacaucgaaaagaaaauuuguaagauggagaaaugcucaaguguguuuaacguaguuaauagcucuaucggccugauaauggugcucuccuucuuauuucugaacugaggacuagucccuguucccagagcccacuuuuuuuucuuuuuuugaaauaaaauagccugucuuucagaucucaaaggcucuuuucagagccaccaaaaaaaaaaaaaaaaaaaaaaaaaaaaaaaaaaaaaaaaaaaaaaaaaaaaaaaaaaaaaaaaaaaaaaaaaaaaaaaaaaaaaaaaaaaaaaaaaaaaagaauu

SEQ ID NO: 7621 - RNA, 1499 nt, Artificial Sequence
  mRNA Design a-3 (hSL-A100-N5) comprising derived and/or modified sequence from Pf(3D7)__XP_001351122.1__Pf-CSP(1-374) (opt3)
aggagagggcgcuuggcuugcaaggacccugagcugcggcauugaagcacacccaacccaacucgacugaagucagccucacugaaccggaucugagaaucuucucucucugggcuugccagggcucuccgaaccuagcuagcauccucuucaauuccaacuagaaagcuuaccaugaugagaaagcuggccauccucagcguguccucuuuccuuuuugucgaggcucuguuccaggaauaccaaugcuauggcucaaguagcaacaccaggguuuugaaugaguuaaacuacgacaaugcagggacaaaccuguauaaugaacuagagaugaacuacuauggaaaacaggaaaauugguacucccucaagaaaaacucucggucgcugggugagaaugaugacggcaacaaugaggauaacgaaaaacuucgcaagcccaagcacaagaaacugaagcagccugccgacgggaauccagauccgaacgcgaaucccaacguggacccuaacgcuaauccaaacguagaucccaaugccaacccuaauguggacccaaacgcaaaucccaacgccaauccuaacgcuaauccaaacgcaaauccgaacgccaaucccaacgcuaacccuaaugccaacccaaaugcgaaccccaaugcaaacccuaaugccaacccaaaugcuaaccccaaugccaacccgaaugcaaacccuaaugcuaaccccaacgccaauccaaacgcgaauccuaacgccaaucccaacgucgauccaaaugcaaaccccaaugcuaacccuaaugccaacccaaaugcuaacccgaaugccaaccccaacgcaaauccuaacgccaauccaaacgcuaaucccaacgcgaauccuaacgcaaauccaaacgccaaucccaacgcuaauccgaacgccaauccuaacgcaaauccaaacgccaaccccaaugcuaacccuaaugccaaccccaaugcaaacccaaauaaaaacaaucagggaaacggccaaggucauaauaugccuaacgaccccaaucgaaacguggaugagaaugcgaacgcuaacucagccguuaagaauaacaauaacgaggaaccaagcgacaaacacauuaaggaguauuugaauaagauacagaacagucucuccacugaauggucuccguguagcgugacgugcgggaauggaauccagguccguauuaaaccuggcuccgcaaacaagcccaaagaugagcuggacuacgccaaugacaucgaaaagaaaauuuguaagauggagaaaugcugaggacuagucccuguucccagagcccacuuuuuuuucuuuuuuugaaauaaaauagccugucuuucagaucucaaaggcucuuuucagagccaccaaaaaaaaaaaaaaaaaaaaaaaaaaaaaaaaaaaaaaaaaaaaaaaaaaaaaaaaaaaaaaaaaaaaaaaaaaaaaaaaaaaaaaaaaaaaaaaaaaaaagaauu

SEQ ID NO: 7622 - RNA, 1352 nt, Artificial Sequence
  mRNA Design a-3 (hSL-A100-N5) comprising derived and/or modified sequence from Pf(3D7)__XP_001351122.1__Pf-CSP(1-325) (opt3)
aggagagggcgcuuggcuugcaaggacccugagcugcggcauugaagcacacccaacccaacucgacugaagucagccucacugaaccggaucugagaaucuucucucucugggcuugccagggcucuccgaaccuagcuagcauccucuucaauuccaacuagaaagcuuaccaugaugagaaagcuggccauccucagcguguccucuuuccuuuuugucgaggcucuguuccaggaauaccaaugcuauggcucaaguagcaacaccaggguuuugaaugaguuaaacuacgacaaugcagggacaaaccuguauaaugaacuagagaugaacuacuauggaaaacaggaaaauugguacucccucaagaaaaacucucggucgcugggugagaaugaugacggcaacaaugaggauaacgaaaaacuucgcaagcccaagcacaagaaacugaagcagccugccgacgggaauccagauccgaacgcgaaucccaacguggacccuaacgcuaauccaaacguagaucccaaugccaacccuaauguggacccaaacgcaaaucccaacgccaauccuaacgcuaauccaaacgcaaauccgaacgccaaucccaacgcuaacccuaaugccaacccaaaugcgaaccccaaugcaaacccuaaugccaacccaaaugcuaaccccaaugccaacccgaaugcaaacccuaaugcuaaccccaacgccaauccaaacgcgaauccuaacgccaaucccaacgucgauccaaaugcaaaccccaaugcuaacccuaaugccaacccaaaugcuaacccgaaugccaaccccaacgcaaauccuaacgccaauccaaacgcuaaucccaacgcgaauccuaacgcaaauccaaacgccaaucccaacgcuaauccgaacgccaauccuaacgcaaauccaaacgccaaccccaaugcuaacccuaaugccaaccccaaugcaaacccaaauaaaaacaaucagggaaacggccaaggucauaauaugccuaacgaccccaaucgaaacguggaugagaaugcgaacgcuaacucagccguuaagaauaacaauaacgaggaaccaagcgacaaacacauuaaggaguauuugaauaagauacagaacugaggacuagucccuguucccagagcccacuuuuuuuucuuuuuuugaaauaaaauagccugucuuucagaucucaaaggcucuuuucagagccaccaaaaaaaaaaaaaaaaaaaaaaaaaaaaaaaaaaaaaaaaaaaaaaaaaaaaaaaaaaaaaaaaaaaaaaaaaaaaaaaaaaaaaaaaaaaaaaaaaaaaagaauu

SEQ ID NO: 7623 - RNA, 1568 nt, Artificial Sequence
  mRNA Design a-3 (hSL-A100-N5) comprising derived and/or modified sequence from Pf(3D7)__XP_001351122.1__HsALB_Pf-CSP(19-397) (opt3)
aggagagggcgcuuggcuugcaaggacccugagcugcggcauugaagcacacccaacccaacucgacugaagucagccucacugaaccggaucugagaaucuucucucucugggcuugccagggcucuccgaaccuagcuagcauccucuucaauuccaacuagaaagcuuaccaugaagugggugaccuucaucagccugcucuuucuuuucuccucugccuacucacuguuucaggaguaucaaugcuacggcaguagcuccaacacaagagucuugaaugaauuaaacuaugacaaugcugggacuaaccuguacaaugagcuagaaaugaacuauuacggaaaacaggagaauugguauucucucaagaaaaacucgaggucacugggugaaaaugaugacggcaacaaugaggauaacgagaaacuucggaagcccaagcacaagaaacugaagcagccugcagacgggaauccagauccgaacgccaaucccaacguugacccuaacgcgaauccaaacguggaucccaaugcuaacccuaauguagacccaaacgccaaucccaacgcaaauccuaacgccaauccaaacgcuaauccgaacgcaaaucccaacgccaacccuaaugcuaacccaaaugccaaccccaaugcgaacccuaaugcaaacccaaaugccaaccccaaugcuaacccgaaugccaacccuaaugcaaaccccaacgcuaauccaaacgccaauccuaacgcgaaucccaacguggauccaaaugccaaccccaaugcaaacccuaaugcuaacccaaaugccaacccgaaugcuaaccccaacgccaauccuaacgcaaauccaaacgccaaucccaacgcuaauccuaacgcgaauccaaacgcaaaucccaacgccaauccgaacgcuaauccuaacgccaauccaaacgcaaaccccaaugccaacccuaaugcuaaccccaaugccaacccaaauaaaaacaaucagggaaacggccaaggucauaauaugccuaacgaccccaaucgcaacgucgaugaaaaugcaaacgcgaacagcgcugugaagaauaacaauaacgaggaaccaagugacaaacacauuaaggaguacuugaauaagauacagaacucccucucuacggaguggagcccguguuccguuaccugcgggaauggaauccaggugcgaauuaaaccuggcucagccaacaagcccaaagaugaacuggacuacgcaaaugacaucgagaagaaaauuuguaagauggaaaaaugcaguagcgucuucaacgugguaaauucuuccaucggccugauaaugguucucucauuuuuauuccugaacugaggacuagucccuguucccagagcccacuuuuuuuucuuuuuuugaaauaaaauagccugucuuucagaucucaaaggcucuuuucagagccaccaaaaaaaaaaaaaaaaaaaaaaaaaaaaaaaaaaaaaaaaaaaaaaaaaaaaaaaaaaaaaaaaaaaaaaaaaaaaaaaaaaaaaaaaaaaaaaaaaaaaagaauu

SEQ ID NO: 7624 - RNA, 1586 nt, Artificial Sequence
  mRNA Design a-3 (hSL-A100-N5) comprising derived and/or modified sequence from Pf(3D7)__XP_001351122.1__HsIns-iso1_Pf-CSP(19-397) (opt3)
aggagagggcgcuuggcuugcaaggacccugagcugcggcauugaagcacacccaacccaacucgacugaagucagccucacugaaccggaucugagaaucuucucucucugggcuugccagggcucuccgaaccuagcuagcauccucuucaauuccaacuagaaagcuuaccauggcccuguggaugagacuccuuccccuguuggcuuuacuggcacuauggggcccugacccagccgcggcucucuuccaggaguaccaaugcuaugggagcuccucuaacaccagggugcugaaugaacuuaacuacgauaaugccggaacaaaccuguauaaugaguuggaaaugaacuacuaugguaagcaggagaauugguacucacucaaaaagaacagucggagccugggcgaaaaugacgaugggaacaaugaggacaacgagaaacugcgcaagccgaaacacaagaagcucaaacagcccgcagauggaaauccugacccaaacgccaaucccaacgucgauccuaacgcuaauccaaacguugaccccaaugcaaacccuaauguggauccaaacgccaauccgaacgcuaaucccaacgccaauccuaacgcgaauccaaacgcaaaucccaacgccaacccuaaugcuaacccaaaugccaaccccaaugcaaacccgaaugcuaacccuaaugccaaccccaaugcgaacccaaaugccaacccuaaugcaaaccccaacgcuaauccaaacgccaaucccaacgcuaauccuaacguagacccaaaugccaacccgaaugcaaaccccaaugccaacccuaaugcuaacccaaaugcgaaccccaacgcaaauccuaacgccaauccaaacgcuaaucccaacgccaauccgaacgcaaauccuaacgccaauccaaacgcuaaucccaacgccaauccuaacgcaaaucccaacgcgaacccaaaugcuaacccuaaugccaaccccaaugcaaacccaaauaagaacaaucagggcaacggucaagggcauaauaugccgaacgauccuaaucgaaacguggacgaaaaugccaacgcuaacuccgccgucaaaaauaacaauaacgaggaacccucugauaagcacaucaaagaguauuuaaauaagauucagaacucgcugucaacugaguggagcccauguagugugacgugcggaaauggcauacagguucguaucaagcccggcuccgcaaacaaaccuaaggacgaacuugacuacgcuaaugauauugagaaaaagaucuguaaaauggaaaagugcucuagcguguuuaacgucguaaauuccucaauuggguugaucauggugcugaguuuccuauuucucaacugaggacuagucccuguucccagagcccacuuuuuuuucuuuuuuugaaauaaaauagccugucuuucagaucucaaaggcucuuuucagagccaccaaaaaaaaaaaaaaaaaaaaaaaaaaaaaaaaaaaaaaaaaaaaaaaaaaaaaaaaaaaaaaaaaaaaaaaaaaaaaaaaaaaaaaaaaaaaaaaaaaaaagaauu

SEQ ID NO: 7625 - RNA, 1565 nt, Artificial Sequence
  mRNA Design a-3 (hSL-A100-N5) comprising derived and/or modified sequence from Pf(3D7)__XP_001351122.1__HsSPARC_Pf-CSP(19-397) (opt3)
aggagagggcgcuuggcuugcaaggacccugagcugcggcauugaagcacacccaacccaacucgacugaagucagccucacugaaccggaucugagaaucuucucucucugggcuugccagggcucuccgaaccuagcuagcauccucuucaauuccaacuagaaagcuuaccaugagagccuggaucuucuuucugcucugccuugcuggcagggcacuggccuuguuccaggaguaccaauguuaugggagcuccucuaacacccggguguuaaaugaacugaacuacgacaaugcgggaacaaaccuauauaaugagcucgaaaugaacuacuaugguaagcaggagaauugguacucacugaaaaagaacagucgcagccuuggcgaaaaugaugacgggaacaaugaggauaacgagaaacugcgaaagcccaaacacaagaaguugaaacagccugcugacggaaauccagauccgaacgccaaucccaacgucgacccuaacgcaaauccaaacguugaucccaaugccaacccuaauguggacccaaacgcuaaucccaacgcaaauccuaacgccaauccaaacgcuaauccgaacgccaaucccaacgcgaacccuaaugcaaacccaaaugccaaccccaaugcuaacccuaaugccaacccaaaugcaaaccccaaugcuaacccgaaugccaacccuaaugcgaaccccaacgccaauccaaacgcaaauccuaacgcuaaucccaacguagauccaaaugccaaccccaaugcuaacccuaaugccaacccaaaugcaaacccgaaugccaaccccaacgcuaauccuaacgcgaauccaaacgcaaaucccaacgccaauccuaacgcuaauccaaacgccaaucccaacgcaaauccgaacgccaauccuaacgcuaauccaaacgccaaccccaaugcaaacccuaaugcgaaccccaaugcuaacccaaauaagaacaaucagggcaacggucaagggcauaauaugccuaacgaccccaaucguaacguggaugaaaaugccaacgcaaacuccgccgucaaaaauaacaauaacgaggaaccaucugacaagcacauuaaagaguaucucaauaagauacagaacucgcugucaacugaguggagcccgugcagugugacguguggaaauggcauccagguuagaauuaagccuggcuccgcuaacaaacccaaggaugaacuggacuacgccaaugacaucgagaaaaagauuugcaaaauggaaaaguguucuagcguguuuaacgucguaaauuccucaaucgggcucauaaugguguuaaguuuccuguuucuuaacugaggacuagucccuguucccagagcccacuuuuuuuucuuuuuuugaaauaaaauagccugucuuucagaucucaaaggcucuuuucagagccaccaaaaaaaaaaaaaaaaaaaaaaaaaaaaaaaaaaaaaaaaaaaaaaaaaaaaaaaaaaaaaaaaaaaaaaaaaaaaaaaaaaaaaaaaaaaaaaaaaaaaagaauu

SEQ ID NO: 7626 - RNA, 1568 nt, Artificial Sequence
  mRNA Design a-3 (hSL-A100-N5) comprising derived and/or modified sequence from Pf(3D7)__XP_001351122.1__IgE_Pf-CSP(19-397) (opt3)
aggagagggcgcuuggcuugcaaggacccugagcugcggcauugaagcacacccaacccaacucgacugaagucagccucacugaaccggaucugagaaucuucucucucugggcuugccagggcucuccgaaccuagcuagcauccucuucaauuccaacuagaaagcuuaccauggacuggaccuggauccuguuccucguggccgcugcaacaagaguccacagccuuuuucaggaguaccaaugcuauggcuccucuucaaacacuaggguucugaaugaauugaacuacgauaaugccgggacgaacuuauauaaugagcuggaaaugaacuacuauggaaagcaggagaauugguacagucuaaagaagaacagccggucccucggugaaaaugacgauggcaacaaugaggacaacgagaaacugcgcaagcccaaacauaagaaacuuaaacagccugcggaugggaauccagacccgaacgcuaaucccaacguggauccuaacgccaauccaaacguagaccccaaugcaaacccuaauguggauccaaacgccaaucccaacgcuaauccuaacgcaaauccaaacgccaauccgaacgcuaaucccaacgccaacccuaaugcgaacccaaaugcaaaccccaaugccaacccuaaugcuaacccaaaugccaaccccaaugcaaacccgaaugcuaacccuaaugccaaccccaacgcgaauccaaacgccaauccuaacgcaaaucccaacgucgacccaaaugcuaaccccaaugccaacccuaaugcuaacccaaaugccaacccgaaugcaaaccccaacgccaauccuaacgcuaauccaaacgcgaaucccaacgcaaauccuaacgccaauccaaacgcuaaucccaacgccaauccgaacgcaaauccuaacgccaauccaaacgcuaaccccaaugccaacccuaaugcaaaccccaaugcgaacccaaauaagaacaaucagggaaacggccaaggucacaauaugccuaacgaucccaaucgaaacguggacgaaaaugcuaacgccaacucugcaguuaaaaauaacaauaacgaggaaccaucggauaagcauauuaaagaguaucugaauaagauacagaacucauugagcaccgaguggaguccguguuccgugacaugcgggaauggaauccagguccguauuaagccuggcucugccaacaaacccaaggacgaacucgacuacgcuaaugauaucgagaaaaagauuuguaaaauggaaaagugcagcuccguguucaacguaguuaauucaaguaucggccugauaauggugcugagcuuucucuucuuaaacugaggacuagucccuguucccagagcccacuuuuuuuucuuuuuuugaaauaaaauagccugucuuucagaucucaaaggcucuuuucagagccaccaaaaaaaaaaaaaaaaaaaaaaaaaaaaaaaaaaaaaaaaaaaaaaaaaaaaaaaaaaaaaaaaaaaaaaaaaaaaaaaaaaaaaaaaaaaaaaaaaaaaagaauu

SEQ ID NO: 7627 - RNA, 1733 nt, Artificial Sequence
  mRNA Design a-3 (hSL-A100-N5) comprising derived and/or modified sequence from Pf(3D7)__XP_001351122.1__Pf-CSP_L(G4SG4)_TM domain HA (opt3)
aggagagggcgcuuggcuugcaaggacccugagcugcggcauugaagcacacccaacccaacucgacugaagucagccucacugaaccggaucugagaaucuucucucucugggcuugccagggcucuccgaaccuagcuagcauccucuucaauuccaacuagaaagcuuaccaugaugagaaagcuggccauccucagcguguccucuuuccuuuuugucgaggcucuguuccaggaauaccaaugcuauggcucaaguagcaacaccaggguuuugaaugaguuaaacuacgacaaugcagggacaaaccuguauaaugaacuagagaugaacuacuauggaaagcaggaaaauugguacucccucaagaaaaacucucggucgcugggugagaaugaugacggcaacaaugaggauaacgaaaaacuucgcaagcccaagcacaagaaacugaagcagccugccgacgggaauccagauccgaacgcgaaucccaacguggacccuaacgcuaauccaaacguagaucccaaugccaacccuaauguggacccaaacgcaaaucccaacgccaauccuaacgcuaauccaaacgcaaauccgaacgccaaucccaacgcuaacccuaaugccaacccaaaugcgaaccccaaugcaaacccuaaugccaacccaaaugcuaaccccaaugccaacccgaaugcaaacccuaaugcuaaccccaacgccaauccaaacgcgaauccuaacgccaaucccaacgucgauccaaaugcaaaccccaaugcuaacccuaaugccaacccaaaugcuaacccgaaugccaaccccaacgcaaauccuaacgccaauccaaacgcuaaucccaacgcgaauccuaacgcaaauccaaacgccaaucccaacgcuaauccgaacgccaauccuaacgcaaauccaaacgccaaccccaaugcuaacccuaaugccaaccccaaugcaaacccaaauaaaaacaaucagggaaacggccaaggucauaauaugccuaacgaccccaaucgaaacguggaugagaaugcgaacgcuaacucagccguuaagaauaacaauaacgaggaaccaagcgacaaacacauuaaggaguauuugaauaagauacagaacagucucuccacugaauggucuccguguagcgugacgugcgggaauggaauccagguccguauuaaaccuggcuccgcaaacaagcccaaagaugagcuggacuacgccaaugacaucgaaaagaaaauuuguaagauggagaaaugcucaaguguguuuaacguaguuaauagcucuaucggccugauaauggugcucuccuucuuauuucugaacgggggagguggcucagggggaggcgguaaacuugaaagcaccagaaucuaccagauuuuggcuaucuauaguacagucgccucuucccuggugcuaguggucagccucggggcaauuucguucuggauguguucuaauggaucccugcaaugcaggaucuguauaugaggacuagucccuguucccagagcccacuuuuuuuucuuuuuuugaaauaaaauagccugucuuucagaucucaaaggcucuuuucagagccaccaaaaaaaaaaaaaaaaaaaaaaaaaaaaaaaaaaaaaaaaaaaaaaaaaaaaaaaaaaaaaaaaaaaaaaaaaaaaaaaaaaaaaaaaaaaaaaaaaaaaagaauu

SEQ ID NO: 7628 - RNA, 1607 nt, Artificial Sequence
  mRNA Design a-3 (hSL-A100-N5) comprising derived and/or modified sequence from Pf(3D7)__XP_001351122.1__Pf-CSP(199-377)_L(PVTN)_HBsAg (opt3)
aggagagggcgcuuggcuugcaaggacccugagcugcggcauugaagcacacccaacccaacucgacugaagucagccucacugaaccggaucugagaaucuucucucucugggcuugccagggcucuccgaaccuagcuagcauccucuucaauuccaacuagaaagcuuaccauggaccccaacgccaauccuaacgcuaauccaaacgcaaauccgaacgccaaucccaacgcgaauccuaacgcuaauccaaacgccaaucccaacgcaaauccuaacgccaacccaaaugcuaaccccaaugcaaacccuaaugccaacccaaaugcuaacccgaaugccaaccccaaugcgaacccuaaugcaaacccaaaugccaaccccaacgcuaauccuaacaagaauaaccagggcaaugggcaaggacacaacaugccaaaugaucccaacagaaauguggacgagaacgccaaugcaaacagcgcugucaaaaauaacaauaacgaggaaccguccgauaagcauaucaaagaauaccugaacaagauucaaaauucucucucaaccgaguggaguccuugcagcguuacaugugguaacggcauacaggugaggaucaaacccggguccgccaauaagccaaaggacgaacuugauuaugcgaacgacauugagaaaaagaucugcaaaauggagaaguguucuucgguaccugugacuaauauggaaaacauuacgucaggauuccugggccccuuguuaguccugcaggccggguuuuuccuacucacccggauccugacaauaccacagagccuugauaguugguggacuucccugaauuuucucgguggaucucccgugugcuugggccagaacagccaguccccuaccucaaaucacaguccaacaagcuguccgcccaucugcccuggcuaccgcuggaugugucugcgacguuucauuaucuuucuguucauucucuuacugugccuuaucuuuuugcugguucuacucgacuaucaggggaugcugccaguguguccccuuauaccuggaucuaccacuacaaacaccgguccaugcaaaacguguacuacccccgcacaaggcaauuccauguucccgucaugcugcuguacaaagccuacugaugggaacugcaccuguauuccaauccccagcaguugggcuuuugccaaguaccugugggagugggcuucugucagauucuccugguugagccuccuggugccuuuuguacagugguucguuggauuaucgcccacaguguggcugucugccauuuggaugaugugguauuggggcccaucccucuacucaaucgucaguccuuuuaucccccuucugccaauuuucuucugcuuguggguguauauaugaggacuagucccuguucccagagcccacuuuuuuuucuuuuuuugaaauaaaauagccugucuuucagaucucaaaggcucuuuucagagccaccaaaaaaaaaaaaaaaaaaaaaaaaaaaaaaaaaaaaaaaaaaaaaaaaaaaaaaaaaaaaaaaaaaaaaaaaaaaaaaaaaaaaaaaaaaaaaaaaaaaaagaauu

SEQ ID NO: 7629 - RNA, 1649 nt, Artificial Sequence
  mRNA Design a-3 (hSL-A100-N5) comprising derived and/or modified sequence from Pf(3D7)__XP_001351122.1__Pf-CSP(199-387)_L(PVTN)_HBsAg (opt3)
aggagagggcgcuuggcuugcaaggacccugagcugcggcauugaagcacacccaacccaacucgacugaagucagccucacugaaccggaucugagaaucuucucucucugggcuugccagggcucuccgaaccuagcuagcauccucuucaauuccaacuagaaagcuuaccaugauggcccccgacccuaacgcuaauccaaacgcaaauccgaacgccaaucccaacgcgaauccuaacgcuaauccaaacgccaaucccaacgcaaauccuaacgccaauccaaacgcuaaccccaaugcaaacccuaaugccaacccaaaugcuaacccgaaugccaaccccaaugcgaacccuaaugcaaacccaaaugccaaccccaaugcuaacccuaacgccaauccaaacaagaauaaccagggcaaugggcaaggacacaacaugcccaaugauccgaacagaaauguggacgagaacgcaaaugcuaacagcgccgucaaaaauaacaauaacgaggaaccuuccgauaagcauaucaaagaauaccugaacaagauucaaaauucucucucaaccgaguggagucccugcagcguuacaugugguaacggcauacaggugaggaucaaaccaggguccgcgaauaagccuaaggacgaacuugauuaugccaacgacauugagaaaaagaucugcaaaauggagaaguguucuucgguauucaauguggucaacucaagcauuggacugggccccgugacuaauauggaaaacaucacgaguggguuuuuggguccauuacugguucuacaggcaggauucuuucuccugacccggauacuuacaaucccccagucccuggauucuugguggacuagcuugaauuuccucggcggcuccccugugugccuggggcagaacucacagaguccaaccagcaaucacucuccgacauccugucccccuauuugcccaggauaccgcuggaugugucugcgacguuuuaucauuuuccucuuuaucuuacugcuuugcuugauauuccugcuaguccuccuggacuaucaggguaugcuucccguguguccucugauuccaggcucaaccacuacaaacaccgggcccugcaaaacguguacuaccccggcucaaggaaauagcauguuuccuaguugcugcuguacaaagccaacugauggcaacugcaccuguauccccauuccuucuuccugggccuucgcuaaguacuugugggagugggccagcguaagauuuucguggcucucucuguuaguucccuucgugcagugguuugucggucuguccccaacaguguggcucucagcaaucuggaugaugugguauugggggccuagucuuuacagcaucgugucccccuucauuccacuguugccgauauucuuuugccuaugggucuauaucugaggacuagucccuguucccagagcccacuuuuuuuucuuuuuuugaaauaaaauagccugucuuucagaucucaaaggcucuuuucagagccaccaaaaaaaaaaaaaaaaaaaaaaaaaaaaaaaaaaaaaaaaaaaaaaaaaaaaaaaaaaaaaaaaaaaaaaaaaaaaaaaaaaaaaaaaaaaaaaaaaaaaagaauu

SEQ ID NO: 7630 - RNA, 833 nt, Artificial Sequence
  mRNA Design a-3 (hSL-A100-N5) comprising derived and/or modified sequence from Pf(3D7)__XP_001351122.1__HsALB_Pf-CSP(19-152) (opt3)
aggagagggcgcuuggcuugcaaggacccugagcugcggcauugaagcacacccaacccaacucgacugaagucagccucacugaaccggaucugagaaucuucucucucugggcuugccagggcucuccgaaccuagcuagcauccucuucaauuccaacuagaaagcuuaccaugaagugggugaccuucaucagccugcucuuucuuuucuccucugccuacucacuguuucaggaguaucaaugcuacggcaguagcuccaacacaagagucuugaaugaauuaaacuaugacaaugcugggacuaaccuguacaaugagcuagaaaugaacuauuacggaaaacaggagaauugguauucucucaagaaaaacucgaggucacugggugaaaaugaugacggcaacaaugaggauaacgagaaacuucggaagcccaagcacaagaaacugaagcagccugcagacgggaauccagauccgaacgccaaucccaacguugacccuaacgcgaauccaaacguggaucccaaugcuaacccuaauguagacccaaacgccaaucccaacgcaaauccuaacgccaauccaaacgcuaauccgaacgcaaaucccaacgccaacccuugaggacuagucccuguucccagagcccacuuuuuuuucuuuuuuugaaauaaaauagccugucuuucagaucucaaaggcucuuuucagagccaccaaaaaaaaaaaaaaaaaaaaaaaaaaaaaaaaaaaaaaaaaaaaaaaaaaaaaaaaaaaaaaaaaaaaaaaaaaaaaaaaaaaaaaaaaaaaaaaaaaaaagaauu

SEQ ID NO: 7631 - RNA, 953 nt, Artificial Sequence
  mRNA Design a-3 (hSL-A100-N5) comprising derived and/or modified sequence from Pf(3D7)__XP_001351122.1__HsALB_Pf-CSP(19-192) (opt3)
aggagagggcgcuuggcuugcaaggacccugagcugcggcauugaagcacacccaacccaacucgacugaagucagccucacugaaccggaucugagaaucuucucucucugggcuugccagggcucuccgaaccuagcuagcauccucuucaauuccaacuagaaagcuuaccaugaagugggugaccuucaucagccugcucuuucuuuucuccucugccuacucacuguuucaggaguaucaaugcuacggcaguagcuccaacacaagagucuugaaugaauuaaacuaugacaaugcugggacuaaccuguacaaugagcuagaaaugaacuauuacggaaaacaggagaauugguauucucucaagaaaaacucgaggucacugggugaaaaugaugacggcaacaaugaggauaacgagaaacuucggaagcccaagcacaagaaacugaagcagccugcagacgggaauccagauccgaacgccaaucccaacguugacccuaacgcgaauccaaacguggaucccaaugcuaacccuaauguagacccaaacgccaaucccaacgcaaauccuaacgccaauccaaacgcuaauccgaacgcaaaucccaacgccaacccuaaugcuaacccaaaugccaaccccaaugcgaacccuaaugcaaacccaaaugccaaccccaaugcuaacccgaaugccaacccuaaugcaaaccccaacgcuaauccaaacgccaauccuugaggacuagucccuguucccagagcccacuuuuuuuucuuuuuuugaaauaaaauagccugucuuucagaucucaaaggcucuuuucagagccaccaaaaaaaaaaaaaaaaaaaaaaaaaaaaaaaaaaaaaaaaaaaaaaaaaaaaaaaaaaaaaaaaaaaaaaaaaaaaaaaaaaaaaaaaaaaaaaaaaaaaagaauu

SEQ ID NO: 7632 - RNA, 1193 nt, Artificial Sequence
  mRNA Design a-3 (hSL-A100-N5) comprising derived and/or modified sequence from Pf(3D7)__XP_001351122.1__HsALB_Pf-CSP(19-272) (opt3)
aggagagggcgcuuggcuugcaaggacccugagcugcggcauugaagcacacccaacccaacucgacugaagucagccucacugaaccggaucugagaaucuucucucucugggcuugccagggcucuccgaaccuagcuagcauccucuucaauuccaacuagaaagcuuaccaugaagugggugaccuucaucagccugcucuuucuuuucuccucugccuacucacuguuucaggaguaucaaugcuacggcaguagcuccaacacaagagucuugaaugaauuaaacuaugacaaugcugggacuaaccuguacaaugagcuagaaaugaacuauuacggaaaacaggagaauugguauucucucaagaaaaacucgaggucacugggugaaaaugaugacggcaacaaugaggauaacgagaaacuucggaagcccaagcacaagaaacugaagcagccugcagacgggaauccagauccgaacgccaaucccaacguugacccuaacgcgaauccaaacguggaucccaaugcuaacccuaauguagacccaaacgccaaucccaacgcaaauccuaacgccaauccaaacgcuaauccgaacgcaaaucccaacgccaacccuaaugcuaacccaaaugccaaccccaaugcgaacccuaaugcaaacccaaaugccaaccccaaugcuaacccgaaugccaacccuaaugcaaaccccaacgcuaauccaaacgccaauccuaacgcgaaucccaacguggauccaaaugccaaccccaaugcaaacccuaaugcuaacccaaaugccaacccgaaugcuaaccccaacgccaauccuaacgcaaauccaaacgccaaucccaacgcuaauccuaacgcgaauccaaacgcaaaucccaacgccaauccgaacgcuaauccuaacgccaauccaaacgcaaaccccaaugccaacccuaaugcuaaccccaaugccaacccaugaggacuagucccuguucccagagcccacuuuuuuuucuuuuuuugaaauaaaauagccugucuuucagaucucaaaggcucuuuucagagccaccaaaaaaaaaaaaaaaaaaaaaaaaaaaaaaaaaaaaaaaaaaaaaaaaaaaaaaaaaaaaaaaaaaaaaaaaaaaaaaaaaaaaaaaaaaaaaaaaaaaaagaauu

SEQ ID NO: 7633 - RNA, 1355 nt, Artificial Sequence
  mRNA Design a-3 (hSL-A100-N5) comprising derived and/or modified sequence from Pf(3D7)__XP_001351122.1__HsALB_Pf-CSP(19-272)_L(AAY)_Pf-CSP(310-3 27)_L(AAY)_Pf-CSP(346-375) (opt3)
aggagagggcgcuuggcuugcaaggacccugagcugcggcauugaagcacacccaacccaacucgacugaagucagccucacugaaccggaucugagaaucuucucucucugggcuugccagggcucuccgaaccuagcuagcauccucuucaauuccaacuagaaagcuuaccaugaagugggugaccuucaucagccugcucuuucuuuucuccucugccuacucacuguuucaggaguaucaaugcuacggcaguagcuccaacacaagagucuugaaugaauuaaacuaugacaaugcugggacuaaccuguacaaugagcuagaaaugaacuauuacggaaaacaggagaauugguauucucucaagaaaaacucgaggucacugggugaaaaugaugacggcaacaaugaggauaacgagaaacuucggaagcccaagcacaagaaacugaagcagccugcagacgggaauccagauccgaacgccaaucccaacguugacccuaacgcgaauccaaacguggaucccaaugcuaacccuaauguagacccaaacgccaaucccaacgcaaauccuaacgccaauccaaacgcuaauccgaacgcaaaucccaacgccaacccuaaugcuaacccaaaugccaaccccaaugcgaacccuaaugcaaacccaaaugccaaccccaaugcuaacccgaaugccaacccuaaugcaaaccccaacgcuaauccaaacgccaauccuaacgcgaaucccaacguggauccaaaugccaaccccaaugcaaacccuaaugcuaacccaaaugccaacccgaaugcuaaccccaacgccaauccuaacgcaaauccaaacgccaaucccaacgcuaauccuaacgcgaauccaaacgcaaaucccaacgccaauccgaacgcuaauccuaacgccaauccaaacgcaaaccccaaugccaacccuaaugcuaaccccaaugccaacccagcagcguacgaaccuagcgacaaacauauuaaggaguacuugaauaaaauacagaacagucucgcugccuauaucaagcccggauccgcaaauaagccaaaagaugaacuggacuacgccaacgauauugagaagaaaaucuguaagauggagaaaugcucuugaggacuagucccuguucccagagcccacuuuuuuuucuuuuuuugaaauaaaauagccugucuuucagaucucaaaggcucuuuucagagccaccaaaaaaaaaaaaaaaaaaaaaaaaaaaaaaaaaaaaaaaaaaaaaaaaaaaaaaaaaaaaaaaaaaaaaaaaaaaaaaaaaaaaaaaaaaaaaaaaaaaaagaauu

SEQ ID NO: 7634 - RNA, 1316 nt, Artificial Sequence
  mRNA Design a-3 (hSL-A100-N5) comprising derived and/or modified sequence from Pf(3D7)__XP_001351122.1__HsALB_Pf-CSP(19-272)_L(AAY)_Pf-CSP(346-3 65)_L(AAY)_P2 (opt3)
aggagagggcgcuuggcuugcaaggacccugagcugcggcauugaagcacacccaacccaacucgacugaagucagccucacugaaccggaucugagaaucuucucucucugggcuugccagggcucuccgaaccuagcuagcauccucuucaauuccaacuagaaagcuuaccaugaagugggugaccuucaucagccugcucuuucuuuucuccucugccuacucacuguuucaggaguaucaaugcuacggcaguagcuccaacacaagagucuugaaugaauuaaacuaugacaaugcugggacuaaccuguacaaugagcuagaaaugaacuauuacggaaaacaggagaauugguauucucucaagaaaaacucgaggucacugggugaaaaugaugacggcaacaaugaggauaacgagaaacuucggaagcccaagcacaagaaacugaagcagccugcagacgggaauccagauccgaacgccaaucccaacguugacccuaacgcgaauccaaacguggaucccaaugcuaacccuaauguagacccaaacgccaaucccaacgcaaauccuaacgccaauccaaacgcuaauccgaacgcaaaucccaacgccaacccuaaugcuaacccaaaugccaaccccaaugcgaacccuaaugcaaacccaaaugccaaccccaaugcuaacccgaaugccaacccuaaugcaaaccccaacgcuaauccaaacgccaauccuaacgcgaaucccaacguggauccaaaugccaaccccaaugcaaacccuaaugcuaacccaaaugccaacccgaaugcuaaccccaacgccaauccuaacgcaaauccaaacgccaaucccaacgcuaauccuaacgcgaauccaaacgcaaaucccaacgccaauccgaacgcuaauccuaacgccaauccaaacgcaaaccccaaugccaacccuaaugcuaaccccaaugccaacccagcagcguacauuaaaccuggaagcgcuaauaagcccaaagacgaauuggauuacgccaacgacauagaggcagccuaucaguacaucaaggcuaauaguaaguucauuggcaucacggaacucugaggacuagucccuguucccagagcccacuuuuuuuucuuuuuuugaaauaaaauagccugucuuucagaucucaaaggcucuuuucagagccaccaaaaaaaaaaaaaaaaaaaaaaaaaaaaaaaaaaaaaaaaaaaaaaaaaaaaaaaaaaaaaaaaaaaaaaaaaaaaaaaaaaaaaaaaaaaaaaaaaaaaagaauu

SEQ ID NO: 7635 - RNA, 1310 nt, Artificial Sequence
  mRNA Design a-3 (hSL-A100-N5) comprising derived and/or modified sequence from Pf(3D7)__XP_001351122.1__HsALB_Pf-CSP(19-272)_L(AAY)_Pf-CSP(346-3 65)_L(AAY)_PADRE (opt3)
aggagagggcgcuuggcuugcaaggacccugagcugcggcauugaagcacacccaacccaacucgacugaagucagccucacugaaccggaucugagaaucuucucucucugggcuugccagggcucuccgaaccuagcuagcauccucuucaauuccaacuagaaagcuuaccaugaagugggugaccuucaucagccugcucuuucuuuucuccucugccuacucacuguuucaggaguaucaaugcuacggcaguagcuccaacacaagagucuugaaugaauuaaacuaugacaaugcugggacuaaccuguacaaugagcuagaaaugaacuauuacggaaaacaggagaauugguauucucucaagaaaaacucgaggucacugggugaaaaugaugacggcaacaaugaggauaacgagaaacuucggaagcccaagcacaagaaacugaagcagccugcagacgggaauccagauccgaacgccaaucccaacguugacccuaacgcgaauccaaacguggaucccaaugcuaacccuaauguagacccaaacgccaaucccaacgcaaauccuaacgccaauccaaacgcuaauccgaacgcaaaucccaacgccaacccuaaugcuaacccaaaugccaaccccaaugcgaacccuaaugcaaacccaaaugccaaccccaaugcuaacccgaaugccaacccuaaugcaaaccccaacgcuaauccaaacgccaauccuaacgcgaaucccaacguggauccaaaugccaaccccaaugcaaacccuaaugcuaacccaaaugccaacccgaaugcuaaccccaacgccaauccuaacgcaaauccaaacgccaaucccaacgcuaauccuaacgcgaauccaaacgcaaaucccaacgccaauccgaacgcuaauccuaacgccaauccaaacgcaaaccccaaugccaacccuaaugcuaaccccaaugccaacccagcagcguacauuaaaccuggaagcgcuaauaagcccaaagacgaauuggauuacgccaacgacauagaggcagccuaugcuaaguucgucgccgcauggacgcucaaggcugccgcgugaggacuagucccuguucccagagcccacuuuuuuuucuuuuuuugaaauaaaauagccugucuuucagaucucaaaggcucuuuucagagccaccaaaaaaaaaaaaaaaaaaaaaaaaaaaaaaaaaaaaaaaaaaaaaaaaaaaaaaaaaaaaaaaaaaaaaaaaaaaaaaaaaaaaaaaaaaaaaaaaaaaaagaauu

SEQ ID NO: 7636 - RNA, 1367 nt, Artificial Sequence
  mRNA Design a-3 (hSL-A100-N5) comprising derived and/or modified sequence from Pf(3D7)__XP_001351122.1__HsALB_Pf-CSP(19-272)_L(G4S)_Pf-CSP(310-3 27)_L(G4S)_Pf-CSP(346-375) (opt3)
aggagagggcgcuuggcuugcaaggacccugagcugcggcauugaagcacacccaacccaacucgacugaagucagccucacugaaccggaucugagaaucuucucucucugggcuugccagggcucuccgaaccuagcuagcauccucuucaauuccaacuagaaagcuuaccaugaagugggugaccuucaucagccugcucuuucuuuucuccucugccuacucacuguuucaggaguaucaaugcuacggcaguagcuccaacacaagagucuugaaugaauuaaacuaugacaaugcugggacuaaccuguacaaugagcuagaaaugaacuauuacggaaaacaggagaauugguauucucucaagaaaaacucgaggucacugggugaaaaugaugacggcaacaaugaggauaacgagaaacuucggaagcccaagcacaagaaacugaagcagccugcagacgggaauccagauccgaacgccaaucccaacguugacccuaacgcgaauccaaacguggaucccaaugcuaacccuaauguagacccaaacgccaaucccaacgcaaauccuaacgccaauccaaacgcuaauccgaacgcaaaucccaacgccaacccuaaugcuaacccaaaugccaaccccaaugcgaacccuaaugcaaacccaaaugccaaccccaaugcuaacccgaaugccaacccuaaugcaaaccccaacgcuaauccaaacgccaauccuaacgcgaaucccaacguggauccaaaugccaaccccaaugcaaacccuaaugcuaacccaaaugccaacccgaaugcuaaccccaacgccaauccuaacgcaaauccaaacgccaaucccaacgcuaauccuaacgcgaauccaaacgcaaaucccaacgccaauccgaacgcuaauccuaacgccaauccaaacgcaaaccccaaugccaacccuaaugcuaaccccaaugccaacccaggaggcggugggagcgaaccuagugacaaacauauuaaggaguacuugaauaaaauacagaacucccucggaggcggcgggucuaucaagcccggaagcgcaaauaagccaaaagaugaacuggacuacgcgaacgauauugagaagaaaaucuguaagauggagaaaugcuccugaggacuagucccuguucccagagcccacuuuuuuuucuuuuuuugaaauaaaauagccugucuuucagaucucaaaggcucuuuucagagccaccaaaaaaaaaaaaaaaaaaaaaaaaaaaaaaaaaaaaaaaaaaaaaaaaaaaaaaaaaaaaaaaaaaaaaaaaaaaaaaaaaaaaaaaaaaaaaaaaaaaaagaauu

SEQ ID NO: 7637 - RNA, 1352 nt, Artificial Sequence
  mRNA Design a-3 (hSL-A100-N5) comprising derived and/or modified sequence from Pf(3D7)__XP_001351122.1__HsALB_Pf-CSP(19-272)_L(G4S)_Pf-CSP(310-3 27)_Pf-CSP(346-375) (opt3)
aggagagggcgcuuggcuugcaaggacccugagcugcggcauugaagcacacccaacccaacucgacugaagucagccucacugaaccggaucugagaaucuucucucucugggcuugccagggcucuccgaaccuagcuagcauccucuucaauuccaacuagaaagcuuaccaugaagugggugaccuucaucagccugcucuuucuuuucuccucugccuacucacuguuucaggaguaucaaugcuacggcaguagcuccaacacaagagucuugaaugaauuaaacuaugacaaugcugggacuaaccuguacaaugagcuagaaaugaacuauuacggaaaacaggagaauugguauucucucaagaaaaacucgaggucacugggugaaaaugaugacggcaacaaugaggauaacgagaaacuucggaagcccaagcacaagaaacugaagcagccugcagacgggaauccagauccgaacgccaaucccaacguugacccuaacgcgaauccaaacguggaucccaaugcuaacccuaauguagacccaaacgccaaucccaacgcaaauccuaacgccaauccaaacgcuaauccgaacgcaaaucccaacgccaacccuaaugcuaacccaaaugccaaccccaaugcgaacccuaaugcaaacccaaaugccaaccccaaugcuaacccgaaugccaacccuaaugcaaaccccaacgcuaauccaaacgccaauccuaacgcgaaucccaacguggauccaaaugccaaccccaaugcaaacccuaaugcuaacccaaaugccaacccgaaugcuaaccccaacgccaauccuaacgcaaauccaaacgccaaucccaacgcuaauccuaacgcgaauccaaacgcaaaucccaacgccaauccgaacgcuaauccuaacgccaauccaaacgcaaaccccaaugccaacccuaaugcuaaccccaaugccaacccaggaggcggugggagcgaaccuagugacaaacauauuaaggaguacuugaauaaaauacagaacucccucaucaagcccggaucugcaaauaagccaaaagaugaacuggacuacgcgaacgauauugagaagaaaaucuguaagauggagaaaugcagcugaggacuagucccuguucccagagcccacuuuuuuuucuuuuuuugaaauaaaauagccugucuuucagaucucaaaggcucuuuucagagccaccaaaaaaaaaaaaaaaaaaaaaaaaaaaaaaaaaaaaaaaaaaaaaaaaaaaaaaaaaaaaaaaaaaaaaaaaaaaaaaaaaaaaaaaaaaaaaaaaaaaaagaauu

SEQ ID NO: 7638 - RNA, 1352 nt, Artificial Sequence
  mRNA Design a-3 (hSL-A100-N5) comprising derived and/or modified sequence from Pf(3D7)__XP_001351122.1__HsALB_Pf-CSP(19-325) (opt3)
aggagagggcgcuuggcuugcaaggacccugagcugcggcauugaagcacacccaacccaacucgacugaagucagccucacugaaccggaucugagaaucuucucucucugggcuugccagggcucuccgaaccuagcuagcauccucuucaauuccaacuagaaagcuuaccaugaagugggugaccuucaucagccugcucuuucuuuucuccucugccuacucacuguuucaggaguaucaaugcuacggcaguagcuccaacacaagagucuugaaugaauuaaacuaugacaaugcugggacuaaccuguacaaugagcuagaaaugaacuauuacggaaaacaggagaauugguauucucucaagaaaaacucgaggucacugggugaaaaugaugacggcaacaaugaggauaacgagaaacuucggaagcccaagcacaagaaacugaagcagccugcagacgggaauccagauccgaacgccaaucccaacguugacccuaacgcgaauccaaacguggaucccaaugcuaacccuaauguagacccaaacgccaaucccaacgcaaauccuaacgccaauccaaacgcuaauccgaacgcaaaucccaacgccaacccuaaugcuaacccaaaugccaaccccaaugcgaacccuaaugcaaacccaaaugccaaccccaaugcuaacccgaaugccaacccuaaugcaaaccccaacgcuaauccaaacgccaauccuaacgcgaaucccaacguggauccaaaugccaaccccaaugcaaacccuaaugcuaacccaaaugccaacccgaaugcuaaccccaacgccaauccuaacgcaaauccaaacgccaaucccaacgcuaauccuaacgcgaauccaaacgcaaaucccaacgccaauccgaacgcuaauccuaacgccaauccaaacgcaaaccccaaugccaacccuaaugcuaaccccaaugccaacccaaauaaaaacaaucagggaaacggccaaggucauaauaugccuaacgaccccaaucgcaacgucgaugaaaaugcaaacgcgaacagcgcugugaagaauaacaauaacgaggaaccaagugacaaacacauuaaggaguacuugaauaagauacagaacugaggacuagucccuguucccagagcccacuuuuuuuucuuuuuuugaaauaaaauagccugucuuucagaucucaaaggcucuuuucagagccaccaaaaaaaaaaaaaaaaaaaaaaaaaaaaaaaaaaaaaaaaaaaaaaaaaaaaaaaaaaaaaaaaaaaaaaaaaaaaaaaaaaaaaaaaaaaaaaaaaaaaagaauu

SEQ ID NO: 7639 - RNA, 1529 nt, Artificial Sequence
  mRNA Design a-3 (hSL-A100-N5) comprising derived and/or modified sequence from Pf(3D7)__XP_001351122.1__HsALB_Pf-CSP(19-384) (opt3)
aggagagggcgcuuggcuugcaaggacccugagcugcggcauugaagcacacccaacccaacucgacugaagucagccucacugaaccggaucugagaaucuucucucucugggcuugccagggcucuccgaaccuagcuagcauccucuucaauuccaacuagaaagcuuaccaugaagugggugaccuucaucagccugcucuuucuuuucuccucugccuacucacuguuucaggaguaucaaugcuacggcaguagcuccaacacaagagucuugaaugaauuaaacuaugacaaugcugggacuaaccuguacaaugagcuagaaaugaacuauuacggaaaacaggagaauugguauucucucaagaaaaacucgaggucacugggugaaaaugaugacggcaacaaugaggauaacgagaaacuucggaagcccaagcacaagaaacugaagcagccugcagacgggaauccagauccgaacgccaaucccaacguugacccuaacgcgaauccaaacguggaucccaaugcuaacccuaauguagacccaaacgccaaucccaacgcaaauccuaacgccaauccaaacgcuaauccgaacgcaaaucccaacgccaacccuaaugcuaacccaaaugccaaccccaaugcgaacccuaaugcaaacccaaaugccaaccccaaugcuaacccgaaugccaacccuaaugcaaaccccaacgcuaauccaaacgccaauccuaacgcgaaucccaacguggauccaaaugccaaccccaaugcaaacccuaaugcuaacccaaaugccaacccgaaugcuaaccccaacgccaauccuaacgcaaauccaaacgccaaucccaacgcuaauccuaacgcgaauccaaacgcaaaucccaacgccaauccgaacgcuaauccuaacgccaauccaaacgcaaaccccaaugccaacccuaaugcuaaccccaaugccaacccaaauaaaaacaaucagggaaacggccaaggucauaauaugccuaacgaccccaaucgcaacgucgaugaaaaugcaaacgcgaacagcgcugugaagaauaacaauaacgaggaaccaagugacaaacacauuaaggaguacuugaauaagauacagaacucccucucuacggaguggagcccguguuccguuaccugcgggaauggaauccaggugcgaauuaaaccuggcucagccaacaagcccaaagaugaacuggacuacgcaaaugacaucgagaagaaaauuuguaagauggaaaaaugcaguagcgucuucaacgugguaaauucuuccugaggacuagucccuguucccagagcccacuuuuuuuucuuuuuuugaaauaaaauagccugucuuucagaucucaaaggcucuuuucagagccaccaaaaaaaaaaaaaaaaaaaaaaaaaaaaaaaaaaaaaaaaaaaaaaaaaaaaaaaaaaaaaaaaaaaaaaaaaaaaaaaaaaaaaaaaaaaaaaaaaaaaagaauu

SEQ ID NO: 7640 - RNA, 1667 nt, Artificial Sequence
  mRNA Design a-3 (hSL-A100-N5) comprising derived and/or modified sequence from Pf(3D7)__XP_001351122.1__HsALB_Pf-CSP(19-384)_TM domain HA (opt3)
aggagagggcgcuuggcuugcaaggacccugagcugcggcauugaagcacacccaacccaacucgacugaagucagccucacugaaccggaucugagaaucuucucucucugggcuugccagggcucuccgaaccuagcuagcauccucuucaauuccaacuagaaagcuuaccaugaagugggugaccuucaucagccugcucuuucuuuucuccucugccuacucacuguuucaggaguaucaaugcuacggcaguagcuccaacacaagagucuugaaugaauuaaacuaugacaaugcugggacuaaccuguacaaugagcuagaaaugaacuauuacggaaaacaggagaauugguauucucucaagaaaaacucgaggucacugggugaaaaugaugacggcaacaaugaggauaacgagaaacuucggaagcccaagcacaagaaacugaagcagccugcagacgggaauccagauccgaacgccaaucccaacguugacccuaacgcgaauccaaacguggaucccaaugcuaacccuaauguagacccaaacgccaaucccaacgcaaauccuaacgccaauccaaacgcuaauccgaacgcaaaucccaacgccaacccuaaugcuaacccaaaugccaaccccaaugcgaacccuaaugcaaacccaaaugccaaccccaaugcuaacccgaaugccaacccuaaugcaaaccccaacgcuaauccaaacgccaauccuaacgcgaaucccaacguggauccaaaugccaaccccaaugcaaacccuaaugcuaacccaaaugccaacccgaaugcuaaccccaacgccaauccuaacgcaaauccaaacgccaaucccaacgcuaauccuaacgcgaauccaaacgcaaaucccaacgccaauccgaacgcuaauccuaacgccaauccaaacgcaaaccccaaugccaacccuaaugcuaaccccaaugccaacccaaauaaaaacaaucagggaaacggccaaggucauaauaugccuaacgaccccaaucgcaacgucgaugaaaaugcaaacgcgaacagcgcugugaagaauaacaauaacgaggaaccaagugacaaacacauuaaggaguacuugaauaagauacagaacucccucucuacggaguggagcccguguuccguuaccugcgggaauggaauccaggugcgaauuaaaccuggcucagccaacaagcccaaagaugaacuggacuacgcaaaugacaucgagaagaaaauuuguaagauggaaaaaugcaguagcgucuucaacgugguaaauucuuccaagcuggagucaacacguaucuaucagauacucgccaucuacagcacuguugcuaguucuuuagugcuggucgugucccuuggcgccauuagcuuuuggauguguucgaacgggucuuugcaaugcagaaucuguauuugaggacuagucccuguucccagagcccacuuuuuuuucuuuuuuugaaauaaaauagccugucuuucagaucucaaaggcucuuuucagagccaccaaaaaaaaaaaaaaaaaaaaaaaaaaaaaaaaaaaaaaaaaaaaaaaaaaaaaaaaaaaaaaaaaaaaaaaaaaaaaaaaaaaaaaaaaaaaaaaaaaaaagaauu

SEQ ID NO: 7641 - RNA, 1379 nt, Artificial Sequence
  mRNA Design a-3 (hSL-A100-N5) comprising derived and/or modified sequence from Pf(3D7)__XP_001351122.1__HsALB_Pf-CSP(82-397) (opt3)
aggagagggcgcuuggcuugcaaggacccugagcugcggcauugaagcacacccaacccaacucgacugaagucagccucacugaaccggaucugagaaucuucucucucugggcuugccagggcucuccgaaccuagcuagcauccucuucaauuccaacuagaaagcuuaccaugaagugggugaccuucaucagccugcucuuucuuuucuccucugccuacucagacaacgagaaacugagaaagcccaaacacaagaaauugaagcagccugcugauggcaauccagacccgaacgcaaaucccaacgucgauccuaaugccaacccaaauguugaccccaacgcgaauccuaacguggauccaaaugcuaaccccaaugccaacccuaaugcaaacccaaacgccaauccgaacgcuaaucccaacgcaaauccuaacgccaauccaaacgcuaaucccaacgccaauccuaacgcgaauccaaacgcaaaucccaacgccaacccgaaugcuaacccuaaugccaaccccaaugcaaacccaaaugcuaacccuaaugccaaccccaauguagacccaaacgcgaaucccaacgccaauccuaacgcaaacccaaaugcuaacccgaaugccaaccccaaugcuaacccuaaugccaacccaaaugcaaaccccaaugccaacccuaaugcuaacccaaaugcgaaccccaacgcaaauccgaacgccaauccuaacgcuaauccaaacgccaaucccaacgcaaauccuaacgccaaucccaacgcuaauccaaacaagaauaaccaggggaauggacagggucauaacaugccuaacgaucccaauaggaacguggacgaaaaugccaacgcaaauagugcggucaaaaacaauaacaaugaggaaccaagcgauaagcacauuaaagaguauuuaaacaagauacaaaauucccugucuacagaauggucgccgugcucagugacuuguggcaacgggauccagguucggauuaaaccuggaagcgcuaauaagcccaaggacgagcuagauuacgccaacgacaucgagaaaaagauuugcaaaauggaaaaguguaguuccguguuuaaugucgugaacucuagcaucggccucauaaugguacuguccuuccuuuuucugaacugaggacuagucccuguucccagagcccacuuuuuuuucuuuuuuugaaauaaaauagccugucuuucagaucucaaaggcucuuuucagagccaccaaaaaaaaaaaaaaaaaaaaaaaaaaaaaaaaaaaaaaaaaaaaaaaaaaaaaaaaaaaaaaaaaaaaaaaaaaaaaaaaaaaaaaaaaaaaaaaaaaaaagaauu

SEQ ID NO: 7642 - RNA, 731 nt, Artificial Sequence
  mRNA Design a-3 (hSL-A100-N5) comprising derived and/or modified sequence from Pf(3D7)__XP_001351122.1__HsALB_Pf-CSP(93-192) (opt3)
aggagagggcgcuuggcuugcaaggacccugagcugcggcauugaagcacacccaacccaacucgacugaagucagccucacugaaccggaucugagaaucuucucucucugggcuugccagggcucuccgaaccuagcuagcauccucuucaauuccaacuagaaagcuuaccaugaagugggugaccuucaucagccugcucuuucuuuucuccucugccuacucaaaacugaagcagcccgcugacggcaacccugauccaaaugcaaacccgaaugucgaccccaacgccaauccuaacguugauccaaaugcgaaccccaauguggacccuaacgcuaauccaaacgccaaucccaacgcaaauccuaacgccaacccaaaugcuaacccgaaugcaaaccccaaugccaacccuaaugcuaacccaaaugccaaccccaaugcgaacccuaaugcaaacccaaaugccaaccccaacgcuaauccgaacgccaauccuaacgcaaaucccaacgcuaauccaugaggacuagucccuguucccagagcccacuuuuuuuucuuuuuuugaaauaaaauagccugucuuucagaucucaaaggcucuuuucagagccaccaaaaaaaaaaaaaaaaaaaaaaaaaaaaaaaaaaaaaaaaaaaaaaaaaaaaaaaaaaaaaaaaaaaaaaaaaaaaaaaaaaaaaaaaaaaaaaaaaaaaagaauu

SEQ ID NO: 7643 - RNA, 971 nt, Artificial Sequence
  mRNA Design a-3 (hSL-A100-N5) comprising derived and/or modified sequence from Pf(3D7)__XP_001351122.1__HsALB_Pf-CSP(93-272) (opt3)
aggagagggcgcuuggcuugcaaggacccugagcugcggcauugaagcacacccaacccaacucgacugaagucagccucacugaaccggaucugagaaucuucucucucugggcuugccagggcucuccgaaccuagcuagcauccucuucaauuccaacuagaaagcuuaccaugaagugggugaccuucaucagccugcucuuucuuuucuccucugccuacucaaaacugaagcagcccgcugacggcaacccugauccaaaugcaaacccgaaugucgaccccaacgccaauccuaacguugauccaaaugcgaaccccaauguggacccuaacgcuaauccaaacgccaaucccaacgcaaauccuaacgccaacccaaaugcuaacccgaaugcaaaccccaaugccaacccuaaugcuaacccaaaugccaaccccaaugcgaacccuaaugcaaacccaaaugccaaccccaacgcuaauccgaacgccaauccuaacgcaaaucccaacgcuaauccaaacgccaauccuaacguagaucccaaugcgaacccaaaugccaaccccaaugcaaacccuaacgcuaauccaaacgccaauccgaacgcuaaucccaacgccaauccuaacgcaaauccaaacgccaaucccaacgcuaauccuaacgcgaauccaaacgcaaaccccaaugccaacccgaaugcuaacccuaaugccaacccaaaugcaaaccccaaugccaacccuaaugcuaaccccugaggacuagucccuguucccagagcccacuuuuuuuucuuuuuuugaaauaaaauagccugucuuucagaucucaaaggcucuuuucagagccaccaaaaaaaaaaaaaaaaaaaaaaaaaaaaaaaaaaaaaaaaaaaaaaaaaaaaaaaaaaaaaaaaaaaaaaaaaaaaaaaaaaaaaaaaaaaaaaaaaaaaagaauu

SEQ ID NO: 7644 - RNA, 1346 nt, Artificial Sequence
  mRNA Design a-3 (hSL-A100-N5) comprising derived and/or modified sequence from Pf(3D7)__XP_001351122.1__HsALB_Pf-CSP(93-397) (opt3)
aggagagggcgcuuggcuugcaaggacccugagcugcggcauugaagcacacccaacccaacucgacugaagucagccucacugaaccggaucugagaaucuucucucucugggcuugccagggcucuccgaaccuagcuagcauccucuucaauuccaacuagaaagcuuaccaugaagugggugaccuucaucagccugcucuuucuuuucuccucugccuacucaaaacugaagcagcccgcugacggcaacccugauccaaaugcaaacccgaaugucgaccccaacgccaauccuaacguugauccaaaugcgaaccccaauguggacccuaacgcuaauccaaacgccaaucccaacgcaaauccuaacgccaacccaaaugcuaacccgaaugcaaaccccaaugccaacccuaaugcuaacccaaaugccaaccccaaugcgaacccuaaugcaaacccaaaugccaaccccaacgcuaauccgaacgccaauccuaacgcaaaucccaacgcuaauccaaacgccaauccuaacguagaucccaaugcgaacccaaaugccaaccccaaugcaaacccuaacgcuaauccaaacgccaauccgaacgcuaaucccaacgccaauccuaacgcaaauccaaacgccaaucccaacgcuaauccuaacgcgaauccaaacgcaaaccccaaugccaacccgaaugcuaacccuaaugccaacccaaaugcaaaccccaaugccaacccuaaugcuaaccccaauaaaaacaaucaagggaacggacagggucacaauaugccaaacgacccuaacagaaauguggaugagaacgccaaugcaaacagugcggucaagaauaacaauaacgaggaacccagcgacaaacauauuaaggaauauuugaauaagauacagaacuccuuaucuacagaguggucgccaugcucagugacuuguggcaaugggauccagguuaggauuaaaccgggaagcgcuaacaagccuaaagaugaacuggacuacgccaaugauaucgagaagaaaauuugcaagauggagaaguguaguuccguguuuaacgucguaaauucuagcaucggccuaauaauggugcucuccuuccuguuucuuaacugaggacuagucccuguucccagagcccacuuuuuuuucuuuuuuugaaauaaaauagccugucuuucagaucucaaaggcucuuuucagagccaccaaaaaaaaaaaaaaaaaaaaaaaaaaaaaaaaaaaaaaaaaaaaaaaaaaaaaaaaaaaaaaaaaaaaaaaaaaaaaaaaaaaaaaaaaaaaaaaaaaaaagaauu

SEQ ID NO: 7645 - RNA, 716 nt, Artificial Sequence
  mRNA Design a-3 (hSL-A100-N5) comprising derived and/or modified sequence from Pf(3D7)__XP_001351122.1__HsALB_Pf-CSP(98-192) (opt3)
aggagagggcgcuuggcuugcaaggacccugagcugcggcauugaagcacacccaacccaacucgacugaagucagccucacugaaccggaucugagaaucuucucucucugggcuugccagggcucuccgaaccuagcuagcauccucuucaauuccaacuagaaagcuuaccaugaagugggugaccuucaucagccugcucuuucuuuucuccucugccuacucagcugacggcaaccccgauccuaaugcaaacccaaaugucgacccgaacgccaaucccaacguugauccuaaugcgaacccaaauguggaccccaacgcuaauccuaacgccaauccaaacgcaaaucccaacgccaacccuaaugcuaacccaaaugcaaacccgaaugccaaccccaaugcuaacccuaaugccaacccaaaugcgaaccccaaugcaaacccuaaugccaacccaaacgcuaaucccaacgccaauccgaacgcaaauccuaacgcuaaucccugaggacuagucccuguucccagagcccacuuuuuuuucuuuuuuugaaauaaaauagccugucuuucagaucucaaaggcucuuuucagagccaccaaaaaaaaaaaaaaaaaaaaaaaaaaaaaaaaaaaaaaaaaaaaaaaaaaaaaaaaaaaaaaaaaaaaaaaaaaaaaaaaaaaaaaaaaaaaaaaaaaaaagaauu

SEQ ID NO: 7646 - RNA, 956 nt, Artificial Sequence
  mRNA Design a-3 (hSL-A100-N5) comprising derived and/or modified sequence from Pf(3D7)__XP_001351122.1__HsALB_Pf-CSP(98-272) (opt3)
aggagagggcgcuuggcuugcaaggacccugagcugcggcauugaagcacacccaacccaacucgacugaagucagccucacugaaccggaucugagaaucuucucucucugggcuugccagggcucuccgaaccuagcuagcauccucuucaauuccaacuagaaagcuuaccaugaagugggugaccuucaucagccugcucuuucuuuucuccucugccuacucagcugacggcaaccccgauccuaaugcaaacccaaaugucgacccgaacgccaaucccaacguugauccuaaugcgaacccaaauguggaccccaacgcuaauccuaacgccaauccaaacgcaaaucccaacgccaacccuaaugcuaacccaaaugcaaacccgaaugccaaccccaaugcuaacccuaaugccaacccaaaugcgaaccccaaugcaaacccuaaugccaacccaaacgcuaaucccaacgccaauccgaacgcaaauccuaacgcuaaucccaacgccaauccaaacguagauccuaaugcgaaccccaaugccaacccaaaugcaaaccccaacgcuaauccuaacgccaauccaaacgcuaauccgaacgccaaucccaacgcaaauccuaacgccaauccaaacgcuaaucccaacgcgaauccuaacgcaaacccaaaugccaaccccaaugcuaacccgaaugccaacccuaaugcaaacccaaaugccaaccccaaugcuaacccuugaggacuagucccuguucccagagcccacuuuuuuuucuuuuuuugaaauaaaauagccugucuuucagaucucaaaggcucuuuucagagccaccaaaaaaaaaaaaaaaaaaaaaaaaaaaaaaaaaaaaaaaaaaaaaaaaaaaaaaaaaaaaaaaaaaaaaaaaaaaaaaaaaaaaaaaaaaaaaaaaaaaaagaauu

SEQ ID NO: 7647 - RNA, 1262 nt, Artificial Sequence
  mRNA Design a-3 (hSL-A100-N5) comprising derived and/or modified sequence from Pf(3D7)__XP_001351122.1__HsALB_Pf-CSP(98-374) (opt3)
aggagagggcgcuuggcuugcaaggacccugagcugcggcauugaagcacacccaacccaacucgacugaagucagccucacugaaccggaucugagaaucuucucucucugggcuugccagggcucuccgaaccuagcuagcauccucuucaauuccaacuagaaagcuuaccaugaagugggugaccuucaucagccugcucuuucuuuucuccucugccuacucagcugacggcaaccccgauccuaaugcaaacccaaaugucgacccgaacgccaaucccaacguugauccuaaugcgaacccaaauguggaccccaacgcuaauccuaacgccaauccaaacgcaaaucccaacgccaacccuaaugcuaacccaaaugcaaacccgaaugccaaccccaaugcuaacccuaaugccaacccaaaugcgaaccccaaugcaaacccuaaugccaacccaaacgcuaaucccaacgccaauccgaacgcaaauccuaacgcuaaucccaacgccaauccaaacguagauccuaaugcgaaccccaaugccaacccaaaugcaaaccccaacgcuaauccuaacgccaauccaaacgcuaauccgaacgccaaucccaacgcaaauccuaacgccaauccaaacgcuaaucccaacgcgaauccuaacgcaaacccaaaugccaaccccaaugcuaacccgaaugccaacccuaaugcaaacccaaaugccaaccccaaugcuaacccuaauaaaaacaaucaggggaacggacaaggucacaauaugcccaacgacccaaacagaaauguggaugagaacgccaaugcaaacagugcggucaagaauaacaauaacgaggaaccuagcgacaaacauauuaaggaauaucugaauaaaauacagaacuccuugucuacagaguggucgcccugcucagugacuuguggcaaugggauccagguuaggauuaagccaggaagcgcuaacaagccgaaagaugaauuagacuacgccaaugauaucgagaagaaaauuugcaagauggagaaauguugaggacuagucccuguucccagagcccacuuuuuuuucuuuuuuugaaauaaaauagccugucuuucagaucucaaaggcucuuuucagagccaccaaaaaaaaaaaaaaaaaaaaaaaaaaaaaaaaaaaaaaaaaaaaaaaaaaaaaaaaaaaaaaaaaaaaaaaaaaaaaaaaaaaaaaaaaaaaaaaaaaaaagaauu

SEQ ID NO: 7648 - RNA, 1331 nt, Artificial Sequence
  mRNA Design a-3 (hSL-A100-N5) comprising derived and/or modified sequence from Pf(3D7)__XP_001351122.1__HsALB_Pf-CSP(98-397) (opt3)
aggagagggcgcuuggcuugcaaggacccugagcugcggcauugaagcacacccaacccaacucgacugaagucagccucacugaaccggaucugagaaucuucucucucugggcuugccagggcucuccgaaccuagcuagcauccucuucaauuccaacuagaaagcuuaccaugaagugggugaccuucaucagccugcucuuucuuuucuccucugccuacucagcugacggcaaccccgauccuaaugcaaacccaaaugucgacccgaacgccaaucccaacguugauccuaaugcgaacccaaauguggaccccaacgcuaauccuaacgccaauccaaacgcaaaucccaacgccaacccuaaugcuaacccaaaugcaaacccgaaugccaaccccaaugcuaacccuaaugccaacccaaaugcgaaccccaaugcaaacccuaaugccaacccaaacgcuaaucccaacgccaauccgaacgcaaauccuaacgcuaaucccaacgccaauccaaacguagauccuaaugcgaaccccaaugccaacccaaaugcaaaccccaacgcuaauccuaacgccaauccaaacgcuaauccgaacgccaaucccaacgcaaauccuaacgccaauccaaacgcuaaucccaacgcgaauccuaacgcaaacccaaaugccaaccccaaugcuaacccgaaugccaacccuaaugcaaacccaaaugccaaccccaaugcuaacccuaauaaaaacaaucaggggaacggacaaggucacaauaugcccaacgacccaaacagaaauguggaugagaacgccaaugcaaacagugcggucaagaauaacaauaacgaggaaccuagcgacaaacauauuaaggaauaucugaauaaaauacagaacuccuugucuacagaguggucgcccugcucagugacuuguggcaaugggauccagguuaggauuaagccaggaagcgcuaacaagccgaaagaugaauuagacuacgccaaugauaucgagaagaaaauuugcaagauggagaaauguaguuccguguuuaacgucguaaauucuagcaucggccugauaauggugcuauccuuccucuuucugaacugaggacuagucccuguucccagagcccacuuuuuuuucuuuuuuugaaauaaaauagccugucuuucagaucucaaaggcucuuuucagagccaccaaaaaaaaaaaaaaaaaaaaaaaaaaaaaaaaaaaaaaaaaaaaaaaaaaaaaaaaaaaaaaaaaaaaaaaaaaaaaaaaaaaaaaaaaaaaaaaaaaaaagaauu

SEQ ID NO: 7649 - RNA, 1658 nt, Artificial Sequence
  mRNA Design a-3 (hSL-A100-N5) comprising derived and/or modified sequence from Pf(3D7)__XP_001351122.1__HsALB_Pf-CSP(199-377)_L(PVTN)_HBsAg (opt3)
aggagagggcgcuuggcuugcaaggacccugagcugcggcauugaagcacacccaacccaacucgacugaagucagccucacugaaccggaucugagaaucuucucucucugggcuugccagggcucuccgaaccuagcuagcauccucuucaauuccaacuagaaagcuuaccaugaagugggugaccuucaucagccugcucuuucuuuucuccucugccuacucagaccccaacgcuaauccuaacgcaaauccaaacgccaauccgaacgcgaaucccaacgcuaauccuaacgccaauccaaacgcaaaucccaacgccaauccuaacgcuaacccaaaugcaaaccccaaugccaacccuaaugcuaacccaaaugccaacccgaaugcgaaccccaaugcaaacccuaaugccaacccaaaugcuaaccccaacgccaauccuaacaaaaauaaccagggcaaugggcaaggacacaacaugccaaaugaucccaacagaaaugucgacgagaacgcaaaugcuaacagugccguuaagaauaacaauaacgaggaaccgagcgauaaacauauuaaggaauaucugaacaaaauacaaaauuccuugucuacagaguggucgccuugcucagugacuugugguaacggcauccagguaaggauuaagcccgggagcgcgaauaagccaaaagacgaauuagauuacgccaacgacaucgagaagaaaauuugcaagauggagaaauguaguuccgugccugucacgaauauggaaaacaucaccucuggauuucugggcccccuacucgugcugcaggcagguuucuuucuucugacacggauauugacuaucccacagagccucgauuccugguggaccucacugaauuuccucgggggaagucccguuugccugggccagaacagccagucuccuacauccaaucacucaccaaccagcuguccgcccauuugcccuggcuaucgcuggauguguuuacgacguuuuaucauuuuccuguuuauccuuuugcugugccuaauauuccuccuggugcuucuggacuaccaggggauguugccagucuguccccucauuccuggaaguacuacaaccaacacggguccaugcaagacuuguaccacacccgcucaaggcaauucuauguuuccguccugcugcuguacuaagccuaccgaugggaacugcacauguaucccaauucccagcucgugggccuucgcuaaauaucugugggagugggccucugugagauuuuccugguuaucacugcucguaccuuucguucagugguucgugggacuuagucccaccgucuggcugagcgcaaucuggaugaugugguacuggggcccauccuuguauucuaucgugagcccuuuuauuccccuacugccaauauucuuuugccucuggguguacaucugaggacuagucccuguucccagagcccacuuuuuuuucuuuuuuugaaauaaaauagccugucuuucagaucucaaaggcucuuuucagagccaccaaaaaaaaaaaaaaaaaaaaaaaaaaaaaaaaaaaaaaaaaaaaaaaaaaaaaaaaaaaaaaaaaaaaaaaaaaaaaaaaaaaaaaaaaaaaaaaaaaaaagaauu

SEQ ID NO: 7650 - RNA, 1568 nt, Artificial Sequence
  mRNA Design a-3 (hSL-A100-N5) comprising derived and/or modified sequence from Pf(3D7)__XP_001351122.1__Pf-CSP (opt4)
aggagagggcgcuuggcuugcaaggacccugagcugcggcauugaagcacacccaacccaacucgacugaagucagccucacugaaccggaucugagaaucuucucucucugggcuugccagggcucuccgaaccuagcuagcauccucuucaauuccaacuagaaagcuuaccaugaugagaaagcuggccauccugagcgugagcagcuuccuguucguggaggcccuguuccaggaguaccagugcuacggcagcagcagcaacaccagagugcugaacgagcugaacuacgacaacgccggcaccaaccuguacaacgagcuggagaugaacuacuacggcaagcaggagaacugguacagccugaagaagaacagcagaagccugggcgagaacgacgacggcaacaacgaggacaacgagaagcugagaaagcccaagcacaagaagcugaagcagcccgccgacggcaaccccgaccccaacgccaaccccaacguggaccccaacgccaaccccaacguggaccccaacgccaaccccaacguggaccccaacgccaaccccaacgccaaccccaacgccaaccccaacgccaaccccaacgccaaccccaacgccaaccccaacgccaaccccaacgccaaccccaacgccaaccccaacgccaaccccaacgccaaccccaacgccaaccccaacgccaaccccaacgccaaccccaacgccaaccccaacgccaaccccaacgccaaccccaacguggaccccaacgccaaccccaacgccaaccccaacgccaaccccaacgccaaccccaacgccaaccccaacgccaaccccaacgccaaccccaacgccaaccccaacgccaaccccaacgccaaccccaacgccaaccccaacgccaaccccaacgccaaccccaacgccaaccccaacgccaaccccaacgccaaccccaacgccaaccccaacgccaaccccaacaagaacaaccagggcaacggccagggccacaacaugcccaacgaccccaacagaaacguggacgagaacgccaacgccaacagcgccgugaagaacaacaacaacgaggagcccagcgacaagcacaucaaggaguaccugaacaagauccagaacagccugagcaccgaguggagccccugcagcgugaccugcggcaacggcauccaggugagaaucaagcccggcagcgccaacaagcccaaggacgagcuggacuacgccaacgacaucgagaagaagaucugcaagauggagaagugcagcagcguguucaacguggugaacagcagcaucggccugaucauggugcugagcuuccuguuccugaacugaggacuagucccuguucccagagcccacuuuuuuuucuuuuuuugaaauaaaauagccugucuuucagaucucaaaggcucuuuucagagccaccaaaaaaaaaaaaaaaaaaaaaaaaaaaaaaaaaaaaaaaaaaaaaaaaaaaaaaaaaaaaaaaaaaaaaaaaaaaaaaaaaaaaaaaaaaaaaaaaaaaaagaauu

SEQ ID NO: 7651 - RNA, 1499 nt, Artificial Sequence
  mRNA Design a-3 (hSL-A100-N5) comprising derived and/or modified sequence from Pf(3D7)__XP_001351122.1__Pf-CSP(1-374) (opt4)
aggagagggcgcuuggcuugcaaggacccugagcugcggcauugaagcacacccaacccaacucgacugaagucagccucacugaaccggaucugagaaucuucucucucugggcuugccagggcucuccgaaccuagcuagcauccucuucaauuccaacuagaaagcuuaccaugaugagaaagcuggccauccugagcgugagcagcuuccuguucguggaggcccuguuccaggaguaccagugcuacggcagcagcagcaacaccagagugcugaacgagcugaacuacgacaacgccggcaccaaccuguacaacgagcuggagaugaacuacuacggcaagcaggagaacugguacagccugaagaagaacagcagaagccugggcgagaacgacgacggcaacaacgaggacaacgagaagcugagaaagcccaagcacaagaagcugaagcagcccgccgacggcaaccccgaccccaacgccaaccccaacguggaccccaacgccaaccccaacguggaccccaacgccaaccccaacguggaccccaacgccaaccccaacgccaaccccaacgccaaccccaacgccaaccccaacgccaaccccaacgccaaccccaacgccaaccccaacgccaaccccaacgccaaccccaacgccaaccccaacgccaaccccaacgccaaccccaacgccaaccccaacgccaaccccaacgccaaccccaacgccaaccccaacgccaaccccaacguggaccccaacgccaaccccaacgccaaccccaacgccaaccccaacgccaaccccaacgccaaccccaacgccaaccccaacgccaaccccaacgccaaccccaacgccaaccccaacgccaaccccaacgccaaccccaacgccaaccccaacgccaaccccaacgccaaccccaacgccaaccccaacgccaaccccaacgccaaccccaacgccaaccccaacaagaacaaccagggcaacggccagggccacaacaugcccaacgaccccaacagaaacguggacgagaacgccaacgccaacagcgccgugaagaacaacaacaacgaggagcccagcgacaagcacaucaaggaguaccugaacaagauccagaacagccugagcaccgaguggagccccugcagcgugaccugcggcaacggcauccaggugagaaucaagcccggcagcgccaacaagcccaaggacgagcuggacuacgccaacgacaucgagaagaagaucugcaagauggagaagugcugaggacuagucccuguucccagagcccacuuuuuuuucuuuuuuugaaauaaaauagccugucuuucagaucucaaaggcucuuuucagagccaccaaaaaaaaaaaaaaaaaaaaaaaaaaaaaaaaaaaaaaaaaaaaaaaaaaaaaaaaaaaaaaaaaaaaaaaaaaaaaaaaaaaaaaaaaaaaaaaaaaaaagaauu

SEQ ID NO: 7652 - RNA, 1352 nt, Artificial Sequence
  mRNA Design a-3 (hSL-A100-N5) comprising derived and/or modified sequence from Pf(3D7)__XP_001351122.1__Pf-CSP(1-325) (opt4)
aggagagggcgcuuggcuugcaaggacccugagcugcggcauugaagcacacccaacccaacucgacugaagucagccucacugaaccggaucugagaaucuucucucucugggcuugccagggcucuccgaaccuagcuagcauccucuucaauuccaacuagaaagcuuaccaugaugagaaagcuggccauccugagcgugagcagcuuccuguucguggaggcccuguuccaggaguaccagugcuacggcagcagcagcaacaccagagugcugaacgagcugaacuacgacaacgccggcaccaaccuguacaacgagcuggagaugaacuacuacggcaagcaggagaacugguacagccugaagaagaacagcagaagccugggcgagaacgacgacggcaacaacgaggacaacgagaagcugagaaagcccaagcacaagaagcugaagcagcccgccgacggcaaccccgaccccaacgccaaccccaacguggaccccaacgccaaccccaacguggaccccaacgccaaccccaacguggaccccaacgccaaccccaacgccaaccccaacgccaaccccaacgccaaccccaacgccaaccccaacgccaaccccaacgccaaccccaacgccaaccccaacgccaaccccaacgccaaccccaacgccaaccccaacgccaaccccaacgccaaccccaacgccaaccccaacgccaaccccaacgccaaccccaacgccaaccccaacguggaccccaacgccaaccccaacgccaaccccaacgccaaccccaacgccaaccccaacgccaaccccaacgccaaccccaacgccaaccccaacgccaaccccaacgccaaccccaacgccaaccccaacgccaaccccaacgccaaccccaacgccaaccccaacgccaaccccaacgccaaccccaacgccaaccccaacgccaaccccaacgccaaccccaacaagaacaaccagggcaacggccagggccacaacaugcccaacgaccccaacagaaacguggacgagaacgccaacgccaacagcgccgugaagaacaacaacaacgaggagcccagcgacaagcacaucaaggaguaccugaacaagauccagaacugaggacuagucccuguucccagagcccacuuuuuuuucuuuuuuugaaauaaaauagccugucuuucagaucucaaaggcucuuuucagagccaccaaaaaaaaaaaaaaaaaaaaaaaaaaaaaaaaaaaaaaaaaaaaaaaaaaaaaaaaaaaaaaaaaaaaaaaaaaaaaaaaaaaaaaaaaaaaaaaaaaaaagaauu

SEQ ID NO: 7653 - RNA, 1568 nt, Artificial Sequence
  mRNA Design a-3 (hSL-A100-N5) comprising derived and/or modified sequence from Pf(3D7)__XP_001351122.1__HsALB_Pf-CSP(19-397) (opt4)
aggagagggcgcuuggcuugcaaggacccugagcugcggcauugaagcacacccaacccaacucgacugaagucagccucacugaaccggaucugagaaucuucucucucugggcuugccagggcucuccgaaccuagcuagcauccucuucaauuccaacuagaaagcuuaccaugaagugggugaccuucaucagccugcuguuccuguucagcagcgccuacagccuguuccaggaguaccagugcuacggcagcagcagcaacaccagagugcugaacgagcugaacuacgacaacgccggcaccaaccuguacaacgagcuggagaugaacuacuacggcaagcaggagaacugguacagccugaagaagaacagcagaagccugggcgagaacgacgacggcaacaacgaggacaacgagaagcugagaaagcccaagcacaagaagcugaagcagcccgccgacggcaaccccgaccccaacgccaaccccaacguggaccccaacgccaaccccaacguggaccccaacgccaaccccaacguggaccccaacgccaaccccaacgccaaccccaacgccaaccccaacgccaaccccaacgccaaccccaacgccaaccccaacgccaaccccaacgccaaccccaacgccaaccccaacgccaaccccaacgccaaccccaacgccaaccccaacgccaaccccaacgccaaccccaacgccaaccccaacgccaaccccaacgccaaccccaacguggaccccaacgccaaccccaacgccaaccccaacgccaaccccaacgccaaccccaacgccaaccccaacgccaaccccaacgccaaccccaacgccaaccccaacgccaaccccaacgccaaccccaacgccaaccccaacgccaaccccaacgccaaccccaacgccaaccccaacgccaaccccaacgccaaccccaacgccaaccccaacgccaaccccaacaagaacaaccagggcaacggccagggccacaacaugcccaacgaccccaacagaaacguggacgagaacgccaacgccaacagcgccgugaagaacaacaacaacgaggagcccagcgacaagcacaucaaggaguaccugaacaagauccagaacagccugagcaccgaguggagccccugcagcgugaccugcggcaacggcauccaggugagaaucaagcccggcagcgccaacaagcccaaggacgagcuggacuacgccaacgacaucgagaagaagaucugcaagauggagaagugcagcagcguguucaacguggugaacagcagcaucggccugaucauggugcugagcuuccuguuccugaacugaggacuagucccuguucccagagcccacuuuuuuuucuuuuuuugaaauaaaauagccugucuuucagaucucaaaggcucuuuucagagccaccaaaaaaaaaaaaaaaaaaaaaaaaaaaaaaaaaaaaaaaaaaaaaaaaaaaaaaaaaaaaaaaaaaaaaaaaaaaaaaaaaaaaaaaaaaaaaaaaaaaaagaauu

SEQ ID NO: 7654 - RNA, 1586 nt, Artificial Sequence
  mRNA Design a-3 (hSL-A100-N5) comprising derived and/or modified sequence from Pf(3D7)__XP_001351122.1__HsIns-iso1_Pf-CSP(19-397) (opt4)
aggagagggcgcuuggcuugcaaggacccugagcugcggcauugaagcacacccaacccaacucgacugaagucagccucacugaaccggaucugagaaucuucucucucugggcuugccagggcucuccgaaccuagcuagcauccucuucaauuccaacuagaaagcuuaccauggcccuguggaugagacugcugccccugcuggcccugcuggcccuguggggccccgaccccgccgccgcccuguuccaggaguaccagugcuacggcagcagcagcaacaccagagugcugaacgagcugaacuacgacaacgccggcaccaaccuguacaacgagcuggagaugaacuacuacggcaagcaggagaacugguacagccugaagaagaacagcagaagccugggcgagaacgacgacggcaacaacgaggacaacgagaagcugagaaagcccaagcacaagaagcugaagcagcccgccgacggcaaccccgaccccaacgccaaccccaacguggaccccaacgccaaccccaacguggaccccaacgccaaccccaacguggaccccaacgccaaccccaacgccaaccccaacgccaaccccaacgccaaccccaacgccaaccccaacgccaaccccaacgccaaccccaacgccaaccccaacgccaaccccaacgccaaccccaacgccaaccccaacgccaaccccaacgccaaccccaacgccaaccccaacgccaaccccaacgccaaccccaacgccaaccccaacguggaccccaacgccaaccccaacgccaaccccaacgccaaccccaacgccaaccccaacgccaaccccaacgccaaccccaacgccaaccccaacgccaaccccaacgccaaccccaacgccaaccccaacgccaaccccaacgccaaccccaacgccaaccccaacgccaaccccaacgccaaccccaacgccaaccccaacgccaaccccaacgccaaccccaacaagaacaaccagggcaacggccagggccacaacaugcccaacgaccccaacagaaacguggacgagaacgccaacgccaacagcgccgugaagaacaacaacaacgaggagcccagcgacaagcacaucaaggaguaccugaacaagauccagaacagccugagcaccgaguggagccccugcagcgugaccugcggcaacggcauccaggugagaaucaagcccggcagcgccaacaagcccaaggacgagcuggacuacgccaacgacaucgagaagaagaucugcaagauggagaagugcagcagcguguucaacguggugaacagcagcaucggccugaucauggugcugagcuuccuguuccugaacugaggacuagucccuguucccagagcccacuuuuuuuucuuuuuuugaaauaaaauagccugucuuucagaucucaaaggcucuuuucagagccaccaaaaaaaaaaaaaaaaaaaaaaaaaaaaaaaaaaaaaaaaaaaaaaaaaaaaaaaaaaaaaaaaaaaaaaaaaaaaaaaaaaaaaaaaaaaaaaaaaaaaagaauu

SEQ ID NO: 7655 - RNA, 1565 nt, Artificial Sequence
  mRNA Design a-3 (hSL-A100-N5) comprising derived and/or modified sequence from Pf(3D7)__XP_001351122.1__HsSPARC_Pf-CSP(19-397) (opt4)
aggagagggcgcuuggcuugcaaggacccugagcugcggcauugaagcacacccaacccaacucgacugaagucagccucacugaaccggaucugagaaucuucucucucugggcuugccagggcucuccgaaccuagcuagcauccucuucaauuccaacuagaaagcuuaccaugagagccuggaucuucuuccugcugugccuggccggcagagcccuggcccuguuccaggaguaccagugcuacggcagcagcagcaacaccagagugcugaacgagcugaacuacgacaacgccggcaccaaccuguacaacgagcuggagaugaacuacuacggcaagcaggagaacugguacagccugaagaagaacagcagaagccugggcgagaacgacgacggcaacaacgaggacaacgagaagcugagaaagcccaagcacaagaagcugaagcagcccgccgacggcaaccccgaccccaacgccaaccccaacguggaccccaacgccaaccccaacguggaccccaacgccaaccccaacguggaccccaacgccaaccccaacgccaaccccaacgccaaccccaacgccaaccccaacgccaaccccaacgccaaccccaacgccaaccccaacgccaaccccaacgccaaccccaacgccaaccccaacgccaaccccaacgccaaccccaacgccaaccccaacgccaaccccaacgccaaccccaacgccaaccccaacgccaaccccaacguggaccccaacgccaaccccaacgccaaccccaacgccaaccccaacgccaaccccaacgccaaccccaacgccaaccccaacgccaaccccaacgccaaccccaacgccaaccccaacgccaaccccaacgccaaccccaacgccaaccccaacgccaaccccaacgccaaccccaacgccaaccccaacgccaaccccaacgccaaccccaacgccaaccccaacaagaacaaccagggcaacggccagggccacaacaugcccaacgaccccaacagaaacguggacgagaacgccaacgccaacagcgccgugaagaacaacaacaacgaggagcccagcgacaagcacaucaaggaguaccugaacaagauccagaacagccugagcaccgaguggagccccugcagcgugaccugcggcaacggcauccaggugagaaucaagcccggcagcgccaacaagcccaaggacgagcuggacuacgccaacgacaucgagaagaagaucugcaagauggagaagugcagcagcguguucaacguggugaacagcagcaucggccugaucauggugcugagcuuccuguuccugaacugaggacuagucccuguucccagagcccacuuuuuuuucuuuuuuugaaauaaaauagccugucuuucagaucucaaaggcucuuuucagagccaccaaaaaaaaaaaaaaaaaaaaaaaaaaaaaaaaaaaaaaaaaaaaaaaaaaaaaaaaaaaaaaaaaaaaaaaaaaaaaaaaaaaaaaaaaaaaaaaaaaaaagaauu

SEQ ID NO: 7656 - RNA, 1568 nt, Artificial Sequence
  mRNA Design a-3 (hSL-A100-N5) comprising derived and/or modified sequence from Pf(3D7)__XP_001351122.1__IgE_Pf-CSP(19-397) (opt4)
aggagagggcgcuuggcuugcaaggacccugagcugcggcauugaagcacacccaacccaacucgacugaagucagccucacugaaccggaucugagaaucuucucucucugggcuugccagggcucuccgaaccuagcuagcauccucuucaauuccaacuagaaagcuuaccauggacuggaccuggauccuguuccugguggccgccgccaccagagugcacagccuguuccaggaguaccagugcuacggcagcagcagcaacaccagagugcugaacgagcugaacuacgacaacgccggcaccaaccuguacaacgagcuggagaugaacuacuacggcaagcaggagaacugguacagccugaagaagaacagcagaagccugggcgagaacgacgacggcaacaacgaggacaacgagaagcugagaaagcccaagcacaagaagcugaagcagcccgccgacggcaaccccgaccccaacgccaaccccaacguggaccccaacgccaaccccaacguggaccccaacgccaaccccaacguggaccccaacgccaaccccaacgccaaccccaacgccaaccccaacgccaaccccaacgccaaccccaacgccaaccccaacgccaaccccaacgccaaccccaacgccaaccccaacgccaaccccaacgccaaccccaacgccaaccccaacgccaaccccaacgccaaccccaacgccaaccccaacgccaaccccaacgccaaccccaacguggaccccaacgccaaccccaacgccaaccccaacgccaaccccaacgccaaccccaacgccaaccccaacgccaaccccaacgccaaccccaacgccaaccccaacgccaaccccaacgccaaccccaacgccaaccccaacgccaaccccaacgccaaccccaacgccaaccccaacgccaaccccaacgccaaccccaacgccaaccccaacgccaaccccaacaagaacaaccagggcaacggccagggccacaacaugcccaacgaccccaacagaaacguggacgagaacgccaacgccaacagcgccgugaagaacaacaacaacgaggagcccagcgacaagcacaucaaggaguaccugaacaagauccagaacagccugagcaccgaguggagccccugcagcgugaccugcggcaacggcauccaggugagaaucaagcccggcagcgccaacaagcccaaggacgagcuggacuacgccaacgacaucgagaagaagaucugcaagauggagaagugcagcagcguguucaacguggugaacagcagcaucggccugaucauggugcugagcuuccuguuccugaacugaggacuagucccuguucccagagcccacuuuuuuuucuuuuuuugaaauaaaauagccugucuuucagaucucaaaggcucuuuucagagccaccaaaaaaaaaaaaaaaaaaaaaaaaaaaaaaaaaaaaaaaaaaaaaaaaaaaaaaaaaaaaaaaaaaaaaaaaaaaaaaaaaaaaaaaaaaaaaaaaaaaaagaauu

SEQ ID NO: 7657 - RNA, 1733 nt, Artificial Sequence
  mRNA Design a-3 (hSL-A100-N5) comprising derived and/or modified sequence from Pf(3D7)__XP_001351122.1__Pf-CSP_L(G4SG4)_TM domain HA (opt4)
aggagagggcgcuuggcuugcaaggacccugagcugcggcauugaagcacacccaacccaacucgacugaagucagccucacugaaccggaucugagaaucuucucucucugggcuugccagggcucuccgaaccuagcuagcauccucuucaauuccaacuagaaagcuuaccaugaugagaaagcuggccauccugagcgugagcagcuuccuguucguggaggcccuguuccaggaguaccagugcuacggcagcagcagcaacaccagagugcugaacgagcugaacuacgacaacgccggcaccaaccuguacaacgagcuggagaugaacuacuacggcaagcaggagaacugguacagccugaagaagaacagcagaagccugggcgagaacgacgacggcaacaacgaggacaacgagaagcugagaaagcccaagcacaagaagcugaagcagcccgccgacggcaaccccgaccccaacgccaaccccaacguggaccccaacgccaaccccaacguggaccccaacgccaaccccaacguggaccccaacgccaaccccaacgccaaccccaacgccaaccccaacgccaaccccaacgccaaccccaacgccaaccccaacgccaaccccaacgccaaccccaacgccaaccccaacgccaaccccaacgccaaccccaacgccaaccccaacgccaaccccaacgccaaccccaacgccaaccccaacgccaaccccaacgccaaccccaacguggaccccaacgccaaccccaacgccaaccccaacgccaaccccaacgccaaccccaacgccaaccccaacgccaaccccaacgccaaccccaacgccaaccccaacgccaaccccaacgccaaccccaacgccaaccccaacgccaaccccaacgccaaccccaacgccaaccccaacgccaaccccaacgccaaccccaacgccaaccccaacgccaaccccaacaagaacaaccagggcaacggccagggccacaacaugcccaacgaccccaacagaaacguggacgagaacgccaacgccaacagcgccgugaagaacaacaacaacgaggagcccagcgacaagcacaucaaggaguaccugaacaagauccagaacagccugagcaccgaguggagccccugcagcgugaccugcggcaacggcauccaggugagaaucaagcccggcagcgccaacaagcccaaggacgagcuggacuacgccaacgacaucgagaagaagaucugcaagauggagaagugcagcagcguguucaacguggugaacagcagcaucggccugaucauggugcugagcuuccuguuccugaacggcggcggcggcagcggcggcggcggcaagcuggagagcaccagaaucuaccagauccuggccaucuacagcaccguggccagcagccuggugcugguggugagccugggcgccaucagcuucuggaugugcagcaacggcagccugcagugcagaaucugcaucugaggacuagucccuguucccagagcccacuuuuuuuucuuuuuuugaaauaaaauagccugucuuucagaucucaaaggcucuuuucagagccaccaaaaaaaaaaaaaaaaaaaaaaaaaaaaaaaaaaaaaaaaaaaaaaaaaaaaaaaaaaaaaaaaaaaaaaaaaaaaaaaaaaaaaaaaaaaaaaaaaaaaagaauu

SEQ ID NO: 7658 - RNA, 1607 nt, Artificial Sequence
  mRNA Design a-3 (hSL-A100-N5) comprising derived and/or modified sequence from Pf(3D7)__XP_001351122.1__Pf-CSP(199-377)_L(PVTN)_HBsAg (opt4)
aggagagggcgcuuggcuugcaaggacccugagcugcggcauugaagcacacccaacccaacucgacugaagucagccucacugaaccggaucugagaaucuucucucucugggcuugccagggcucuccgaaccuagcuagcauccucuucaauuccaacuagaaagcuuaccauggaccccaacgccaaccccaacgccaaccccaacgccaaccccaacgccaaccccaacgccaaccccaacgccaaccccaacgccaaccccaacgccaaccccaacgccaaccccaacgccaaccccaacgccaaccccaacgccaaccccaacgccaaccccaacgccaaccccaacgccaaccccaacgccaaccccaacgccaaccccaacgccaaccccaacaagaacaaccagggcaacggccagggccacaacaugcccaacgaccccaacagaaacguggacgagaacgccaacgccaacagcgccgugaagaacaacaacaacgaggagcccagcgacaagcacaucaaggaguaccugaacaagauccagaacagccugagcaccgaguggagccccugcagcgugaccugcggcaacggcauccaggugagaaucaagcccggcagcgccaacaagcccaaggacgagcuggacuacgccaacgacaucgagaagaagaucugcaagauggagaagugcagcagcgugcccgugaccaacauggagaacaucaccagcggcuuccugggcccccugcuggugcugcaggccggcuucuuccugcugaccagaauccugaccaucccccagagccuggacagcugguggaccagccugaacuuccugggcggcagccccgugugccugggccagaacagccagagccccaccagcaaccacagccccaccagcugcccccccaucugccccggcuacagauggaugugccugagaagauucaucaucuuccuguucauccugcugcugugccugaucuuccugcuggugcugcuggacuaccagggcaugcugcccgugugcccccugauccccggcagcaccaccaccaacaccggccccugcaagaccugcaccacccccgcccagggcaacagcauguuccccagcugcugcugcaccaagcccaccgacggcaacugcaccugcauccccauccccagcagcugggccuucgccaaguaccugugggagugggccagcgugagauucagcuggcugagccugcuggugcccuucgugcagugguucgugggccugagccccaccguguggcugagcgccaucuggaugaugugguacuggggccccagccuguacagcaucgugagccccuucaucccccugcugcccaucuucuucugccuguggguguacaucugaggacuagucccuguucccagagcccacuuuuuuuucuuuuuuugaaauaaaauagccugucuuucagaucucaaaggcucuuuucagagccaccaaaaaaaaaaaaaaaaaaaaaaaaaaaaaaaaaaaaaaaaaaaaaaaaaaaaaaaaaaaaaaaaaaaaaaaaaaaaaaaaaaaaaaaaaaaaaaaaaaaaagaauu

SEQ ID NO: 7659 - RNA, 1649 nt, Artificial Sequence
  mRNA Design a-3 (hSL-A100-N5) comprising derived and/or modified sequence from Pf(3D7)__XP_001351122.1__Pf-CSP(199-387)_L(PVTN)_HBsAg (opt4)
aggagagggcgcuuggcuugcaaggacccugagcugcggcauugaagcacacccaacccaacucgacugaagucagccucacugaaccggaucugagaaucuucucucucugggcuugccagggcucuccgaaccuagcuagcauccucuucaauuccaacuagaaagcuuaccaugauggcccccgaccccaacgccaaccccaacgccaaccccaacgccaaccccaacgccaaccccaacgccaaccccaacgccaaccccaacgccaaccccaacgccaaccccaacgccaaccccaacgccaaccccaacgccaaccccaacgccaaccccaacgccaaccccaacgccaaccccaacgccaaccccaacgccaaccccaacgccaaccccaacgccaaccccaacaagaacaaccagggcaacggccagggccacaacaugcccaacgaccccaacagaaacguggacgagaacgccaacgccaacagcgccgugaagaacaacaacaacgaggagcccagcgacaagcacaucaaggaguaccugaacaagauccagaacagccugagcaccgaguggagccccugcagcgugaccugcggcaacggcauccaggugagaaucaagcccggcagcgccaacaagcccaaggacgagcuggacuacgccaacgacaucgagaagaagaucugcaagauggagaagugcagcagcguguucaacguggugaacagcagcaucggccugggccccgugaccaacauggagaacaucaccagcggcuuccugggcccccugcuggugcugcaggccggcuucuuccugcugaccagaauccugaccaucccccagagccuggacagcugguggaccagccugaacuuccugggcggcagccccgugugccugggccagaacagccagagccccaccagcaaccacagccccaccagcugcccccccaucugccccggcuacagauggaugugccugagaagauucaucaucuuccuguucauccugcugcugugccugaucuuccugcuggugcugcuggacuaccagggcaugcugcccgugugcccccugauccccggcagcaccaccaccaacaccggccccugcaagaccugcaccacccccgcccagggcaacagcauguuccccagcugcugcugcaccaagcccaccgacggcaacugcaccugcauccccauccccagcagcugggccuucgccaaguaccugugggagugggccagcgugagauucagcuggcugagccugcuggugcccuucgugcagugguucgugggccugagccccaccguguggcugagcgccaucuggaugaugugguacuggggccccagccuguacagcaucgugagccccuucaucccccugcugcccaucuucuucugccuguggguguacaucugaggacuagucccuguucccagagcccacuuuuuuuucuuuuuuugaaauaaaauagccugucuuucagaucucaaaggcucuuuucagagccaccaaaaaaaaaaaaaaaaaaaaaaaaaaaaaaaaaaaaaaaaaaaaaaaaaaaaaaaaaaaaaaaaaaaaaaaaaaaaaaaaaaaaaaaaaaaaaaaaaaaaagaauu

SEQ ID NO: 7660 - RNA, 833 nt, Artificial Sequence
  mRNA Design a-3 (hSL-A100-N5) comprising derived and/or modified sequence from Pf(3D7)__XP_001351122.1__HsALB_Pf-CSP(19-152) (opt4)
aggagagggcgcuuggcuugcaaggacccugagcugcggcauugaagcacacccaacccaacucgacugaagucagccucacugaaccggaucugagaaucuucucucucugggcuugccagggcucuccgaaccuagcuagcauccucuucaauuccaacuagaaagcuuaccaugaagugggugaccuucaucagccugcuguuccuguucagcagcgccuacagccuguuccaggaguaccagugcuacggcagcagcagcaacaccagagugcugaacgagcugaacuacgacaacgccggcaccaaccuguacaacgagcuggagaugaacuacuacggcaagcaggagaacugguacagccugaagaagaacagcagaagccugggcgagaacgacgacggcaacaacgaggacaacgagaagcugagaaagcccaagcacaagaagcugaagcagcccgccgacggcaaccccgaccccaacgccaaccccaacguggaccccaacgccaaccccaacguggaccccaacgccaaccccaacguggaccccaacgccaaccccaacgccaaccccaacgccaaccccaacgccaaccccaacgccaaccccaacgccaaccccugaggacuagucccuguucccagagcccacuuuuuuuucuuuuuuugaaauaaaauagccugucuuucagaucucaaaggcucuuuucagagccaccaaaaaaaaaaaaaaaaaaaaaaaaaaaaaaaaaaaaaaaaaaaaaaaaaaaaaaaaaaaaaaaaaaaaaaaaaaaaaaaaaaaaaaaaaaaaaaaaaaaaagaauu

SEQ ID NO: 7661 - RNA, 953 nt, Artificial Sequence
  mRNA Design a-3 (hSL-A100-N5) comprising derived and/or modified sequence from Pf(3D7)__XP_001351122.1__HsALB_Pf-CSP(19-192) (opt4)
aggagagggcgcuuggcuugcaaggacccugagcugcggcauugaagcacacccaacccaacucgacugaagucagccucacugaaccggaucugagaaucuucucucucugggcuugccagggcucuccgaaccuagcuagcauccucuucaauuccaacuagaaagcuuaccaugaagugggugaccuucaucagccugcuguuccuguucagcagcgccuacagccuguuccaggaguaccagugcuacggcagcagcagcaacaccagagugcugaacgagcugaacuacgacaacgccggcaccaaccuguacaacgagcuggagaugaacuacuacggcaagcaggagaacugguacagccugaagaagaacagcagaagccugggcgagaacgacgacggcaacaacgaggacaacgagaagcugagaaagcccaagcacaagaagcugaagcagcccgccgacggcaaccccgaccccaacgccaaccccaacguggaccccaacgccaaccccaacguggaccccaacgccaaccccaacguggaccccaacgccaaccccaacgccaaccccaacgccaaccccaacgccaaccccaacgccaaccccaacgccaaccccaacgccaaccccaacgccaaccccaacgccaaccccaacgccaaccccaacgccaaccccaacgccaaccccaacgccaaccccaacgccaaccccaacgccaaccccaacgccaaccccugaggacuagucccuguucccagagcccacuuuuuuuucuuuuuuugaaauaaaauagccugucuuucagaucucaaaggcucuuuucagagccaccaaaaaaaaaaaaaaaaaaaaaaaaaaaaaaaaaaaaaaaaaaaaaaaaaaaaaaaaaaaaaaaaaaaaaaaaaaaaaaaaaaaaaaaaaaaaaaaaaaaaagaauu

SEQ ID NO: 7662 - RNA, 1193 nt, Artificial Sequence
  mRNA Design a-3 (hSL-A100-N5) comprising derived and/or modified sequence from Pf(3D7)__XP_001351122.1__HsALB_Pf-CSP(19-272) (opt4)
aggagagggcgcuuggcuugcaaggacccugagcugcggcauugaagcacacccaacccaacucgacugaagucagccucacugaaccggaucugagaaucuucucucucugggcuugccagggcucuccgaaccuagcuagcauccucuucaauuccaacuagaaagcuuaccaugaagugggugaccuucaucagccugcuguuccuguucagcagcgccuacagccuguuccaggaguaccagugcuacggcagcagcagcaacaccagagugcugaacgagcugaacuacgacaacgccggcaccaaccuguacaacgagcuggagaugaacuacuacggcaagcaggagaacugguacagccugaagaagaacagcagaagccugggcgagaacgacgacggcaacaacgaggacaacgagaagcugagaaagcccaagcacaagaagcugaagcagcccgccgacggcaaccccgaccccaacgccaaccccaacguggaccccaacgccaaccccaacguggaccccaacgccaaccccaacguggaccccaacgccaaccccaacgccaaccccaacgccaaccccaacgccaaccccaacgccaaccccaacgccaaccccaacgccaaccccaacgccaaccccaacgccaaccccaacgccaaccccaacgccaaccccaacgccaaccccaacgccaaccccaacgccaaccccaacgccaaccccaacgccaaccccaacgccaaccccaacguggaccccaacgccaaccccaacgccaaccccaacgccaaccccaacgccaaccccaacgccaaccccaacgccaaccccaacgccaaccccaacgccaaccccaacgccaaccccaacgccaaccccaacgccaaccccaacgccaaccccaacgccaaccccaacgccaaccccaacgccaaccccaacgccaaccccaacgccaaccccaacgccaaccccugaggacuagucccuguucccagagcccacuuuuuuuucuuuuuuugaaauaaaauagccugucuuucagaucucaaaggcucuuuucagagccaccaaaaaaaaaaaaaaaaaaaaaaaaaaaaaaaaaaaaaaaaaaaaaaaaaaaaaaaaaaaaaaaaaaaaaaaaaaaaaaaaaaaaaaaaaaaaaaaaaaaaagaauu

SEQ ID NO: 7663 - RNA, 1355 nt, Artificial Sequence
  mRNA Design a-3 (hSL-A100-N5) comprising derived and/or modified sequence from Pf(3D7)__XP_001351122.1__HsALB_Pf-CSP(19-272)_L(AAY)_Pf-CSP(310-3 27)_L(AAY)_Pf-CSP(346-375) (opt4)
aggagagggcgcuuggcuugcaaggacccugagcugcggcauugaagcacacccaacccaacucgacugaagucagccucacugaaccggaucugagaaucuucucucucugggcuugccagggcucuccgaaccuagcuagcauccucuucaauuccaacuagaaagcuuaccaugaagugggugaccuucaucagccugcuguuccuguucagcagcgccuacagccuguuccaggaguaccagugcuacggcagcagcagcaacaccagagugcugaacgagcugaacuacgacaacgccggcaccaaccuguacaacgagcuggagaugaacuacuacggcaagcaggagaacugguacagccugaagaagaacagcagaagccugggcgagaacgacgacggcaacaacgaggacaacgagaagcugagaaagcccaagcacaagaagcugaagcagcccgccgacggcaaccccgaccccaacgccaaccccaacguggaccccaacgccaaccccaacguggaccccaacgccaaccccaacguggaccccaacgccaaccccaacgccaaccccaacgccaaccccaacgccaaccccaacgccaaccccaacgccaaccccaacgccaaccccaacgccaaccccaacgccaaccccaacgccaaccccaacgccaaccccaacgccaaccccaacgccaaccccaacgccaaccccaacgccaaccccaacgccaaccccaacgccaaccccaacguggaccccaacgccaaccccaacgccaaccccaacgccaaccccaacgccaaccccaacgccaaccccaacgccaaccccaacgccaaccccaacgccaaccccaacgccaaccccaacgccaaccccaacgccaaccccaacgccaaccccaacgccaaccccaacgccaaccccaacgccaaccccaacgccaaccccaacgccaaccccaacgccaaccccgccgccuacgagcccagcgacaagcacaucaaggaguaccugaacaagauccagaacagccuggccgccuacaucaagcccggcagcgccaacaagcccaaggacgagcuggacuacgccaacgacaucgagaagaagaucugcaagauggagaagugcagcugaggacuagucccuguucccagagcccacuuuuuuuucuuuuuuugaaauaaaauagccugucuuucagaucucaaaggcucuuuucagagccaccaaaaaaaaaaaaaaaaaaaaaaaaaaaaaaaaaaaaaaaaaaaaaaaaaaaaaaaaaaaaaaaaaaaaaaaaaaaaaaaaaaaaaaaaaaaaaaaaaaaaagaauu

SEQ ID NO: 7664 - RNA, 1316 nt, Artificial Sequence
  mRNA Design a-3 (hSL-A100-N5) comprising derived and/or modified sequence from Pf(3D7)__XP_001351122.1__HsALB_Pf-CSP(19-272)_L(AAY)_Pf-CSP(346-3 65)_L(AAY)_P2 (opt4)
aggagagggcgcuuggcuugcaaggacccugagcugcggcauugaagcacacccaacccaacucgacugaagucagccucacugaaccggaucugagaaucuucucucucugggcuugccagggcucuccgaaccuagcuagcauccucuucaauuccaacuagaaagcuuaccaugaagugggugaccuucaucagccugcuguuccuguucagcagcgccuacagccuguuccaggaguaccagugcuacggcagcagcagcaacaccagagugcugaacgagcugaacuacgacaacgccggcaccaaccuguacaacgagcuggagaugaacuacuacggcaagcaggagaacugguacagccugaagaagaacagcagaagccugggcgagaacgacgacggcaacaacgaggacaacgagaagcugagaaagcccaagcacaagaagcugaagcagcccgccgacggcaaccccgaccccaacgccaaccccaacguggaccccaacgccaaccccaacguggaccccaacgccaaccccaacguggaccccaacgccaaccccaacgccaaccccaacgccaaccccaacgccaaccccaacgccaaccccaacgccaaccccaacgccaaccccaacgccaaccccaacgccaaccccaacgccaaccccaacgccaaccccaacgccaaccccaacgccaaccccaacgccaaccccaacgccaaccccaacgccaaccccaacgccaaccccaacguggaccccaacgccaaccccaacgccaaccccaacgccaaccccaacgccaaccccaacgccaaccccaacgccaaccccaacgccaaccccaacgccaaccccaacgccaaccccaacgccaaccccaacgccaaccccaacgccaaccccaacgccaaccccaacgccaaccccaacgccaaccccaacgccaaccccaacgccaaccccaacgccaaccccgccgccuacaucaagcccggcagcgccaacaagcccaaggacgagcuggacuacgccaacgacaucgaggccgccuaccaguacaucaaggccaacagcaaguucaucggcaucaccgagcugugaggacuagucccuguucccagagcccacuuuuuuuucuuuuuuugaaauaaaauagccugucuuucagaucucaaaggcucuuuucagagccaccaaaaaaaaaaaaaaaaaaaaaaaaaaaaaaaaaaaaaaaaaaaaaaaaaaaaaaaaaaaaaaaaaaaaaaaaaaaaaaaaaaaaaaaaaaaaaaaaaaaaagaauu

SEQ ID NO: 7665 - RNA, 1310 nt, Artificial Sequence
  mRNA Design a-3 (hSL-A100-N5) comprising derived and/or modified sequence from Pf(3D7)__XP_001351122.1__HsALB_Pf-CSP(19-272)_L(AAY)_Pf-CSP(346-3 65)_L(AAY)_PADRE (opt4)
aggagagggcgcuuggcuugcaaggacccugagcugcggcauugaagcacacccaacccaacucgacugaagucagccucacugaaccggaucugagaaucuucucucucugggcuugccagggcucuccgaaccuagcuagcauccucuucaauuccaacuagaaagcuuaccaugaagugggugaccuucaucagccugcuguuccuguucagcagcgccuacagccuguuccaggaguaccagugcuacggcagcagcagcaacaccagagugcugaacgagcugaacuacgacaacgccggcaccaaccuguacaacgagcuggagaugaacuacuacggcaagcaggagaacugguacagccugaagaagaacagcagaagccugggcgagaacgacgacggcaacaacgaggacaacgagaagcugagaaagcccaagcacaagaagcugaagcagcccgccgacggcaaccccgaccccaacgccaaccccaacguggaccccaacgccaaccccaacguggaccccaacgccaaccccaacguggaccccaacgccaaccccaacgccaaccccaacgccaaccccaacgccaaccccaacgccaaccccaacgccaaccccaacgccaaccccaacgccaaccccaacgccaaccccaacgccaaccccaacgccaaccccaacgccaaccccaacgccaaccccaacgccaaccccaacgccaaccccaacgccaaccccaacgccaaccccaacguggaccccaacgccaaccccaacgccaaccccaacgccaaccccaacgccaaccccaacgccaaccccaacgccaaccccaacgccaaccccaacgccaaccccaacgccaaccccaacgccaaccccaacgccaaccccaacgccaaccccaacgccaaccccaacgccaaccccaacgccaaccccaacgccaaccccaacgccaaccccaacgccaaccccgccgccuacaucaagcccggcagcgccaacaagcccaaggacgagcuggacuacgccaacgacaucgaggccgccuacgccaaguucguggccgccuggacccugaaggccgccgccugaggacuagucccuguucccagagcccacuuuuuuuucuuuuuuugaaauaaaauagccugucuuucagaucucaaaggcucuuuucagagccaccaaaaaaaaaaaaaaaaaaaaaaaaaaaaaaaaaaaaaaaaaaaaaaaaaaaaaaaaaaaaaaaaaaaaaaaaaaaaaaaaaaaaaaaaaaaaaaaaaaaaagaauu

SEQ ID NO: 7666 - RNA, 1367 nt, Artificial Sequence
  mRNA Design a-3 (hSL-A100-N5) comprising derived and/or modified sequence from Pf(3D7)__XP_001351122.1__HsALB_Pf-CSP(19-272)_L(G4S)_Pf-CSP(310-3 27)_L(G4S)_Pf-CSP(346-375) (opt4)
aggagagggcgcuuggcuugcaaggacccugagcugcggcauugaagcacacccaacccaacucgacugaagucagccucacugaaccggaucugagaaucuucucucucugggcuugccagggcucuccgaaccuagcuagcauccucuucaauuccaacuagaaagcuuaccaugaagugggugaccuucaucagccugcuguuccuguucagcagcgccuacagccuguuccaggaguaccagugcuacggcagcagcagcaacaccagagugcugaacgagcugaacuacgacaacgccggcaccaaccuguacaacgagcuggagaugaacuacuacggcaagcaggagaacugguacagccugaagaagaacagcagaagccugggcgagaacgacgacggcaacaacgaggacaacgagaagcugagaaagcccaagcacaagaagcugaagcagcccgccgacggcaaccccgaccccaacgccaaccccaacguggaccccaacgccaaccccaacguggaccccaacgccaaccccaacguggaccccaacgccaaccccaacgccaaccccaacgccaaccccaacgccaaccccaacgccaaccccaacgccaaccccaacgccaaccccaacgccaaccccaacgccaaccccaacgccaaccccaacgccaaccccaacgccaaccccaacgccaaccccaacgccaaccccaacgccaaccccaacgccaaccccaacgccaaccccaacguggaccccaacgccaaccccaacgccaaccccaacgccaaccccaacgccaaccccaacgccaaccccaacgccaaccccaacgccaaccccaacgccaaccccaacgccaaccccaacgccaaccccaacgccaaccccaacgccaaccccaacgccaaccccaacgccaaccccaacgccaaccccaacgccaaccccaacgccaaccccaacgccaaccccggcggcggcggcagcgagcccagcgacaagcacaucaaggaguaccugaacaagauccagaacagccugggcggcggcggcagcaucaagcccggcagcgccaacaagcccaaggacgagcuggacuacgccaacgacaucgagaagaagaucugcaagauggagaagugcagcugaggacuagucccuguucccagagcccacuuuuuuuucuuuuuuugaaauaaaauagccugucuuucagaucucaaaggcucuuuucagagccaccaaaaaaaaaaaaaaaaaaaaaaaaaaaaaaaaaaaaaaaaaaaaaaaaaaaaaaaaaaaaaaaaaaaaaaaaaaaaaaaaaaaaaaaaaaaaaaaaaaaaagaauu

SEQ ID NO: 7667 - RNA, 1352 nt, Artificial Sequence
  mRNA Design a-3 (hSL-A100-N5) comprising derived and/or modified sequence from Pf(3D7)__XP_001351122.1__HsALB_Pf-CSP(19-272)_L(G4S)_Pf-CSP(310-3 27)_Pf-CSP(346-375) (opt4)
aggagagggcgcuuggcuugcaaggacccugagcugcggcauugaagcacacccaacccaacucgacugaagucagccucacugaaccggaucugagaaucuucucucucugggcuugccagggcucuccgaaccuagcuagcauccucuucaauuccaacuagaaagcuuaccaugaagugggugaccuucaucagccugcuguuccuguucagcagcgccuacagccuguuccaggaguaccagugcuacggcagcagcagcaacaccagagugcugaacgagcugaacuacgacaacgccggcaccaaccuguacaacgagcuggagaugaacuacuacggcaagcaggagaacugguacagccugaagaagaacagcagaagccugggcgagaacgacgacggcaacaacgaggacaacgagaagcugagaaagcccaagcacaagaagcugaagcagcccgccgacggcaaccccgaccccaacgccaaccccaacguggaccccaacgccaaccccaacguggaccccaacgccaaccccaacguggaccccaacgccaaccccaacgccaaccccaacgccaaccccaacgccaaccccaacgccaaccccaacgccaaccccaacgccaaccccaacgccaaccccaacgccaaccccaacgccaaccccaacgccaaccccaacgccaaccccaacgccaaccccaacgccaaccccaacgccaaccccaacgccaaccccaacgccaaccccaacguggaccccaacgccaaccccaacgccaaccccaacgccaaccccaacgccaaccccaacgccaaccccaacgccaaccccaacgccaaccccaacgccaaccccaacgccaaccccaacgccaaccccaacgccaaccccaacgccaaccccaacgccaaccccaacgccaaccccaacgccaaccccaacgccaaccccaacgccaaccccaacgccaaccccggcggcggcggcagcgagcccagcgacaagcacaucaaggaguaccugaacaagauccagaacagccugaucaagcccggcagcgccaacaagcccaaggacgagcuggacuacgccaacgacaucgagaagaagaucugcaagauggagaagugcagcugaggacuagucccuguucccagagcccacuuuuuuuucuuuuuuugaaauaaaauagccugucuuucagaucucaaaggcucuuuucagagccaccaaaaaaaaaaaaaaaaaaaaaaaaaaaaaaaaaaaaaaaaaaaaaaaaaaaaaaaaaaaaaaaaaaaaaaaaaaaaaaaaaaaaaaaaaaaaaaaaaaaaagaauu

SEQ ID NO: 7668 - RNA, 1352 nt, Artificial Sequence
  mRNA Design a-3 (hSL-A100-N5) comprising derived and/or modified sequence from Pf(3D7)__XP_001351122.1__HsALB_Pf-CSP(19-325) (opt4)
aggagagggcgcuuggcuugcaaggacccugagcugcggcauugaagcacacccaacccaacucgacugaagucagccucacugaaccggaucugagaaucuucucucucugggcuugccagggcucuccgaaccuagcuagcauccucuucaauuccaacuagaaagcuuaccaugaagugggugaccuucaucagccugcuguuccuguucagcagcgccuacagccuguuccaggaguaccagugcuacggcagcagcagcaacaccagagugcugaacgagcugaacuacgacaacgccggcaccaaccuguacaacgagcuggagaugaacuacuacggcaagcaggagaacugguacagccugaagaagaacagcagaagccugggcgagaacgacgacggcaacaacgaggacaacgagaagcugagaaagcccaagcacaagaagcugaagcagcccgccgacggcaaccccgaccccaacgccaaccccaacguggaccccaacgccaaccccaacguggaccccaacgccaaccccaacguggaccccaacgccaaccccaacgccaaccccaacgccaaccccaacgccaaccccaacgccaaccccaacgccaaccccaacgccaaccccaacgccaaccccaacgccaaccccaacgccaaccccaacgccaaccccaacgccaaccccaacgccaaccccaacgccaaccccaacgccaaccccaacgccaaccccaacgccaaccccaacguggaccccaacgccaaccccaacgccaaccccaacgccaaccccaacgccaaccccaacgccaaccccaacgccaaccccaacgccaaccccaacgccaaccccaacgccaaccccaacgccaaccccaacgccaaccccaacgccaaccccaacgccaaccccaacgccaaccccaacgccaaccccaacgccaaccccaacgccaaccccaacgccaaccccaacaagaacaaccagggcaacggccagggccacaacaugcccaacgaccccaacagaaacguggacgagaacgccaacgccaacagcgccgugaagaacaacaacaacgaggagcccagcgacaagcacaucaaggaguaccugaacaagauccagaacugaggacuagucccuguucccagagcccacuuuuuuuucuuuuuuugaaauaaaauagccugucuuucagaucucaaaggcucuuuucagagccaccaaaaaaaaaaaaaaaaaaaaaaaaaaaaaaaaaaaaaaaaaaaaaaaaaaaaaaaaaaaaaaaaaaaaaaaaaaaaaaaaaaaaaaaaaaaaaaaaaaaaagaauu

SEQ ID NO: 7669 - RNA, 1529 nt, Artificial Sequence
  mRNA Design a-3 (hSL-A100-N5) comprising derived and/or modified sequence from Pf(3D7)__XP_001351122.1__HsALB_Pf-CSP(19-384) (opt4)
aggagagggcgcuuggcuugcaaggacccugagcugcggcauugaagcacacccaacccaacucgacugaagucagccucacugaaccggaucugagaaucuucucucucugggcuugccagggcucuccgaaccuagcuagcauccucuucaauuccaacuagaaagcuuaccaugaagugggugaccuucaucagccugcuguuccuguucagcagcgccuacagccuguuccaggaguaccagugcuacggcagcagcagcaacaccagagugcugaacgagcugaacuacgacaacgccggcaccaaccuguacaacgagcuggagaugaacuacuacggcaagcaggagaacugguacagccugaagaagaacagcagaagccugggcgagaacgacgacggcaacaacgaggacaacgagaagcugagaaagcccaagcacaagaagcugaagcagcccgccgacggcaaccccgaccccaacgccaaccccaacguggaccccaacgccaaccccaacguggaccccaacgccaaccccaacguggaccccaacgccaaccccaacgccaaccccaacgccaaccccaacgccaaccccaacgccaaccccaacgccaaccccaacgccaaccccaacgccaaccccaacgccaaccccaacgccaaccccaacgccaaccccaacgccaaccccaacgccaaccccaacgccaaccccaacgccaaccccaacgccaaccccaacgccaaccccaacguggaccccaacgccaaccccaacgccaaccccaacgccaaccccaacgccaaccccaacgccaaccccaacgccaaccccaacgccaaccccaacgccaaccccaacgccaaccccaacgccaaccccaacgccaaccccaacgccaaccccaacgccaaccccaacgccaaccccaacgccaaccccaacgccaaccccaacgccaaccccaacgccaaccccaacaagaacaaccagggcaacggccagggccacaacaugcccaacgaccccaacagaaacguggacgagaacgccaacgccaacagcgccgugaagaacaacaacaacgaggagcccagcgacaagcacaucaaggaguaccugaacaagauccagaacagccugagcaccgaguggagccccugcagcgugaccugcggcaacggcauccaggugagaaucaagcccggcagcgccaacaagcccaaggacgagcuggacuacgccaacgacaucgagaagaagaucugcaagauggagaagugcagcagcguguucaacguggugaacagcagcugaggacuagucccuguucccagagcccacuuuuuuuucuuuuuuugaaauaaaauagccugucuuucagaucucaaaggcucuuuucagagccaccaaaaaaaaaaaaaaaaaaaaaaaaaaaaaaaaaaaaaaaaaaaaaaaaaaaaaaaaaaaaaaaaaaaaaaaaaaaaaaaaaaaaaaaaaaaaaaaaaaaaagaauu

SEQ ID NO: 7670 - RNA, 1667 nt, Artificial Sequence
  mRNA Design a-3 (hSL-A100-N5) comprising derived and/or modified sequence from Pf(3D7)__XP_001351122.1__HsALB_Pf-CSP(19-384)_TM domain HA (opt4)
aggagagggcgcuuggcuugcaaggacccugagcugcggcauugaagcacacccaacccaacucgacugaagucagccucacugaaccggaucugagaaucuucucucucugggcuugccagggcucuccgaaccuagcuagcauccucuucaauuccaacuagaaagcuuaccaugaagugggugaccuucaucagccugcuguuccuguucagcagcgccuacagccuguuccaggaguaccagugcuacggcagcagcagcaacaccagagugcugaacgagcugaacuacgacaacgccggcaccaaccuguacaacgagcuggagaugaacuacuacggcaagcaggagaacugguacagccugaagaagaacagcagaagccugggcgagaacgacgacggcaacaacgaggacaacgagaagcugagaaagcccaagcacaagaagcugaagcagcccgccgacggcaaccccgaccccaacgccaaccccaacguggaccccaacgccaaccccaacguggaccccaacgccaaccccaacguggaccccaacgccaaccccaacgccaaccccaacgccaaccccaacgccaaccccaacgccaaccccaacgccaaccccaacgccaaccccaacgccaaccccaacgccaaccccaacgccaaccccaacgccaaccccaacgccaaccccaacgccaaccccaacgccaaccccaacgccaaccccaacgccaaccccaacgccaaccccaacguggaccccaacgccaaccccaacgccaaccccaacgccaaccccaacgccaaccccaacgccaaccccaacgccaaccccaacgccaaccccaacgccaaccccaacgccaaccccaacgccaaccccaacgccaaccccaacgccaaccccaacgccaaccccaacgccaaccccaacgccaaccccaacgccaaccccaacgccaaccccaacgccaaccccaacaagaacaaccagggcaacggccagggccacaacaugcccaacgaccccaacagaaacguggacgagaacgccaacgccaacagcgccgugaagaacaacaacaacgaggagcccagcgacaagcacaucaaggaguaccugaacaagauccagaacagccugagcaccgaguggagccccugcagcgugaccugcggcaacggcauccaggugagaaucaagcccggcagcgccaacaagcccaaggacgagcuggacuacgccaacgacaucgagaagaagaucugcaagauggagaagugcagcagcguguucaacguggugaacagcagcaagcuggagagcaccagaaucuaccagauccuggccaucuacagcaccguggccagcagccuggugcugguggugagccugggcgccaucagcuucuggaugugcagcaacggcagccugcagugcagaaucugcaucugaggacuagucccuguucccagagcccacuuuuuuuucuuuuuuugaaauaaaauagccugucuuucagaucucaaaggcucuuuucagagccaccaaaaaaaaaaaaaaaaaaaaaaaaaaaaaaaaaaaaaaaaaaaaaaaaaaaaaaaaaaaaaaaaaaaaaaaaaaaaaaaaaaaaaaaaaaaaaaaaaaaaagaauu

SEQ ID NO: 7671 - RNA, 1379 nt, Artificial Sequence
  mRNA Design a-3 (hSL-A100-N5) comprising derived and/or modified sequence from Pf(3D7)__XP_001351122.1__HsALB_Pf-CSP(82-397) (opt4)
aggagagggcgcuuggcuugcaaggacccugagcugcggcauugaagcacacccaacccaacucgacugaagucagccucacugaaccggaucugagaaucuucucucucugggcuugccagggcucuccgaaccuagcuagcauccucuucaauuccaacuagaaagcuuaccaugaagugggugaccuucaucagccugcuguuccuguucagcagcgccuacagcgacaacgagaagcugagaaagcccaagcacaagaagcugaagcagcccgccgacggcaaccccgaccccaacgccaaccccaacguggaccccaacgccaaccccaacguggaccccaacgccaaccccaacguggaccccaacgccaaccccaacgccaaccccaacgccaaccccaacgccaaccccaacgccaaccccaacgccaaccccaacgccaaccccaacgccaaccccaacgccaaccccaacgccaaccccaacgccaaccccaacgccaaccccaacgccaaccccaacgccaaccccaacgccaaccccaacgccaaccccaacgccaaccccaacguggaccccaacgccaaccccaacgccaaccccaacgccaaccccaacgccaaccccaacgccaaccccaacgccaaccccaacgccaaccccaacgccaaccccaacgccaaccccaacgccaaccccaacgccaaccccaacgccaaccccaacgccaaccccaacgccaaccccaacgccaaccccaacgccaaccccaacgccaaccccaacgccaaccccaacaagaacaaccagggcaacggccagggccacaacaugcccaacgaccccaacagaaacguggacgagaacgccaacgccaacagcgccgugaagaacaacaacaacgaggagcccagcgacaagcacaucaaggaguaccugaacaagauccagaacagccugagcaccgaguggagccccugcagcgugaccugcggcaacggcauccaggugagaaucaagcccggcagcgccaacaagcccaaggacgagcuggacuacgccaacgacaucgagaagaagaucugcaagauggagaagugcagcagcguguucaacguggugaacagcagcaucggccugaucauggugcugagcuuccuguuccugaacugaggacuagucccuguucccagagcccacuuuuuuuucuuuuuuugaaauaaaauagccugucuuucagaucucaaaggcucuuuucagagccaccaaaaaaaaaaaaaaaaaaaaaaaaaaaaaaaaaaaaaaaaaaaaaaaaaaaaaaaaaaaaaaaaaaaaaaaaaaaaaaaaaaaaaaaaaaaaaaaaaaaaagaauu

SEQ ID NO: 7672 - RNA, 731 nt, Artificial Sequence
  mRNA Design a-3 (hSL-A100-N5) comprising derived and/or modified sequence from Pf(3D7)__XP_001351122.1__HsALB_Pf-CSP(93-192) (opt4)
aggagagggcgcuuggcuugcaaggacccugagcugcggcauugaagcacacccaacccaacucgacugaagucagccucacugaaccggaucugagaaucuucucucucugggcuugccagggcucuccgaaccuagcuagcauccucuucaauuccaacuagaaagcuuaccaugaagugggugaccuucaucagccugcuguuccuguucagcagcgccuacagcaagcugaagcagcccgccgacggcaaccccgaccccaacgccaaccccaacguggaccccaacgccaaccccaacguggaccccaacgccaaccccaacguggaccccaacgccaaccccaacgccaaccccaacgccaaccccaacgccaaccccaacgccaaccccaacgccaaccccaacgccaaccccaacgccaaccccaacgccaaccccaacgccaaccccaacgccaaccccaacgccaaccccaacgccaaccccaacgccaaccccaacgccaaccccaacgccaaccccugaggacuagucccuguucccagagcccacuuuuuuuucuuuuuuugaaauaaaauagccugucuuucagaucucaaaggcucuuuucagagccaccaaaaaaaaaaaaaaaaaaaaaaaaaaaaaaaaaaaaaaaaaaaaaaaaaaaaaaaaaaaaaaaaaaaaaaaaaaaaaaaaaaaaaaaaaaaaaaaaaaaaagaauu

SEQ ID NO: 7673 - RNA, 971 nt, Artificial Sequence
  mRNA Design a-3 (hSL-A100-N5) comprising derived and/or modified sequence from Pf(3D7)__XP_001351122.1__HsALB_Pf-CSP(93-272) (opt4)
aggagagggcgcuuggcuugcaaggacccugagcugcggcauugaagcacacccaacccaacucgacugaagucagccucacugaaccggaucugagaaucuucucucucugggcuugccagggcucuccgaaccuagcuagcauccucuucaauuccaacuagaaagcuuaccaugaagugggugaccuucaucagccugcuguuccuguucagcagcgccuacagcaagcugaagcagcccgccgacggcaaccccgaccccaacgccaaccccaacguggaccccaacgccaaccccaacguggaccccaacgccaaccccaacguggaccccaacgccaaccccaacgccaaccccaacgccaaccccaacgccaaccccaacgccaaccccaacgccaaccccaacgccaaccccaacgccaaccccaacgccaaccccaacgccaaccccaacgccaaccccaacgccaaccccaacgccaaccccaacgccaaccccaacgccaaccccaacgccaaccccaacgccaaccccaacguggaccccaacgccaaccccaacgccaaccccaacgccaaccccaacgccaaccccaacgccaaccccaacgccaaccccaacgccaaccccaacgccaaccccaacgccaaccccaacgccaaccccaacgccaaccccaacgccaaccccaacgccaaccccaacgccaaccccaacgccaaccccaacgccaaccccaacgccaaccccaacgccaaccccugaggacuagucccuguucccagagcccacuuuuuuuucuuuuuuugaaauaaaauagccugucuuucagaucucaaaggcucuuuucagagccaccaaaaaaaaaaaaaaaaaaaaaaaaaaaaaaaaaaaaaaaaaaaaaaaaaaaaaaaaaaaaaaaaaaaaaaaaaaaaaaaaaaaaaaaaaaaaaaaaaaaaagaauu

SEQ ID NO: 7674 - RNA, 1346 nt, Artificial Sequence
  mRNA Design a-3 (hSL-A100-N5) comprising derived and/or modified sequence from Pf(3D7)__XP_001351122.1__HsALB_Pf-CSP(93-397) (opt4)
aggagagggcgcuuggcuugcaaggacccugagcugcggcauugaagcacacccaacccaacucgacugaagucagccucacugaaccggaucugagaaucuucucucucugggcuugccagggcucuccgaaccuagcuagcauccucuucaauuccaacuagaaagcuuaccaugaagugggugaccuucaucagccugcuguuccuguucagcagcgccuacagcaagcugaagcagcccgccgacggcaaccccgaccccaacgccaaccccaacguggaccccaacgccaaccccaacguggaccccaacgccaaccccaacguggaccccaacgccaaccccaacgccaaccccaacgccaaccccaacgccaaccccaacgccaaccccaacgccaaccccaacgccaaccccaacgccaaccccaacgccaaccccaacgccaaccccaacgccaaccccaacgccaaccccaacgccaaccccaacgccaaccccaacgccaaccccaacgccaaccccaacgccaaccccaacguggaccccaacgccaaccccaacgccaaccccaacgccaaccccaacgccaaccccaacgccaaccccaacgccaaccccaacgccaaccccaacgccaaccccaacgccaaccccaacgccaaccccaacgccaaccccaacgccaaccccaacgccaaccccaacgccaaccccaacgccaaccccaacgccaaccccaacgccaaccccaacgccaaccccaacaagaacaaccagggcaacggccagggccacaacaugcccaacgaccccaacagaaacguggacgagaacgccaacgccaacagcgccgugaagaacaacaacaacgaggagcccagcgacaagcacaucaaggaguaccugaacaagauccagaacagccugagcaccgaguggagccccugcagcgugaccugcggcaacggcauccaggugagaaucaagcccggcagcgccaacaagcccaaggacgagcuggacuacgccaacgacaucgagaagaagaucugcaagauggagaagugcagcagcguguucaacguggugaacagcagcaucggccugaucauggugcugagcuuccuguuccugaacugaggacuagucccuguucccagagcccacuuuuuuuucuuuuuuugaaauaaaauagccugucuuucagaucucaaaggcucuuuucagagccaccaaaaaaaaaaaaaaaaaaaaaaaaaaaaaaaaaaaaaaaaaaaaaaaaaaaaaaaaaaaaaaaaaaaaaaaaaaaaaaaaaaaaaaaaaaaaaaaaaaaaagaauu

SEQ ID NO: 7675 - RNA, 716 nt, Artificial Sequence
  mRNA Design a-3 (hSL-A100-N5) comprising derived and/or modified sequence from Pf(3D7)__XP_001351122.1__HsALB_Pf-CSP(98-192) (opt4)
aggagagggcgcuuggcuugcaaggacccugagcugcggcauugaagcacacccaacccaacucgacugaagucagccucacugaaccggaucugagaaucuucucucucugggcuugccagggcucuccgaaccuagcuagcauccucuucaauuccaacuagaaagcuuaccaugaagugggugaccuucaucagccugcuguuccuguucagcagcgccuacagcgccgacggcaaccccgaccccaacgccaaccccaacguggaccccaacgccaaccccaacguggaccccaacgccaaccccaacguggaccccaacgccaaccccaacgccaaccccaacgccaaccccaacgccaaccccaacgccaaccccaacgccaaccccaacgccaaccccaacgccaaccccaacgccaaccccaacgccaaccccaacgccaaccccaacgccaaccccaacgccaaccccaacgccaaccccaacgccaaccccaacgccaaccccugaggacuagucccuguucccagagcccacuuuuuuuucuuuuuuugaaauaaaauagccugucuuucagaucucaaaggcucuuuucagagccaccaaaaaaaaaaaaaaaaaaaaaaaaaaaaaaaaaaaaaaaaaaaaaaaaaaaaaaaaaaaaaaaaaaaaaaaaaaaaaaaaaaaaaaaaaaaaaaaaaaaaagaauu

SEQ ID NO: 7676 - RNA, 956 nt, Artificial Sequence
  mRNA Design a-3 (hSL-A100-N5) comprising derived and/or modified sequence from Pf(3D7)__XP_001351122.1__HsALB_Pf-CSP(98-272) (opt4)
aggagagggcgcuuggcuugcaaggacccugagcugcggcauugaagcacacccaacccaacucgacugaagucagccucacugaaccggaucugagaaucuucucucucugggcuugccagggcucuccgaaccuagcuagcauccucuucaauuccaacuagaaagcuuaccaugaagugggugaccuucaucagccugcuguuccuguucagcagcgccuacagcgccgacggcaaccccgaccccaacgccaaccccaacguggaccccaacgccaaccccaacguggaccccaacgccaaccccaacguggaccccaacgccaaccccaacgccaaccccaacgccaaccccaacgccaaccccaacgccaaccccaacgccaaccccaacgccaaccccaacgccaaccccaacgccaaccccaacgccaaccccaacgccaaccccaacgccaaccccaacgccaaccccaacgccaaccccaacgccaaccccaacgccaaccccaacgccaaccccaacguggaccccaacgccaaccccaacgccaaccccaacgccaaccccaacgccaaccccaacgccaaccccaacgccaaccccaacgccaaccccaacgccaaccccaacgccaaccccaacgccaaccccaacgccaaccccaacgccaaccccaacgccaaccccaacgccaaccccaacgccaaccccaacgccaaccccaacgccaaccccaacgccaaccccugaggacuagucccuguucccagagcccacuuuuuuuucuuuuuuugaaauaaaauagccugucuuucagaucucaaaggcucuuuucagagccaccaaaaaaaaaaaaaaaaaaaaaaaaaaaaaaaaaaaaaaaaaaaaaaaaaaaaaaaaaaaaaaaaaaaaaaaaaaaaaaaaaaaaaaaaaaaaaaaaaaaaagaauu

SEQ ID NO: 7677 - RNA, 1262 nt, Artificial Sequence
  mRNA Design a-3 (hSL-A100-N5) comprising derived and/or modified sequence from Pf(3D7)__XP_001351122.1__HsALB_Pf-CSP(98-374) (opt4)
aggagagggcgcuuggcuugcaaggacccugagcugcggcauugaagcacacccaacccaacucgacugaagucagccucacugaaccggaucugagaaucuucucucucugggcuugccagggcucuccgaaccuagcuagcauccucuucaauuccaacuagaaagcuuaccaugaagugggugaccuucaucagccugcuguuccuguucagcagcgccuacagcgccgacggcaaccccgaccccaacgccaaccccaacguggaccccaacgccaaccccaacguggaccccaacgccaaccccaacguggaccccaacgccaaccccaacgccaaccccaacgccaaccccaacgccaaccccaacgccaaccccaacgccaaccccaacgccaaccccaacgccaaccccaacgccaaccccaacgccaaccccaacgccaaccccaacgccaaccccaacgccaaccccaacgccaaccccaacgccaaccccaacgccaaccccaacgccaaccccaacguggaccccaacgccaaccccaacgccaaccccaacgccaaccccaacgccaaccccaacgccaaccccaacgccaaccccaacgccaaccccaacgccaaccccaacgccaaccccaacgccaaccccaacgccaaccccaacgccaaccccaacgccaaccccaacgccaaccccaacgccaaccccaacgccaaccccaacgccaaccccaacgccaaccccaacaagaacaaccagggcaacggccagggccacaacaugcccaacgaccccaacagaaacguggacgagaacgccaacgccaacagcgccgugaagaacaacaacaacgaggagcccagcgacaagcacaucaaggaguaccugaacaagauccagaacagccugagcaccgaguggagccccugcagcgugaccugcggcaacggcauccaggugagaaucaagcccggcagcgccaacaagcccaaggacgagcuggacuacgccaacgacaucgagaagaagaucugcaagauggagaagugcugaggacuagucccuguucccagagcccacuuuuuuuucuuuuuuugaaauaaaauagccugucuuucagaucucaaaggcucuuuucagagccaccaaaaaaaaaaaaaaaaaaaaaaaaaaaaaaaaaaaaaaaaaaaaaaaaaaaaaaaaaaaaaaaaaaaaaaaaaaaaaaaaaaaaaaaaaaaaaaaaaaaaagaauu

SEQ ID NO: 7678 - RNA, 1331 nt, Artificial Sequence
  mRNA Design a-3 (hSL-A100-N5) comprising derived and/or modified sequence from Pf(3D7)__XP_001351122.1__HsALB_Pf-CSP(98-397) (opt4)
aggagagggcgcuuggcuugcaaggacccugagcugcggcauugaagcacacccaacccaacucgacugaagucagccucacugaaccggaucugagaaucuucucucucugggcuugccagggcucuccgaaccuagcuagcauccucuucaauuccaacuagaaagcuuaccaugaagugggugaccuucaucagccugcuguuccuguucagcagcgccuacagcgccgacggcaaccccgaccccaacgccaaccccaacguggaccccaacgccaaccccaacguggaccccaacgccaaccccaacguggaccccaacgccaaccccaacgccaaccccaacgccaaccccaacgccaaccccaacgccaaccccaacgccaaccccaacgccaaccccaacgccaaccccaacgccaaccccaacgccaaccccaacgccaaccccaacgccaaccccaacgccaaccccaacgccaaccccaacgccaaccccaacgccaaccccaacgccaaccccaacguggaccccaacgccaaccccaacgccaaccccaacgccaaccccaacgccaaccccaacgccaaccccaacgccaaccccaacgccaaccccaacgccaaccccaacgccaaccccaacgccaaccccaacgccaaccccaacgccaaccccaacgccaaccccaacgccaaccccaacgccaaccccaacgccaaccccaacgccaaccccaacgccaaccccaacaagaacaaccagggcaacggccagggccacaacaugcccaacgaccccaacagaaacguggacgagaacgccaacgccaacagcgccgugaagaacaacaacaacgaggagcccagcgacaagcacaucaaggaguaccugaacaagauccagaacagccugagcaccgaguggagccccugcagcgugaccugcggcaacggcauccaggugagaaucaagcccggcagcgccaacaagcccaaggacgagcuggacuacgccaacgacaucgagaagaagaucugcaagauggagaagugcagcagcguguucaacguggugaacagcagcaucggccugaucauggugcugagcuuccuguuccugaacugaggacuagucccuguucccagagcccacuuuuuuuucuuuuuuugaaauaaaauagccugucuuucagaucucaaaggcucuuuucagagccaccaaaaaaaaaaaaaaaaaaaaaaaaaaaaaaaaaaaaaaaaaaaaaaaaaaaaaaaaaaaaaaaaaaaaaaaaaaaaaaaaaaaaaaaaaaaaaaaaaaaaagaauu

SEQ ID NO: 7679 - RNA, 1658 nt, Artificial Sequence
  mRNA Design a-3 (hSL-A100-N5) comprising derived and/or modified sequence from Pf(3D7)__XP_001351122.1__HsALB_Pf-CSP(199-377)_L(PVTN)_HBsAg (opt4)
aggagagggcgcuuggcuugcaaggacccugagcugcggcauugaagcacacccaacccaacucgacugaagucagccucacugaaccggaucugagaaucuucucucucugggcuugccagggcucuccgaaccuagcuagcauccucuucaauuccaacuagaaagcuuaccaugaagugggugaccuucaucagccugcuguuccuguucagcagcgccuacagcgaccccaacgccaaccccaacgccaaccccaacgccaaccccaacgccaaccccaacgccaaccccaacgccaaccccaacgccaaccccaacgccaaccccaacgccaaccccaacgccaaccccaacgccaaccccaacgccaaccccaacgccaaccccaacgccaaccccaacgccaaccccaacgccaaccccaacgccaaccccaacgccaaccccaacaagaacaaccagggcaacggccagggccacaacaugcccaacgaccccaacagaaacguggacgagaacgccaacgccaacagcgccgugaagaacaacaacaacgaggagcccagcgacaagcacaucaaggaguaccugaacaagauccagaacagccugagcaccgaguggagccccugcagcgugaccugcggcaacggcauccaggugagaaucaagcccggcagcgccaacaagcccaaggacgagcuggacuacgccaacgacaucgagaagaagaucugcaagauggagaagugcagcagcgugcccgugaccaacauggagaacaucaccagcggcuuccugggcccccugcuggugcugcaggccggcuucuuccugcugaccagaauccugaccaucccccagagccuggacagcugguggaccagccugaacuuccugggcggcagccccgugugccugggccagaacagccagagccccaccagcaaccacagccccaccagcugcccccccaucugccccggcuacagauggaugugccugagaagauucaucaucuuccuguucauccugcugcugugccugaucuuccugcuggugcugcuggacuaccagggcaugcugcccgugugcccccugauccccggcagcaccaccaccaacaccggccccugcaagaccugcaccacccccgcccagggcaacagcauguuccccagcugcugcugcaccaagcccaccgacggcaacugcaccugcauccccauccccagcagcugggccuucgccaaguaccugugggagugggccagcgugagauucagcuggcugagccugcuggugcccuucgugcagugguucgugggccugagccccaccguguggcugagcgccaucuggaugaugugguacuggggccccagccuguacagcaucgugagccccuucaucccccugcugcccaucuucuucugccuguggguguacaucugaggacuagucccuguucccagagcccacuuuuuuuucuuuuuuugaaauaaaauagccugucuuucagaucucaaaggcucuuuucagagccaccaaaaaaaaaaaaaaaaaaaaaaaaaaaaaaaaaaaaaaaaaaaaaaaaaaaaaaaaaaaaaaaaaaaaaaaaaaaaaaaaaaaaaaaaaaaaaaaaaaaaagaauu

SEQ ID NO: 7680 - RNA, 1568 nt, Artificial Sequence
  mRNA Design a-3 (hSL-A100-N5) comprising derived and/or modified sequence from Pf(3D7)__XP_001351122.1__Pf-CSP (opt5)
aggagagggcgcuuggcuugcaaggacccugagcugcggcauugaagcacacccaacccaacucgacugaagucagccucacugaaccggaucugagaaucuucucucucugggcuugccagggcucuccgaaccuagcuagcauccucuucaauuccaacuagaaagcuuaccaugaugagaaagcuggccauccucagcguguccucuuuccuguuugucgaggcucuuuuccaggaauaccaaugcuauggcagcuccucuaacacccggguucugaaugagcucaacuacgacaaugccgggacaaaccuguauaaugaacuugagaugaacuacuauggaaaacaggaaaauugguacagccugaagaaaaacucccgcucucucggcgagaaugaugacgggaacaaugaggauaacgaaaagcugagaaaacccaagcacaagaaacugaagcagccugcggacggaaauccggaucccaacgcuaauccuaacguggaccccaacgccaauccuaacguggaucccaaugccaacccuaaugucgacccgaacgcuaaucccaacgccaauccuaacgcuaaucccaacgccaauccuaacgcgaaucccaacgccaacccgaaugcuaacccuaaugccaaccccaaugcuaacccuaaugccaaccccaaugcgaaccccaaugccaacccuaaugcuaacccgaaugccaaccccaacgcuaauccuaacgccaaucccaacgccaauccuaacguggaucccaaugcuaacccgaaugcgaacccuaaugccaaccccaaugcuaacccuaaugccaaccccaacgccaauccuaacgcuaaucccaacgccaauccgaacgcgaauccuaacgcuaaucccaacgccaaucccaacgccaauccuaacgcuaauccgaacgccaaucccaacgcuaacccuaaugccaaccccaaugcgaacccuaaugccaaccccaauaaaaacaaucagggcaacgggcaaggacauaauaugccuaacgaccccaaucggaacguugaugagaaugcuaacgccaacagcgcugugaagaauaacaauaacgaggaaccguccgacaaacacauuaaggaguaucucaauaagauccagaacagccugucuacggaaugguccccuuguagcgugaccugcggcaauggcauucagguccgcaucaaacccgggucugccaacaagccuaaagaugagcuugacuacgcgaaugacauugaaaagaaaaucuguaagauggagaaaugcuccagcguuuuuaacguggucaauucuuccaucggacugauuauggugcucagcuuccuguuucuuaacugaggacuagucccuguucccagagcccacuuuuuuuucuuuuuuugaaauaaaauagccugucuuucagaucucaaaggcucuuuucagagccaccaaaaaaaaaaaaaaaaaaaaaaaaaaaaaaaaaaaaaaaaaaaaaaaaaaaaaaaaaaaaaaaaaaaaaaaaaaaaaaaaaaaaaaaaaaaaaaaaaaaaagaauu

SEQ ID NO: 7681 - RNA, 1499 nt, Artificial Sequence
  mRNA Design a-3 (hSL-A100-N5) comprising derived and/or modified sequence from Pf(3D7)__XP_001351122.1__Pf-CSP(1-374) (opt5)
aggagagggcgcuuggcuugcaaggacccugagcugcggcauugaagcacacccaacccaacucgacugaagucagccucacugaaccggaucugagaaucuucucucucugggcuugccagggcucuccgaaccuagcuagcauccucuucaauuccaacuagaaagcuuaccaugaugagaaagcuggccauccucagcguguccucuuuccuguuugucgaggcucuuuuccaggaauaccaaugcuauggcagcuccucuaacacccggguucugaaugagcucaacuacgacaaugccgggacaaaccuguauaaugaacuugagaugaacuacuauggaaaacaggaaaauugguacagccugaagaaaaacucccgcucucucggcgagaaugaugacgggaacaaugaggauaacgaaaagcugagaaaacccaagcacaagaaacugaagcagccugcggacggaaauccggaucccaacgcuaauccuaacguggaccccaacgccaauccuaacguggaucccaaugccaacccuaaugucgacccgaacgcuaaucccaacgccaauccuaacgcuaaucccaacgccaauccuaacgcgaaucccaacgccaacccgaaugcuaacccuaaugccaaccccaaugcuaacccuaaugccaaccccaaugcgaaccccaaugccaacccuaaugcuaacccgaaugccaaccccaacgcuaauccuaacgccaaucccaacgccaauccuaacguggaucccaaugcuaacccgaaugcgaacccuaaugccaaccccaaugcuaacccuaaugccaaccccaacgccaauccuaacgcuaaucccaacgccaauccgaacgcgaauccuaacgcuaaucccaacgccaaucccaacgccaauccuaacgcuaauccgaacgccaaucccaacgcuaacccuaaugccaaccccaaugcgaacccuaaugccaaccccaauaaaaacaaucagggcaacgggcaaggacauaauaugccuaacgaccccaaucggaacguugaugagaaugcuaacgccaacagcgcugugaagaauaacaauaacgaggaaccguccgacaaacacauuaaggaguaucucaauaagauccagaacagccugucuacggaaugguccccuuguagcgugaccugcggcaauggcauucagguccgcaucaaacccgggucugccaacaagccuaaagaugagcuugacuacgcgaaugacauugaaaagaaaaucuguaagauggagaaaugcugaggacuagucccuguucccagagcccacuuuuuuuucuuuuuuugaaauaaaauagccugucuuucagaucucaaaggcucuuuucagagccaccaaaaaaaaaaaaaaaaaaaaaaaaaaaaaaaaaaaaaaaaaaaaaaaaaaaaaaaaaaaaaaaaaaaaaaaaaaaaaaaaaaaaaaaaaaaaaaaaaaaaagaauu

SEQ ID NO: 7682 - RNA, 1352 nt, Artificial Sequence
  mRNA Design a-3 (hSL-A100-N5) comprising derived and/or modified sequence from Pf(3D7)__XP_001351122.1__Pf-CSP(1-325) (opt5)
aggagagggcgcuuggcuugcaaggacccugagcugcggcauugaagcacacccaacccaacucgacugaagucagccucacugaaccggaucugagaaucuucucucucugggcuugccagggcucuccgaaccuagcuagcauccucuucaauuccaacuagaaagcuuaccaugaugagaaagcuggccauccucagcguguccucuuuccuguuugucgaggcucuuuuccaggaauaccaaugcuauggcagcuccucuaacacccggguucugaaugagcucaacuacgacaaugccgggacaaaccuguauaaugaacuugagaugaacuacuauggaaaacaggaaaauugguacagccugaagaaaaacucccgcucucucggcgagaaugaugacgggaacaaugaggauaacgaaaagcugagaaaacccaagcacaagaaacugaagcagccugcggacggaaauccggaucccaacgcuaauccuaacguggaccccaacgccaauccuaacguggaucccaaugccaacccuaaugucgacccgaacgcuaaucccaacgccaauccuaacgcuaaucccaacgccaauccuaacgcgaaucccaacgccaacccgaaugcuaacccuaaugccaaccccaaugcuaacccuaaugccaaccccaaugcgaaccccaaugccaacccuaaugcuaacccgaaugccaaccccaacgcuaauccuaacgccaaucccaacgccaauccuaacguggaucccaaugcuaacccgaaugcgaacccuaaugccaaccccaaugcuaacccuaaugccaaccccaacgccaauccuaacgcuaaucccaacgccaauccgaacgcgaauccuaacgcuaaucccaacgccaaucccaacgccaauccuaacgcuaauccgaacgccaaucccaacgcuaacccuaaugccaaccccaaugcgaacccuaaugccaaccccaauaaaaacaaucagggcaacgggcaaggacauaauaugccuaacgaccccaaucggaacguugaugagaaugcuaacgccaacagcgcugugaagaauaacaauaacgaggaaccguccgacaaacacauuaaggaguaucucaauaagauccagaacugaggacuagucccuguucccagagcccacuuuuuuuucuuuuuuugaaauaaaauagccugucuuucagaucucaaaggcucuuuucagagccaccaaaaaaaaaaaaaaaaaaaaaaaaaaaaaaaaaaaaaaaaaaaaaaaaaaaaaaaaaaaaaaaaaaaaaaaaaaaaaaaaaaaaaaaaaaaaaaaaaaaaagaauu

SEQ ID NO: 7683 - RNA, 1568 nt, Artificial Sequence
  mRNA Design a-3 (hSL-A100-N5) comprising derived and/or modified sequence from Pf(3D7)__XP_001351122.1__HsALB_Pf-CSP(19-397) (opt5)
aggagagggcgcuuggcuugcaaggacccugagcugcggcauugaagcacacccaacccaacucgacugaagucagccucacugaaccggaucugagaaucuucucucucugggcuugccagggcucuccgaaccuagcuagcauccucuucaauuccaacuagaaagcuuaccaugaagugggugaccuucaucagccugcucuuucuguucuccucugccuacagccuuuuucaggaguaucaaugcuacggcuccucuagcaacacaagaguccugaaugaacucaacuaugacaaugcugggacgaaccuguacaaugagcuugaaaugaacuauuacggaaaacaggagaauugguauucccugaagaaaaacucucggagccucggcgaaaaugaugacgggaacaaugaggauaacgagaagcugcgcaaacccaagcacaagaaacugaagcagccugccgacggaaauccggaucccaacgcgaauccuaacguugaccccaacgcuaauccuaacguggaucccaaugccaacccuaauguggacccgaacgccaaucccaacgcuaauccuaacgccaaucccaacgcuaauccuaacgccaaucccaacgcgaacccgaaugccaacccuaaugcuaaccccaaugccaacccuaaugcuaaccccaaugccaaccccaaugcgaacccuaaugccaacccgaaugcuaaccccaacgccaauccuaacgcuaaucccaacgccaauccuaacgucgaucccaaugccaacccgaaugcuaacccuaaugcgaaccccaaugccaacccuaaugcuaaccccaacgccaauccuaacgccaaucccaacgcuaauccgaacgccaauccuaacgcgaaucccaacgcuaaucccaacgccaauccuaacgccaauccgaacgcuaaucccaacgccaacccuaaugcuaaccccaaugccaacccuaaugcgaaccccaauaaaaacaaucagggcaacgggcaaggacauaauaugccuaacgaccccaauagaaacguggaugaaaaugccaacgcuaacuccgccguuaagaauaacaauaacgaggaaccgagcgacaaacacauuaaggaguaccucaauaagauccagaacucucuguccaccgaguggagcccuuguucugugacaugcggcaauggcauucagguccggaucaaacccggguccgcuaacaagccuaaagaugaacuugacuacgccaaugacauugagaagaaaaucuguaagauggaaaaaugcagcucuguguucaacguugucaauuccagcaucggacugauuauggugcucuccuuucuguuccuuaacugaggacuagucccuguucccagagcccacuuuuuuuucuuuuuuugaaauaaaauagccugucuuucagaucucaaaggcucuuuucagagccaccaaaaaaaaaaaaaaaaaaaaaaaaaaaaaaaaaaaaaaaaaaaaaaaaaaaaaaaaaaaaaaaaaaaaaaaaaaaaaaaaaaaaaaaaaaaaaaaaaaaaagaauu

SEQ ID NO: 7684 - RNA, 1586 nt, Artificial Sequence
  mRNA Design a-3 (hSL-A100-N5) comprising derived and/or modified sequence from Pf(3D7)__XP_001351122.1__HsIns-iso1_Pf-CSP(19-397) (opt5)
aggagagggcgcuuggcuugcaaggacccugagcugcggcauugaagcacacccaacccaacucgacugaagucagccucacugaaccggaucugagaaucuucucucucugggcuugccagggcucuccgaaccuagcuagcauccucuucaauuccaacuagaaagcuuaccauggcccuguggaugagacuccugccccuucuggcucuccuggcccuuuggggcccugacccggcggcugcccuguuccaggaguaccaaugcuaugggagcuccucuaacacccgggugcucaaugaacugaacuacgauaaugccggaacaaaccuguauaaugagcucgaaaugaacuacuauggcaagcaggagaauugguacagccugaaaaagaacucccgcucucuuggggaaaaugacgauggaaacaaugaggacaacgagaaacugagaaagcccaaacacaagaagcucaaacagccugcugauggcaaucccgacccuaacgccaaucccaacgucgauccuaacgcuaauccgaacguugaccccaaugccaacccuaauguggaucccaacgcgaauccuaacgccaaucccaacgcuaauccgaacgccaauccuaacgcuaaucccaacgccaacccuaaugcgaaccccaaugccaaccccaaugcuaacccuaaugccaacccgaaugcuaaccccaaugccaacccuaaugccaaccccaaugcuaacccuaacgcgaaucccaacgccaauccgaacgcuaauccuaacguggaccccaaugccaacccuaaugccaaccccaaugcuaacccuaaugccaaccccaaugcgaacccgaacgcuaauccuaacgccaaucccaacgccaaucccaacgcuaauccuaacgccaauccgaacgcuaaucccaacgccaauccuaacgcgaaucccaacgccaauccuaacgcuaaccccaaugccaacccuaaugcuaaccccaaugccaacccgaauaagaacaaucaggggaacggacaaggccauaauaugccuaacgaucccaaucggaacgucgacgaaaaugcgaacgccaacagcgcugugaaaaauaacaauaacgaggaaccuuccgauaagcacaucaaagaguaucugaauaagauucagaacucucuuagcacggaguggucccccuguagcguuaccugcggcaaugggauccaggugcgcauuaagccgggaucugccaacaaaccuaaggacgaacuggacuacgcuaaugauaucgagaaaaagauuuguaaaauggaaaagugcuccagcgucuuuaacgugguuaauucuuccaucggccucaucauggugcugagcuuccuguuucucaacugaggacuagucccuguucccagagcccacuuuuuuuucuuuuuuugaaauaaaauagccugucuuucagaucucaaaggcucuuuucagagccaccaaaaaaaaaaaaaaaaaaaaaaaaaaaaaaaaaaaaaaaaaaaaaaaaaaaaaaaaaaaaaaaaaaaaaaaaaaaaaaaaaaaaaaaaaaaaaaaaaaaaagaauu

SEQ ID NO: 7685 - RNA, 1565 nt, Artificial Sequence
  mRNA Design a-3 (hSL-A100-N5) comprising derived and/or modified sequence from Pf(3D7)__XP_001351122.1__HsSPARC_Pf-CSP(19-397) (opt5)
aggagagggcgcuuggcuugcaaggacccugagcugcggcauugaagcacacccaacccaacucgacugaagucagccucacugaaccggaucugagaaucuucucucucugggcuugccagggcucuccgaaccuagcuagcauccucuucaauuccaacuagaaagcuuaccaugagagccuggaucuucuuucugcucugccuggcuggccgggcccuugcgcuguuccaggaguaccaauguuaugggagcuccucuaacacccgcgugcucaaugaacugaacuacgacaaugcuggaacaaaccuuuauaaugagcuggaaaugaacuacuauggcaagcaggagaauugguacagccucaaaaagaacuccagaucucugggggaaaaugaugacggaaacaaugaggauaacgagaaacugcggaagcccaaacacaagaagcucaaacagccugccgacggcaauccggaucccaacgccaauccuaacgucgaccccaacgcuaauccuaacguugaucccaaugccaacccuaauguggacccgaacgcuaaucccaacgccaauccuaacgcgaaucccaacgccaauccuaacgcuaaucccaacgccaacccgaaugcuaacccuaaugccaaccccaaugcgaacccuaaugccaaccccaaugcuaaccccaaugccaacccuaaugcuaacccgaaugccaaccccaacgccaauccuaacgcuaaucccaacgcgaauccuaacguggaucccaaugccaacccgaaugcuaacccuaaugccaaccccaaugccaacccuaaugcuaaccccaacgccaauccuaacgcgaaucccaacgcuaauccgaacgccaauccuaacgccaaucccaacgcuaaucccaacgccaauccuaacgcuaauccgaacgccaaucccaacgcgaacccuaaugccaaccccaaugcuaacccuaaugccaaccccaauaagaacaaucaggggaacggacaaggccauaauaugccuaacgaccccaaucgcaacgucgaugaaaaugcuaacgccaacagcgcggugaaaaauaacaauaacgaggaaccguccgacaagcacauuaaagaguaucugaauaagauccagaacucucuuagcacggagugguccccuugcagcguuaccuguggcaaugggauucaggugagaaucaagcccggaucugccaacaaaccuaaggaugaacuggacuacgcuaaugacauugagaaaaagaucugcaaaauggaaaaguguuccagcgucuuuaacgugguuaauucuuccaucggccucauuauggugcugagcuuccuuuuucugaacugaggacuagucccuguucccagagcccacuuuuuuuucuuuuuuugaaauaaaauagccugucuuucagaucucaaaggcucuuuucagagccaccaaaaaaaaaaaaaaaaaaaaaaaaaaaaaaaaaaaaaaaaaaaaaaaaaaaaaaaaaaaaaaaaaaaaaaaaaaaaaaaaaaaaaaaaaaaaaaaaaaaaagaauu

SEQ ID NO: 7686 - RNA, 1568 nt, Artificial Sequence
  mRNA Design a-3 (hSL-A100-N5) comprising derived and/or modified sequence from Pf(3D7)__XP_001351122.1__IgE_Pf-CSP(19-397) (opt5)
aggagagggcgcuuggcuugcaaggacccugagcugcggcauugaagcacacccaacccaacucgacugaagucagccucacugaaccggaucugagaaucuucucucucugggcuugccagggcucuccgaaccuagcuagcauccucuucaauuccaacuagaaagcuuaccauggacuggaccuggauccuguuccucguggccgcugccacaagaguccacagccuguuucaggaguaccaaugcuauggcuccucuagcaacacgcggguucuuaaugaacugaacuacgauaaugcggggaccaaccucuauaaugagcuggaaaugaacuacuauggaaagcaggagaauugguacucccuuaaaaagaacucucgcagccugggcgaaaaugacgaugggaacaaugaggacaacgagaaacucagaaagcccaaacauaagaagcugaaacagccugcugauggaaauccggaccccaacgccaauccuaacguggaucccaacgccaauccuaacguggaccccaaugcuaacccuaaugucgauccgaacgccaaucccaacgcuaauccuaacgccaaucccaacgcgaauccuaacgccaaucccaacgcuaacccgaaugccaacccuaaugcuaaccccaaugccaacccuaaugcgaaccccaaugccaaccccaaugcuaacccuaaugccaacccgaaugcuaaccccaacgccaauccuaacgccaaucccaacgcuaauccuaacguggaccccaaugcgaacccgaaugccaacccuaaugcuaaccccaaugccaacccuaaugccaaccccaacgcuaauccuaacgccaaucccaacgcgaauccgaacgcuaauccuaacgccaaucccaacgccaaucccaacgcuaauccuaacgccaauccgaacgcuaaucccaacgccaacccuaaugcgaaccccaaugccaacccuaaugcuaaccccaauaagaacaaucagggcaacgggcaaggacacaauaugccuaacgaucccaaucggaacguugacgaaaaugccaacgcuaacuccgccgugaaaaauaacaauaacgaggaaccgucugauaagcauauuaaagaguaucugaauaagauccagaacagccucuccacagaguggagcccuuguucugugaccugcggcaauggcauucagguccgcaucaagcccggguccgcgaacaaaccuaaggacgaacuggacuacgccaaugauauugagaaaaagaucuguaaaauggaaaagugcagcucuguuuucaacguggucaauuccagcaucggacuuauuauggugcugucuuuucucuuccugaacugaggacuagucccuguucccagagcccacuuuuuuuucuuuuuuugaaauaaaauagccugucuuucagaucucaaaggcucuuuucagagccaccaaaaaaaaaaaaaaaaaaaaaaaaaaaaaaaaaaaaaaaaaaaaaaaaaaaaaaaaaaaaaaaaaaaaaaaaaaaaaaaaaaaaaaaaaaaaaaaaaaaaagaauu

SEQ ID NO: 7687 - RNA, 1733 nt, Artificial Sequence
  mRNA Design a-3 (hSL-A100-N5) comprising derived and/or modified sequence from Pf(3D7)__XP_001351122.1__Pf-CSP_L(G4SG4)_TM domain HA (opt5)
aggagagggcgcuuggcuugcaaggacccugagcugcggcauugaagcacacccaacccaacucgacugaagucagccucacugaaccggaucugagaaucuucucucucugggcuugccagggcucuccgaaccuagcuagcauccucuucaauuccaacuagaaagcuuaccaugaugagaaagcuggccauccucagcguguccucuuuccuguuugucgaggcucuuuuccaggaauaccaaugcuauggcagcuccucuaacacccggguucugaaugagcucaacuacgacaaugccgggacaaaccuguauaaugaacuugagaugaacuacuauggaaaacaggaaaauugguacagccugaagaaaaacucccgcucucucggcgagaaugaugacgggaacaaugaggauaacgaaaagcugagaaaacccaagcacaagaaacugaagcagccugcggacggaaauccggaucccaacgcuaauccuaacguggaccccaacgccaauccuaacguggaucccaaugccaacccuaaugucgacccgaacgcuaaucccaacgccaauccuaacgcuaaucccaacgccaauccuaacgcgaaucccaacgccaacccgaaugcuaacccuaaugccaaccccaaugcuaacccuaaugccaaccccaaugcgaaccccaaugccaacccuaaugcuaacccgaaugccaaccccaacgcuaauccuaacgccaaucccaacgccaauccuaacguggaucccaaugcuaacccgaaugcgaacccuaaugccaaccccaaugcuaacccuaaugccaaccccaacgccaauccuaacgcuaaucccaacgccaauccgaacgcgaauccuaacgcuaaucccaacgccaaucccaacgccaauccuaacgcuaauccgaacgccaaucccaacgcuaacccuaaugccaaccccaaugcgaacccuaaugccaaccccaauaaaaacaaucagggcaacgggcaaggacauaauaugccuaacgaccccaaucggaacguugaugagaaugcuaacgccaacagcgcugugaagaauaacaauaacgaggaaccguccgacaaacacauuaaggaguaucucaauaagauccagaacagccugucuacggaaugguccccuuguagcgugaccugcggcaauggcauucagguccgcaucaaacccgggucugccaacaagccuaaagaugagcuugacuacgcgaaugacauugaaaagaaaaucuguaagauggagaaaugcuccagcguuuuuaacguggucaauucuuccaucggacugauuauggugcucagcuuccuguuucuuaacggcgggggaggcuccgggggaggcggcaagcuggaaucuacaagaaucuaccagauucucgccaucuauagcaccguggcuuccagccugguccugguugugucucucggggccauuuccuucuggauguguagcaauggaucucugcaaugccggaucuguauuugaggacuagucccuguucccagagcccacuuuuuuuucuuuuuuugaaauaaaauagccugucuuucagaucucaaaggcucuuuucagagccaccaaaaaaaaaaaaaaaaaaaaaaaaaaaaaaaaaaaaaaaaaaaaaaaaaaaaaaaaaaaaaaaaaaaaaaaaaaaaaaaaaaaaaaaaaaaaaaaaaaaaagaauu

SEQ ID NO: 7688 - RNA, 1607 nt, Artificial Sequence
  mRNA Design a-3 (hSL-A100-N5) comprising derived and/or modified sequence from Pf(3D7)__XP_001351122.1__Pf-CSP(199-377)_L(PVTN)_HBsAg (opt5)
aggagagggcgcuuggcuugcaaggacccugagcugcggcauugaagcacacccaacccaacucgacugaagucagccucacugaaccggaucugagaaucuucucucucugggcuugccagggcucuccgaaccuagcuagcauccucuucaauuccaacuagaaagcuuaccauggaccccaacgccaauccuaacgcuaauccgaacgccaaucccaacgcgaauccuaacgcuaaucccaacgccaauccuaacgccaaucccaacgcuaauccuaacgccaacccgaaugcuaaccccaaugccaacccuaaugcgaaccccaaugccaacccuaaugcuaaccccaaugccaacccgaaugcuaacccuaaugccaaccccaacgcgaauccuaacaagaauaaccagggcaaugggcaaggacacaacaugcccaaugaucccaacagaaauguggacgagaacgccaaugcuaacagcgccgucaaaaauaacaauaacgaggaaccuuccgauaagcauaucaaagaauaccugaacaagauucaaaauucucucagcaccgagugguccccgugcucuguuacauguggcaacgggauccaggugcggauuaaacccggaagcgcuaauaagccuaaggacgaacuggauuaugccaacgacaucgagaaaaagauuugcaaaauggagaaguguuccucugugcccgucacgaauauggaaaacaucaccagcggcuuccuugggccucugcucgugcugcaggccggauuuuuccuucugacacgcauccucaccauuccccagucccuggauagcugguggacaucucugaauuuucucggcggcuccccgguuugccuggggcagaacagccagucuccuaccuccaaucacagccccacaucuuguccucccaucugcccuggauacagauggaugugucuucggcgcuucauuaucuuucuguucauucuccugcuuugccugaucuuucuccuggugcugcucgacuaucagggcaugcugcccgucuguccgcuuauuccuggguccaccacgaccaacacaggacccugcaaaaccuguacaacccccgcucaaggcaauagcauguucccuuccugcugcuguacgaagccgacagaugggaacugcaccuguauccccaucccuucuagcugggcguuugccaaguaccugugggagugggcuuccgugagauucagcuggcucucucugcuuguucccuuugugcagugguucgucggacuguccccuacaguguggcucagcgccauuuggaugaugugguauuggggccccucucuguacagcaucguguccccuuuuauuccccugcucccgaucuucuucugccugugggucuauauuugaggacuagucccuguucccagagcccacuuuuuuuucuuuuuuugaaauaaaauagccugucuuucagaucucaaaggcucuuuucagagccaccaaaaaaaaaaaaaaaaaaaaaaaaaaaaaaaaaaaaaaaaaaaaaaaaaaaaaaaaaaaaaaaaaaaaaaaaaaaaaaaaaaaaaaaaaaaaaaaaaaaaagaauu

SEQ ID NO: 7689 - RNA, 1649 nt, Artificial Sequence
  mRNA Design a-3 (hSL-A100-N5) comprising derived and/or modified sequence from Pf(3D7)__XP_001351122.1__Pf-CSP(199-387)_L(PVTN)_HBsAg (opt5)
aggagagggcgcuuggcuugcaaggacccugagcugcggcauugaagcacacccaacccaacucgacugaagucagccucacugaaccggaucugagaaucuucucucucugggcuugccagggcucuccgaaccuagcuagcauccucuucaauuccaacuagaaagcuuaccaugauggcccccgacccuaacgcuaauccgaacgccaaucccaacgcgaauccuaacgcuaaucccaacgccaauccuaacgccaaucccaacgcuaauccuaacgccaauccgaacgcuaaccccaaugccaacccuaaugcgaaccccaaugccaacccuaaugcuaaccccaaugccaacccgaaugcuaacccuaaugccaaccccaaugcgaacccuaacgccaaucccaacaagaauaaccagggcaaugggcaaggacacaacaugcccaaugauccuaacagaaauguggacgagaacgcuaaugccaacagcgcugucaaaaauaacaauaacgaggaaccguccgauaagcauaucaaagaauaccugaacaagauucaaaauucucucagcaccgaguggucccccugcucuguuacauguggcaacgggauccaggugcggauuaaaccuggaagcgccaauaagcccaaggacgaacuggauuaugccaacgacaucgagaaaaagauuugcaaaauggagaaguguuccucuguguucaaugucgugaacagcuccaucggccuugggccuguuacgaauauggaaaacaucaccagcggauuucugggcccccuccuggugcuucaggcuggcuucuuucugcucacacgcauucugaccaucccgcagucucuggauuccugguggacaagccucaauuuccuugggggaucuccugucugccugggccagaacucccagagccccaccucuaaucacuccccuacaagcugucccccuauuugccccggguacagauggaugugucugcggcgcuuuaucauuuuccucuuuauccugcuucugugccucauuuuccugcuggugcuccuggacuaucagggaaugcuuccgguuuguccucugauccccggcuccaccacgaccaacacagggcccugcaaaaccuguacaaccccugcgcaaggaaauucuauguuuccgagcugcugcuguacgaagcccacagauggcaacugcaccuguaucccuauucccuccagcugggccuucgcuaaguaccucugggagugggccucugugagauuuuccuggcugagccuucuggucccuuucgugcagugguuugugggccucucucccacagucuggcugagcgccaucuggaugaugugguauugggggccuucccuguacucuauuguuagccccuucaucccgcuccugccuauuuucuuuugccuuuggguguauaucugaggacuagucccuguucccagagcccacuuuuuuuucuuuuuuugaaauaaaauagccugucuuucagaucucaaaggcucuuuucagagccaccaaaaaaaaaaaaaaaaaaaaaaaaaaaaaaaaaaaaaaaaaaaaaaaaaaaaaaaaaaaaaaaaaaaaaaaaaaaaaaaaaaaaaaaaaaaaaaaaaaaaagaauu

SEQ ID NO: 7690 - RNA, 833 nt, Artificial Sequence
  mRNA Design a-3 (hSL-A100-N5) comprising derived and/or modified sequence from Pf(3D7)__XP_001351122.1__HsALB_Pf-CSP(19-152) (opt5)
aggagagggcgcuuggcuugcaaggacccugagcugcggcauugaagcacacccaacccaacucgacugaagucagccucacugaaccggaucugagaaucuucucucucugggcuugccagggcucuccgaaccuagcuagcauccucuucaauuccaacuagaaagcuuaccaugaagugggugaccuucaucagccugcucuuucuguucuccucugccuacagccuuuuucaggaguaucaaugcuacggcuccucuagcaacacaagaguccugaaugaacucaacuaugacaaugcugggacgaaccuguacaaugagcuugaaaugaacuauuacggaaaacaggagaauugguauucccugaagaaaaacucucggagccucggcgaaaaugaugacgggaacaaugaggauaacgagaagcugcgcaaacccaagcacaagaaacugaagcagccugccgacggaaauccggaucccaacgcgaauccuaacguugaccccaacgcuaauccuaacguggaucccaaugccaacccuaauguggacccgaacgccaaucccaacgcuaauccuaacgccaaucccaacgcuaauccuaacgccaaucccaacgcgaacccgugaggacuagucccuguucccagagcccacuuuuuuuucuuuuuuugaaauaaaauagccugucuuucagaucucaaaggcucuuuucagagccaccaaaaaaaaaaaaaaaaaaaaaaaaaaaaaaaaaaaaaaaaaaaaaaaaaaaaaaaaaaaaaaaaaaaaaaaaaaaaaaaaaaaaaaaaaaaaaaaaaaaaagaauu

SEQ ID NO: 7691 - RNA, 953 nt, Artificial Sequence
  mRNA Design a-3 (hSL-A100-N5) comprising derived and/or modified sequence from Pf(3D7)__XP_001351122.1__HsALB_Pf-CSP(19-192) (opt5)
aggagagggcgcuuggcuugcaaggacccugagcugcggcauugaagcacacccaacccaacucgacugaagucagccucacugaaccggaucugagaaucuucucucucugggcuugccagggcucuccgaaccuagcuagcauccucuucaauuccaacuagaaagcuuaccaugaagugggugaccuucaucagccugcucuuucuguucuccucugccuacagccuuuuucaggaguaucaaugcuacggcuccucuagcaacacaagaguccugaaugaacucaacuaugacaaugcugggacgaaccuguacaaugagcuugaaaugaacuauuacggaaaacaggagaauugguauucccugaagaaaaacucucggagccucggcgaaaaugaugacgggaacaaugaggauaacgagaagcugcgcaaacccaagcacaagaaacugaagcagccugccgacggaaauccggaucccaacgcgaauccuaacguugaccccaacgcuaauccuaacguggaucccaaugccaacccuaauguggacccgaacgccaaucccaacgcuaauccuaacgccaaucccaacgcuaauccuaacgccaaucccaacgcgaacccgaaugccaacccuaaugcuaaccccaaugccaacccuaaugcuaaccccaaugccaaccccaaugcgaacccuaaugccaacccgaaugcuaaccccaacgccaauccuaacgcuaaucccugaggacuagucccuguucccagagcccacuuuuuuuucuuuuuuugaaauaaaauagccugucuuucagaucucaaaggcucuuuucagagccaccaaaaaaaaaaaaaaaaaaaaaaaaaaaaaaaaaaaaaaaaaaaaaaaaaaaaaaaaaaaaaaaaaaaaaaaaaaaaaaaaaaaaaaaaaaaaaaaaaaaaagaauu

SEQ ID NO: 7692 - RNA, 1193 nt, Artificial Sequence
  mRNA Design a-3 (hSL-A100-N5) comprising derived and/or modified sequence from Pf(3D7)__XP_001351122.1__HsALB_Pf-CSP(19-272) (opt5)
aggagagggcgcuuggcuugcaaggacccugagcugcggcauugaagcacacccaacccaacucgacugaagucagccucacugaaccggaucugagaaucuucucucucugggcuugccagggcucuccgaaccuagcuagcauccucuucaauuccaacuagaaagcuuaccaugaagugggugaccuucaucagccugcucuuucuguucuccucugccuacagccuuuuucaggaguaucaaugcuacggcuccucuagcaacacaagaguccugaaugaacucaacuaugacaaugcugggacgaaccuguacaaugagcuugaaaugaacuauuacggaaaacaggagaauugguauucccugaagaaaaacucucggagccucggcgaaaaugaugacgggaacaaugaggauaacgagaagcugcgcaaacccaagcacaagaaacugaagcagccugccgacggaaauccggaucccaacgcgaauccuaacguugaccccaacgcuaauccuaacguggaucccaaugccaacccuaauguggacccgaacgccaaucccaacgcuaauccuaacgccaaucccaacgcuaauccuaacgccaaucccaacgcgaacccgaaugccaacccuaaugcuaaccccaaugccaacccuaaugcuaaccccaaugccaaccccaaugcgaacccuaaugccaacccgaaugcuaaccccaacgccaauccuaacgcuaaucccaacgccaauccuaacgucgaucccaaugccaacccgaaugcuaacccuaaugcgaaccccaaugccaacccuaaugcuaaccccaacgccaauccuaacgccaaucccaacgcuaauccgaacgccaauccuaacgcgaaucccaacgcuaaucccaacgccaauccuaacgccaauccgaacgcuaaucccaacgccaacccuaaugcuaaccccaaugccaacccuaaugcgaaccccugaggacuagucccuguucccagagcccacuuuuuuuucuuuuuuugaaauaaaauagccugucuuucagaucucaaaggcucuuuucagagccaccaaaaaaaaaaaaaaaaaaaaaaaaaaaaaaaaaaaaaaaaaaaaaaaaaaaaaaaaaaaaaaaaaaaaaaaaaaaaaaaaaaaaaaaaaaaaaaaaaaaaagaauu

SEQ ID NO: 7693 - RNA, 1355 nt, Artificial Sequence
  mRNA Design a-3 (hSL-A100-N5) comprising derived and/or modified sequence from Pf(3D7)__XP_001351122.1__HsALB_Pf-CSP(19-272)_L(AAY)_Pf-CSP(310-3 27)_L(AAY)_Pf-CSP(346-375) (opt5)
aggagagggcgcuuggcuugcaaggacccugagcugcggcauugaagcacacccaacccaacucgacugaagucagccucacugaaccggaucugagaaucuucucucucugggcuugccagggcucuccgaaccuagcuagcauccucuucaauuccaacuagaaagcuuaccaugaagugggugaccuucaucagccugcucuuucuguucuccucugccuacagccuuuuucaggaguaucaaugcuacggcuccucuagcaacacaagaguccugaaugaacucaacuaugacaaugcugggacgaaccuguacaaugagcuugaaaugaacuauuacggaaaacaggagaauugguauucccugaagaaaaacucucggagccucggcgaaaaugaugacgggaacaaugaggauaacgagaagcugcgcaaacccaagcacaagaaacugaagcagccugccgacggaaauccggaucccaacgcgaauccuaacguugaccccaacgcuaauccuaacguggaucccaaugccaacccuaauguggacccgaacgccaaucccaacgcuaauccuaacgccaaucccaacgcuaauccuaacgccaaucccaacgcgaacccgaaugccaacccuaaugcuaaccccaaugccaacccuaaugcuaaccccaaugccaaccccaaugcgaacccuaaugccaacccgaaugcuaaccccaacgccaauccuaacgcuaaucccaacgccaauccuaacgucgaucccaaugccaacccgaaugcuaacccuaaugcgaaccccaaugccaacccuaaugcuaaccccaacgccaauccuaacgccaaucccaacgcuaauccgaacgccaauccuaacgcgaaucccaacgcuaaucccaacgccaauccuaacgccaauccgaacgcuaaucccaacgccaacccuaaugcuaaccccaaugccaacccuaaugcgaaccccgccgcuuacgaaccuuccgacaaacauauuaaggaguaccucaauaaaauccagaacagccuggccgcuuauauuaagcccggcucugccaauaagccgaaagaugaacuugacuacgcgaacgauaucgagaagaaaauuuguaagauggagaaaugcuccugaggacuagucccuguucccagagcccacuuuuuuuucuuuuuuugaaauaaaauagccugucuuucagaucucaaaggcucuuuucagagccaccaaaaaaaaaaaaaaaaaaaaaaaaaaaaaaaaaaaaaaaaaaaaaaaaaaaaaaaaaaaaaaaaaaaaaaaaaaaaaaaaaaaaaaaaaaaaaaaaaaaaagaauu

SEQ ID NO: 7694 - RNA, 1316 nt, Artificial Sequence
  mRNA Design a-3 (hSL-A100-N5) comprising derived and/or modified sequence from Pf(3D7)__XP_001351122.1__HsALB_Pf-CSP(19-272)_L(AAY)_Pf-CSP(346-3 65)_L(AAY)_P2 (opt5)
aggagagggcgcuuggcuugcaaggacccugagcugcggcauugaagcacacccaacccaacucgacugaagucagccucacugaaccggaucugagaaucuucucucucugggcuugccagggcucuccgaaccuagcuagcauccucuucaauuccaacuagaaagcuuaccaugaagugggugaccuucaucagccugcucuuucuguucuccucugccuacagccuuuuucaggaguaucaaugcuacggcuccucuagcaacacaagaguccugaaugaacucaacuaugacaaugcugggacgaaccuguacaaugagcuugaaaugaacuauuacggaaaacaggagaauugguauucccugaagaaaaacucucggagccucggcgaaaaugaugacgggaacaaugaggauaacgagaagcugcgcaaacccaagcacaagaaacugaagcagccugccgacggaaauccggaucccaacgcgaauccuaacguugaccccaacgcuaauccuaacguggaucccaaugccaacccuaauguggacccgaacgccaaucccaacgcuaauccuaacgccaaucccaacgcuaauccuaacgccaaucccaacgcgaacccgaaugccaacccuaaugcuaaccccaaugccaacccuaaugcuaaccccaaugccaaccccaaugcgaacccuaaugccaacccgaaugcuaaccccaacgccaauccuaacgcuaaucccaacgccaauccuaacgucgaucccaaugccaacccgaaugcuaacccuaaugcgaaccccaaugccaacccuaaugcuaaccccaacgccaauccuaacgccaaucccaacgcuaauccgaacgccaauccuaacgcgaaucccaacgcuaaucccaacgccaauccuaacgccaauccgaacgcuaaucccaacgccaacccuaaugcuaaccccaaugccaacccuaaugcgaaccccgccgcuuacauuaaaccuggcuccgccaauaagcccaaagacgaacucgauuacgcuaacgacaucgaggccgcguaucaguacauuaaggccaauagcaaguucaucgggauuaccgaacugugaggacuagucccuguucccagagcccacuuuuuuuucuuuuuuugaaauaaaauagccugucuuucagaucucaaaggcucuuuucagagccaccaaaaaaaaaaaaaaaaaaaaaaaaaaaaaaaaaaaaaaaaaaaaaaaaaaaaaaaaaaaaaaaaaaaaaaaaaaaaaaaaaaaaaaaaaaaaaaaaaaaaagaauu

SEQ ID NO: 7695 - RNA, 1310 nt, Artificial Sequence
  mRNA Design a-3 (hSL-A100-N5) comprising derived and/or modified sequence from Pf(3D7)__XP_001351122.1__HsALB_Pf-CSP(19-272)_L(AAY)_Pf-CSP(346-3 65)_L(AAY)_PADRE (opt5)
aggagagggcgcuuggcuugcaaggacccugagcugcggcauugaagcacacccaacccaacucgacugaagucagccucacugaaccggaucugagaaucuucucucucugggcuugccagggcucuccgaaccuagcuagcauccucuucaauuccaacuagaaagcuuaccaugaagugggugaccuucaucagccugcucuuucuguucuccucugccuacagccuuuuucaggaguaucaaugcuacggcuccucuagcaacacaagaguccugaaugaacucaacuaugacaaugcugggacgaaccuguacaaugagcuugaaaugaacuauuacggaaaacaggagaauugguauucccugaagaaaaacucucggagccucggcgaaaaugaugacgggaacaaugaggauaacgagaagcugcgcaaacccaagcacaagaaacugaagcagccugccgacggaaauccggaucccaacgcgaauccuaacguugaccccaacgcuaauccuaacguggaucccaaugccaacccuaauguggacccgaacgccaaucccaacgcuaauccuaacgccaaucccaacgcuaauccuaacgccaaucccaacgcgaacccgaaugccaacccuaaugcuaaccccaaugccaacccuaaugcuaaccccaaugccaaccccaaugcgaacccuaaugccaacccgaaugcuaaccccaacgccaauccuaacgcuaaucccaacgccaauccuaacgucgaucccaaugccaacccgaaugcuaacccuaaugcgaaccccaaugccaacccuaaugcuaaccccaacgccaauccuaacgccaaucccaacgcuaauccgaacgccaauccuaacgcgaaucccaacgcuaaucccaacgccaauccuaacgccaauccgaacgcuaaucccaacgccaacccuaaugcuaaccccaaugccaacccuaaugcgaaccccgccgcuuacauuaaaccuggcuccgccaauaagcccaaagacgaacucgauuacgcuaacgacaucgaggccgcguaugccaaguucguggcugccuggacccugaaggcugccgccugaggacuagucccuguucccagagcccacuuuuuuuucuuuuuuugaaauaaaauagccugucuuucagaucucaaaggcucuuuucagagccaccaaaaaaaaaaaaaaaaaaaaaaaaaaaaaaaaaaaaaaaaaaaaaaaaaaaaaaaaaaaaaaaaaaaaaaaaaaaaaaaaaaaaaaaaaaaaaaaaaaaaagaauu

SEQ ID NO: 7696 - RNA, 1367 nt, Artificial Sequence
  mRNA Design a-3 (hSL-A100-N5) comprising derived and/or modified sequence from Pf(3D7)__XP_001351122.1__HsALB_Pf-CSP(19-272)_L(G4S)_Pf-CSP(310-3 27)_L(G4S)_Pf-CSP(346-375) (opt5)
aggagagggcgcuuggcuugcaaggacccugagcugcggcauugaagcacacccaacccaacucgacugaagucagccucacugaaccggaucugagaaucuucucucucugggcuugccagggcucuccgaaccuagcuagcauccucuucaauuccaacuagaaagcuuaccaugaagugggugaccuucaucagccugcucuuucuguucuccucugccuacagccuuuuucaggaguaucaaugcuacggcuccucuagcaacacaagaguccugaaugaacucaacuaugacaaugcugggacgaaccuguacaaugagcuugaaaugaacuauuacggaaaacaggagaauugguauucccugaagaaaaacucucggagccucggcgaaaaugaugacgggaacaaugaggauaacgagaagcugcgcaaacccaagcacaagaaacugaagcagccugccgacggaaauccggaucccaacgcgaauccuaacguugaccccaacgcuaauccuaacguggaucccaaugccaacccuaauguggacccgaacgccaaucccaacgcuaauccuaacgccaaucccaacgcuaauccuaacgccaaucccaacgcgaacccgaaugccaacccuaaugcuaaccccaaugccaacccuaaugcuaaccccaaugccaaccccaaugcgaacccuaaugccaacccgaaugcuaaccccaacgccaauccuaacgcuaaucccaacgccaauccuaacgucgaucccaaugccaacccgaaugcuaacccuaaugcgaaccccaaugccaacccuaaugcuaaccccaacgccaauccuaacgccaaucccaacgcuaauccgaacgccaauccuaacgcgaaucccaacgcuaaucccaacgccaauccuaacgccaauccgaacgcuaaucccaacgccaacccuaaugcuaaccccaaugccaacccuaaugcgaaccccggcgggggaggcuccgaaccuagcgacaaacauauuaaggaguaccucaauaaaauccagaacucucugggcgggggaggcuccauuaagcccgggagcgccaauaagccgaaagaugaacuugacuacgcuaacgauaucgagaagaaaauuuguaagauggagaaaugcucuugaggacuagucccuguucccagagcccacuuuuuuuucuuuuuuugaaauaaaauagccugucuuucagaucucaaaggcucuuuucagagccaccaaaaaaaaaaaaaaaaaaaaaaaaaaaaaaaaaaaaaaaaaaaaaaaaaaaaaaaaaaaaaaaaaaaaaaaaaaaaaaaaaaaaaaaaaaaaaaaaaaaaagaauu

SEQ ID NO: 7697 - RNA, 1352 nt, Artificial Sequence
  mRNA Design a-3 (hSL-A100-N5) comprising derived and/or modified sequence from Pf(3D7)__XP_001351122.1__HsALB_Pf-CSP(19-272)_L(G4S)_Pf-CSP(310-3 27)_Pf-CSP(346-375) (opt5)
aggagagggcgcuuggcuugcaaggacccugagcugcggcauugaagcacacccaacccaacucgacugaagucagccucacugaaccggaucugagaaucuucucucucugggcuugccagggcucuccgaaccuagcuagcauccucuucaauuccaacuagaaagcuuaccaugaagugggugaccuucaucagccugcucuuucuguucuccucugccuacagccuuuuucaggaguaucaaugcuacggcuccucuagcaacacaagaguccugaaugaacucaacuaugacaaugcugggacgaaccuguacaaugagcuugaaaugaacuauuacggaaaacaggagaauugguauucccugaagaaaaacucucggagccucggcgaaaaugaugacgggaacaaugaggauaacgagaagcugcgcaaacccaagcacaagaaacugaagcagccugccgacggaaauccggaucccaacgcgaauccuaacguugaccccaacgcuaauccuaacguggaucccaaugccaacccuaauguggacccgaacgccaaucccaacgcuaauccuaacgccaaucccaacgcuaauccuaacgccaaucccaacgcgaacccgaaugccaacccuaaugcuaaccccaaugccaacccuaaugcuaaccccaaugccaaccccaaugcgaacccuaaugccaacccgaaugcuaaccccaacgccaauccuaacgcuaaucccaacgccaauccuaacgucgaucccaaugccaacccgaaugcuaacccuaaugcgaaccccaaugccaacccuaaugcuaaccccaacgccaauccuaacgccaaucccaacgcuaauccgaacgccaauccuaacgcgaaucccaacgcuaaucccaacgccaauccuaacgccaauccgaacgcuaaucccaacgccaacccuaaugcuaaccccaaugccaacccuaaugcgaaccccggcgggggaggcuccgaaccuagcgacaaacauauuaaggaguaccucaauaaaauccagaacucucugauuaagcccggcuccgccaauaagccgaaagaugaacuugacuacgcuaacgauaucgagaagaaaauuuguaagauggagaaaugcagcugaggacuagucccuguucccagagcccacuuuuuuuucuuuuuuugaaauaaaauagccugucuuucagaucucaaaggcucuuuucagagccaccaaaaaaaaaaaaaaaaaaaaaaaaaaaaaaaaaaaaaaaaaaaaaaaaaaaaaaaaaaaaaaaaaaaaaaaaaaaaaaaaaaaaaaaaaaaaaaaaaaaaagaauu

SEQ ID NO: 7698 - RNA, 1352 nt, Artificial Sequence
  mRNA Design a-3 (hSL-A100-N5) comprising derived and/or modified sequence from Pf(3D7)__XP_001351122.1__HsALB_Pf-CSP(19-325) (opt5)
aggagagggcgcuuggcuugcaaggacccugagcugcggcauugaagcacacccaacccaacucgacugaagucagccucacugaaccggaucugagaaucuucucucucugggcuugccagggcucuccgaaccuagcuagcauccucuucaauuccaacuagaaagcuuaccaugaagugggugaccuucaucagccugcucuuucuguucuccucugccuacagccuuuuucaggaguaucaaugcuacggcuccucuagcaacacaagaguccugaaugaacucaacuaugacaaugcugggacgaaccuguacaaugagcuugaaaugaacuauuacggaaaacaggagaauugguauucccugaagaaaaacucucggagccucggcgaaaaugaugacgggaacaaugaggauaacgagaagcugcgcaaacccaagcacaagaaacugaagcagccugccgacggaaauccggaucccaacgcgaauccuaacguugaccccaacgcuaauccuaacguggaucccaaugccaacccuaauguggacccgaacgccaaucccaacgcuaauccuaacgccaaucccaacgcuaauccuaacgccaaucccaacgcgaacccgaaugccaacccuaaugcuaaccccaaugccaacccuaaugcuaaccccaaugccaaccccaaugcgaacccuaaugccaacccgaaugcuaaccccaacgccaauccuaacgcuaaucccaacgccaauccuaacgucgaucccaaugccaacccgaaugcuaacccuaaugcgaaccccaaugccaacccuaaugcuaaccccaacgccaauccuaacgccaaucccaacgcuaauccgaacgccaauccuaacgcgaaucccaacgcuaaucccaacgccaauccuaacgccaauccgaacgcuaaucccaacgccaacccuaaugcuaaccccaaugccaacccuaaugcgaaccccaauaaaaacaaucagggcaacgggcaaggacauaauaugccuaacgaccccaauagaaacguggaugaaaaugccaacgcuaacuccgccguuaagaauaacaauaacgaggaaccgagcgacaaacacauuaaggaguaccucaauaagauccagaacugaggacuagucccuguucccagagcccacuuuuuuuucuuuuuuugaaauaaaauagccugucuuucagaucucaaaggcucuuuucagagccaccaaaaaaaaaaaaaaaaaaaaaaaaaaaaaaaaaaaaaaaaaaaaaaaaaaaaaaaaaaaaaaaaaaaaaaaaaaaaaaaaaaaaaaaaaaaaaaaaaaaaagaauu

SEQ ID NO: 7699 - RNA, 1529 nt, Artificial Sequence
  mRNA Design a-3 (hSL-A100-N5) comprising derived and/or modified sequence from Pf(3D7)__XP_001351122.1__HsALB_Pf-CSP(19-384) (opt5)
aggagagggcgcuuggcuugcaaggacccugagcugcggcauugaagcacacccaacccaacucgacugaagucagccucacugaaccggaucugagaaucuucucucucugggcuugccagggcucuccgaaccuagcuagcauccucuucaauuccaacuagaaagcuuaccaugaagugggugaccuucaucagccugcucuuucuguucuccucugccuacagccuuuuucaggaguaucaaugcuacggcuccucuagcaacacaagagugcugaaugaacucaacuaugacaaugcugggacgaaccuguacaaugagcuugaaaugaacuauuacggaaaacaggagaauugguauucccugaagaaaaacucucggagccucggcgaaaaugaugacgggaacaaugaggauaacgagaagcugcgcaaacccaagcacaagaaacugaagcagccugccgacggaaauccggaucccaacgcgaauccuaacguugaccccaacgcuaauccuaacguggaucccaaugccaacccuaauguggacccgaacgccaaucccaacgcuaauccuaacgccaaucccaacgcuaauccuaacgccaaucccaacgcgaacccgaaugccaacccuaaugcuaaccccaaugccaacccuaaugcuaaccccaaugccaaccccaaugcgaacccuaaugccaacccgaaugcuaaccccaacgccaauccuaacgcuaaucccaacgccaauccuaacgucgaucccaaugccaacccgaaugcuaacccuaaugcgaaccccaaugccaacccuaaugcuaaccccaacgccaauccuaacgccaaucccaacgcuaauccgaacgccaauccuaacgcgaaucccaacgcuaaucccaacgccaauccuaacgccaauccgaacgcuaaucccaacgccaacccuaaugcuaaccccaaugccaacccuaaugcgaaccccaauaaaaacaaucagggcaacgggcaaggacauaauaugccuaacgaccccaauagaaacguggaugaaaaugccaacgcuaacuccgccguuaagaauaacaauaacgaggaaccgagcgacaaacacauuaaggaguaccucaauaagauccagaacucucuguccaccgaguggagcccuuguucugugacaugcggcaauggcauucagguccggaucaaacccggguccgcuaacaagccuaaagaugaacuugacuacgccaaugacauugagaagaaaaucuguaagauggaaaaaugcagcucuguguucaacguugucaauuccagcugaggacuagucccuguucccagagcccacuuuuuuuucuuuuuuugaaauaaaauagccugucuuucagaucucaaaggcucuuuucagagccaccaaaaaaaaaaaaaaaaaaaaaaaaaaaaaaaaaaaaaaaaaaaaaaaaaaaaaaaaaaaaaaaaaaaaaaaaaaaaaaaaaaaaaaaaaaaaaaaaaaaaagaauu

SEQ ID NO: 7700 - RNA, 1667 nt, Artificial Sequence
  mRNA Design a-3 (hSL-A100-N5) comprising derived and/or modified sequence from Pf(3D7)__XP_001351122.1__HsALB_Pf-CSP(19-384)_TM domain HA (opt5)
aggagagggcgcuuggcuugcaaggacccugagcugcggcauugaagcacacccaacccaacucgacugaagucagccucacugaaccggaucugagaaucuucucucucugggcuugccagggcucuccgaaccuagcuagcauccucuucaauuccaacuagaaagcuuaccaugaagugggugaccuucaucagccugcucuuucuguucuccucugccuacagccuuuuucaggaguaucaaugcuacggcuccucuagcaacacaagaguccugaaugaacucaacuaugacaaugcugggacgaaccuguacaaugagcuugaaaugaacuauuacggaaaacaggagaauugguauucccugaagaaaaacucucggagccucggcgaaaaugaugacgggaacaaugaggauaacgagaagcugcgcaaacccaagcacaagaaacugaagcagccugccgacggaaauccggaucccaacgcgaauccuaacguugaccccaacgcuaauccuaacguggaucccaaugccaacccuaauguggacccgaacgccaaucccaacgcuaauccuaacgccaaucccaacgcuaauccuaacgccaaucccaacgcgaacccgaaugccaacccuaaugcuaaccccaaugccaacccuaaugcuaaccccaaugccaaccccaaugcgaacccuaaugccaacccgaaugcuaaccccaacgccaauccuaacgcuaaucccaacgccaauccuaacgucgaucccaaugccaacccgaaugcuaacccuaaugcgaaccccaaugccaacccuaaugcuaaccccaacgccaauccuaacgccaaucccaacgcuaauccgaacgccaauccuaacgcgaaucccaacgcuaaucccaacgccaauccuaacgccaauccgaacgcuaaucccaacgccaacccuaaugcuaaccccaaugccaacccuaaugcgaaccccaauaaaaacaaucagggcaacgggcaaggacauaauaugccuaacgaccccaauagaaacguggaugaaaaugccaacgcuaacuccgccguuaagaauaacaauaacgaggaaccgagcgacaaacacauuaaggaguaccucaauaagauccagaacucucuguccaccgaguggagcccuuguucugugacaugcggcaauggcauucagguccggaucaaacccggguccgcuaacaagccuaaagaugaacuugacuacgccaaugacauugagaagaaaaucuguaagauggaaaaaugcagcucuguguucaacguugucaauuccagcaagcuggaguccacccgcaucuaucagauucucgcgaucuacucuacaguggccagcucccuggugcuuguggucagccugggagcuauuucuuuuuggauguguuccaacggcagccuccaaugcagaaucuguauuugaggacuagucccuguucccagagcccacuuuuuuuucuuuuuuugaaauaaaauagccugucuuucagaucucaaaggcucuuuucagagccaccaaaaaaaaaaaaaaaaaaaaaaaaaaaaaaaaaaaaaaaaaaaaaaaaaaaaaaaaaaaaaaaaaaaaaaaaaaaaaaaaaaaaaaaaaaaaaaaaaaaaagaauu

SEQ ID NO: 7701 - RNA, 1379 nt, Artificial Sequence
  mRNA Design a-3 (hSL-A100-N5) comprising derived and/or modified sequence from Pf(3D7)__XP_001351122.1__HsALB_Pf-CSP(82-397) (opt5)
aggagagggcgcuuggcuugcaaggacccugagcugcggcauugaagcacacccaacccaacucgacugaagucagccucacugaaccggaucugagaaucuucucucucugggcuugccagggcucuccgaaccuagcuagcauccucuucaauuccaacuagaaagcuuaccaugaagugggugaccuucaucagccugcucuuucuguucuccucugccuacagcgacaacgagaaacuuagaaagcccaaacacaagaaacugaagcagccugcugauggcaauccggaccccaacgccaauccuaacgucgaucccaaugcgaacccuaauguugaccccaacgcuaauccuaacguggauccgaaugccaaccccaaugccaacccuaaugcuaaccccaacgccaauccuaacgcuaaucccaacgccaauccgaacgcgaauccuaacgccaaucccaacgcuaauccuaacgccaaucccaacgcuaaucccaacgccaacccuaaugcgaacccgaaugccaaccccaaugcuaacccuaaugccaaccccaaugcuaacccuaauguggaccccaacgccaauccgaacgccaauccuaacgcuaaccccaaugcgaacccuaaugccaaccccaaugcuaacccuaaugccaaccccaaugccaacccgaaugcuaacccuaaugccaaccccaaugcgaaccccaacgcuaauccuaacgccaauccgaacgccaaucccaacgcuaauccuaacgccaaucccaacgcuaauccuaacgccaaucccaacaagaauaaccaagggaauggacagggccauaacaugccuaacgaucccaaucggaacgucgacgaaaaugcgaacgccaauuccgcugugaaaaacaauaacaaugaggaaccgucugauaagcacauuaaagaguaucucaacaagauccagaauagccuguccacagaauggucuccuugcagcguuacgugugggaacggcauucaggugcgcaucaaacccggauccgccaauaagccuaaggacgagcuugauuacgcuaacgacauugagaaaaagaucugcaaaauggaaaaguguagcucugucuuuaaugugguuaacuccagcaucgggcugauuauggugcucucuuuccuguuucugaacugaggacuagucccuguucccagagcccacuuuuuuuucuuuuuuugaaauaaaauagccugucuuucagaucucaaaggcucuuuucagagccaccaaaaaaaaaaaaaaaaaaaaaaaaaaaaaaaaaaaaaaaaaaaaaaaaaaaaaaaaaaaaaaaaaaaaaaaaaaaaaaaaaaaaaaaaaaaaaaaaaaaaagaauu

SEQ ID NO: 7702 - RNA, 731 nt, Artificial Sequence
  mRNA Design a-3 (hSL-A100-N5) comprising derived and/or modified sequence from Pf(3D7)__XP_001351122.1__HsALB_Pf-CSP(93-192) (opt5)
aggagagggcgcuuggcuugcaaggacccugagcugcggcauugaagcacacccaacccaacucgacugaagucagccucacugaaccggaucugagaaucuucucucucugggcuugccagggcucuccgaaccuagcuagcauccucuucaauuccaacuagaaagcuuaccaugaagugggugaccuucaucagccugcucuuucuguucuccucugccuacagcaaacuuaagcagcccgcugacggcaacccugauccgaaugccaaccccaaugucgacccuaacgcgaaucccaacguugauccuaaugcuaaccccaauguggacccuaacgccaauccgaacgccaaucccaacgcuaauccuaacgccaaccccaaugcuaacccuaaugccaaccccaaugcgaacccgaaugccaacccuaaugcuaaccccaaugccaacccuaaugcuaaccccaaugccaaccccaacgcgaauccuaacgccaauccgaacgcuaaucccaacgccaauccuugaggacuagucccuguucccagagcccacuuuuuuuucuuuuuuugaaauaaaauagccugucuuucagaucucaaaggcucuuuucagagccaccaaaaaaaaaaaaaaaaaaaaaaaaaaaaaaaaaaaaaaaaaaaaaaaaaaaaaaaaaaaaaaaaaaaaaaaaaaaaaaaaaaaaaaaaaaaaaaaaaaaaagaauu

SEQ ID NO: 7703 - RNA, 971 nt, Artificial Sequence
  mRNA Design a-3 (hSL-A100-N5) comprising derived and/or modified sequence from Pf(3D7)__XP_001351122.1__HsALB_Pf-CSP(93-272) (opt5)
aggagagggcgcuuggcuugcaaggacccugagcugcggcauugaagcacacccaacccaacucgacugaagucagccucacugaaccggaucugagaaucuucucucucugggcuugccagggcucuccgaaccuagcuagcauccucuucaauuccaacuagaaagcuuaccaugaagugggugaccuucaucagccugcucuuucuguucuccucugccuacagcaaacuuaagcagcccgcugacggcaacccugauccgaaugccaaccccaaugucgacccuaacgcgaaucccaacguugauccuaaugcuaaccccaauguggacccuaacgccaauccgaacgccaaucccaacgcuaauccuaacgccaaccccaaugcuaacccuaaugccaaccccaaugcgaacccgaaugccaacccuaaugcuaaccccaaugccaacccuaaugcuaaccccaaugccaaccccaacgcgaauccuaacgccaauccgaacgcuaaucccaacgccaauccuaacgcuaaucccaacguggauccuaaugccaaccccaaugccaacccgaaugcuaacccuaacgcgaaucccaacgccaauccuaacgcuaaucccaacgccaauccuaacgccaaucccaacgcuaauccgaacgccaauccuaacgcgaaucccaacgcuaaccccaaugccaacccuaaugccaacccgaaugcuaaccccaaugccaacccuaaugcuaaccccaaugccaacccuugaggacuagucccuguucccagagcccacuuuuuuuucuuuuuuugaaauaaaauagccugucuuucagaucucaaaggcucuuuucagagccaccaaaaaaaaaaaaaaaaaaaaaaaaaaaaaaaaaaaaaaaaaaaaaaaaaaaaaaaaaaaaaaaaaaaaaaaaaaaaaaaaaaaaaaaaaaaaaaaaaaaaagaauu

SEQ ID NO: 7704 - RNA, 1346 nt, Artificial Sequence
  mRNA Design a-3 (hSL-A100-N5) comprising derived and/or modified sequence from Pf(3D7)__XP_001351122.1__HsALB_Pf-CSP(93-397) (opt5)
aggagagggcgcuuggcuugcaaggacccugagcugcggcauugaagcacacccaacccaacucgacugaagucagccucacugaaccggaucugagaaucuucucucucugggcuugccagggcucuccgaaccuagcuagcauccucuucaauuccaacuagaaagcuuaccaugaagugggugaccuucaucagccugcucuuucuguucuccucugccuacagcaaacuuaagcagcccgcugacggcaacccugauccgaaugccaaccccaaugucgacccuaacgcgaaucccaacguugauccuaaugcuaaccccaauguggacccuaacgccaauccgaacgccaaucccaacgcuaauccuaacgccaaccccaaugcuaacccuaaugccaaccccaaugcgaacccgaaugccaacccuaaugcuaaccccaaugccaacccuaaugcuaaccccaaugccaaccccaacgcgaauccuaacgccaauccgaacgcuaaucccaacgccaauccuaacgcuaaucccaacguggauccuaaugccaaccccaaugccaacccgaaugcuaacccuaacgcgaaucccaacgccaauccuaacgcuaaucccaacgccaauccuaacgccaaucccaacgcuaauccgaacgccaauccuaacgcgaaucccaacgcuaaccccaaugccaacccuaaugccaacccgaaugcuaaccccaaugccaacccuaaugcuaaccccaaugccaacccuaauaaaaacaaucaagggaacggacagggccacaauaugcccaacgacccuaacagaaaugucgaugagaacgcgaaugccaacuccgcugugaagaauaacaauaacgaggaacccucugacaaacauauuaaggaauaucugaauaagauccagaacagccucuccacagaguggucuccgugcagcguuacgugugggaauggcauucaggugcggaucaaaccuggauccgccaacaagcccaaagaugaacuggacuacgcuaaugauauugagaagaaaaucugcaagauggagaaguguagcucugucuuuaacgugguuaauuccagcaucgggcuuauuauggugcugucuuuccucuuucugaacugaggacuagucccuguucccagagcccacuuuuuuuucuuuuuuugaaauaaaauagccugucuuucagaucucaaaggcucuuuucagagccaccaaaaaaaaaaaaaaaaaaaaaaaaaaaaaaaaaaaaaaaaaaaaaaaaaaaaaaaaaaaaaaaaaaaaaaaaaaaaaaaaaaaaaaaaaaaaaaaaaaaaagaauu

SEQ ID NO: 7705 - RNA, 716 nt, Artificial Sequence
  mRNA Design a-3 (hSL-A100-N5) comprising derived and/or modified sequence from Pf(3D7)__XP_001351122.1__HsALB_Pf-CSP(98-192) (opt5)
aggagagggcgcuuggcuugcaaggacccugagcugcggcauugaagcacacccaacccaacucgacugaagucagccucacugaaccggaucugagaaucuucucucucugggcuugccagggcucuccgaaccuagcuagcauccucuucaauuccaacuagaaagcuuaccaugaagugggugaccuucaucagccugcucuuucuguucuccucugccuacagcgcugacggcaaccccgauccuaaugccaacccgaaugucgaccccaacgcgaauccuaacguugaucccaaugcuaacccuaauguggaccccaacgccaauccuaacgccaauccgaacgcuaaucccaacgccaacccuaaugcuaaccccaaugccaacccuaaugcgaaccccaaugccaacccgaaugcuaacccuaaugccaaccccaaugcuaacccuaaugccaaccccaacgcgaaucccaacgccaauccuaacgcuaauccgaacgccaaucccugaggacuagucccuguucccagagcccacuuuuuuuucuuuuuuugaaauaaaauagccugucuuucagaucucaaaggcucuuuucagagccaccaaaaaaaaaaaaaaaaaaaaaaaaaaaaaaaaaaaaaaaaaaaaaaaaaaaaaaaaaaaaaaaaaaaaaaaaaaaaaaaaaaaaaaaaaaaaaaaaaaaaagaauu

SEQ ID NO: 7706 - RNA, 956 nt, Artificial Sequence
  mRNA Design a-3 (hSL-A100-N5) comprising derived and/or modified sequence from Pf(3D7)__XP_001351122.1__HsALB_Pf-CSP(98-272) (opt5)
aggagagggcgcuuggcuugcaaggacccugagcugcggcauugaagcacacccaacccaacucgacugaagucagccucacugaaccggaucugagaaucuucucucucugggcuugccagggcucuccgaaccuagcuagcauccucuucaauuccaacuagaaagcuuaccaugaagugggugaccuucaucagccugcucuuucuguucuccucugccuacagcgcugacggcaaccccgauccuaaugccaacccgaaugucgaccccaacgcgaauccuaacguugaucccaaugcuaacccuaauguggaccccaacgccaauccuaacgccaauccgaacgcuaaucccaacgccaacccuaaugcuaaccccaaugccaacccuaaugcgaaccccaaugccaacccgaaugcuaacccuaaugccaaccccaaugcuaacccuaaugccaaccccaacgcgaaucccaacgccaauccuaacgcuaauccgaacgccaaucccaacgcuaauccuaacguggaucccaaugccaacccuaaugccaaccccaaugcuaacccgaacgcgaauccuaacgccaaucccaacgcuaauccuaacgccaaucccaacgccaauccuaacgcuaaucccaacgccaauccgaacgcgaauccuaacgcuaaccccaaugccaaccccaaugccaacccuaaugcuaacccgaaugccaaccccaaugcuaacccuaaugccaaccccugaggacuagucccuguucccagagcccacuuuuuuuucuuuuuuugaaauaaaauagccugucuuucagaucucaaaggcucuuuucagagccaccaaaaaaaaaaaaaaaaaaaaaaaaaaaaaaaaaaaaaaaaaaaaaaaaaaaaaaaaaaaaaaaaaaaaaaaaaaaaaaaaaaaaaaaaaaaaaaaaaaaaagaauu

SEQ ID NO: 7707 - RNA, 1262 nt, Artificial Sequence
  mRNA Design a-3 (hSL-A100-N5) comprising derived and/or modified sequence from Pf(3D7)__XP_001351122.1__HsALB_Pf-CSP(98-374) (opt5)
aggagagggcgcuuggcuugcaaggacccugagcugcggcauugaagcacacccaacccaacucgacugaagucagccucacugaaccggaucugagaaucuucucucucugggcuugccagggcucuccgaaccuagcuagcauccucuucaauuccaacuagaaagcuuaccaugaagugggugaccuucaucagccugcucuuucuguucuccucugccuacagcgcugacggcaaccccgauccuaaugccaacccgaaugucgaccccaacgcgaauccuaacguugaucccaaugcuaacccuaauguggaccccaacgccaauccuaacgccaauccgaacgcuaaucccaacgccaacccuaaugcuaaccccaaugccaacccuaaugcgaaccccaaugccaacccgaaugcuaacccuaaugccaaccccaaugcuaacccuaaugccaaccccaacgcgaaucccaacgccaauccuaacgcuaauccgaacgccaaucccaacgcuaauccuaacguggaucccaaugccaacccuaaugccaaccccaaugcuaacccgaacgcgaauccuaacgccaaucccaacgcuaauccuaacgccaaucccaacgccaauccuaacgcuaaucccaacgccaauccgaacgcgaauccuaacgcuaaccccaaugccaaccccaaugccaacccuaaugcuaacccgaaugccaaccccaaugcuaacccuaaugccaaccccaauaaaaacaaucaggggaacggacaaggccacaauaugccuaacgaccccaacagaaaugucgaugagaacgcgaaugccaacuccgcugugaagaauaacaauaacgaggaaccuucugacaaacauauuaaggaauaucuuaauaaaauccagaacagccuguccacagaguggucucccugcagcguuacgugugggaauggcauucaggugcggaucaagccgggauccgccaacaagccuaaagaugaacucgacuacgcuaaugauauugagaagaaaaucugcaagauggagaaauguugaggacuagucccuguucccagagcccacuuuuuuuucuuuuuuugaaauaaaauagccugucuuucagaucucaaaggcucuuuucagagccaccaaaaaaaaaaaaaaaaaaaaaaaaaaaaaaaaaaaaaaaaaaaaaaaaaaaaaaaaaaaaaaaaaaaaaaaaaaaaaaaaaaaaaaaaaaaaaaaaaaaaagaauu

SEQ ID NO: 7708 - RNA, 1331 nt, Artificial Sequence
  mRNA Design a-3 (hSL-A100-N5) comprising derived and/or modified sequence from Pf(3D7)__XP_001351122.1__HsALB_Pf-CSP(98-397) (opt5)
aggagagggcgcuuggcuugcaaggacccugagcugcggcauugaagcacacccaacccaacucgacugaagucagccucacugaaccggaucugagaaucuucucucucugggcuugccagggcucuccgaaccuagcuagcauccucuucaauuccaacuagaaagcuuaccaugaagugggugaccuucaucagccugcucuuucuguucuccucugccuacagcgcugacggcaaccccgauccuaaugccaacccgaaugucgaccccaacgcgaauccuaacguugaucccaaugcuaacccuaauguggaccccaacgccaauccuaacgccaauccgaacgcuaaucccaacgccaacccuaaugcuaaccccaaugccaacccuaaugcgaaccccaaugccaacccgaaugcuaacccuaaugccaaccccaaugcuaacccuaaugccaaccccaacgcgaaucccaacgccaauccuaacgcuaauccgaacgccaaucccaacgcuaauccuaacguggaucccaaugccaacccuaaugccaaccccaaugcuaacccgaacgcgaauccuaacgccaaucccaacgcuaauccuaacgccaaucccaacgccaauccuaacgcuaaucccaacgccaauccgaacgcgaauccuaacgcuaaccccaaugccaaccccaaugccaacccuaaugcuaacccgaaugccaaccccaaugcuaacccuaaugccaaccccaauaaaaacaaucaggggaacggacaaggccacaauaugccuaacgaccccaacagaaaugucgaugagaacgcgaaugccaacuccgcugugaagaauaacaauaacgaggaaccuucugacaaacauauuaaggaauaucuuaauaaaauccagaacagccuguccacagaguggucucccugcagcguuacgugugggaauggcauucaggugcggaucaagccgggauccgccaacaagccuaaagaugaacucgacuacgcuaaugauauugagaagaaaaucugcaagauggagaaauguagcucugucuuuaacgugguuaauuccagcaucgggcugauuauggugcuuucuuuccuguuucucaacugaggacuagucccuguucccagagcccacuuuuuuuucuuuuuuugaaauaaaauagccugucuuucagaucucaaaggcucuuuucagagccaccaaaaaaaaaaaaaaaaaaaaaaaaaaaaaaaaaaaaaaaaaaaaaaaaaaaaaaaaaaaaaaaaaaaaaaaaaaaaaaaaaaaaaaaaaaaaaaaaaaaaagaauu

SEQ ID NO: 7709 - RNA, 1658 nt, Artificial Sequence
  mRNA Design a-3 (hSL-A100-N5) comprising derived and/or modified sequence from Pf(3D7)__XP_001351122.1__HsALB_Pf-CSP(199-377)_L(PVTN)_HBsAg (opt5)
aggagagggcgcuuggcuugcaaggacccugagcugcggcauugaagcacacccaacccaacucgacugaagucagccucacugaaccggaucugagaaucuucucucucugggcuugccagggcucuccgaaccuagcuagcauccucuucaauuccaacuagaaagcuuaccaugaagugggugaccuucaucagccugcucuuucuguucuccucugccuacagcgaccccaacgcuaauccuaacgccaauccgaacgcgaaucccaacgcuaauccuaacgccaaucccaacgccaauccuaacgcuaaucccaacgccaauccuaacgcuaacccgaaugccaaccccaaugcgaacccuaaugccaaccccaaugcuaacccuaaugccaaccccaaugcuaacccgaaugccaacccuaaugcgaaccccaacgccaauccuaacaaaaauaaccagggcaaugggcaaggacacaacaugcccaaugaucccaacagaaaugucgacgagaacgcuaaugccaacuccgcuguuaagaauaacaauaacgaggaaccuucugauaaacauauuaaggaauaucuuaacaaaauccagaauagccuguccacagaguggucuccgugcagcgugacguguggcaacgggauucaggugcggaucaagcccggauccgccaauaagccuaaagacgaacucgauuacgccaacgacauugagaagaaaaucugcaagauggagaaauguagcucuguccccgugaccaauauggaaaacaucacauccggcuuucuggggccucuucugguucuccaggcuggauucuuucugcugacccgcauucucacaaucccccaaagccuggauucuugguggaccucccuuaauuuccugggcggcagcccggugugccucgggcagaacucucaguccccuacaagcaaucacucccccaccucuuguccucccauuugcccuggauauagauggaugugucugcggcgcuuuaucauuuuccuuuuuauccugcuccugugccugauuuuccuccugguccuucuggacuaccagggcaugcuccccguguguccgcugaucccugggagcacgaccacaaacaccggacccugcaagacauguaccacgcccgcgcaaggcaauuccauguuuccuagcugcugcuguacaaagccgaccgaugggaacugcacauguauccccauuccuucuuccugggccuucgcuaaauaucuuugggagugggccagcguuagauuuucuuggcugagccuccuggugcccuucguccagugguucgugggacuguccccuaccguguggcucucugccaucuggaugaugugguacuggggccccagccuguauuccauugucagcccuuuuaucccccuucugccgauuuucuuuugccucuggguuuacaucugaggacuagucccuguucccagagcccacuuuuuuuucuuuuuuugaaauaaaauagccugucuuucagaucucaaaggcucuuuucagagccaccaaaaaaaaaaaaaaaaaaaaaaaaaaaaaaaaaaaaaaaaaaaaaaaaaaaaaaaaaaaaaaaaaaaaaaaaaaaaaaaaaaaaaaaaaaaaaaaaaaaaagaauu

SEQ ID NO: 7710 - RNA, 1568 nt, Artificial Sequence
  mRNA Design a-3 (hSL-A100-N5) comprising derived and/or modified sequence from Pf(3D7)__XP_001351122.1__Pf-CSP (opt6)
aggagagggcgcuuggcuugcaaggacccugagcugcggcauugaagcacacccaacccaacucgacugaagucagccucacugaaccggaucugagaaucuucucucucugggcuugccagggcucuccgaaccuagcuagcauccucuucaauuccaacuagaaagcuuaccaugaugagaaaacuugcaauacuaagcguaucuucauuccuauucguagaagcacuauuccaagaauaucaaugcuauggaucaagcuccaacacaagaguacuuaacgaacuaaauuacgacaaugcaggaacaaaccuauacaaugaacuugaaaugaauuacuacggcaaacaagaaaacugguacucccuaaaaaaaaacucaaggucauuaggagaaaacgacgacggaaacaacgaagacaacgaaaaacuacgaaaacccaaacacaaaaaauuaaaacaaccagcagacggaaaccccgacccaaacgcaaacccaaacgucgacccaaacgcaaacccgaacguagacccaaacgcgaacccaaacguagacccaaacgcaaacccaaacgcaaacccaaacgcaaacccaaacgcaaacccaaaugcaaacccaaacgcaaacccaaacgccaauccaaacgccaacccaaacgcaaacccaaacgcaaacccaaacgcaaacccaaacgcaaaccccaacgcaaacccaaacgcuaacccaaacgcaaacccuaaugcaaacccuaacgcaaacccaaacgucgacccgaacgcaaacccaaaugcaaacccaaacgcaaacccaaacgcaaaccccaacgccaacccaaaugcaaacccaaaugcaaauccaaacgcaaacccaaacgcaaacccuaacgcaaacccaaacgcaaaccccaacgcaaacccaaacgcaaacccaaacgccaacccaaacgcaaaccccaaugcaaacccaaacgcaaacccaaacgcaaacccaaacaaaaacaaucaaggcaacggacaaggacacaacaugcccaacgacccaaaccgaaacgucgacgaaaacgccaacgcaaacagcgcaguaaaaaacaacaacaacgaagaacccucagacaaacacauaaaagaauacuuaaacaaaauacaaaacucacuaucuacagaauggucacccuguagcguaaccugcggcaacggaauacaaguaagaauaaaaccaggcucagcaaacaaaccaaaagaugaacuagacuacgccaaugauauagaaaaaaaaauauguaaaauggaaaaauguagcucagucuucaacguagucaacucaucaauaggacuaauaaugguacucuccuuccucuuccuaaauuaaggacuagucccuguucccagagcccacuuuuuuuucuuuuuuugaaauaaaauagccugucuuucagaucucaaaggcucuuuucagagccaccaaaaaaaaaaaaaaaaaaaaaaaaaaaaaaaaaaaaaaaaaaaaaaaaaaaaaaaaaaaaaaaaaaaaaaaaaaaaaaaaaaaaaaaaaaaaaaaaaaaaagaauu

SEQ ID NO: 7711 - RNA, 1499 nt, Artificial Sequence
  mRNA Design a-3 (hSL-A100-N5) comprising derived and/or modified sequence from Pf(3D7)__XP_001351122.1__Pf-CSP(1-374) (opt6)
aggagagggcgcuuggcuugcaaggacccugagcugcggcauugaagcacacccaacccaacucgacugaagucagccucacugaaccggaucugagaaucuucucucucugggcuugccagggcucuccgaaccuagcuagcauccucuucaauuccaacuagaaagcuuaccaugaugagaaaacuagcaauauuaagcguaagcucauuccuauucguugaagcauuauuccaagaauaccaaugcuacggcucaagcucaaacacaagaguauuaaacgaauuaaacuacgacaaugcaggaaccaaccucuacaacgaacuagaaaugaauuauuacggcaaacaagaaaacugguacucacucaaaaaaaacucacgaucccuaggagaaaacgaugacggaaacaaugaagauaacgaaaaauuaagaaaaccaaaacacaaaaaauuaaaacaaccugcagacggaaacccagacccaaacgcaaauccaaauguagacccaaacgcaaaccccaacguagacccaaaugcaaacccaaacguagacccaaacgcaaacccaaaugcaaacccaaacgcaaacccaaacgcaaacccaaacgcaaaccccaacgcaaacccaaacgcaaacccaaacgccaaccccaacgcaaacccaaacgcaaacccgaaugcaaacccaaacgcaaacccaaacgcaaacccaaacgcaaacccaaacgcaaacccaaacgcaaacccaaaugcaaacccaaacguggauccaaacgcaaauccaaacgcaaacccaaacgcaaacccaaacgcaaaccccaacgcaaauccaaacgcaaaccccaaugcaaauccaaacgcaaacccaaacgccaacccaaacgcaaacccgaacgccaauccaaacgcaaacccaaacgcaaacccaaacgcaaacccaaacgccaacccaaacgcaaacccaaacgcaaacccaaacgcaaaccccaacaaaaacaaccaaggaaacggacaaggacacaacaugccaaacgauccaaacagaaacgucgacgaaaacgccaacgcuaacagcgcaguaaaaaacaauaacaacgaagaaccaucagacaaacauauaaaagaauacuuaaacaaaauccaaaacucacuaucaacagaauggucccccuguuccguaacaugcggaaacggaauacaaguacgaaucaaaccaggaucagccaacaaaccgaaagacgaacuagacuaugccaacgauauagaaaaaaaaauaugcaaaauggaaaaaugcugaggacuagucccuguucccagagcccacuuuuuuuucuuuuuuugaaauaaaauagccugucuuucagaucucaaaggcucuuuucagagccaccaaaaaaaaaaaaaaaaaaaaaaaaaaaaaaaaaaaaaaaaaaaaaaaaaaaaaaaaaaaaaaaaaaaaaaaaaaaaaaaaaaaaaaaaaaaaaaaaaaaaagaauu

SEQ ID NO: 7712 - RNA, 1352 nt, Artificial Sequence
  mRNA Design a-3 (hSL-A100-N5) comprising derived and/or modified sequence from Pf(3D7)__XP_001351122.1__Pf-CSP(1-325) (opt6)
aggagagggcgcuuggcuugcaaggacccugagcugcggcauugaagcacacccaacccaacucgacugaagucagccucacugaaccggaucugagaaucuucucucucugggcuugccagggcucuccgaaccuagcuagcauccucuucaauuccaacuagaaagcuuaccaugaugcgaaaauuagcaauacuaagcguaagcucauucuuauucguagaagcacucuuccaagaauaccaaugcuacggaucaagcucaaacacaagaguccuaaacgaauuaaacuaugacaacgcaggaacaaaccuauacaacgaacuagaaaugaacuacuacggaaaacaagaaaacugguacucacucaaaaaaaacagcagaagucuaggagaaaacgacgacggaaacaacgaagacaacgaaaaacuacgaaaaccaaaacacaaaaaacuaaaacaaccagcagacgggaacccagacccaaacgcaaacccaaacguagauccaaacgcaaacccaaauguagacccuaacgcaaacccaaauguagacccaaacgcaaacccuaacgcaaacccaaaugcaaacccaaacgcaaauccaaacgcaaacccaaacgcaaacccaaacgcgaacccaaacgcaaacccaaacgcaaacccaaaugcaaaccccaacgcaaauccaaaugcaaacccaaaugcaaauccaaacgcaaacccaaacgcaaacccaaaugcaaauccaaacgcaaauccaaacguggauccaaacgcaaacccaaacgcaaacccaaacgcaaacccaaacgcaaacccaaacgcaaacccaaacgcaaauccaaacgccaauccaaacgcaaauccaaaugcaaacccaaacgcaaacccaaacgcaaacccaaacgcaaacccaaacgcaaacccaaacgcaaacccaaacgcaaacccaaacgcaaacccaaacgcaaacccaaacgcaaacccaaacaaaaacaaccaaggaaacggacaaggacacaacaugccaaacgacccaaacagaaacguagacgaaaacgccaacgcaaauagcgcagucaaaaacaacaauaacgaagaaccaucggacaaacacauaaaagaauacuuaaacaaaauacaaaacugaggacuagucccuguucccagagcccacuuuuuuuucuuuuuuugaaauaaaauagccugucuuucagaucucaaaggcucuuuucagagccaccaaaaaaaaaaaaaaaaaaaaaaaaaaaaaaaaaaaaaaaaaaaaaaaaaaaaaaaaaaaaaaaaaaaaaaaaaaaaaaaaaaaaaaaaaaaaaaaaaaaaagaauu

SEQ ID NO: 7713 - RNA, 1568 nt, Artificial Sequence
  mRNA Design a-3 (hSL-A100-N5) comprising derived and/or modified sequence from Pf(3D7)__XP_001351122.1__HsALB_Pf-CSP(19-397) (opt6)
aggagagggcgcuuggcuugcaaggacccugagcugcggcauugaagcacacccaacccaacucgacugaagucagccucacugaaccggaucugagaaucuucucucucugggcuugccagggcucuccgaaccuagcuagcauccucuucaauuccaacuagaaagcuuaccaugaaaugggucacauuuauuucacuacuauucuuauucucaagcgcauacucacuauuucaagaauaccaaugcuacggcucauccucaaauacacgaguacuaaaugaacucaacuacgacaacgcaggaaccaaucucuacaacgaauuagaaaugaacuacuacggcaaacaagaaaacugguauucacuaaaaaaaaacaguagaucacuaggagaaaaugacgacggaaacaaugaagacaacgaaaaacuaagaaaaccaaaacacaaaaaauuaaaacaaccagcagacggaaacccagacccaaacgcaaacccuaacguagaucccaaugccaacccaaauguagacccaaacgcaaaccccaacgucgauccaaacgcaaacccaaacgcaaacccaaacgcaaacccaaacgcaaacccaaacgcaaacccaaaugcaaaccccaacgcaaacccaaacgcuaacccaaacgcaaacccaaacgcaaacccaaacgcaaacccaaacgcaaacccaaacgccaacccaaacgccaacccaaacgcaaauccaaacgcaaacccaaaugccaauccaaacguugacccaaacgcaaacccaaacgcaaaccccaacgcaaacccaaacgcaaauccaaacgcgaaccccaacgcaaacccaaacgcaaacccaaaugcaaacccaaacgcuaacccaaaugcaaacccaaacgccaacccaaacgccaacccaaacgcaaaccccaacgcaaacccaaacgcaaacccaaacgccaauccaaacgcaaacccaaaugcaaacccaaacaaaaacaaccaaggaaacggacaaggacacaacaugccaaacgaccccaacagaaacguagaugaaaaugcaaaugcuaacucagccguaaaaaacaauaacaacgaagaaccaucagacaaacacauaaaagaauaccuaaauaaaauacaaaauuccuuaucaacagaaugguccccaugcucaguaacuugcgguaacggcauacaaguaagaauaaaaccaggaucagcaaacaaaccaaaagacgaauuagacuaugcaaacgacauagaaaaaaaaauauguaaaauggaaaaaugcagcucaguauucaacguaguaaauuccucaaucggacucaucaugguauuaucauuccuauuuuuaaauuaaggacuagucccuguucccagagcccacuuuuuuuucuuuuuuugaaauaaaauagccugucuuucagaucucaaaggcucuuuucagagccaccaaaaaaaaaaaaaaaaaaaaaaaaaaaaaaaaaaaaaaaaaaaaaaaaaaaaaaaaaaaaaaaaaaaaaaaaaaaaaaaaaaaaaaaaaaaaaaaaaaaaagaauu

SEQ ID NO: 7714 - RNA, 1586 nt, Artificial Sequence
  mRNA Design a-3 (hSL-A100-N5) comprising derived and/or modified sequence from Pf(3D7)__XP_001351122.1__HsIns-iso1_Pf-CSP(19-397) (opt6)
aggagagggcgcuuggcuugcaaggacccugagcugcggcauugaagcacacccaacccaacucgacugaagucagccucacugaaccggaucugagaaucuucucucucugggcuugccagggcucuccgaaccuagcuagcauccucuucaauuccaacuagaaagcuuaccauggcacuauggaugagacuacuaccacuacuagcacuccuagccuuauggggacccgauccagccgcagcacucuuccaagaauaccaaugcuauggaucauccuccaacacaagaguccuaaacgaauuaaauuacgacaacgcuggaacaaaccuauacaaugaacuagaaaugaauuauuacggaaaacaagaaaauugguacucacuaaaaaaaaacucuagaagccuaggagaaaacgacgacggaaacaacgaagauaacgaaaaacuaagaaaaccaaaacacaaaaaauuaaaacaacccgcagacggcaacccagacccaaaugcaaauccaaacguagacccaaacgcaaauccaaacguagacccaaacgcaaacccaaauguagacccaaacgcaaauccaaacgcaaacccaaaugcaaacccaaaugcaaacccaaacgcaaauccaaacgcaaaucccaacgccaacccaaacgcaaacccaaacgcaaauccaaacgcaaacccaaacgcaaacccaaacgcaaacccaaacgcaaacccaaaugcaaacccaaaugccaauccaaacgccaacccaaacgcaaacccaaacguagacccaaacgcaaacccaaacgccaacccaaacgcaaaccccaaugcaaacccaaacgcaaacccaaacgcaaaccccaacgcaaauccaaacgcaaacccaaacgcaaauccaaacgcaaauccaaacgccaacccaaacgcaaacccaaacgcaaauccaaacgcaaaccccaacgcaaacccaaacgccaacccaaaugcaaacccaaacgcaaaucccaauaaaaacaaccaaggaaacggacaaggacacaacaugccaaacgauccaaacagaaacguagacgaaaacgcaaacgcaaacucagcagucaaaaacaauaacaacgaagaaccaucagacaaacacauaaaagaauaccuaaacaaaauacaaaacucacuauccacagaauggucaccaugcucaguaaccugcggaaacggaauacaaguaagaauaaaaccaggaucagccaacaaaccaaaagacgaacuagacuaugcuaaugacauagaaaaaaaaauaugcaaaauggaaaaaugcuccucaguauucaacgucguaaacucuucaauaggacuaauaaugguacuauccuucuuauuucuaaacuaaggacuagucccuguucccagagcccacuuuuuuuucuuuuuuugaaauaaaauagccugucuuucagaucucaaaggcucuuuucagagccaccaaaaaaaaaaaaaaaaaaaaaaaaaaaaaaaaaaaaaaaaaaaaaaaaaaaaaaaaaaaaaaaaaaaaaaaaaaaaaaaaaaaaaaaaaaaaaaaaaaaaagaauu

SEQ ID NO: 7715 - RNA, 1565 nt, Artificial Sequence
  mRNA Design a-3 (hSL-A100-N5) comprising derived and/or modified sequence from Pf(3D7)__XP_001351122.1__HsSPARC_Pf-CSP(19-397) (opt6)
aggagagggcgcuuggcuugcaaggacccugagcugcggcauugaagcacacccaacccaacucgacugaagucagccucacugaaccggaucugagaaucuucucucucugggcuugccagggcucuccgaaccuagcuagcauccucuucaauuccaacuagaaagcuuaccaugcgcgcauggauauucuuccuccuaugucuagcaggucgagcacuugcacucuuccaagaauaccaauguuacggauccucaagcaacacacgaguacuaaacgaacuaaacuacgauaacgcaggaaccaacuuauacaacgaacuagaaaugaacuacuacggcaaacaagaaaacugguacucacucaaaaaaaacagcagaagccuaggagaaaaugacgacggaaacaacgaagauaacgaaaaauuacgaaaacccaaacacaaaaaauuaaaacaacccgcagauggaaauccagacccgaacgcaaacccaaacguagacccaaacgcaaacccaaacguugacccaaacgcaaacccaaacguagacccaaacgcaaacccuaacgccaacccaaacgcaaacccaaacgcaaacccaaaugcgaacccaaaugcaaacccaaacgccaacccaaaugcaaaccccaacgcaaauccaaacgcaaacccaaaugcaaacccaaacgcaaacccaaacgcaaacccaaacgcaaacccaaacgccaaccccaaugcaaacccaaacgcaaacccaaacgucgacccaaacgcaaacccaaacgcaaacccaaacgcaaauccaaacgcaaauccaaacgcaaacccuaacgcaaacccaaacgcaaacccaaaugcaaauccaaacgcaaacccaaacgcaaacccaaacgcaaauccaaacgcaaacccaaacgcaaacccaaacgcaaacccuaaugcaaacccaaaugcaaauccaaacgcaaacccaaaugcaaaccccaacaaaaacaaccaaggaaacggacaaggacacaauaugccaaacgacccaaacagaaacguagacgaaaacgcaaacgccaacagcgcaguaaaaaacaacaacaacgaagaaccaucagacaaacacauaaaagaauaccuaaacaaaauacaaaacucacuaucaacagaauggucucccugcuccguaacaugcggaaacggcauacaaguacgaauaaaaccuggaucagccaacaaaccaaaagacgaacuagacuaugcaaaugacauagaaaaaaaaauaugcaaaauggaaaaaugcaguucagucuucaacguagucaacagcucaauaggccuaauaaugguacucucauuccuauucuuaaacuaaggacuagucccuguucccagagcccacuuuuuuuucuuuuuuugaaauaaaauagccugucuuucagaucucaaaggcucuuuucagagccaccaaaaaaaaaaaaaaaaaaaaaaaaaaaaaaaaaaaaaaaaaaaaaaaaaaaaaaaaaaaaaaaaaaaaaaaaaaaaaaaaaaaaaaaaaaaaaaaaaaaaagaauu

SEQ ID NO: 7716 - RNA, 1568 nt, Artificial Sequence
  mRNA Design a-3 (hSL-A100-N5) comprising derived and/or modified sequence from Pf(3D7)__XP_001351122.1__IgE_Pf-CSP(19-397) (opt6)
aggagagggcgcuuggcuugcaaggacccugagcugcggcauugaagcacacccaacccaacucgacugaagucagccucacugaaccggaucugagaaucuucucucucugggcuugccagggcucuccgaaccuagcuagcauccucuucaauuccaacuagaaagcuuaccauggauuggacauggauucucuuccucguagcagcagccacaagaguacacucuuuauuucaagaauaccaaugcuacggaucaagcucaaacacacgcguacuaaacgaacuaaacuacgacaacgcaggaacaaacuuauacaacgaacuagaaaugaacuauuauggcaaacaagaaaacugguacucacuaaaaaaaaacuccagaagcuuaggagaaaacgacgacggaaacaacgaagacaacgaaaaacuacgcaaaccuaaacacaaaaaacuaaaacaaccugcagacggaaacccagacccaaacgcgaacccaaacguagauccaaacgcaaacccaaacguagaucccaacgcaaacccgaacguagacccuaacgcaaauccaaacgcaaaccccaacgcaaacccgaacgcaaacccaaacgcaaacccaaacgcaaacccaaacgcaaacccaaacgcaaacccaaacgccaacccaaacgcaaauccaaacgcuaacccaaaugcaaacccuaacgcaaacccaaacgccaacccaaacgcaaacccaaacgcaaacccaaacgcaaaucccaauguagacccaaacgcaaacccaaacgcaaacccaaacgcuaacccaaaugcaaacccaaacgcaaacccaaacgcaaacccaaacgcuaaccccaacgcaaacccgaacgcaaacccaaaugcaaacccaaacgcaaacccaaaugcaaacccaaacgcaaacccaaacgcaaaccccaaugccaacccaaacgcaaauccaaaugccaauccaaacgcaaacccaaacaaaaacaaccaaggaaauggacaaggacauaacaugccaaacgaccccaaccgaaauguagacgaaaacgccaacgcaaauagugcagucaaaaacaauaacaaugaagaacccucagauaaacauauaaaagaauacuuaaacaaaauacaaaacucacuaucaaccgaguggucuccuugcucaguaacauguggaaacggaauacaaguacgaauaaaaccaggaucagcaaacaaaccgaaagacgaacuagacuacgccaacgacauagaaaagaaaauauguaaaauggagaaauguaguucaguauucaacgugguaaacagcucaauaggccuaauaaugguacucucuuuccuauuccuaaacuaaggacuagucccuguucccagagcccacuuuuuuuucuuuuuuugaaauaaaauagccugucuuucagaucucaaaggcucuuuucagagccaccaaaaaaaaaaaaaaaaaaaaaaaaaaaaaaaaaaaaaaaaaaaaaaaaaaaaaaaaaaaaaaaaaaaaaaaaaaaaaaaaaaaaaaaaaaaaaaaaaaaaagaauu

SEQ ID NO: 7717 - RNA, 1733 nt, Artificial Sequence
  mRNA Design a-3 (hSL-A100-N5) comprising derived and/or modified sequence from Pf(3D7)__XP_001351122.1__Pf-CSP_L(G4SG4)_TM domain HA (opt6)
aggagagggcgcuuggcuugcaaggacccugagcugcggcauugaagcacacccaacccaacucgacugaagucagccucacugaaccggaucugagaaucuucucucucugggcuugccagggcucuccgaaccuagcuagcauccucuucaauuccaacuagaaagcuuaccaugaugcguaaacuagcaauacuaucugucaguucauucuuauucguagaagcacuauuccaagaauaccaauguuacggaucuucaucaaacacaagaguacucaacgaauuaaacuacgauaacgcuggaaccaauuuauacaacgaacuagaaaugaacuacuauggaaaacaagaaaacugguauucacuaaaaaaaaacagcagaaguuuaggagaaaaugacgacggaaacaaugaagacaaugaaaaauuacgaaaaccaaaacacaaaaaauuaaaacaacccgccgacggaaauccagacccaaacgcaaacccaaauguagacccaaacgcaaacccaaauguagaucccaacgcaaacccaaacguagaucccaaugcaaacccaaacgcaaacccaaaugcaaaccccaacgcaaacccaaaugcaaacccuaacgcaaacccgaacgcaaacccaaacgcaaaucccaaugcaaaccccaacgcaaauccaaaugcaaacccuaacgcaaauccgaacgcaaauccaaacgcaaacccaaacgcaaacccaaacgcaaacccaaacgcaaacccaaacgucgacccaaacgccaauccaaacgcaaaccccaaugcaaacccaaaugcaaacccaaacgcaaacccaaaugccaacccaaacgcaaacccaaacgcaaacccaaacgcaaacccaaacgcaaacccaaaugcaaacccaaaugcaaacccaaacgccaacccaaacgcaaacccaaacgcaaacccaaacgccaacccaaacgcaaacccuaacgcaaauccaaacaaaaacaaccaagggaacggacaaggacacaacaugccaaacgacccaaacagaaacguagacgaaaacgccaacgcaaacucagcugucaaaaacaauaacaacgaagaacccuccgauaaacacauaaaagaauaccuaaacaaaauccaaaacucccuuucuacagaauggucacccugcucaguaacaugcggcaacggcauacaaguuagaaucaaaccaggaucagcaaauaaaccaaaagacgaauuagacuaugccaacgacauagaaaaaaaaauauguaaaauggaaaaaugcucaucaguuuucaacguaguaaacagcucaaucggauuaauaaugguacuaucauucuuauuuuuaaacggaggaggaggcuccggcggagguggaaaacuagaaucaacuagaauauaccaaauauuagcaauauacucaacaguagcaucaucacucguauuaguaguaucgcuaggagcaauaaguuucuggaugugcucuaacggaagccuacaaugccgaauaugcauauaaggacuagucccuguucccagagcccacuuuuuuuucuuuuuuugaaauaaaauagccugucuuucagaucucaaaggcucuuuucagagccaccaaaaaaaaaaaaaaaaaaaaaaaaaaaaaaaaaaaaaaaaaaaaaaaaaaaaaaaaaaaaaaaaaaaaaaaaaaaaaaaaaaaaaaaaaaaaaaaaaaaaagaauu

SEQ ID NO: 7718 - RNA, 1607 nt, Artificial Sequence
  mRNA Design a-3 (hSL-A100-N5) comprising derived and/or modified sequence from Pf(3D7)__XP_001351122.1__Pf-CSP(199-377)_L(PVTN)_HBsAg (opt6)
aggagagggcgcuuggcuugcaaggacccugagcugcggcauugaagcacacccaacccaacucgacugaagucagccucacugaaccggaucugagaaucuucucucucugggcuugccagggcucuccgaaccuagcuagcauccucuucaauuccaacuagaaagcuuaccauggacccaaacgccaaccccaacgcaaacccaaaugcaaacccaaacgcuaaccccaacgcaaacccaaacgcuaacccuaacgcaaauccaaacgcaaaucccaacgcaaauccaaacgcaaacccaaacgcaaacccaaaugccaacccaaacgcaaacccuaacgcaaaucccaacgcaaauccaaaugcaaaccccaaugcaaacccaaacgcaaauccaaacaaaaauaaucaaggaaauggacaaggacauaacaugccaaacgacccuaaccgaaacgucgacgaaaaugcaaacgcaaacuccgcaguaaaaaacaacaacaacgaagaaccuuccgacaaacacauaaaagaauaccuaaacaaaauacaaaacucucuauccacugaauggucaccaugcucaguaaccugcggaaauggcauacaaguaagaauaaaaccaggaucugcaaauaaaccuaaagacgaacuagauuacgcaaaugacauagaaaaaaaaauaugcaaaauggaaaaaugcucaucagucccaguaacaaacauggaaaacaucacaucaggauucuuaggaccacuacucguauuacaagcaggauucuuucuuuuaacaagaauauuaacaauaccacaaucccuagacucaugguggacaucauuaaacuuccuagguggaucaccagucugccucggacaaaacucacaaucaccaacaucaaaccacucaccaacauccugcccaccaauuuguccaggauacagauggaugugccuacgaagauucauaauauucuuauuuauauuacuacuaugucucauauuuuuacucguacuauuagacuaucagggcauguuacccguauguccacuaauaccaggcucaaccaccacaaacacagguccaugcaaaaccugcaccacaccagcacaaggaaacuccauguuucccucauguugcugcaccaaacccaccgauggaaacugcaccugcauaccaaucccaucuucaugggcauucgcaaaauaucuaugggaaugggcauccguaagauuuucauggcuaucacuauuaguaccauucguacaaugguucguaggauuaucaccaacaguaugguuaucagcaauauggaugaugugguacuggggaccaucacuauacucaauaguauccccuuucauaccauuacucccaauauuuuucugccuuuggguauacauauaaggacuagucccuguucccagagcccacuuuuuuuucuuuuuuugaaauaaaauagccugucuuucagaucucaaaggcucuuuucagagccaccaaaaaaaaaaaaaaaaaaaaaaaaaaaaaaaaaaaaaaaaaaaaaaaaaaaaaaaaaaaaaaaaaaaaaaaaaaaaaaaaaaaaaaaaaaaaaaaaaaaaagaauu

SEQ ID NO: 7719 - RNA, 1649 nt, Artificial Sequence
  mRNA Design a-3 (hSL-A100-N5) comprising derived and/or modified sequence from Pf(3D7)__XP_001351122.1__Pf-CSP(199-387)_L(PVTN)_HBsAg (opt6)
aggagagggcgcuuggcuugcaaggacccugagcugcggcauugaagcacacccaacccaacucgacugaagucagccucacugaaccggaucugagaaucuucucucucugggcuugccagggcucuccgaaccuagcuagcauccucuucaauuccaacuagaaagcuuaccaugauggcaccagauccaaacgcaaacccaaacgcaaacccaaacgcaaauccaaaugcaaacccaaacgcaaaucccaaugcaaacccuaacgcaaacccaaacgccaacccaaaugccaacccaaacgcaaacccaaacgcaaauccaaacgcaaacccaaacgcuaacccaaaugcaaaccccaacgcaaauccaaacgcaaacccaaacgcaaauccaaacgcuaacccaaacaaaaauaaccaaggaaacggacaaggacacaauaugccaaaugacccaaauagaaacguagacgaaaacgcaaacgcaaauucagcagucaaaaacaauaacaacgaagaaccauccgauaaacacauaaaagaauacuuaaacaaaauccaaaacucacuaucaacugaauggucaccuuguucaguaacauguggcaacggaauacaaguaagaauaaaaccagguucagccaacaaaccuaaagacgaacuagacuacgcaaacgacauagaaaaaaaaaucugcaaaauggaaaaaugcucaucaguauuuaauguaguaaacucaucaauaggacuaggcccuguaacaaacauggaaaacauaaccucaggauucuuaggcccacuacuaguacuccaagcaggauucuuucuucuaacaagaauauuaaccauuccucaaucauuagacucaugguggacaucccuuaacuuucuaggaggaagccccguaugcuuaggacaaaacagccaauccccaacauccaaccacuccccaacaucaugccccccaauaugcccaggauacagauggaugugccuaagaagauucaucauauuccuauuuauucucuuacucugcuuaauauucuuacucguauuacucgacuaccaaggaauguuaccaguaugcccacuaauaccaggauccacaacaacaaacacgggaccaugcaaaacaugcacaacaccugcccaaggaaauuccauguucccaucaugcugcugcacaaaaccaaccgacggcaacugcacaugcauaccaauaccaucaagcugggccuucgcaaaauaccuaugggaaugggcaucagugagauucucauggcucucauuacuagucccauucguacaaugguuuguaggauuaucaccaacaguuuggcucagcgcaauauggaugaugugguacuggggccccucuuuauauucaauaguauccccauuuauaccacuacucccaauauucuucuguuuauggguauacauauaaggacuagucccuguucccagagcccacuuuuuuuucuuuuuuugaaauaaaauagccugucuuucagaucucaaaggcucuuuucagagccaccaaaaaaaaaaaaaaaaaaaaaaaaaaaaaaaaaaaaaaaaaaaaaaaaaaaaaaaaaaaaaaaaaaaaaaaaaaaaaaaaaaaaaaaaaaaaaaaaaaaaagaauu

SEQ ID NO: 7720 - RNA, 833 nt, Artificial Sequence
  mRNA Design a-3 (hSL-A100-N5) comprising derived and/or modified sequence from Pf(3D7)__XP_001351122.1__HsALB_Pf-CSP(19-152) (opt6)
aggagagggcgcuuggcuugcaaggacccugagcugcggcauugaagcacacccaacccaacucgacugaagucagccucacugaaccggaucugagaaucuucucucucugggcuugccagggcucuccgaaccuagcuagcauccucuucaauuccaacuagaaagcuuaccaugaaauggguaacauucauaucacuacuauuccuauucuccagcgcauacucacuauuccaagaauaccaaugcuacggaucaagcucaaacacacgaguacuaaacgaacuaaacuacgacaacgcaggaaccaaccuauacaacgaacuagaaaugaacuacuacggaaaacaagaaaacugguacucacuaaaaaaaaacagcagaucacuaggagaaaacgacgacggaaacaacgaagacaacgaaaaacuaagaaaaccaaaacacaaaaaacuaaaacaacccgcagacggaaacccagacccaaacgcaaacccaaacguagacccaaaugcaaacccaaacguagacccaaacgcaaacccaaacguagacccaaacgcaaacccaaacgcaaacccaaacgcaaacccaaacgcaaacccaaacgcaaacccaaacgcaaacccauaaggacuagucccuguucccagagcccacuuuuuuuucuuuuuuugaaauaaaauagccugucuuucagaucucaaaggcucuuuucagagccaccaaaaaaaaaaaaaaaaaaaaaaaaaaaaaaaaaaaaaaaaaaaaaaaaaaaaaaaaaaaaaaaaaaaaaaaaaaaaaaaaaaaaaaaaaaaaaaaaaaaaagaauu

SEQ ID NO: 7721 - RNA, 953 nt, Artificial Sequence
  mRNA Design a-3 (hSL-A100-N5) comprising derived and/or modified sequence from Pf(3D7)__XP_001351122.1__HsALB_Pf-CSP(19-192) (opt6)
aggagagggcgcuuggcuugcaaggacccugagcugcggcauugaagcacacccaacccaacucgacugaagucagccucacugaaccggaucugagaaucuucucucucugggcuugccagggcucuccgaaccuagcuagcauccucuucaauuccaacuagaaagcuuaccaugaaauggguaacauucaucucacuacuauucuuauucucaucagcauacucacuauuccaagaauaccaaugcuacggaucaucaucaaacacacgaguacucaacgaacuaaacuacgacaacgcaggaacaaaccuauacaacgaacuagaaaugaacuacuacggaaaacaagaaaacugguauucacuaaaaaaaaacucaagaucacuaggagaaaacgacgacggaaacaacgaagacaacgaaaaacuaagaaaaccaaaacacaaaaaacuaaaacaaccagcagacggaaacccagacccaaacgcaaacccaaacguagacccaaacgccaacccaaacguagacccaaacgcaaacccaaacguagacccaaacgcaaacccaaacgcaaacccaaacgcaaacccaaacgcaaacccaaacgcaaacccaaacgcaaacccaaacgcaaacccaaacgcaaacccaaacgcaaacccaaacgcaaacccaaacgcaaacccaaacgcaaauccaaacgcaaacccaaacgcaaacccaaacgcaaacccaaacgcaaaccccuaaggacuagucccuguucccagagcccacuuuuuuuucuuuuuuugaaauaaaauagccugucuuucagaucucaaaggcucuuuucagagccaccaaaaaaaaaaaaaaaaaaaaaaaaaaaaaaaaaaaaaaaaaaaaaaaaaaaaaaaaaaaaaaaaaaaaaaaaaaaaaaaaaaaaaaaaaaaaaaaaaaaaagaauu

SEQ ID NO: 7722 - RNA, 1193 nt, Artificial Sequence
  mRNA Design a-3 (hSL-A100-N5) comprising derived and/or modified sequence from Pf(3D7)__XP_001351122.1__HsALB_Pf-CSP(19-272) (opt6)
aggagagggcgcuuggcuugcaaggacccugagcugcggcauugaagcacacccaacccaacucgacugaagucagccucacugaaccggaucugagaaucuucucucucugggcuugccagggcucuccgaaccuagcuagcauccucuucaauuccaacuagaaagcuuaccaugaaauggguaacauucauaucacuacuauuccuauucucaagcgcauauucacuauuccaagaauaccaaugcuacggaucaagcucaaacacaagaguacuuaacgaacuaaacuacgacaacgcaggaacaaaccuauacaacgaacuugaaaugaacuacuacggaaaacaagaaaacugguacucacuaaaaaaaaauagcagaagcuuaggagaaaacgacgacggaaacaacgaagacaacgaaaaauuaagaaaaccuaaacacaaaaaacuaaaacaacccgcagacggaaacccagacccuaacgccaacccaaauguagacccaaacgcaaacccaaacguagacccaaacgcaaaccccaacguagacccaaacgcaaacccaaacgcaaacccaaacgcaaacccaaacgcaaaccccaacgcaaacccaaacgcaaacccaaacgcaaacccaaacgcaaacccaaacgcaaacccaaacgcaaacccaaacgcaaacccaaacgcaaacccaaacgcgaacccaaacgcaaacccaaacgcaaacccaaacgcaaacccaaacgcaaacccaaacguagacccaaaugcaaaccccaacgcaaacccaaacgcaaacccaaaugcaaaccccaacgcaaacccaaacgcaaacccaaacgcaaacccaaacgcaaacccaaaugcaaacccaaacgcaaacccaaacgccaacccaaacgcaaacccaaacgcaaacccaaacgcaaacccaaacgcaaacccgaacgcaaacccaaacgcaaacccaaacgcaaacccauaaggacuagucccuguucccagagcccacuuuuuuuucuuuuuuugaaauaaaauagccugucuuucagaucucaaaggcucuuuucagagccaccaaaaaaaaaaaaaaaaaaaaaaaaaaaaaaaaaaaaaaaaaaaaaaaaaaaaaaaaaaaaaaaaaaaaaaaaaaaaaaaaaaaaaaaaaaaaaaaaaaaaagaauu

SEQ ID NO: 7723 - RNA, 1355 nt, Artificial Sequence
  mRNA Design a-3 (hSL-A100-N5) comprising derived and/or modified sequence from Pf(3D7)__XP_001351122.1__HsALB_Pf-CSP(19-272)_L(AAY)_Pf-CSP(310-3 27)_L(AAY)_Pf-CSP(346-375) (opt6)
aggagagggcgcuuggcuugcaaggacccugagcugcggcauugaagcacacccaacccaacucgacugaagucagccucacugaaccggaucugagaaucuucucucucugggcuugccagggcucuccgaaccuagcuagcauccucuucaauuccaacuagaaagcuuaccaugaaauggguaacauuuauaucacuccuauuccuuuuuucgucagcauacucacuauuccaagaauaucaaugcuacggaucaagcuccaacacaagaguacuaaacgaacuaaacuacgacaacgcaggaacaaaccuauacaacgaacuagaaaugaacuacuacggaaaacaagaaaacugguacucacuaaaaaaaaacagccgaagcuuaggagaaaaugacgacggaaacaacgaagacaacgaaaaauuacgcaaacccaaacacaaaaaacugaaacaaccagcagacggaaacccagacccaaacgcaaacccaaacguagacccaaacgcaaacccaaacguagacccaaacgcaaacccaaacguagacccaaacgcaaacccaaacgcgaacccaaacgccaacccaaacgcaaacccaaacgcaaacccaaacgcaaacccaaacgcaaacccaaacgcaaacccaaacgccaacccgaacgcaaacccaaacgcaaacccaaacgcaaauccaaacgcaaacccaaacgcaaacccaaacgccaacccaaacgcaaacccaaacgcaaacccaaauguggacccaaacgcaaacccaaacgcaaacccaaacgcaaacccaaaugcaaacccaaacgcaaacccaaacgcaaacccaaacgcaaacccaaacgcaaacccaaaugcaaacccaaacgcaaauccaaacgcaaacccaaacgcaaacccaaacgcaaacccaaacgcaaacccuaacgcaaacccaaacgcaaacccaaacgccaaccccaaugcaaacccagcagcauacgaaccaucagacaaacacauaaaagaauaccuaaacaaaauacaaaacucacucgcagcauauauaaagccaggaagcgccaacaaaccaaaagacgaacuagauuacgcaaacgacauagaaaaaaaaaucuguaaaauggaaaaaugcucauaaggacuagucccuguucccagagcccacuuuuuuuucuuuuuuugaaauaaaauagccugucuuucagaucucaaaggcucuuuucagagccaccaaaaaaaaaaaaaaaaaaaaaaaaaaaaaaaaaaaaaaaaaaaaaaaaaaaaaaaaaaaaaaaaaaaaaaaaaaaaaaaaaaaaaaaaaaaaaaaaaaaaagaauu

SEQ ID NO: 7724 - RNA, 1316 nt, Artificial Sequence
  mRNA Design a-3 (hSL-A100-N5) comprising derived and/or modified sequence from Pf(3D7)__XP_001351122.1__HsALB_Pf-CSP(19-272)_L(AAY)_Pf-CSP(346-3 65)_L(AAY)_P2 (opt6)
aggagagggcgcuuggcuugcaaggacccugagcugcggcauugaagcacacccaacccaacucgacugaagucagccucacugaaccggaucugagaaucuucucucucugggcuugccagggcucuccgaaccuagcuagcauccucuucaauuccaacuagaaagcuuaccaugaaauggguaacauucauaucacuauuauuccuuuucucaucagcuuacucacuauuccaagaauaccaaugcuacggaucauccucaaacacaagaguacuaaacgaacuaaacuacgacaacgccggaaccaaccuauacaacgaacucgaaaugaacuacuacggaaaacaagaaaacugguacucacuaaaaaaaaacagccgaucccuaggagaaaacgacgacggaaauaacgaagacaaugaaaaauuaagaaaaccaaaacacaaaaaacuaaaacaaccagcagacggaaacccagacccaaacgcaaacccaaacguagauccaaacgcaaacccaaacguagacccaaacgcaaacccaaacguagacccaaacgcuaacccaaacgcaaacccaaacgcaaacccaaacgcaaacccaaacgcaaacccaaacgcaaacccgaacgcaaaccccaacgcaaacccaaacgcaaacccaaacgcaaaccccaacgcaaacccaaacgcaaacccgaacgcaaacccaaacgcaaacccaaacgcaaacccaaacgcaaacccaaacgcaaacccaaacguagacccaaacgccaacccaaacgcaaacccaaacgcaaacccaaacgcaaacccaaacgcaaacccaaacgcaaacccaaacgcaaacccaaacgcaaacccaaacgcaaacccaaacgcaaaccccaacgcaaacccaaaugcaaacccaaacgcaaacccaaaugcaaaccccaacgcaaacccaaaugccaauccaaacgcaaacccaaacgcaaacccagccgcauacauaaaaccaggauccgcaaacaaaccaaaagacgaacuagacuacgcaaacgacauagaagcagcauaccaauauauaaaagccaacuccaaauucauagguauaacagaacucuaaggacuagucccuguucccagagcccacuuuuuuuucuuuuuuugaaauaaaauagccugucuuucagaucucaaaggcucuuuucagagccaccaaaaaaaaaaaaaaaaaaaaaaaaaaaaaaaaaaaaaaaaaaaaaaaaaaaaaaaaaaaaaaaaaaaaaaaaaaaaaaaaaaaaaaaaaaaaaaaaaaaaagaauu

SEQ ID NO: 7725 - RNA, 1310 nt, Artificial Sequence
  mRNA Design a-3 (hSL-A100-N5) comprising derived and/or modified sequence from Pf(3D7)__XP_001351122.1__HsALB_Pf-CSP(19-272)_L(AAY)_Pf-CSP(346-3 65)_L(AAY)_PADRE (opt6)
aggagagggcgcuuggcuugcaaggacccugagcugcggcauugaagcacacccaacccaacucgacugaagucagccucacugaaccggaucugagaaucuucucucucugggcuugccagggcucuccgaaccuagcuagcauccucuucaauuccaacuagaaagcuuaccaugaaauggguaaccuucauaucacuacuauucuuauucucaucagcauacucacucuuccaagaauaccaaugcuacggcucaagcucaaacacaagaguacuaaacgaauuaaacuaugacaacgccggaacaaaccuauacaaugaauuagaaaugaacuacuacggcaaacaagaaaacugguacucacucaaaaaaaacuccagaaguuuaggagaaaaugacgacggaaacaaugaagacaaugaaaaauuacgaaaaccaaaacacaaaaaacuaaaacaacccgccgacggaaaccccgacccgaacgcaaacccaaacguagacccaaacgcaaacccaaacguagacccaaaugcaaacccaaacguagacccaaacgcaaacccaaacgcaaacccaaacgcaaauccaaacgcaaacccaaaugcaaacccaaaugcaaauccaaacgcaaaccccaacgcaaacccaaacgcaaacccaaaugcaaauccaaacgccaacccaaaugcaaacccaaacgcaaauccaaacgcaaacccaaacgcaaauccaaacgcaaacccaaaugcaaacccaaacguagauccaaacgcaaacccaaacgccaacccaaacgcaaacccgaacgcaaacccaaacgcaaacccaaacgccaacccaaacgccaacccaaacgccaacccaaacgcaaacccaaacgcaaacccaaacgcaaacccaaacgcaaacccaaaugcaaacccuaacgcaaacccaaacgcaaacccaaacgcaaacccaaacgccaacccaaacgcaaauccagcagcauacauaaaaccaggaucagcaaacaaaccaaaagaugaacuagacuacgcaaaugacaucgaagcagccuacgcuaaauucguagcagccuggacacuaaaagcagcagccuaaggacuagucccuguucccagagcccacuuuuuuuucuuuuuuugaaauaaaauagccugucuuucagaucucaaaggcucuuuucagagccaccaaaaaaaaaaaaaaaaaaaaaaaaaaaaaaaaaaaaaaaaaaaaaaaaaaaaaaaaaaaaaaaaaaaaaaaaaaaaaaaaaaaaaaaaaaaaaaaaaaaaagaauu

SEQ ID NO: 7726 - RNA, 1367 nt, Artificial Sequence
  mRNA Design a-3 (hSL-A100-N5) comprising derived and/or modified sequence from Pf(3D7)__XP_001351122.1__HsALB_Pf-CSP(19-272)_L(G4S)_Pf-CSP(310-3 27)_L(G4S)_Pf-CSP(346-375) (opt6)
aggagagggcgcuuggcuugcaaggacccugagcugcggcauugaagcacacccaacccaacucgacugaagucagccucacugaaccggaucugagaaucuucucucucugggcuugccagggcucuccgaaccuagcuagcauccucuucaauuccaacuagaaagcuuaccaugaaauggguaaccuucaucucacuacuauuccuauucucaagcgcauacucacucuuucaagaauaccaaugcuacggcucaagcucaaacacacgaguacuaaacgaacuaaacuacgacaacgcaggaacaaaccuauauaacgaacucgaaaugaacuacuacggcaaacaagaaaauugguacucacuaaaaaaaaacagcagaagcuuaggagaaaacgacgacggaaacaacgaagauaacgaaaaacuaagaaaaccaaaacacaaaaaacuaaaacaacccgcagacggaaacccagacccaaacgcaaauccaaauguagacccgaacgcaaacccaaacguagacccaaaugcgaacccaaacgucgacccaaacgcaaacccaaaugcaaacccaaaugcgaacccaaacgcaaacccaaacgcaaauccaaacgcaaauccaaaugcaaacccaaacgcgaauccaaacgcaaacccaaacgcaaacccaaacgcaaacccaaacgcaaacccaaacgcaaacccaaacgcaaacccgaacgcuaacccaaacgcaaacccaaacgcaaacccaaacguagauccaaacgcgaacccaaacgcaaacccaaaugcaaacccaaacgcaaacccaaacgcaaacccaaacgcaaacccaaacgcaaacccaaacgcaaacccaaacgcgaacccaaacgcaaauccaaaugcaaacccaaacgcaaacccaaacgcaaacccaaacgcaaacccaaaugcaaacccaaacgcaaacccaaaugcaaacccaaacgcaaacccaggaggaggaggaucagaacccucagacaaacacauaaaagaauaccuaaacaaaauacaaaacucacuaggaggaggaggaucgaucaaaccaggaagcgcaaacaaaccaaaagacgaacucgacuacgcaaacgauauagaaaaaaaaauaugcaaaauggaaaaaugcucguaaggacuagucccuguucccagagcccacuuuuuuuucuuuuuuugaaauaaaauagccugucuuucagaucucaaaggcucuuuucagagccaccaaaaaaaaaaaaaaaaaaaaaaaaaaaaaaaaaaaaaaaaaaaaaaaaaaaaaaaaaaaaaaaaaaaaaaaaaaaaaaaaaaaaaaaaaaaaaaaaaaaaagaauu

SEQ ID NO: 7727 - RNA, 1352 nt, Artificial Sequence
  mRNA Design a-3 (hSL-A100-N5) comprising derived and/or modified sequence from Pf(3D7)__XP_001351122.1__HsALB_Pf-CSP(19-272)_L(G4S)_Pf-CSP(310-3 27)_Pf-CSP(346-375) (opt6)
aggagagggcgcuuggcuugcaaggacccugagcugcggcauugaagcacacccaacccaacucgacugaagucagccucacugaaccggaucugagaaucuucucucucugggcuugccagggcucuccgaaccuagcuagcauccucuucaauuccaacuagaaagcuuaccaugaaauggguaacauucauaucacuccuauuccuauucuccucagcauacucccucuuccaagaauaccaaugcuacggcucaagcucaaacacacgaguacuaaacgaacuaaauuacgacaacgccggaacaaaccuauauaaugaacuagaaaugaauuacuacggaaaacaagaaaacugguacucacuuaaaaaaaacucaagaucauuaggagaaaacgacgacggcaacaacgaagacaacgaaaaacuaagaaaaccaaaacacaaaaaacuaaaacaacccgcagacggaaauccagauccaaacgcaaacccaaacguagacccaaacgcaaacccaaacguagacccaaacgcaaacccaaacgucgacccaaacgccaacccaaacgcaaacccaaacgcaaacccaaacgcaaacccaaacgccaacccaaacgcaaacccaaacgcaaacccaaacgcaaacccaaacgcaaacccaaacgcaaacccaaacgcaaacccgaacgcaaacccaaacgcaaauccuaacgcaaacccaaacgcaaacccaaacgcaaauccgaacgcaaacccaaacguagacccaaacgcaaacccaaacgcaaacccaaacgcaaacccaaacgcaaacccaaacgcaaacccuaacgcaaacccaaaugcaaacccaaacgcgaacccaaaugcaaacccaaaugcaaacccaaacgcaaacccaaacgcaaacccaaacgcaaauccaaacgcaaauccaaacgcaaacccaaacgcaaacccaaacgcaaacccaaacgccaacccaggaggagguggaagcgaaccauccgacaaacacauaaaagaauaccuaaacaaaauacaaaacucacuaauaaaacccggcucagcaaacaaaccaaaagacgaacuagacuacgccaacgacauagaaaaaaaaauauguaaaauggaaaaaugcucauaaggacuagucccuguucccagagcccacuuuuuuuucuuuuuuugaaauaaaauagccugucuuucagaucucaaaggcucuuuucagagccaccaaaaaaaaaaaaaaaaaaaaaaaaaaaaaaaaaaaaaaaaaaaaaaaaaaaaaaaaaaaaaaaaaaaaaaaaaaaaaaaaaaaaaaaaaaaaaaaaaaaaagaauu

SEQ ID NO: 7728 - RNA, 1352 nt, Artificial Sequence
  mRNA Design a-3 (hSL-A100-N5) comprising derived and/or modified sequence from Pf(3D7)__XP_001351122.1__HsALB_Pf-CSP(19-325) (opt6)
aggagagggcgcuuggcuugcaaggacccugagcugcggcauugaagcacacccaacccaacucgacugaagucagccucacugaaccggaucugagaaucuucucucucugggcuugccagggcucuccgaaccuagcuagcauccucuucaauuccaacuagaaagcuuaccaugaaauggguaacauucauaucacuccuauuccuauucucaagcgcauacucauuauuccaagaauaccaaugcuacggaucaucaucuaacacaagaguacucaacgaacuaaacuacgacaacgcaggaacuaaucucuacaacgaacuagaaaugaacuacuacggaaaacaagaaaacugguauucacuaaaaaaaaacagccgaucauuaggagaaaacgacgacggcaacaacgaagacaacgaaaaacuacgaaaaccaaaacacaaaaaauuaaaacagccagccgacggaaacccagacccaaacgcaaacccaaacguagacccaaacgcaaacccaaacguagacccaaacgcaaacccaaacguagacccaaacgcaaacccaaacgcaaacccaaacgcaaauccaaacgcaaacccaaacgccaacccaaacgcaaacccaaacgcaaaccccaacgcaaacccaaacgcaaacccaaacgcaaacccaaaugccaacccaaacgcaaacccaaacgcaaacccaaacgcaaacccaaacgcaaacccaaaugcaaacccaaacgcaaacccaaacguagacccaaacgcaaacccaaaugcaaacccaaacgcaaaccccaacgcaaacccaaacgcaaacccaaacgcaaacccaaacgcaaacccaaacgccaacccaaacgcaaacccaaacgcaaacccaaacgcaaacccaaacgcaaacccaaacgcaaauccaaacgcaaacccaaacgcaaacccaaacgcaaacccaaacgcaaacccaaacgcaaacccaaauaaaaacaaucaaggaaacggacaaggacacaacaugccaaacgauccaaaucgcaacguagacgaaaacgcaaacgcaaacagcgcagucaaaaacaacaacaacgaagaaccaucagacaaacacauaaaagaauaccuaaauaaaauacaaaacuagggacuagucccuguucccagagcccacuuuuuuuucuuuuuuugaaauaaaauagccugucuuucagaucucaaaggcucuuuucagagccaccaaaaaaaaaaaaaaaaaaaaaaaaaaaaaaaaaaaaaaaaaaaaaaaaaaaaaaaaaaaaaaaaaaaaaaaaaaaaaaaaaaaaaaaaaaaaaaaaaaaaagaauu

SEQ ID NO: 7729 - RNA, 1529 nt, Artificial Sequence
  mRNA Design a-3 (hSL-A100-N5) comprising derived and/or modified sequence from Pf(3D7)__XP_001351122.1__HsALB_Pf-CSP(19-384) (opt6)
aggagagggcgcuuggcuugcaaggacccugagcugcggcauugaagcacacccaacccaacucgacugaagucagccucacugaaccggaucugagaaucuucucucucugggcuugccagggcucuccgaaccuagcuagcauccucuucaauuccaacuagaaagcuuaccaugaaauggguaaccuuuauaucacucuuauuccuauuuucaucagcauacucacucuuccaagaauaucaaugcuacggaucaucaucaaacacaagaguccucaaugaauuaaacuaugacaaugcaggaaccaaccuauacaacgaauuagaaaugaacuacuacggcaaacaagaaaacugguacucacucaaaaaaaacucaagauccuuaggagaaaaugaugacggaaacaacgaagacaacgaaaaacuccgaaaaccaaaacacaaaaaacuaaaacaacccgccgacggaaacccagaccccaacgcaaacccaaauguagaccccaacgcaaacccaaacguagacccaaacgcaaacccaaacguagacccaaacgcaaauccaaacgccaacccaaacgcaaacccaaacgccaacccaaacgcaaacccaaacgcaaacccaaacgcaaacccaaacgcaaacccaaaugcaaacccaaaugcaaacccaaacgcaaacccaaacgcaaacccaaacgcaaacccaaacgcaaacccaaaugcaaacccaaacgcaaacccaaacgcaaacccaaacguagacccaaaugcaaacccaaacgcaaacccaaacgcaaauccaaaugcaaauccaaacgcaaauccaaacgcaaacccaaacgcaaacccaaacgcaaacccaaacgcaaauccaaaugcaaacccaaacgcaaacccaaacgcaaacccaaacgcuaacccaaacgccaauccaaacgcaaacccaaacgcaaacccuaaugcaaacccaaacgccaacccaaauaaaaauaaccaaggaaacggacaaggacacaacaugccaaacgacccaaacagaaacgucgaugaaaacgcaaacgcaaauuccgcagucaaaaacaacaacaacgaagaaccaucagacaaacacauaaaagaauaccucaacaaaauacaaaacucccuaucaacagaauggucacccugcuccguuacaugcgguaacggcauacaaguaagaauaaaaccaggaucagcuaacaaacccaaagacgaacuagacuacgccaacgacauagaaaaaaaaauaugcaaaauggaaaaaugcuccucaguauucaacguaguaaacucaucauaaggacuagucccuguucccagagcccacuuuuuuuucuuuuuuugaaauaaaauagccugucuuucagaucucaaaggcucuuuucagagccaccaaaaaaaaaaaaaaaaaaaaaaaaaaaaaaaaaaaaaaaaaaaaaaaaaaaaaaaaaaaaaaaaaaaaaaaaaaaaaaaaaaaaaaaaaaaaaaaaaaaaagaauu

SEQ ID NO: 7730 - RNA, 1667 nt, Artificial Sequence
  mRNA Design a-3 (hSL-A100-N5) comprising derived and/or modified sequence from Pf(3D7)__XP_001351122.1__HsALB_Pf-CSP(19-384)_TM domain HA (opt6)
aggagagggcgcuuggcuugcaaggacccugagcugcggcauugaagcacacccaacccaacucgacugaagucagccucacugaaccggaucugagaaucuucucucucugggcuugccagggcucuccgaaccuagcuagcauccucuucaauuccaacuagaaagcuuaccaugaaauggguaacauuuauaucacuacuuuuccuauucucaucagcauacucacucuuccaagaauaucaaugcuauggauccucaucaaacacaagaguacucaacgaauuaaacuacgauaaugccggaacaaaccuauauaacgaacuagaaaugaacuacuacggaaaacaagaaaauugguacucauuaaaaaaaaacuccagaucccuuggagaaaacgacgauggaaacaacgaagauaacgaaaaauuaagaaaaccaaaacacaaaaaauugaaacaaccagcagacgguaacccagacccaaacgccaacccaaacguagacccaaacgcgaauccaaacgucgacccaaacgcaaaucccaacguagacccaaaugcaaauccaaaugccaauccaaacgcaaacccaaacgcaaacccaaaugcaaacccaaacgccaacccaaacgcaaauccaaacgcaaacccaaacgcaaacccaaacgccaacccaaacgccaaccccaaugcaaacccaaaugcaaacccaaacgcaaacccaaacgcaaauccaaacgcaaacccaaacgccaacccaaacguagacccaaacgcaaauccaaacgcaaacccaaacgccaauccaaacgcaaacccaaacgccaacccaaaugcaaaucccaacgcaaacccaaacgcaaauccaaaugcaaaccccaacgcaaauccaaacgcaaacccaaacgcaaauccaaacgcaaauccaaaugcaaacccaaacgcaaacccuaaugcaaacccaaacgcaaacccaaacgccaacccaaacaaaaacaaccaaggaaacggacaaggucacaauaugccaaaugacccaaaccgaaacguagacgaaaacgcaaaugccaauagcgcaguaaaaaacaauaacaacgaagaaccuucagauaaacacauaaaagaauaccuaaacaaaauacaaaacucccuaucaacagaauggucaccuuguucagucacauguggaaacggaauacaaguaagaauaaaaccaggaucagcaaacaaaccaaaagacgaacuagauuacgcaaacgauauagaaaaaaaaauauguaaaauggaaaaaugcuccucagucuucaacguagucaacaguuccaaacuagaaucaaccagaaucuaccaaauacuagcaauauauuccacaguagcaagcucacucguauuaguagucucccuaggagcaauaucauucuggaugugcucaaacggaagcuuacaaugccgaauauguauauaaggacuagucccuguucccagagcccacuuuuuuuucuuuuuuugaaauaaaauagccugucuuucagaucucaaaggcucuuuucagagccaccaaaaaaaaaaaaaaaaaaaaaaaaaaaaaaaaaaaaaaaaaaaaaaaaaaaaaaaaaaaaaaaaaaaaaaaaaaaaaaaaaaaaaaaaaaaaaaaaaaaaagaauu

SEQ ID NO: 7731 - RNA, 1379 nt, Artificial Sequence
  mRNA Design a-3 (hSL-A100-N5) comprising derived and/or modified sequence from Pf(3D7)__XP_001351122.1__HsALB_Pf-CSP(82-397) (opt6)
aggagagggcgcuuggcuugcaaggacccugagcugcggcauugaagcacacccaacccaacucgacugaagucagccucacugaaccggaucugagaaucuucucucucugggcuugccagggcucuccgaaccuagcuagcauccucuucaauuccaacuagaaagcuuaccaugaaauggguaacauucauaucacuacuauuccucuucaguucagccuauagcgauaacgaaaaacuaagaaaaccaaaacacaaaaaacucaaacaaccagcagacggaaacccagacccaaacgcaaacccaaacguagacccaaacgcaaacccaaacguagacccaaacgcaaauccaaacguagacccaaaugcaaaccccaacgcaaacccaaacgcaaacccaaacgcaaacccaaacgcaaacccaaaugcgaacccaaaugcaaauccaaacgcaaacccaaacgcaaacccaaacgcaaacccaaacgcuaacccaaacgcaaacccaaacgcaaacccaaaugcaaacccaaacgcaaacccaaacgcaaaccccaacgcaaacccaaacguagacccaaacgcaaacccaaacgcaaacccaaacgcaaacccaaacgccaacccaaaugccaacccaaacgcaaacccaaaugcaaaccccaacgcaaacccaaacgccaacccaaacgcaaacccaaacgcaaacccaaacgcaaaccccaaugcaaacccaaacgcaaacccaaaugcaaauccaaacgcaaacccaaacgcaaacccaaacgcaaacccaaacaaaaacaaccaaggaaacggacaaggacacaacaugccaaacgacccaaaucgaaacgucgaugaaaacgccaacgcaaacucagcaguaaaaaacaacaacaacgaagaaccaucugacaaacacauaaaagaauaccuaaacaaaauacaaaacucauuauccaccgaauggucaccauguucaguaacaugcggcaacggaauacaagucagaauaaaaccaggcucagcaaauaaaccaaaagacgaacuagacuacgcaaacgacauagaaaaaaaaauaugcaaaauggaaaaauguucaucagucuucaacguaguaaacucaucaauaggacucauaaugguacuaucauuccuauucuuaaacuaaggacuagucccuguucccagagcccacuuuuuuuucuuuuuuugaaauaaaauagccugucuuucagaucucaaaggcucuuuucagagccaccaaaaaaaaaaaaaaaaaaaaaaaaaaaaaaaaaaaaaaaaaaaaaaaaaaaaaaaaaaaaaaaaaaaaaaaaaaaaaaaaaaaaaaaaaaaaaaaaaaaaagaauu

SEQ ID NO: 7732 - RNA, 731 nt, Artificial Sequence
  mRNA Design a-3 (hSL-A100-N5) comprising derived and/or modified sequence from Pf(3D7)__XP_001351122.1__HsALB_Pf-CSP(93-192) (opt6)
aggagagggcgcuuggcuugcaaggacccugagcugcggcauugaagcacacccaacccaacucgacugaagucagccucacugaaccggaucugagaaucuucucucucugggcuugccagggcucuccgaaccuagcuagcauccucuucaauuccaacuagaaagcuuaccaugaaauggguaacauucaucucacuacuauuccuauucucaagcgcauacucaaaacuaaaacaaccagcagacggaaacccagacccaaacgcaaacccaaacguagacccaaacgcaaacccaaacguagacccaaacgcaaacccaaacguagacccaaacgcaaacccaaacgcaaacccaaacgcaaacccaaacgcaaacccaaacgcaaacccaaacgcaaacccaaacgcaaacccaaacgcaaacccaaacgcaaacccaaacgcaaacccaaacgcaaacccaaacgcaaacccaaacgcaaacccaaacgcaaacccaaacgcaaacccaaacgcaaacccauaaggacuagucccuguucccagagcccacuuuuuuuucuuuuuuugaaauaaaauagccugucuuucagaucucaaaggcucuuuucagagccaccaaaaaaaaaaaaaaaaaaaaaaaaaaaaaaaaaaaaaaaaaaaaaaaaaaaaaaaaaaaaaaaaaaaaaaaaaaaaaaaaaaaaaaaaaaaaaaaaaaaaagaauu

SEQ ID NO: 7733 - RNA, 971 nt, Artificial Sequence
  mRNA Design a-3 (hSL-A100-N5) comprising derived and/or modified sequence from Pf(3D7)__XP_001351122.1__HsALB_Pf-CSP(93-272) (opt6)
aggagagggcgcuuggcuugcaaggacccugagcugcggcauugaagcacacccaacccaacucgacugaagucagccucacugaaccggaucugagaaucuucucucucugggcuugccagggcucuccgaaccuagcuagcauccucuucaauuccaacuagaaagcuuaccaugaaaugggucacauucauaucacuccuauuccuauucucaagcgcauacucaaaacuaaaacaaccagcagacggaaacccagacccaaacgcaaacccaaacguagacccaaacgcaaacccaaacguagacccaaacgcaaacccaaacguagacccaaacgcaaacccaaacgcaaacccaaacgccaacccaaacgcaaacccaaacgcaaacccaaacgcaaacccaaacgcaaacccaaacgcaaacccaaacgcaaacccaaacgcaaacccaaacgcaaacccaaacgcaaacccaaacgcaaauccaaacgcaaacccaaacgccaacccaaacgcaaacccaaacgcaaacccaaacguagacccaaacgcaaacccaaacgcaaacccaaacgcaaacccaaacgcaaacccaaacgcaaacccaaacgcaaacccaaacgcaaacccaaacgcaaacccaaacgcaaauccaaacgcaaacccaaacgcaaacccaaacgcaaacccaaacgcaaacccaaacgcaaacccaaacgcaaacccaaacgcaaacccaaacgcaaacccaaacgcaaacccauaaggacuagucccuguucccagagcccacuuuuuuuucuuuuuuugaaauaaaauagccugucuuucagaucucaaaggcucuuuucagagccaccaaaaaaaaaaaaaaaaaaaaaaaaaaaaaaaaaaaaaaaaaaaaaaaaaaaaaaaaaaaaaaaaaaaaaaaaaaaaaaaaaaaaaaaaaaaaaaaaaaaaagaauu

SEQ ID NO: 7734 - RNA, 1346 nt, Artificial Sequence
  mRNA Design a-3 (hSL-A100-N5) comprising derived and/or modified sequence from Pf(3D7)__XP_001351122.1__HsALB_Pf-CSP(93-397) (opt6)
aggagagggcgcuuggcuugcaaggacccugagcugcggcauugaagcacacccaacccaacucgacugaagucagccucacugaaccggaucugagaaucuucucucucugggcuugccagggcucuccgaaccuagcuagcauccucuucaauuccaacuagaaagcuuaccaugaaauggguaacauucauaucacuccuauuccuauucucaucagcauacucaaaacuaaaacaacccgcagacggaaacccagacccaaacgccaacccaaacguagacccaaacgcaaacccgaacguagacccaaacgcaaaccccaacguagacccaaacgcaaacccaaaugcaaacccaaacgcaaacccaaacgcaaacccaaacgcaaacccaaacgcaaacccaaacgcaaacccaaacgcaaacccaaacgcaaacccaaacgcgaaucccaacgcaaauccaaacgcaaacccaaacgcaaauccaaacgcaaacccgaacgcaaacccaaacgcaaacccaaacgcaaacccaaacguagauccaaacgcaaauccaaacgcaaacccaaacgcaaauccaaacgcaaacccaaacgcaaacccaaacgcaaaccccaacgcaaacccaaacgcaaacccaaacgcaaacccaaacgcaaauccaaacgccaacccaaacgcaaacccaaacgcaaacccaaacgcgaacccaaacgcgaacccaaacgcaaacccaaacgcaaacccaaacgcaaacccaaacaaaaacaaccaagggaacggacaaggacacaacaugccaaacgauccaaacagaaacguagacgaaaacgcaaacgcaaacucagcaguaaaaaacaacaacaacgaagaaccaucagacaaacacauaaaagaauaccuaaacaaaauacaaaacucacucucaacagaauggucaccaugcaguguaacaugcggaaauggaauacaaguacguauaaaaccaggaucagcaaacaaaccaaaagacgaauuagacuacgccaacgauauagaaaaaaaaauaugcaaaauggaaaaaugcagcucagucuucaacguagucaacagcucaauaggacuaauaaugguccucucauucuuauuucuaaacugaggacuagucccuguucccagagcccacuuuuuuuucuuuuuuugaaauaaaauagccugucuuucagaucucaaaggcucuuuucagagccaccaaaaaaaaaaaaaaaaaaaaaaaaaaaaaaaaaaaaaaaaaaaaaaaaaaaaaaaaaaaaaaaaaaaaaaaaaaaaaaaaaaaaaaaaaaaaaaaaaaaaagaauu

SEQ ID NO: 7735 - RNA, 716 nt, Artificial Sequence
  mRNA Design a-3 (hSL-A100-N5) comprising derived and/or modified sequence from Pf(3D7)__XP_001351122.1__HsALB_Pf-CSP(98-192) (opt6)
aggagagggcgcuuggcuugcaaggacccugagcugcggcauugaagcacacccaacccaacucgacugaagucagccucacugaaccggaucugagaaucuucucucucugggcuugccagggcucuccgaaccuagcuagcauccucuucaauuccaacuagaaagcuuaccaugaaauggguaacauucauaagccuacuauuccuauucagcucagcauacagcgcagacggaaacccagacccaaacgcaaacccaaacguagacccaaacgcaaacccaaacguagacccaaacgcaaacccaaacguagacccaaacgcaaacccaaacgcaaacccaaacgcaaacccaaacgcaaacccaaacgcaaacccaaacgcaaacccaaacgcaaacccaaacgcaaacccaaacgcaaacccaaacgcaaacccaaacgcaaacccaaacgcaaacccaaacgcaaacccaaacgcaaacccaaacgcaaacccaaacgcaaacccauaaggacuagucccuguucccagagcccacuuuuuuuucuuuuuuugaaauaaaauagccugucuuucagaucucaaaggcucuuuucagagccaccaaaaaaaaaaaaaaaaaaaaaaaaaaaaaaaaaaaaaaaaaaaaaaaaaaaaaaaaaaaaaaaaaaaaaaaaaaaaaaaaaaaaaaaaaaaaaaaaaaaaagaauu

SEQ ID NO: 7736 - RNA, 956 nt, Artificial Sequence
  mRNA Design a-3 (hSL-A100-N5) comprising derived and/or modified sequence from Pf(3D7)__XP_001351122.1__HsALB_Pf-CSP(98-272) (opt6)
aggagagggcgcuuggcuugcaaggacccugagcugcggcauugaagcacacccaacccaacucgacugaagucagccucacugaaccggaucugagaaucuucucucucugggcuugccagggcucuccgaaccuagcuagcauccucuucaauuccaacuagaaagcuuaccaugaaauggguaacauucauaucacuacuauuccuauucagcucagccuacagcgcagacggaaacccagacccaaacgcaaacccaaacguagacccaaacgcaaacccaaacgucgacccaaacgcaaacccaaacguagacccaaacgcaaacccaaacgcaaacccaaacgcaaacccaaacgcaaacccaaacgcaaacccaaacgcaaacccaaacgcaaacccaaacgcaaacccaaacgcaaacccaaacgcaaacccaaacgcaaacccaaacgcaaacccaaacgcaaacccaaacgcaaacccaaacgcaaacccaaacgcaaacccaaacgcaaacccaaacguagacccaaaugcaaacccaaacgcaaacccaaacgcaaacccaaacgcaaacccaaacgcaaacccaaacgcaaacccaaacgcaaacccaaacgcaaacccaaacgcaaacccaaacgcaaacccaaacgcaaacccaaacgcgaacccaaacgcaaacccaaacgcaaacccaaacgcaaacccaaacgcaaacccaaaugcaaacccaaacgcaaacccauaaggacuagucccuguucccagagcccacuuuuuuuucuuuuuuugaaauaaaauagccugucuuucagaucucaaaggcucuuuucagagccaccaaaaaaaaaaaaaaaaaaaaaaaaaaaaaaaaaaaaaaaaaaaaaaaaaaaaaaaaaaaaaaaaaaaaaaaaaaaaaaaaaaaaaaaaaaaaaaaaaaaaagaauu

SEQ ID NO: 7737 - RNA, 1262 nt, Artificial Sequence
  mRNA Design a-3 (hSL-A100-N5) comprising derived and/or modified sequence from Pf(3D7)__XP_001351122.1__HsALB_Pf-CSP(98-374) (opt6)
aggagagggcgcuuggcuugcaaggacccugagcugcggcauugaagcacacccaacccaacucgacugaagucagccucacugaaccggaucugagaaucuucucucucugggcuugccagggcucuccgaaccuagcuagcauccucuucaauuccaacuagaaagcuuaccaugaaaugggucacauucauaucccuacuauuccuauucucaucagcauauucagcagauggaaacccagacccaaacgccaacccaaacguagacccaaacgcaaacccaaacguagacccaaacgcaaacccaaacguagacccaaacgcaaacccaaacgcaaacccaaacgcaaacccaaacgcaaacccaaacgcaaacccaaacgcaaacccaaacgcaaacccaaacgcaaacccaaacgcaaacccaaacgcaaacccaaacgcaaacccaaaugcaaauccaaacgcaaauccaaacgcaaacccaaacgccaacccaaacgcaaauccaaacgcaaacccaaacguagacccgaacgcaaacccgaacgcaaacccaaacgcaaacccaaaugcaaacccaaacgcaaacccaaacgccaacccaaacgcaaacccaaacgcaaacccaaaugcaaacccaaacgcaaacccaaacgccaacccaaacgcaaacccaaacgcaaacccaaacgcaaacccaaacgcaaacccaaaugcaaacccaaacgcaaacccaaacgcaaacccaaacaaaaacaaccaaggaaauggacaaggccacaacaugccaaacgacccaaacagaaacguagacgaaaacgcaaacgcaaacuccgcagucaaaaacaacaacaacgaagaaccauccgacaaacacauaaaagaauaccucaauaaaauacaaaacucacuaucaacagaaugguccccaugcucaguaacaugcggaaacggaauacaaguaagaauaaaaccaggauccgcaaacaaaccaaaagacgaacuagacuacgcaaacgauauagaaaaaaaaauaugcaaaauggaaaaaugcuaaggacuagucccuguucccagagcccacuuuuuuuucuuuuuuugaaauaaaauagccugucuuucagaucucaaaggcucuuuucagagccaccaaaaaaaaaaaaaaaaaaaaaaaaaaaaaaaaaaaaaaaaaaaaaaaaaaaaaaaaaaaaaaaaaaaaaaaaaaaaaaaaaaaaaaaaaaaaaaaaaaaaagaauu

SEQ ID NO: 7738 - RNA, 1331 nt, Artificial Sequence
  mRNA Design a-3 (hSL-A100-N5) comprising derived and/or modified sequence from Pf(3D7)__XP_001351122.1__HsALB_Pf-CSP(98-397) (opt6)
aggagagggcgcuuggcuugcaaggacccugagcugcggcauugaagcacacccaacccaacucgacugaagucagccucacugaaccggaucugagaaucuucucucucugggcuugccagggcucuccgaaccuagcuagcauccucuucaauuccaacuagaaagcuuaccaugaaauggguaaccuucauaucauuacuauuccuuuucagcucggcauacucagcagacggcaacccagacccaaacgcaaacccaaacgucgacccaaaugcgaacccaaacguagacccaaacgcaaacccaaacguagauccaaacgcaaacccaaacgcaaacccaaacgcaaacccaaacgcaaacccaaacgccaacccaaaugcaaacccaaacgcaaaccccaacgcaaacccaaacgcaaacccaaacgcaaacccaaacgcaaaucccaacgcaaauccaaacgcaaacccaaaugcaaacccaaacgccaacccaaacgcaaacccaaacgcaaaccccaaugucgacccaaacgcaaacccaaacgcaaacccaaacgcaaacccaaacgcaaauccaaacgcaaaccccaacgcaaacccaaacgcaaacccaaacgcaaacccaaacgcaaacccaaacgcaaacccaaacgcaaacccaaacgcaaacccaaacgcaaacccaaacgcaaacccaaacgcaaauccaaacgcaaacccaaacgcaaacccaaacgcaaacccaaacaaaaacaaccaaggaaauggacaaggacacaacaugccaaaugaccccaacagaaacgucgacgaaaacgccaacgcaaacagcgcaguaaaaaacaacaacaaugaagaaccaucagacaaacacauaaaagaauaccuaaacaaaauucaaaacucacuaucaaccgaaugguccccaugcucaguaacaugcggaaacgguauacaaguacgaauaaaaccaggaucagcaaacaaaccaaaagacgaacuagacuacgcaaacgacauagaaaaaaaaauaugcaaaauggaaaaaugcucaucaguuuuuaacguagucaauagcucaaucggacucauaaugguacuaucauuucucuuccuaaauuaaggacuagucccuguucccagagcccacuuuuuuuucuuuuuuugaaauaaaauagccugucuuucagaucucaaaggcucuuuucagagccaccaaaaaaaaaaaaaaaaaaaaaaaaaaaaaaaaaaaaaaaaaaaaaaaaaaaaaaaaaaaaaaaaaaaaaaaaaaaaaaaaaaaaaaaaaaaaaaaaaaaaagaauu

SEQ ID NO: 7739 - RNA, 1658 nt, Artificial Sequence
  mRNA Design a-3 (hSL-A100-N5) comprising derived and/or modified sequence from Pf(3D7)__XP_001351122.1__HsALB_Pf-CSP(199-377)_L(PVTN)_HBsAg (opt6)
aggagagggcgcuuggcuugcaaggacccugagcugcggcauugaagcacacccaacccaacucgacugaagucagccucacugaaccggaucugagaaucuucucucucugggcuugccagggcucuccgaaccuagcuagcauccucuucaauuccaacuagaaagcuuaccaugaaauggguaacauuuauauccuuacuauuucucuucuccucagcuuacucugacccaaacgcaaaucccaacgcaaacccaaaugcaaacccaaacgcaaauccaaacgcaaacccaaaugcuaaucccaacgcaaacccaaacgcaaaccccaaugccaacccaaacgcuaacccaaacgcaaacccaaacgccaacccaaaugcaaacccaaacgcaaacccaaacgcaaauccaaaugcaaacccaaacgcaaauccaaacgcaaacccaaacaaaaacaaccaaggaaacggacaaggccauaauaugccuaaugaccccaacagaaacguagacgaaaaugcuaacgccaacucagcaguaaaaaacaacaauaacgaagaaccaucagauaaacacauaaaagaauacuuaaacaaaauacaaaauucauuaucaacagaauggucaccaugcucagucaccugcggaaacgguauacaaguacgcauaaaaccaggcucagcaaauaaaccaaaagacgaacuagauuacgcuaacgacauagaaaaaaaaauaugcaaaauggaaaaaugcucaucaguaccaguaacaaauauggaaaacauaacaucaggauuccuaggcccacucuuaguacuacaagcaggauuuuuucuucuaacaagaaucuuaacuauaccccaaucacucgacucaugguggaccucacuaaauuuccucggaggaucuccaguaugccucggacaaaauucacaaucaccaacauccaaucacucacccaccuccugcccaccaaucugcccaggauacagauggaugugcuuacgaagauucauaauauuccuauucauacuacuucuaugcuuaauauuccuucucguccuacucgacuaucaaggaaugcucccuguaugcccacucauaccaggauccacaacaacuaacacaggacccuguaaaacaugcacaacacccgcccaaggaaauucaauguuccccucuugcugcugcacaaaaccaacagacggaaauugcacaugcauuccaauuccaucaucuugggcauuugcaaaauacuuaugggaaugggcaucaguccgauucucgugguuaucuuuacuaguaccauucguucaaugguuuguaggacuuucaccuacaguaugguuaucugcaauauggaugaugugguacuggggaccaucauuauacucaaucguaucaccauuuauaccacuacuacccauauuuuucugccuauggguauacauauaaggacuagucccuguucccagagcccacuuuuuuuucuuuuuuugaaauaaaauagccugucuuucagaucucaaaggcucuuuucagagccaccaaaaaaaaaaaaaaaaaaaaaaaaaaaaaaaaaaaaaaaaaaaaaaaaaaaaaaaaaaaaaaaaaaaaaaaaaaaaaaaaaaaaaaaaaaaaaaaaaaaaagaauu

SEQ ID NO: 7740 - RNA, 1568 nt, Artificial Sequence
  mRNA Design a-3 (hSL-A100-N5) comprising derived and/or modified sequence from Pf(3D7)__XP_001351122.1__Pf-CSP (opt11)
aggagagggcgcuuggcuugcaaggacccugagcugcggcauugaagcacacccaacccaacucgacugaagucagccucacugaaccggaucugagaaucuucucucucugggcuugccagggcucuccgaaccuagcuagcauccucuucaauuccaacuagaaagcuuaccaugaugcgaaagcuugcgauccucagcgucuccucauuccuauucguagaagcacuauuccaagaauaccaaugcuacggcucauccucaaacacacgcguacucaacgaacucaacuacgacaacgcaggaacaaaccucuacaacgaacuagagaugaacuacuacggcaaacaagaaaacugguacucucucaaaaaaaacucacgaagccucggcgagaacgacgacggaaacaacgaagacaacgaaaaacuccgcaaaccaaaacacaaaaaacucaaacaacccgccgacggaaacccagacccaaacgcaaacccaaacguagacccaaacgccaaccccaacguagaccccaacgccaacccuaacgucgaccccaaugcaaaccccaacgcgaacccaaacgcaaaccccaacgcaaaccccaacgcaaacccaaacgccaaccccaacgcaaacccaaacgcaaacccuaacgccaacccaaacgccaacccaaacgccaacccaaacgcaaacccgaacgccaaccccaacgccaacccaaacgcaaacccaaacgcaaaccccaacgccaaccccaacguagaccccaacgcaaaccccaacgcaaacccaaacgccaaccccaacgccaaccccaacgccaaccccaacgccaaccccaaugccaacccaaacgcgaaccccaacgcaaacccgaacgcaaacccaaacgcgaacccaaacgcgaacccaaacgccaaccccaacgccaaccccaacgcaaacccaaacgcgaacccaaacgcaaaccccaacgccaacccaaacaaaaacaaccaaggaaacggacaaggccacaacaugccaaacgaccccaaccgcaacguagacgaaaacgccaacgccaacuccgcugucaagaacaacaacaacgaagaaccauccgacaaacacauaaaagaauaccuaaacaaaauccaaaacucccucucaaccgaauggucccccugcuccgucacaugcggaaacggcauccaaguccgaaucaaaccaggcuccgccaacaaacccaaagacgaacuggacuacgccaacgacaucgaaaaaaaaaucugcaaaauggaaaaaugcucauccgucuucaacguggucaacuccuccaucggacuaauaaugguccucuccuuccuauuccuaaacuaaggacuagucccuguucccagagcccacuuuuuuuucuuuuuuugaaauaaaauagccugucuuucagaucucaaaggcucuuuucagagccaccaaaaaaaaaaaaaaaaaaaaaaaaaaaaaaaaaaaaaaaaaaaaaaaaaaaaaaaaaaaaaaaaaaaaaaaaaaaaaaaaaaaaaaaaaaaaaaaaaaaaagaauu

SEQ ID NO: 7741 - RNA, 1499 nt, Artificial Sequence
  mRNA Design a-3 (hSL-A100-N5) comprising derived and/or modified sequence from Pf(3D7)__XP_001351122.1__Pf-CSP(1-374) (opt11)
aggagagggcgcuuggcuugcaaggacccugagcugcggcauugaagcacacccaacccaacucgacugaagucagccucacugaaccggaucugagaaucuucucucucugggcuugccagggcucuccgaaccuagcuagcauccucuucaauuccaacuagaaagcuuaccaugaugcgcaaacucgcaauccucuccgucucaucguuccuauucguagaagcacucuuccaagaauaccaaugcuacggcucaagcuccaacacaagaguacucaacgaacucaacuacgacaaugccggaacaaaccuauacaacgagcuagaaaugaacuacuacggcaaacaagaaaacugguacucgcuaaaaaaaaacagcagaagccuaggugaaaacgacgacggaaacaacgaagacaacgaaaaacugcgcaaaccaaaacacaaaaaacuaaaacaacccgcagacggcaacccagacccaaacgcaaacccaaacguagaccccaacgccaacccaaacguagacccaaacgccaacccaaacguagacccaaacgcaaacccgaacgcaaacccaaacgcaaacccaaacgcaaacccaaacgcaaacccaaacgccaaccccaacgcaaauccaaacgcaaaccccaacgcaaaccccaacgccaacccaaacgcaaaccccaacgcgaacccaaacgccaaccccaacgccaacccaaacgcaaacccaaacgcaaacccaaacgccaaccccaacgucgacccaaacgccaacccaaacgcaaaccccaacgccaaccccaacgcaaacccaaacgccaacccgaacgcaaacccgaacgcaaacccaaacgcaaaccccaacgcaaaccccaacgcaaacccaaacgcaaaccccaacgccaaccccaacgccaaccccaacgcaaacccaaacgcaaacccgaacgcaaaccccaacgcaaaccccaacgccaaucccaacaaaaacaaccaaggcaacggacaaggacacaacaugccaaacgaccccaaccgcaacgucgacgaaaacgccaacgccaacuccgcggucaaaaacaacaacaacgaagagcccucagacaaacacauaaaagaauaccuaaacaaaauccaaaacucccucucgacagaauggucccccugcagcgucaccugcggaaacggcauacaaguacgaauaaaacccggcucagccaacaaaccaaaagacgaacuagacuacgccaacgacauagaaaaaaaaauaugcaaaauggaaaaaugcugaggacuagucccuguucccagagcccacuuuuuuuucuuuuuuugaaauaaaauagccugucuuucagaucucaaaggcucuuuucagagccaccaaaaaaaaaaaaaaaaaaaaaaaaaaaaaaaaaaaaaaaaaaaaaaaaaaaaaaaaaaaaaaaaaaaaaaaaaaaaaaaaaaaaaaaaaaaaaaaaaaaaagaauu

SEQ ID NO: 7742 - RNA, 1352 nt, Artificial Sequence
  mRNA Design a-3 (hSL-A100-N5) comprising derived and/or modified sequence from Pf(3D7)__XP_001351122.1__Pf-CSP(1-325) (opt11)
aggagagggcgcuuggcuugcaaggacccugagcugcggcauugaagcacacccaacccaacucgacugaagucagccucacugaaccggaucugagaaucuucucucucugggcuugccagggcucuccgaaccuagcuagcauccucuucaauuccaacuagaaagcuuaccaugaugcgcaaacucgcaauccuaucaguaagcucauuccuguucguagaagcacuauuccaagaauaccaaugcuacggcucauccucaaacacaagaguacuaaacgaacuaaacuacgacaacgccggaaccaaccuauacaacgaacucgaaaugaacuacuacggcaaacaagaaaacugguacucacuaaagaaaaacagcagaagccucggcgaaaacgacgacggcaacaacgaagacaacgagaaacugagaaaaccaaaacacaagaaacuaaaacaacccgcggacgggaacccagacccaaaugcaaacccaaacgucgacccaaacgcaaacccaaacguagacccaaacgcaaaccccaacguagaccccaacgcaaacccaaacgcaaacccaaacgcaaacccaaacgcaaacccaaacgcaaaccccaacgcaaacccaaacgcaaacccaaacgcaaaccccaacgccaacccaaacgccaaccccaacgcaaacccaaacgcaaacccaaacgcaaaccccaacgccaacccgaacgcaaacccaaacgcaaacccaaacgcaaaccccaacguagacccaaacgcaaacccaaacgccaaccccaacgcaaacccaaacgcaaacccgaacgcaaaccccaacgcaaaccccaacgcaaacccaaacgcaaaccccaacgcaaauccaaacgcaaacccaaacgcaaacccaaacgccaacccaaacgcaaaucccaacgcaaacccaaacgcaaaccccaacgcaaacccaaacgcaaacccaaacgcaaacccaaacaaaaacaaccaaggaaacggccaaggacacaacaugccaaacgacccaaaccgaaacguagacgaaaacgccaacgccaacagcgcagucaaaaacaacaauaaugaagaacccuccgacaaacacauaaaagaauaccuaaacaaaauccaaaacugaggacuagucccuguucccagagcccacuuuuuuuucuuuuuuugaaauaaaauagccugucuuucagaucucaaaggcucuuuucagagccaccaaaaaaaaaaaaaaaaaaaaaaaaaaaaaaaaaaaaaaaaaaaaaaaaaaaaaaaaaaaaaaaaaaaaaaaaaaaaaaaaaaaaaaaaaaaaaaaaaaaaagaauu

SEQ ID NO: 7743 - RNA, 1568 nt, Artificial Sequence
  mRNA Design a-3 (hSL-A100-N5) comprising derived and/or modified sequence from Pf(3D7)__XP_001351122.1__HsALB_Pf-CSP(19-397) (opt11)
aggagagggcgcuuggcuugcaaggacccugagcugcggcauugaagcacacccaacccaacucgacugaagucagccucacugaaccggaucugagaaucuucucucucugggcuugccagggcucuccgaaccuagcuagcauccucuucaauuccaacuagaaagcuuaccaugaaaugggucaccuucauaucccuccuauuccucuucucaucagccuacucccucuuccaggaauaccaaugcuacggaucguccucaaacacuagaguacucaaugaauuaaacuacgacaacgccggcaccaaccucuacaacgaacucgaaaugaacuacuacggaaaacaagaaaacugguacucacucaaaaaaaacucucgaucccucggcgaaaacgacgacggcaacaacgaagacaacgagaaacuacgcaaaccaaaacacaaaaaauuaaaacaacccgccgacggcaaccccgaccccaacgccaaccccaacguagaccccaacgcgaaccccaacgucgacccaaacgccaaccccaacguggaccccaacgccaacccaaacgccaaccccaacgccaacccaaacgcaaaccccaacgccaacccaaacgccaaccccaacgcaaacccaaacgcgaacccaaacgcaaacccaaacgccaacccaaacgcaaacccaaacgcgaacccaaacgccaacccaaacgccaaccccaacgcaaacccaaacgccaacccaaacgccaacccaaacguagacccaaacgcgaaccccaacgcuaacccaaacgcaaacccaaacgccaacccaaacgccaacccuaacgcaaacccaaacgccaaccccaacgccaaccccaacgccaaccccaacgcaaacccaaacgccaacccaaacgccaaccccaacgccaacccaaacgcaaacccaaacgcaaacccaaacgcaaaccccaacgccaacccaaacgccaacccaaacaaaaauaaccaaggcaaugggcaaggccacaacaugccaaacgaccccaaccgcaaugucgacgaaaacgccaacgccaacucugcaguaaaaaacaauaacaacgaagaacccucagacaaacacaucaaagaauaccucaacaagauccaaaauucccucuccacagaauggucccccugcagcguaaccugcggcaacggcauccaaguccgcaucaaacccggcuccgccaacaaaccgaaagacgaacuagacuacgccaacgacauagaaaaaaaaaucugcaaaauggaaaaaugcagcuccgucuucaacgucgucaacagcuccaucggccucaucaugguccucuccuuccuguuccucaacuaaggacuagucccuguucccagagcccacuuuuuuuucuuuuuuugaaauaaaauagccugucuuucagaucucaaaggcucuuuucagagccaccaaaaaaaaaaaaaaaaaaaaaaaaaaaaaaaaaaaaaaaaaaaaaaaaaaaaaaaaaaaaaaaaaaaaaaaaaaaaaaaaaaaaaaaaaaaaaaaaaaaaagaauu

SEQ ID NO: 7744 - RNA, 1586 nt, Artificial Sequence
  mRNA Design a-3 (hSL-A100-N5) comprising derived and/or modified sequence from Pf(3D7)__XP_001351122.1__HsIns-iso1_Pf-CSP(19-397) (opt11)
aggagagggcgcuuggcuugcaaggacccugagcugcggcauugaagcacacccaacccaacucgacugaagucagccucacugaaccggaucugagaaucuucucucucugggcuugccagggcucuccgaaccuagcuagcauccucuucaauuccaacuagaaagcuuaccauggcacucuggaugagacuccucccccuccucgcacuccucgcccuauggggcccagacccagcggcagcccucuuccaagaauaccaaugcuacggcucauccuccaacacccgaguccucaaugaacuaaacuacgacaacgccggcaccaaccuauacaacgaacuagaaaugaacuacuacggcaaacaagaaaacugguacucccucaaaaaaaauucacgcucccuaggugagaacgacgacggaaacaacgaagacaacgaaaaacuccgaaaacccaaacacaaaaaacuaaaacaaccagcagacggcaaccccgaccccaacgcaaaccccaacguagacccaaacgcgaaccccaacgucgauccaaacgccaacccaaacguugaccccaacgcgaaccccaacgcaaacccaaacgcaaacccuaacgcgaaccccaacgcaaaccccaacgccaaccccaacgccaaccccaacgccaacccaaacgcaaaccccaacgccaaccccaacgcaaacccaaacgcaaacccgaacgcaaaccccaacgccaacccaaacgcaaacccaaacgccaacccaaacgcaaaccccaacguagacccaaacgccaaucccaacgcgaaccccaacgcaaacccaaacgcgaacccaaacgccaacccaaacgcaaacccgaacgccaacccaaacgccaaccccaacgcaaaccccaacgcaaacccaaacgccaacccaaacgcaaacccaaacgcaaaccccaacgccaaccccaacgcaaacccaaaugccaaccccaacgccaaccccaacgcaaacccaaacaaaaacaaccaaggaaacggccaaggccacaacaugccgaacgaccccaaccgaaacgucgacgaaaacgcaaacgccaacucagcggucaaaaacaacaacaacgaagaacccucagacaaacacaucaaagaauaccuaaacaagauccagaacucucucucaacagaauggucccccugcuccguaacaugcggcaacggcauccaaguacgaaucaaaccgggaucagccaauaaacccaaagacgaacucgacuacgccaacgacaucgaaaaaaaaauaugcaaaauggaaaaaugcagcucagucuucaacguagucaacagcuccauaggccucaucaugguacucuccuuccuguuccuaaacuaaggacuagucccuguucccagagcccacuuuuuuuucuuuuuuugaaauaaaauagccugucuuucagaucucaaaggcucuuuucagagccaccaaaaaaaaaaaaaaaaaaaaaaaaaaaaaaaaaaaaaaaaaaaaaaaaaaaaaaaaaaaaaaaaaaaaaaaaaaaaaaaaaaaaaaaaaaaaaaaaaaaaagaauu

SEQ ID NO: 7745 - RNA, 1565 nt, Artificial Sequence
  mRNA Design a-3 (hSL-A100-N5) comprising derived and/or modified sequence from Pf(3D7)__XP_001351122.1__HsSPARC_Pf-CSP(19-397) (opt11)
aggagagggcgcuuggcuugcaaggacccugagcugcggcauugaagcacacccaacccaacucgacugaagucagccucacugaaccggaucugagaaucuucucucucugggcuugccagggcucuccgaaccuagcuagcauccucuucaauuccaacuagaaagcuuaccaugcgcgccuggauauucuuccuccuaugccuagcaggacgcgcccucgcacucuuccaagaauaccaaugcuacggcucauccucaaacacccgcguacuuaacgaacuaaacuacgacaacgccggaaccaaccuauacaacgaacucgaaaugaacuacuacgguaaacaagaaaacugguacucccucaaaaaaaacagccgaagccuaggagaaaacgacgacggaaacaacgaagacaacgaaaaacugcgcaaacccaaacacaaaaaacucaaacaacccgcagacgggaacccagacccaaacgcaaacccaaacguggacccaaacgccaacccuaacguagaccccaacgcaaaccccaacgucgacccuaaugcaaacccaaacgccaaccccaacgcgaacccaaacgcaaaccccaacgcuaacccgaacgccaaccccaacgccaacccgaacgcaaacccaaacgcaaacccaaacgcgaacccaaacgcaaacccaaacgccaaccccaacgcgaacccaaacgccaauccaaacgccaacccaaacgcaaacccaaacgccaaccccaacguagacccaaacgccaacccaaacgcgaacccaaacgcaaaccccaacgcaaacccaaacgcaaacccaaacgccaacccuaacgcaaacccaaacgccaaccccaacgccaacccaaacgcaaacccaaacgccaacccaaacgccaaccccaacgcaaacccgaacgcaaaccccaacgcaaacccaaacgcaaacccaaacgcgaacccgaacgccaacccaaauaagaacaaccaaggaaacggacaaggccacaacaugccaaacgaccccaaccgcaacgucgacgaaaacgcaaaugccaacuccgcagucaaaaacaacaauaacgaagaacccucggacaaacacaucaaagaauaccucaacaagauccaaaacucacucuccaccgaauggucacccugcagcguaacuugcggcaacggcauccaaguccgcauaaaaccaggcuccgcaaacaaacccaaagacgaacucgacuaugccaacgacaucgaaaaaaaaauaugcaaaauggaaaaaugcagcucagucuucaacguagucaacagcucuaucggacuaauaaugguacucuccuuccuauucuuaaacuaaggacuagucccuguucccagagcccacuuuuuuuucuuuuuuugaaauaaaauagccugucuuucagaucucaaaggcucuuuucagagccaccaaaaaaaaaaaaaaaaaaaaaaaaaaaaaaaaaaaaaaaaaaaaaaaaaaaaaaaaaaaaaaaaaaaaaaaaaaaaaaaaaaaaaaaaaaaaaaaaaaaaagaauu

SEQ ID NO: 7746 - RNA, 1568 nt, Artificial Sequence
  mRNA Design a-3 (hSL-A100-N5) comprising derived and/or modified sequence from Pf(3D7)__XP_001351122.1__IgE_Pf-CSP(19-397) (opt11)
aggagagggcgcuuggcuugcaaggacccugagcugcggcauugaagcacacccaacccaacucgacugaagucagccucacugaaccggaucugagaaucuucucucucugggcuugccagggcucuccgaaccuagcuagcauccucuucaauuccaacuagaaagcuuaccauggacuggacauggauccucuuccucgucgccgcggccacacgcguacacucacucuuccaagaauaucaaugcuacggcucaagcucgaacacgcgcguacucaacgaacuaaacuacgacaacgccggcaccaaccuauacaacgaacucgaaaugaacuacuacggcaaacaagaaaacugguacucacuuaagaaaaauucacgaucccucggagaaaacgacgaugggaacaacgaagacaacgaaaaacuacgcaaacccaaacacaagaaacuuaaacaacccgcagacggcaacccagacccaaacgcaaaccccaacguagaccccaacgcaaacccaaacguagacccaaacgccaacccaaacguagacccaaacgcgaacccaaacgccaacccaaacgccaaccccaacgcaaacccaaacgcaaauccaaacgcaaacccaaaugcaaacccgaacgccaauccaaacgcaaaccccaacgcaaacccaaacgcaaaccccaaugccaacccaaacgcaaaccccaacgcaaaccccaacgcaaaccccaacgcaaacccaaacgcgaacccaaacguagaccccaacgccaaccccaacgccaacccaaacgcaaacccaaacgccaacccaaacgccaaccccaacgcaaaccccaacgcaaacccgaacgcaaacccaaacgcaaacccaaacgcaaacccgaacgcaaacccuaacgcgaaccccaacgccaaccccaacgcaaacccaaacgcaaacccaaacgccaacccaaacgcaaacccaaacgcaaacccaaacaaaaacaaccaaggaaacgggcaaggacauaacaugccgaacgaccccaaccgcaacguagacgaaaacgccaacgccaacagcgcagucaaaaacaacaacaacgaagaacccuccgacaaacacaucaaagaauaccuaaacaaaauccagaacucacuauccaccgaauggucccccugcagcgugaccugcggcaacggcauacaaguccgcauaaaaccaggcuccgccaacaaacccaaagacgaacuagacuacgccaacgacauagaaaagaaaauaugcaaaauggaaaaaugcagcucagucuucaauguagucaacuccuccaucggacucauaaugguccuaucauuccucuuccuaaacuaaggacuagucccuguucccagagcccacuuuuuuuucuuuuuuugaaauaaaauagccugucuuucagaucucaaaggcucuuuucagagccaccaaaaaaaaaaaaaaaaaaaaaaaaaaaaaaaaaaaaaaaaaaaaaaaaaaaaaaaaaaaaaaaaaaaaaaaaaaaaaaaaaaaaaaaaaaaaaaaaaaaaagaauu

SEQ ID NO: 7747 - RNA, 1733 nt, Artificial Sequence
  mRNA Design a-3 (hSL-A100-N5) comprising derived and/or modified sequence from Pf(3D7)__XP_001351122.1__Pf-CSP_L(G4SG4)_TM domain HA (opt11)
aggagagggcgcuuggcuugcaaggacccugagcugcggcauugaagcacacccaacccaacucgacugaagucagccucacugaaccggaucugagaaucuucucucucugggcuugccagggcucuccgaaccuagcuagcauccucuucaauuccaacuagaaagcuuaccaugaugcgcaaacucgccauccucagcgucagcucguuccucuucgucgaagcacuauuccaagaauaccaguguuacggcucauccucaaacacacgcgugcucaacgaacuaaacuacgacaacgccggcaccaaccucuacaacgaacuagaaaugaacuauuacggcaagcaagaaaacugguacucacucaaaaaaaacagccgaagccuaggcgagaacgacgacgggaacaacgaagacaacgaaaaacuacgcaaacccaagcacaaaaaacugaaacaaccagccgacggaaauccagaccccaacgcaaacccgaacguagaccccaacgcgaaccccaacguggacccgaacgcaaacccgaacguagacccaaacgcaaacccaaacgcgaacccaaacgcaaacccaaacgcuaacccaaacgcaaaccccaacgccaaccccaacgcgaacccaaacgcaaacccaaacgcaaacccaaacgcaaacccgaacgcaaacccaaacgccaacccaaacgcgaacccaaacgccaacccaaacgcaaacccaaacgcaaacccaaacgcaaacccaaacguagacccgaacgccaacccgaaugcaaacccaaacgcaaacccgaacgcaaacccaaacgcgaacccgaacgccaacccaaacgcaaacccgaacgcaaaccccaacgccaacccaaacgcaaaccccaacgcaaaccccaacgcaaacccgaacgcaaacccaaacgcaaacccaaacgccaaccccaacgccaaccccaacgcaaacccgaacgccaacccaaacaaaaacaaccaaggcaacgggcaaggacacaacaugccaaacgaccccaaccgaaacgucgacgaaaacgccaacgccaacuccgcagucaaaaacaacaacaacgaagaacccucagacaaacacauaaaagaauaccucaacaaaauccaaaacucacucucaaccgaguggucacccugcagugugaccuguggcaacggaauacaaguacgcauaaaacccggaucagccaacaaaccgaaagacgaacuagacuacgccaacgacauagaaaaaaaaauaugcaaaauggagaaaugcagcucugucuucaacgucgucaacagcucaaucggacucauaaugguccucuccuuccuauuccucaacggcggagggggcucaggcggcggaggaaaauuagaauccaccagaaucuaucagauucucgccauauacagcacagucgcaagcucgcuuguccuugucguaucacuaggcgcaaucucauucuggaugugcuccaacggaagccugcaaugccgcauuugcauauaaggacuagucccuguucccagagcccacuuuuuuuucuuuuuuugaaauaaaauagccugucuuucagaucucaaaggcucuuuucagagccaccaaaaaaaaaaaaaaaaaaaaaaaaaaaaaaaaaaaaaaaaaaaaaaaaaaaaaaaaaaaaaaaaaaaaaaaaaaaaaaaaaaaaaaaaaaaaaaaaaaaaagaauu

SEQ ID NO: 7748 - RNA, 1607 nt, Artificial Sequence
  mRNA Design a-3 (hSL-A100-N5) comprising derived and/or modified sequence from Pf(3D7)__XP_001351122.1__Pf-CSP(199-377)_L(PVTN)_HBsAg (opt11)
aggagagggcgcuuggcuugcaaggacccugagcugcggcauugaagcacacccaacccaacucgacugaagucagccucacugaaccggaucugagaaucuucucucucugggcuugccagggcucuccgaaccuagcuagcauccucuucaauuccaacuagaaagcuuaccauggaccccaacgccaaccccaacgccaaccccaacgccaaucccaacgcuaaccccaacgccaaccccaacgcaaaccccaacgccaacccaaacgccaaccccaacgcaaaccccaacgccaaucccaaugccaaccccaacgccaaccccaacgcgaaccccaacgccaaccccaacgcaaacccaaacgccaaccccaacgccaaccccaacgccaaccccaacaaaaacaaccaaggcaacggccaaggccacaacaugcccaacgaccccaaccgcaacguagacgagaacgccaacgccaacagcgcugucaaaaacaacaacaacgaggaacccuccgacaaacacaucaaagaauaccuuaacaaaauccaaaacucucucuccaccgaguggucccccugcucagucacaugcggcaacggcauacaaguucguaucaaacccggcucagcaaacaaacccaaagacgaacucgacuacgcaaacgacauagaaaagaaaaucugcaaaauggaaaaauguucauccguccccgucaccaacauggaaaacaucacuuccggauuccucgguccccuacucguacuccaagccggcuucuuccuccucacccgcauccucaccaucccccaaucacuugacuccugguggaccucccucaacuuccucggcggcucccccgucugccuaggccaaaacagccaaucccccacuagcaaccacucccccacauccugcccacccaucugccccggauaucgauggaugugccuucgccgauucauaaucuuccucuucauccuccuacucugccucaucuuccuccucguccuucuagauuaccaaggcaugcuccccgucugcccccuuauccccggcuccaccaccacaaacaccggccccugcaaaaccugcacaacccccgcccaaggcaauagcauguuccccuccugcugcugcacuaaaccaacagacggcaacuguaccugcaucccaaucccaucaucaugggccuucgccaaauaccucugggaaugggcaucuguacgauucuccuggcucucccuucucguacccuucguccagugguucgucggccucucccccaccguauggcuauccgccaucuggaugaugugguacuggggccccucccuauacuccaucgucuccccauucauaccacuccuacccaucuucuucugccucugggucuacaucugaggacuagucccuguucccagagcccacuuuuuuuucuuuuuuugaaauaaaauagccugucuuucagaucucaaaggcucuuuucagagccaccaaaaaaaaaaaaaaaaaaaaaaaaaaaaaaaaaaaaaaaaaaaaaaaaaaaaaaaaaaaaaaaaaaaaaaaaaaaaaaaaaaaaaaaaaaaaaaaaaaaaagaauu

SEQ ID NO: 7749 - RNA, 1649 nt, Artificial Sequence
  mRNA Design a-3 (hSL-A100-N5) comprising derived and/or modified sequence from Pf(3D7)__XP_001351122.1__Pf-CSP(199-387)_L(PVTN)_HBsAg (opt11)
aggagagggcgcuuggcuugcaaggacccugagcugcggcauugaagcacacccaacccaacucgacugaagucagccucacugaaccggaucugagaaucuucucucucugggcuugccagggcucuccgaaccuagcuagcauccucuucaauuccaacuagaaagcuuaccaugauggcccccgaccccaacgcaaauccaaacgcaaaccccaacgccaacccuaacgcaaaccccaacgccaacccaaacgccaaucccaacgccaacccuaacgccaaccccaacgcaaaccccaacgccaaccccaacgccaacccuaacgcaaaccccaacgccaacccaaacgcaaaccccaacgccaaccccaacgccaaccccaacgcaaacccaaacgcaaaccccaacaaaaacaaccaaggaaacggacaaggccacaacaugccuaacgaccccaaucgcaacgucgacgaaaacgcaaacgccaacuccgccgucaaaaacaacaacaacgaagaacccucugacaaacacaucaaagaauaccucaacaagauccaaaacucccuauccaccgaauggucccccugcuccgucacuugcgguaauggcauccaaguccgcauaaaaccaggauccgcaaacaaacccaaagacgaacuagacuacgccaacgacauagaaaagaaaaucugcaaaauggaaaaaugcuccucagucuucaaugucguaaacuccuccauuggccuaggccccgucaccaacauggaaaacauuaccuccggauuccucgguccucuccucguccuccaagccggauucuuucuccucacacgaauccucacuaucccucaaucccuggacucaugguggaccucccucaacuuccugggcggcucccccgucugccucggccaaaacagccaauccccaaccuccaaucacucccccacaagcugcccucccauaugccccggcuaccgcuggaugugccuccgucgcuucaucauauuccucuucauacuucuccucugccucaucuuccuccuuguccugcuagacuaccaaggcaugcuccccgucugcccacucauccccgguuccaccacaacaaacaccggccccugcaaaacaugcaccacacccgcccaagguaacuccauguuccccuccugcugcugcaccaaaccaaccgacggcaacugcacuugcauucccauccccucauccugggccuucgccaaauaccucugggaaugggcauccguccguuucucauggcuaucucuccuaguaccauucguacaaugguucguuggccucucccccaccguauggcucuccgccauauggaugaugugguacuggggcccuucacuuuacuccaucgucucacccuucaucccacuccuacccaucuucuucugccuuuggguauacaucuaaggacuagucccuguucccagagcccacuuuuuuuucuuuuuuugaaauaaaauagccugucuuucagaucucaaaggcucuuuucagagccaccaaaaaaaaaaaaaaaaaaaaaaaaaaaaaaaaaaaaaaaaaaaaaaaaaaaaaaaaaaaaaaaaaaaaaaaaaaaaaaaaaaaaaaaaaaaaaaaaaaaaagaauu

SEQ ID NO: 7750 - RNA, 833 nt, Artificial Sequence
  mRNA Design a-3 (hSL-A100-N5) comprising derived and/or modified sequence from Pf(3D7)__XP_001351122.1__HsALB_Pf-CSP(19-152) (opt11)
aggagagggcgcuuggcuugcaaggacccugagcugcggcauugaagcacacccaacccaacucgacugaagucagccucacugaaccggaucugagaaucuucucucucugggcuugccagggcucuccgaaccuagcuagcauccucuucaauuccaacuagaaagcuuaccaugaaaugggucaccuucaucucccuccucuuccucuucuccagcgcauacucccucuuccaagaauaccaaugcuacggcuccuccuccaacacccgcguccucaacgaacucaacuacgacaacgccggcaccaaccucuacaacgaacucgaaaugaacuacuacggcaaacaagaaaacugguacucccucaaaaaaaacucccgcucccuaggcgaaaacgacgacggaaacaacgaagacaacgaaaaacuccgcaaacccaaacacaaaaaacucaaacaacccgccgacggaaaccccgaccccaacgccaacccaaacgucgaccccaacgccaaccccaacgucgaccccaacgccaaccccaacgucgaccccaacgccaaccccaacgcaaacccaaacgcaaacccaaacgccaaccccaacgccaaccccaacgccaaccccuaaggacuagucccuguucccagagcccacuuuuuuuucuuuuuuugaaauaaaauagccugucuuucagaucucaaaggcucuuuucagagccaccaaaaaaaaaaaaaaaaaaaaaaaaaaaaaaaaaaaaaaaaaaaaaaaaaaaaaaaaaaaaaaaaaaaaaaaaaaaaaaaaaaaaaaaaaaaaaaaaaaaaagaauu

SEQ ID NO: 7751 - RNA, 953 nt, Artificial Sequence
  mRNA Design a-3 (hSL-A100-N5) comprising derived and/or modified sequence from Pf(3D7)__XP_001351122.1__HsALB_Pf-CSP(19-192) (opt11)
aggagagggcgcuuggcuugcaaggacccugagcugcggcauugaagcacacccaacccaacucgacugaagucagccucacugaaccggaucugagaaucuucucucucugggcuugccagggcucuccgaaccuagcuagcauccucuucaauuccaacuagaaagcuuaccaugaaauggguaaccuucauaucccuccucuuccuauucucgagcgccuacucccucuuccaagaauaccaaugcuacggcucauccuccaacacccgcguccucaacgaacucaacuacgacaacgccggcaccaaccucuacaacgaacuagagaugaacuacuacggcaaacaagaaaacugguacucacucaaaaaaaacucccgaucccuaggagaaaacgacgacggcaacaacgaagacaacgaaaaacuacgaaaacccaaacacaaaaaacucaaacaacccgccgacggcaaccccgaccccaacgccaaccccaacgucgaccccaacgccaacccaaacguagaccccaacgccaaccccaacgucgacccaaacgccaaccccaacgccaaccccaacgccaacccaaacgcaaacccaaacgcaaacccaaacgccaacccaaacgccaaccccaacgccaaccccaacgcaaaccccaacgcaaaccccaacgccaacccaaacgcaaaccccaacgccaacccaaacgccaacccaaacgccaaccccaacgcaaaccccuaaggacuagucccuguucccagagcccacuuuuuuuucuuuuuuugaaauaaaauagccugucuuucagaucucaaaggcucuuuucagagccaccaaaaaaaaaaaaaaaaaaaaaaaaaaaaaaaaaaaaaaaaaaaaaaaaaaaaaaaaaaaaaaaaaaaaaaaaaaaaaaaaaaaaaaaaaaaaaaaaaaaaagaauu

SEQ ID NO: 7752 - RNA, 1193 nt, Artificial Sequence
  mRNA Design a-3 (hSL-A100-N5) comprising derived and/or modified sequence from Pf(3D7)__XP_001351122.1__HsALB_Pf-CSP(19-272) (opt11)
aggagagggcgcuuggcuugcaaggacccugagcugcggcauugaagcacacccaacccaacucgacugaagucagccucacugaaccggaucugagaaucuucucucucugggcuugccagggcucuccgaaccuagcuagcauccucuucaauuccaacuagaaagcuuaccaugaaauggguaaccuucaucucccuccucuuccuauucucaucagcauacucacucuuccaagaauaccaaugcuacggcucgagcucaaacacacgcguacucaacgaacugaacuacgacaacgccggaaccaaccucuacaaugaacucgaaaugaacuacuacggcaaacaagagaacugguacucacucaaaaaaaacagcagaagccucggagaaaacgacgacggaaacaacgaagacaacgaaaaacuccgcaaacccaagcacaaaaaacuaaaacaacccgcagacggaaaccccgaccccaacgcaaacccgaacgucgacccaaacgccaacccaaacguagaccccaacgcgaacccaaacguagacccaaacgccaacccaaacgcaaaccccaacgccaaccccaacgcaaacccaaacgccaacccaaacgcaaaccccaaugcaaaccccaacgcaaacccaaacgccaaccccaacgcaaacccaaacgcaaacccaaacgcaaacccaaacgcaaacccaaacgcgaacccaaacgcaaacccaaacgcaaacccgaacgcaaacccaaacguagacccaaacgcaaaccccaacgccaacccaaacgcaaacccaaacgcaaacccaaacgcaaacccaaacgcgaacccaaacgccaacccaaacgcaaacccaaacgcaaacccaaacgcaaacccaaacgcaaacccaaacgcaaacccaaacgcaaacccgaacgcgaacccaaacgcaaacccaaacgcgaacccgaacgcaaaccccaacgcaaacccauaaggacuagucccuguucccagagcccacuuuuuuuucuuuuuuugaaauaaaauagccugucuuucagaucucaaaggcucuuuucagagccaccaaaaaaaaaaaaaaaaaaaaaaaaaaaaaaaaaaaaaaaaaaaaaaaaaaaaaaaaaaaaaaaaaaaaaaaaaaaaaaaaaaaaaaaaaaaaaaaaaaaaagaauu

SEQ ID NO: 7753 - RNA, 1355 nt, Artificial Sequence
  mRNA Design a-3 (hSL-A100-N5) comprising derived and/or modified sequence from Pf(3D7)__XP_001351122.1__HsALB_Pf-CSP(19-272)_L(AAY)_Pf-CSP(310-3 27)_L(AAY)_Pf-CSP(346-375) (opt11)
aggagagggcgcuuggcuugcaaggacccugagcugcggcauugaagcacacccaacccaacucgacugaagucagccucacugaaccggaucugagaaucuucucucucugggcuugccagggcucuccgaaccuagcuagcauccucuucaauuccaacuagaaagcuuaccaugaaaugggucaccuucaucucacuccuauuccuauucuccuccgcauacucacucuuccaagaauaccagugcuacggaucaagcuccaacacacgcguacuaaacgaacugaacuacgacaacgccggaaccaaccucuacaacgaacucgaaaugaauuacuacggcaaacaagagaacugguacucacucaaaaaaaacagcagaucccuaggcgaaaacgacgacggaaacaacgaagacaacgaaaaacuacgcaaacccaaacacaaaaaacuaaaacaacccgcagacggaaacccagauccaaacgcaaacccaaacguagacccaaacgccaacccaaacguagacccaaacgcaaacccaaacguagaccccaacgcaaacccaaacgcaaacccgaacgccaacccaaacgcaaaccccaacgccaacccaaacgcaaacccaaacgcaaacccaaacgcaaacccaaacgccaaccccaacgcgaacccaaacgcaaacccuaacgccaacccaaacgcaaacccaaacgcaaacccgaacgcaaacccaaacgcaaacccaaacgcaaacccgaacguagacccaaacgcaaacccaaacgcaaacccaaacgcaaacccaaacgccaacccaaacgccaacccaaacgcaaaccccaacgcaaaccccaacgcgaacccaaacgccaaccccaacgcaaacccaaacgccaacccaaacgccaacccgaacgcaaacccaaacgccaacccaaacgccaacccgaacgcaaacccaaacgccaacccaaacgccaacccagccgcguacgaacccucagauaaacacauaaaagaauaccucaacaaaauccaaaacucacuagcagccuacaucaaaccaggauccgccaacaaacccaaggacgaacucgacuacgcaaacgacaucgaaaaaaaaaucugcaaaauggaaaaaugcucaugaggacuagucccuguucccagagcccacuuuuuuuucuuuuuuugaaauaaaauagccugucuuucagaucucaaaggcucuuuucagagccaccaaaaaaaaaaaaaaaaaaaaaaaaaaaaaaaaaaaaaaaaaaaaaaaaaaaaaaaaaaaaaaaaaaaaaaaaaaaaaaaaaaaaaaaaaaaaaaaaaaaaagaauu

SEQ ID NO: 7754 - RNA, 1316 nt, Artificial Sequence
  mRNA Design a-3 (hSL-A100-N5) comprising derived and/or modified sequence from Pf(3D7)__XP_001351122.1__HsALB_Pf-CSP(19-272)_L(AAY)_Pf-CSP(346-3 65)_L(AAY)_P2 (opt11)
aggagagggcgcuuggcuugcaaggacccugagcugcggcauugaagcacacccaacccaacucgacugaagucagccucacugaaccggaucugagaaucuucucucucugggcuugccagggcucuccgaaccuagcuagcauccucuucaauuccaacuagaaagcuuaccaugaaaugggucaccuucaucucacuccuauuccuauucucgagcgcauacucacucuuccaagaauaccaaugcuauggcuccagcucaaacacacgcguccuaaacgaacucaacuacgacaacgccggaacaaaccucuacaacgaacucgaaaugaacuacuacggcaaacaagaaaacugguacucgcucaaaaaaaacucccgaagucuaggcgaaaacgacgacggaaacaacgaagacaacgaaaaacuacgcaaacccaaacacaaaaaacuaaaacaacccgcagacggaaaccccgacccaaacgcaaaccccaacguagacccaaacgcaaaccccaacguagacccaaacgcaaacccgaacguagacccaaacgccaacccaaacgccaaccccaacgcaaacccaaacgccaaccccaacgcaaacccaaacgcaaacccaaacgcaaacccaaacgcaaacccaaacgccaaccccaacgccaacccaaacgccaaccccaacgcgaaccccaacgcgaacccaaacgccaacccaaacgcaaaccccaacgcaaacccaaacgcaaacccaaacgucgacccaaacgcaaacccaaacgcaaacccgaacgcaaacccaaacgcaaaccccaacgccaacccaaacgcgaacccaaacgccaacccaaacgccaacccaaacgcaaacccaaacgccaacccaaacgcaaacccaaacgcaaaccccaacgcaaaccccaacgcaaacccaaacgccaaccccaacgcaaaccccaacgcaaacccaaacgccaacccagccgcauacauaaaacccggcuccgccaacaaaccaaaagacgaacuagacuacgccaacgacauagaagcagccuaccaauacaucaaagccaacagcaaauucauaggaauaaccgagcuauaaggacuagucccuguucccagagcccacuuuuuuuucuuuuuuugaaauaaaauagccugucuuucagaucucaaaggcucuuuucagagccaccaaaaaaaaaaaaaaaaaaaaaaaaaaaaaaaaaaaaaaaaaaaaaaaaaaaaaaaaaaaaaaaaaaaaaaaaaaaaaaaaaaaaaaaaaaaaaaaaaaaaagaauu

SEQ ID NO: 7755 - RNA, 1310 nt, Artificial Sequence
  mRNA Design a-3 (hSL-A100-N5) comprising derived and/or modified sequence from Pf(3D7)__XP_001351122.1__HsALB_Pf-CSP(19-272)_L(AAY)_Pf-CSP(346-3 65)_L(AAY)_PADRE (opt11)
aggagagggcgcuuggcuugcaaggacccugagcugcggcauugaagcacacccaacccaacucgacugaagucagccucacugaaccggaucugagaaucuucucucucugggcuugccagggcucuccgaaccuagcuagcauccucuucaauuccaacuagaaagcuuaccaugaaauggguaaccuucaucucgcuacuguuccucuucucauccgcauacucccucuuccaagaauaccaaugcuacggcucauccucaaacacacgaguacuaaacgaacucaacuacgacaacgccggaaccaaccuauacaacgaacucgaaaugaacuacuacggcaaacaagaaaacugguacucacucaaaaaaaacucccgaucccucggcgaaaacgacgacggaaacaacgaagacaacgaaaaacugagaaaacccaaacacaaaaaacuaaaacaaccagccgacggcaacccagaccccaacgcaaaccccaacguagacccaaacgccaaccccaacguagacccaaacgcaaacccaaacguagaccccaacgccaacccaaacgccaacccaaacgccaaccccaacgcaaacccaaacgcaaacccaaacgcaaacccaaacgccaacccaaacgcaaacccaaacgccaacccgaacgcaaaccccaacgcaaacccaaacgcaaaccccaacgccaacccaaacgcaaacccaaacgcaaaccccaacgcaaacccaaaugcgaacccaaacguggacccgaacgcaaaccccaacgccaacccaaacgcaaaccccaacgccaaccccaacgccaaccccaacgcaaaccccaacgccaaccccaacgccaacccaaacgccaacccaaacgcgaacccaaacgcaaaccccaacgcaaacccaaacgcaaacccaaacgcaaacccaaacgcaaaccccaacgcaaacccaaacgcaaacccaaacgcaaaccccgcagccuacauuaaaccaggcuccgccaacaaacccaaagacgaacucgacuacgccaacgacauagaagcagccuacgccaaauucguagccgcauggacacucaaagccgcagccuaaggacuagucccuguucccagagcccacuuuuuuuucuuuuuuugaaauaaaauagccugucuuucagaucucaaaggcucuuuucagagccaccaaaaaaaaaaaaaaaaaaaaaaaaaaaaaaaaaaaaaaaaaaaaaaaaaaaaaaaaaaaaaaaaaaaaaaaaaaaaaaaaaaaaaaaaaaaaaaaaaaaaagaauu

SEQ ID NO: 7756 - RNA, 1367 nt, Artificial Sequence
  mRNA Design a-3 (hSL-A100-N5) comprising derived and/or modified sequence from Pf(3D7)__XP_001351122.1__HsALB_Pf-CSP(19-272)_L(G4S)_Pf-CSP(310-3 27)_L(G4S)_Pf-CSP(346-375) (opt11)
aggagagggcgcuuggcuugcaaggacccugagcugcggcauugaagcacacccaacccaacucgacugaagucagccucacugaaccggaucugagaaucuucucucucugggcuugccagggcucuccgaaccuagcuagcauccucuucaauuccaacuagaaagcuuaccaugaaaugggucaccuucaucucccuacuauuccucuucucaucagccuacucacucuuccaagaguaccaaugcuacggcucaagcucaaacacacgcguacucaacgaacuaaacuacgacaacgcaggcaccaaccucuacaacgaacucgagaugaacuacuacggcaaacaagaaaacugguacucacucaaaaaaaacucccgcagccucggcgaaaacgacgacggcaacaacgaagauaacgagaaacuacgcaaacccaaacacaaaaaacuaaaacaacccgccgacggaaacccagacccaaacgccaacccaaacguagacccaaacgcaaacccaaacguagacccaaacgccaaccccaacguagacccaaacgccaacccaaacgccaacccaaacgcaaacccaaacgcaaacccaaacgcgaacccaaacgcaaaccccaacgccaacccaaacgcaaacccaaacgccaaccccaacgcaaacccaaacgcaaaccccaacgcaaacccaaacgccaaccccaacgcaaaccccaacgcaaacccaaacgcaaacccaaacgcaaacccaaacgucgacccaaacgcaaaccccaacgcaaacccaaacgcaaacccaaacgccaacccaaacgcaaacccaaacgccaacccaaacgcaaaccccaacgcaaaccccaacgccaacccaaacgcaaaccccaacgcgaacccaaacgcaaacccaaacgcaaacccaaacgcaaaccccaacgcaaaccccaacgcaaacccaaacgcaaacccaaacgcaaacccaggcggcggcggaagcgaacccucggacaaacacauaaaagaauaccucaacaaaauccaaaacucccucggaggcggaggcuccaucaaacccggaagcgcaaacaaacccaaagacgaacucgacuacgcaaacgacaucgagaaaaaaauaugcaaaauggaaaaaugcucauaaggacuagucccuguucccagagcccacuuuuuuuucuuuuuuugaaauaaaauagccugucuuucagaucucaaaggcucuuuucagagccaccaaaaaaaaaaaaaaaaaaaaaaaaaaaaaaaaaaaaaaaaaaaaaaaaaaaaaaaaaaaaaaaaaaaaaaaaaaaaaaaaaaaaaaaaaaaaaaaaaaaaagaauu

SEQ ID NO: 7757 - RNA, 1352 nt, Artificial Sequence
  mRNA Design a-3 (hSL-A100-N5) comprising derived and/or modified sequence from Pf(3D7)__XP_001351122.1__HsALB_Pf-CSP(19-272)_L(G4S)_Pf-CSP(310-3 27)_Pf-CSP(346-375) (opt11)
aggagagggcgcuuggcuugcaaggacccugagcugcggcauugaagcacacccaacccaacucgacugaagucagccucacugaaccggaucugagaaucuucucucucugggcuugccagggcucuccgaaccuagcuagcauccucuucaauuccaacuagaaagcuuaccaugaaauggguaaccuucaucucacuccuauuccucuucuccuccgcauacucgcucuuccaagaauaccaaugcuacggcucaagcucaaacacccgcguccucaacgaacucaacuacgacaacgccgguaccaaccuauacaacgaacucgaaaugaacuacuacggcaaacaagaaaacugguacucacucaaaaaaaacuccaggucccuaggagaaaacgacgauggcaacaacgaagacaacgaaaaacuccgaaagccaaaacacaaaaaacuaaaacagcccgcagacggcaacccagacccaaacgcaaacccaaacguagacccaaacgcgaaccccaacguagacccaaacgcaaacccaaacguagacccaaacgcaaaccccaacgcaaacccaaacgcaaaccccaacgcaaaccccaacgcaaacccaaacgcaaacccaaacgcaaacccaaacgcaaacccaaacgcaaaccccaacgccaaccccaacgcaaacccaaacgcaaacccaaacgcaaacccaaacgcaaacccaaacgcaaaccccaacgccaacccaaacgcaaacccaaacguagacccaaacgcaaacccaaacgcaaacccaaacgcaaaccccaacgccaacccaaacgcaaacccaaacgcaaacccaaacgcaaacccaaacgcaaauccaaacgcuaacccaaacgcaaacccgaacgcaaaccccaaugcaaaccccaacgcaaacccaaacgccaacccaaacgcaaacccaaacgcgaacccaaacgcaaacccaaacgcaaacccaggcggaggcggauccgaacccuccgacaaacacauaaaagaauaccuaaacaaaauccaaaacucucucauaaaacccggaucagccaacaaaccaaaagacgaacuagacuacgccaaugacauagaaaaaaaaauaugcaagauggaaaaaugcagcuaaggacuagucccuguucccagagcccacuuuuuuuucuuuuuuugaaauaaaauagccugucuuucagaucucaaaggcucuuuucagagccaccaaaaaaaaaaaaaaaaaaaaaaaaaaaaaaaaaaaaaaaaaaaaaaaaaaaaaaaaaaaaaaaaaaaaaaaaaaaaaaaaaaaaaaaaaaaaaaaaaaaaagaauu

SEQ ID NO: 7758 - RNA, 1352 nt, Artificial Sequence
  mRNA Design a-3 (hSL-A100-N5) comprising derived and/or modified sequence from Pf(3D7)__XP_001351122.1__HsALB_Pf-CSP(19-325) (opt11)
aggagagggcgcuuggcuugcaaggacccugagcugcggcauugaagcacacccaacccaacucgacugaagucagccucacugaaccggaucugagaaucuucucucucugggcuugccagggcucuccgaaccuagcuagcauccucuucaauuccaacuagaaagcuuaccaugaaauggguaaccuucaucucacuccuguuccuauucucauccgcauacucacucuuccaagaauaccaaugcuacggcucgucuucaaacacccgcguacucaacgaacucaacuacgacaacgccggaaccaaccucuacaacgaacucgaaaugaacuacuacggcaaacaagaaaacugguacucacucaaaaaaaacagccgaagccuaggcgaaaacgacgacggaaacaaugaagacaacgaaaaacuccgcaaacccaaacacaaaaaacucaaacaaccagcagacggaaaccccgacccgaacgcaaacccaaacguagacccaaacgcaaacccaaacguagacccaaacgcgaacccaaacguagaccccaacgcaaacccaaacgcaaacccaaacgcaaacccaaacgccaaccccaacgccaacccaaacgccaacccaaacgcaaacccgaacgcgaacccaaacgcaaaccccaacgcaaacccaaacgcaaacccaaacgcgaacccaaacgccaacccaaacgccaacccaaacgcaaacccaaacgccaacccaaacgcaaaccccaacguggaccccaacgcaaacccaaacgcaaacccaaacgccaaccccaacgcaaacccaaacgcaaacccuaacgcaaacccaaacgcaaaccccaacgcgaacccaaacgcaaacccaaacgcaaacccaaacgcaaaccccaacgcaaacccaaacgccaacccaaacgccaacccaaacgcgaauccaaacgcaaaccccaacgcaaacccaaacgcaaacccgaacaaaaacaaccaagggaacggacaaggacacaacaugccaaacgaccccaaccgcaacgucgacgaaaacgccaacgccaacuccgcaguaaaaaacaacaacaacgaagaacccuccgacaaacacauaaaagaauaccucaacaagauacaaaacuagggacuagucccuguucccagagcccacuuuuuuuucuuuuuuugaaauaaaauagccugucuuucagaucucaaaggcucuuuucagagccaccaaaaaaaaaaaaaaaaaaaaaaaaaaaaaaaaaaaaaaaaaaaaaaaaaaaaaaaaaaaaaaaaaaaaaaaaaaaaaaaaaaaaaaaaaaaaaaaaaaaaagaauu

SEQ ID NO: 7759 - RNA, 1529 nt, Artificial Sequence
  mRNA Design a-3 (hSL-A100-N5) comprising derived and/or modified sequence from Pf(3D7)__XP_001351122.1__HsALB_Pf-CSP(19-384) (opt11)
aggagagggcgcuuggcuugcaaggacccugagcugcggcauugaagcacacccaacccaacucgacugaagucagccucacugaaccggaucugagaaucuucucucucugggcuugccagggcucuccgaaccuagcuagcauccucuucaauuccaacuagaaagcuuaccaugaaauggguaaccuucaucucacuacucuuccuauucucaagcgcguacucacucuuccaagaauaccaaugcuacggcucgagcucaaacacccgcguucucaacgaacuaaacuacgacaacgccggaaccaaccuauacaacgaacuugaaaugaacuacuacggcaaacaagaaaacugguacucgcucaaaaaaaacuccaggagccuaggcgaaaacgacgacggaaacaacgaagacaacgagaaacuaagaaaacccaaacacaaaaaacucaaacagcccgcggacggaaaccccgacccaaacgcaaaccccaacguagacccgaacgccaacccaaacguagacccaaacgcaaacccaaacguagaccccaacgcaaacccgaacgccaacccaaacgcaaacccaaaugcgaaccccaacgcgaacccaaacgcaaacccgaacgcaaaccccaacgccaacccaaacgcaaacccaaacgcaaaccccaacgcaaacccaaacgcgaacccaaacgcaaacccaaacgcgaacccgaacgcaaacccaaacgcaaacccgaacgcaaacccaaacguagacccaaacgccaacccaaacgcaaacccaaacgcaaaccccaacgcaaacccaaacgcaaacccgaacgcaaacccaaacgcaaacccaaacgcgaacccaaacgcaaaccccaacgcaaacccaaacgcaaacccuaacgcaaacccgaacgcaaacccaaacgccaacccaaacgcgaaccccaacgcaaacccaaacgccaacccaaacgccaacccgaacaaaaacaaccaaggaaacggacaaggacacaacaugccaaacgaccccaaccgaaacgucgacgaaaacgcaaacgccaacagugccgucaaaaacaacaacaaugaagaacccucagacaaacacauaaaagaauaccuaaacaaaauccagaacucgcucucaaccgaauggucacccugcagcgucaccugcggcaacggaauacaaguacgcaucaaaccaggcucggccaacaaaccaaaagacgaauuagacuacgcaaacgacaucgaaaaaaaaauaugcaaaauggaaaaaugcagcucagucuucaacguagucaauagcucauaaggacuagucccuguucccagagcccacuuuuuuuucuuuuuuugaaauaaaauagccugucuuucagaucucaaaggcucuuuucagagccaccaaaaaaaaaaaaaaaaaaaaaaaaaaaaaaaaaaaaaaaaaaaaaaaaaaaaaaaaaaaaaaaaaaaaaaaaaaaaaaaaaaaaaaaaaaaaaaaaaaaaagaauu

SEQ ID NO: 7760 - RNA, 1667 nt, Artificial Sequence
  mRNA Design a-3 (hSL-A100-N5) comprising derived and/or modified sequence from Pf(3D7)__XP_001351122.1__HsALB_Pf-CSP(19-384)_TM domain HA (opt11)
aggagagggcgcuuggcuugcaaggacccugagcugcggcauugaagcacacccaacccaacucgacugaagucagccucacugaaccggaucugagaaucuucucucucugggcuugccagggcucuccgaaccuagcuagcauccucuucaauuccaacuagaaagcuuaccaugaagugggucaccuucaucucccuccuauuccucuucucuagcgcguacucacucuuccaagaauaccaaugcuacggauccagcucaaacacacgcguccucaaugaacugaacuacgauaacgccggaaccaaccucuacaacgaacucgaaaugaacuacuacggcaaacaagaaaacugguacucacuaaagaaaaauagcaggucccucggcgaaaacgacgacgggaacaacgaagauaacgaaaaacuacgcaaacccaagcacaagaaacuaaaacagccagcagacggaaacccagaccccaacgccaacccaaacgucgaccccaacgcaaacccaaacguagauccgaacgcaaacccaaacgucgauccaaacgcaaacccaaacgcaaacccaaacgcuaaccccaacgccaacccaaacgcaaacccgaacgcaaaccccaacgcgaacccgaacgcaaacccaaacgcaaacccaaacgccaacccaaacgcaaacccaaacgcaaacccaaacgccaacccaaacgcaaaccccaacgcgaaccccaacgcaaaccccaacgcaaacccaaacgucgacccaaacgcaaaccccaacgcaaaccccaacgcaaaccccaaugcaaacccaaacgcgaaccccaacgcaaacccaaacgcgaacccaaaugcaaaccccaacgccaaccccaacgccaacccgaacgcaaacccaaacgccaacccaaacgccaacccaaacgcaaaucccaacgccaacccaaacgcgaacccgaacgcaaacccaaacgcaaacccgaacaaaaacaaccaaggaaacggucaaggacacaacaugccaaacgaccccaaccgcaacgucgacgaaaacgccaaugccaacagcgccgucaaaaacaacaacaacgaagaacccucagacaaacacaucaaagaguaccuaaacaagauccaaaacucccucuccaccgaauggucccccugcagcguaaccugcggaaacggcauccaaguccgcauaaaaccaggcucagccaacaaaccaaaagaugaacucgacuacgcaaacgacauagaaaagaaaaucugcaaaauggaaaaaugcagcuccguauucaacgugguuaacuccucaaaacuagaauccacccgcaucuaccaaauacucgcaauauacagcacaguagccagcucacucguccuagucgucucccucggagccaucagcuucuggaugugcuccaacggaaguuuacaaugucgcauaugcauauaaggacuagucccuguucccagagcccacuuuuuuuucuuuuuuugaaauaaaauagccugucuuucagaucucaaaggcucuuuucagagccaccaaaaaaaaaaaaaaaaaaaaaaaaaaaaaaaaaaaaaaaaaaaaaaaaaaaaaaaaaaaaaaaaaaaaaaaaaaaaaaaaaaaaaaaaaaaaaaaaaaaaagaauu

SEQ ID NO: 7761 - RNA, 1379 nt, Artificial Sequence
  mRNA Design a-3 (hSL-A100-N5) comprising derived and/or modified sequence from Pf(3D7)__XP_001351122.1__HsALB_Pf-CSP(82-397) (opt11)
aggagagggcgcuuggcuugcaaggacccugagcugcggcauugaagcacacccaacccaacucgacugaagucagccucacugaaccggaucugagaaucuucucucucugggcuugccagggcucuccgaaccuagcuagcauccucuucaauuccaacuagaaagcuuaccaugaaaugggucaccuucaucucacuccuguuccucuucucauccgccuacagcgacaacgaaaaacugcgcaaacccaaacacaagaaacucaaacaaccagccgacggcaaccccgaccccaacgccaacccaaacguagaccccaacgccaaccccaacguagacccaaacgccaacccaaacguggaccccaacgcaaacccaaacgccaacccaaacgccaauccaaacgccaacccaaacgcaaacccaaacgcaaaccccaacgccaacccuaacgccaaccccaacgcaaacccaaacgccaaccccaacgccaaccccaacgcaaaccccaacgcaaacccuaacgccaaccccaacgccaaccccaacgcaaacccaaacgccaaccccaacguagacccaaacgccaaccccaacgcaaaccccaacgccaacccaaacgcaaacccaaacgccaaccccaacgccaaccccaacgcaaacccaaacgcaaacccaaaugcaaaccccaacgccaaccccaacgccaaccccaacgcaaaccccaacgcaaaccccaacgcaaacccgaacgccaacccaaacgccaacccaaacgccaaccccaacgcaaaccccaacaaaaacaaccaaggcaacggacaaggacacaacaugcccaacgaccccaaccgcaacgucgacgaaaacgccaacgccaacuccgccgucaaaaacaacaacaacgaagaacccuccgacaaacacaucaaagaauaccucaacaaaauccaaaacucccucucaaccgaauggucacccugcuccguaaccugcggcaacggcauccaaguccgcaucaaacccggcucagccaacaaacccaaagacgaacucgacuacgccaaugacaucgaaaagaaaauaugcaaaauggaaaaaugcuccuccgucuucaacgucgucaacuccuccaucggccucaucaugguccucucguuccuauuccuaaacuaaggacuagucccuguucccagagcccacuuuuuuuucuuuuuuugaaauaaaauagccugucuuucagaucucaaaggcucuuuucagagccaccaaaaaaaaaaaaaaaaaaaaaaaaaaaaaaaaaaaaaaaaaaaaaaaaaaaaaaaaaaaaaaaaaaaaaaaaaaaaaaaaaaaaaaaaaaaaaaaaaaaaagaauu

SEQ ID NO: 7762 - RNA, 731 nt, Artificial Sequence
  mRNA Design a-3 (hSL-A100-N5) comprising derived and/or modified sequence from Pf(3D7)__XP_001351122.1__HsALB_Pf-CSP(93-192) (opt11)
aggagagggcgcuuggcuugcaaggacccugagcugcggcauugaagcacacccaacccaacucgacugaagucagccucacugaaccggaucugagaaucuucucucucugggcuugccagggcucuccgaaccuagcuagcauccucuucaauuccaacuagaaagcuuaccaugaaauggguaaccuucaucucacuccuauuccuauucucaagcgcauacucaaaacuaaaacaacccgcagacggaaacccagacccaaacgcaaacccaaacguagacccaaacgcaaacccaaacguagacccaaacgcaaacccaaacguagacccaaacgcaaacccaaacgcaaacccaaacgcaaacccaaacgcaaacccaaacgcaaaccccaacgcaaacccaaacgcaaacccaaacgcaaacccaaacgcaaacccaaacgcaaacccaaacgcaaacccaaacgcaaacccaaacgcaaacccaaacgcaaacccaaacgccaacccaaacgcaaacccauaaggacuagucccuguucccagagcccacuuuuuuuucuuuuuuugaaauaaaauagccugucuuucagaucucaaaggcucuuuucagagccaccaaaaaaaaaaaaaaaaaaaaaaaaaaaaaaaaaaaaaaaaaaaaaaaaaaaaaaaaaaaaaaaaaaaaaaaaaaaaaaaaaaaaaaaaaaaaaaaaaaaaagaauu

SEQ ID NO: 7763 - RNA, 971 nt, Artificial Sequence
  mRNA Design a-3 (hSL-A100-N5) comprising derived and/or modified sequence from Pf(3D7)__XP_001351122.1__HsALB_Pf-CSP(93-272) (opt11)
aggagagggcgcuuggcuugcaaggacccugagcugcggcauugaagcacacccaacccaacucgacugaagucagccucacugaaccggaucugagaaucuucucucucugggcuugccagggcucuccgaaccuagcuagcauccucuucaauuccaacuagaaagcuuaccaugaaaugggucaccuucaucucacuccuauuccuauucucauccgcauacucaaaacuaaaacaacccgccgacggaaacccagacccaaacgcaaacccaaacguagacccaaacgcaaacccaaacguagacccaaacgcaaacccaaacguagacccaaacgcaaacccaaacgccaacccaaacgcaaauccaaacgcaaacccaaacgcaaacccaaacgcaaacccaaacgcaaacccaaacgccaacccaaacgccaacccaaacgcaaacccaaacgcaaacccaaacgcaaacccaaacgcaaacccaaacgcaaacccaaacgccaaccccaacgcaaacccaaacgcaaaccccaacguagacccaaacgcaaacccaaacgccaaccccaacgcaaaccccaacgccaaccccaacgccaacccaaacgccaacccaaacgcaaacccaaacgcaaacccaaacgcaaacccaaacgcaaacccaaacgcaaacccaaacgcaaacccaaacgcaaacccaaacgcaaacccaaacgccaacccaaacgcaaacccaaacgcaaacccgaacgcaaacccauaaggacuagucccuguucccagagcccacuuuuuuuucuuuuuuugaaauaaaauagccugucuuucagaucucaaaggcucuuuucagagccaccaaaaaaaaaaaaaaaaaaaaaaaaaaaaaaaaaaaaaaaaaaaaaaaaaaaaaaaaaaaaaaaaaaaaaaaaaaaaaaaaaaaaaaaaaaaaaaaaaaaaagaauu

SEQ ID NO: 7764 - RNA, 1346 nt, Artificial Sequence
  mRNA Design a-3 (hSL-A100-N5) comprising derived and/or modified sequence from Pf(3D7)__XP_001351122.1__HsALB_Pf-CSP(93-397) (opt11)
aggagagggcgcuuggcuugcaaggacccugagcugcggcauugaagcacacccaacccaacucgacugaagucagccucacugaaccggaucugagaaucuucucucucugggcuugccagggcucuccgaaccuagcuagcauccucuucaauuccaacuagaaagcuuaccaugaaaugggucacauucaucucacuccuauuccuauucucaagcgccuacuccaaacucaaacaacccgccgacggcaacccagacccaaacgccaaccccaacgucgacccaaacgccaacccaaacgucgacccaaacgcaaacccaaacgucgaccccaacgccaaccccaacgccaaccccaacgccaacccaaacgccaaucccaacgccaaccccaacgccaacccaaacgcaaaccccaacgccaauccaaacgccaaccccaacgcaaaccccaacgccaaccccaacgcaaacccaaacgcaaacccaaacgcaaaccccaacgccaaccccaacgcaaaccccaacgccaaccccaacgucgaccccaacgccaacccaaacgccaacccaaacgccaaccccaacgccaaccccaacgcaaacccaaacgcgaaccccaacgcaaaccccaacgccaacccgaacgccaacccgaacgcaaacccaaacgccaaccccaacgcaaaccccaacgcaaacccaaacgcgaaccccaacgccaacccaaacgccaacccaaacgcgaacccaaacgccaaccccaacaaaaacaaccaagggaacggacaaggccacaacaugcccaacgaccccaaccgcaacgucgacgaaaacgccaacgccaacuccgccgucaaaaacaacaacaacgaagaacccuccgacaaacacauaaaagaauaccuaaacaaaauccaaaacucacucucuacugaauggucccccugcucagucaccugcggcaacggcauacaaguccgcauaaaacccggcucggccaacaaaccaaaagacgaacuagacuacgcaaacgacaucgaaaaaaaaauaugcaaaauggaaaaaugcuccucagucuucaacguaguaaacuccuccaucggccucauaaugguccucuccuuccuauuccucaacuaaggacuagucccuguucccagagcccacuuuuuuuucuuuuuuugaaauaaaauagccugucuuucagaucucaaaggcucuuuucagagccaccaaaaaaaaaaaaaaaaaaaaaaaaaaaaaaaaaaaaaaaaaaaaaaaaaaaaaaaaaaaaaaaaaaaaaaaaaaaaaaaaaaaaaaaaaaaaaaaaaaaaagaauu

SEQ ID NO: 7765 - RNA, 716 nt, Artificial Sequence
  mRNA Design a-3 (hSL-A100-N5) comprising derived and/or modified sequence from Pf(3D7)__XP_001351122.1__HsALB_Pf-CSP(98-192) (opt11)
aggagagggcgcuuggcuugcaaggacccugagcugcggcauugaagcacacccaacccaacucgacugaagucagccucacugaaccggaucugagaaucuucucucucugggcuugccagggcucuccgaaccuagcuagcauccucuucaauuccaacuagaaagcuuaccaugaaaugggucacauucauaagccuacucuuccucuucagcucagccuacuccgcagacggaaacccagacccaaacgcaaacccaaacguagacccaaacgcaaacccaaacguagacccaaacgcaaacccaaacguagacccaaacgcaaacccaaacgcaaacccaaacgcaaacccaaacgcaaacccaaacgcaaacccaaacgcaaacccaaacgcaaacccaaacgcaaacccaaacgcaaacccaaacgcaaaccccaacgcaaacccaaacgcaaacccaaacgcaaacccaaacgcaaacccaaacgcaaacccaaacgcaaacccauaaggacuagucccuguucccagagcccacuuuuuuuucuuuuuuugaaauaaaauagccugucuuucagaucucaaaggcucuuuucagagccaccaaaaaaaaaaaaaaaaaaaaaaaaaaaaaaaaaaaaaaaaaaaaaaaaaaaaaaaaaaaaaaaaaaaaaaaaaaaaaaaaaaaaaaaaaaaaaaaaaaaaagaauu

SEQ ID NO: 7766 - RNA, 956 nt, Artificial Sequence
  mRNA Design a-3 (hSL-A100-N5) comprising derived and/or modified sequence from Pf(3D7)__XP_001351122.1__HsALB_Pf-CSP(98-272) (opt11)
aggagagggcgcuuggcuugcaaggacccugagcugcggcauugaagcacacccaacccaacucgacugaagucagccucacugaaccggaucugagaaucuucucucucugggcuugccagggcucuccgaaccuagcuagcauccucuucaauuccaacuagaaagcuuaccaugaaauggguaaccuucauaagccuacucuuccuauucucaucagccuacagcgcagacggaaacccagaccccaacgcaaacccaaacguagacccaaacgcaaacccaaacguagaccccaacgcaaacccaaacguagacccaaacgccaacccaaacgcaaacccaaacgcaaacccaaacgccaacccaaacgcaaacccaaacgccaacccaaacgcaaacccaaacgcaaacccaaacgcaaacccaaacgcaaacccaaacgcaaacccaaacgcaaacccaaacgccaacccaaacgcaaacccaaacgcaaacccaaacgcaaacccaaacgccaaccccaacguagacccaaacgccaaccccaacgcaaacccaaacgcaaacccaaacgcaaacccaaacgcaaacccaaacgcaaacccaaacgcaaacccaaacgcaaacccaaacgcaaacccgaacgccaacccaaacgcaaacccaaacgcaaacccaaacgcaaacccaaacgcaaacccaaacgcaaaccccaacgcaaacccaaacgcaaacccaaacgcaaacccauaaggacuagucccuguucccagagcccacuuuuuuuucuuuuuuugaaauaaaauagccugucuuucagaucucaaaggcucuuuucagagccaccaaaaaaaaaaaaaaaaaaaaaaaaaaaaaaaaaaaaaaaaaaaaaaaaaaaaaaaaaaaaaaaaaaaaaaaaaaaaaaaaaaaaaaaaaaaaaaaaaaaaagaauu

SEQ ID NO: 7767 - RNA, 1262 nt, Artificial Sequence
  mRNA Design a-3 (hSL-A100-N5) comprising derived and/or modified sequence from Pf(3D7)__XP_001351122.1__HsALB_Pf-CSP(98-374) (opt11)
aggagagggcgcuuggcuugcaaggacccugagcugcggcauugaagcacacccaacccaacucgacugaagucagccucacugaaccggaucugagaaucuucucucucugggcuugccagggcucuccgaaccuagcuagcauccucuucaauuccaacuagaaagcuuaccaugaaauggguaaccuucauaucccuacucuuccuuuucuccucggccuacuccgcagacggaaacccagacccaaacgcaaaccccaacguagacccaaacgcaaacccaaauguagacccaaacgcaaacccaaacguggacccaaacgcgaaccccaacgcaaaccccaacgcaaacccaaacgccaacccaaacgcaaacccaaacgccaacccaaacgcaaaccccaacgccaaccccaacgccaacccaaacgcaaacccaaacgcaaaccccaacgcaaacccaaacgccaacccaaacgccaacccaaacgccaaccccaacgcaaacccaaacgccaacccaaacguagacccaaacgcaaacccaaacgcaaacccaaacgcaaaccccaacgcaaaccccaacgcaaacccaaacgcaaacccaaacgcaaacccaaacgcaaacccaaacgccaacccaaacgcgaaccccaacgccaacccaaacgcaaacccaaacgccaacccaaacgccaacccaaacgcaaaccccaacgcaaacccaaacgcaaacccaaacgccaacccgaacaaaaacaaccaaggcaacggccaaggacacaacaugccaaacgaccccaaccgcaacguagacgaaaacgccaacgcaaacuccgcagucaaaaacaacaacaacgaagaacccuccgacaaacacauaaaagaauaccuaaacaaaauccaaaacucgcucucaaccgaauggucccccugcuccgucaccugcggcaacggcauccaaguacgcaucaaaccaggcucagcaaacaaaccaaaagacgaacucgacuacgccaacgacauagaaaaaaaaauaugcaaaauggagaaaugcuaaggacuagucccuguucccagagcccacuuuuuuuucuuuuuuugaaauaaaauagccugucuuucagaucucaaaggcucuuuucagagccaccaaaaaaaaaaaaaaaaaaaaaaaaaaaaaaaaaaaaaaaaaaaaaaaaaaaaaaaaaaaaaaaaaaaaaaaaaaaaaaaaaaaaaaaaaaaaaaaaaaaaagaauu

SEQ ID NO: 7768 - RNA, 1331 nt, Artificial Sequence
  mRNA Design a-3 (hSL-A100-N5) comprising derived and/or modified sequence from Pf(3D7)__XP_001351122.1__HsALB_Pf-CSP(98-397) (opt11)
aggagagggcgcuuggcuugcaaggacccugagcugcggcauugaagcacacccaacccaacucgacugaagucagccucacugaaccggaucugagaaucuucucucucugggcuugccagggcucuccgaaccuagcuagcauccucuucaauuccaacuagaaagcuuaccaugaaauggguaaccuucaucagccuacuauuccuauucagcuccgccuacagcgccgacggaaacccagacccaaacgccaaccccaacgucgacccaaacgccaaccccaacguagacccaaacgccaaccccaacgucgaccccaacgccaaccccaacgccaacccaaacgccaacccuaacgccaacccaaacgccaacccgaacgccaaccccaacgcgaacccaaacgccaacccaaacgcaaaccccaacgccaaccccaacgccaaccccaacgcaaaccccaacgcaaacccaaacgccaacccaaacgccaaccccaacgccaaccccaaugcaaacccaaacgucgaccccaacgccaacccaaacgccaaccccaacgccaaccccaacgccaaccccaacgcaaaccccaacgccaaccccaacgcgaaccccaacgccaaccccaacgccaacccaaacgccaaccccaacgccaaccccaacgccaaccccaacgcuaaccccaacgcaaacccaaacgccaacccaaacgccaacccaaacgccaaccccaacgccaacccaaacaaaaacaaccaaggcaacggacaaggacacaacaugccaaacgaccccaaccgcaacgucgacgaaaaugccaacgccaacuccgccgucaaaaacaacaacaacgaagaacccuccgacaaacacaucaaagaauaccuaaacaaaauacaaaacucucucucaaccgaauggucccccugcuccgucacaugcggcaacggcauccaaguccgcaucaaaccaggaucagccaauaaacccaaagacgaacucgacuacgccaacgacauagaaaaaaaaaucugcaaaauggaaaaaugcagcucagucuucaacgucgucaacuccucaaucggacuuauaaugguccuauccuuccucuuccuuaacuaaggacuagucccuguucccagagcccacuuuuuuuucuuuuuuugaaauaaaauagccugucuuucagaucucaaaggcucuuuucagagccaccaaaaaaaaaaaaaaaaaaaaaaaaaaaaaaaaaaaaaaaaaaaaaaaaaaaaaaaaaaaaaaaaaaaaaaaaaaaaaaaaaaaaaaaaaaaaaaaaaaaaagaauu

SEQ ID NO: 7769 - RNA, 1658 nt, Artificial Sequence
  mRNA Design a-3 (hSL-A100-N5) comprising derived and/or modified sequence from Pf(3D7)__XP_001351122.1__HsALB_Pf-CSP(199-377)_L(PVTN)_HBsAg (opt11)
aggagagggcgcuuggcuugcaaggacccugagcugcggcauugaagcacacccaacccaacucgacugaagucagccucacugaaccggaucugagaaucuucucucucugggcuugccagggcucuccgaaccuagcuagcauccucuucaauuccaacuagaaagcuuaccaugaaaugggucacauucaucucgcuccucuuccuauucuccuccgccuacuccgacccuaacgccaaucccaacgccaaccccaacgccaaccccaacgccaaccccaacgccaaccccaaugcaaacccaaacgcaaaccccaacgccaaccccaacgcaaacccaaaugcaaaccccaacgcaaaccccaacgccaaccccaaugccaaccccaacgcuaaccccaacgccaauccaaacgccaaccccaacgcaaaccccaacgccaacccuaacaaaaauaaccaaggcaacggccaaggacacaacaugcccaacgaccccaaccgaaaugucgacgaaaacgcuaacgcuaacagcgccgucaaaaacaacaacaacgaagaacccuccgacaaacacauuaaagaauaccucaacaaaauccaaaacucccucuccaccgaauggucccccugcucuguaacuugcggcaacggcauccaaguccgcauaaaacccggaucagcaaacaaacccaaagacgaacucgacuacgcaaacgacauugagaagaaaaucugcaaaauggaaaaaugcucaucaguacccgucacuaacauggaaaacaucaccuccggcuuccucggcccccuccuaguccuacaagccgguuucuuccuucuuacacgcauccuaaccaucccacaaucccuagacuccugguggacaucuuuaaacuuccuuggaggauccccugucugccucggccaaaacucccaauccccaaccucuaaccacucucccacauccugcccucccauaugccccgguuaccgcuggaugugccuccgccgcuucaucaucuuccucuucauacuccucuuaugccucaucuuccuccucguacuacucgacuaccaagguaugcuacccguaugcccucucauccccggcuccaccacaaccaacaccggccccugcaaaacaugcaccacccccgcacagggcaauuccauguuccccuccugcuguugcaccaaacccacagacggcaacuguaccugcauccccauccccuccucuugggcauuugccaaauaccucugggaaugggccuccguccgauucucuuggcuuucacuccucguucccuucguacaaugguucgucggccuaucacccaccgucuggcucuccgccaucuggaugaugugguacuggggcccuucacuuuacuccauagucagccccuucauaccacuccuccccaucuucuucugccuauggguauacaucuaaggacuagucccuguucccagagcccacuuuuuuuucuuuuuuugaaauaaaauagccugucuuucagaucucaaaggcucuuuucagagccaccaaaaaaaaaaaaaaaaaaaaaaaaaaaaaaaaaaaaaaaaaaaaaaaaaaaaaaaaaaaaaaaaaaaaaaaaaaaaaaaaaaaaaaaaaaaaaaaaaaaaagaauu

SEQ ID NO: 7770 - RNA, 1412 nt, Artificial Sequence
  mRNA Design i-3 (hSL-A100-N5) comprising derived and/or modified sequence from Pf(3D7)__XP_001351122.1__Pf-CSP (wt)
aggagaaagcuuaccaugaugagaaaauuagcuauuuuaucuguuucuuccuuuuuauuuguugaggccuuauuccaggaauaccagugcuauggaaguucgucaaacacaaggguucuaaaugaauuaaauuaugauaaugcaggcacuaauuuauauaaugaauuagaaaugaauuauuaugggaaacaggaaaauugguauagucuuaaaaaaaauaguagaucacuuggagaaaaugaugauggaaauaacgaagacaacgagaaauuaaggaaaccaaaacauaaaaaauuaaagcaaccagcggaugguaauccugauccaaaugcaaacccaaauguagaucccaaugccaacccaaauguagauccaaaugcaaacccaaauguagauccaaaugcaaacccaaaugcaaacccaaaugcaaacccaaaugcaaacccaaaugcaaacccaaaugcaaacccaaaugcaaacccaaaugcaaacccaaaugcaaacccaaaugcaaacccaaaugcaaacccaaaugcaaacccaaaugcaaacccaaaugcaaaccccaaugcaaauccuaaugcaaacccaaaugcaaacccaaacguagauccuaaugcaaauccaaaugcaaacccaaacgcaaaccccaaugcaaauccuaaugcaaaccccaaugcaaauccuaaugcaaauccuaaugccaauccaaaugcaaauccaaaugcaaacccaaacgcaaaccccaaugcaaauccuaaugccaauccaaaugcaaauccaaaugcaaacccaaaugcaaacccaaaugcaaaccccaaugcaaauccuaauaaaaacaaucaagguaauggacaaggucacaauaugccaaaugacccaaaccgaaauguagaugaaaaugcuaaugccaacagugcuguaaaaaauaauaauaacgaagaaccaagugauaagcacauaaaagaauauuuaaacaaaauacaaaauucucuuucaacugaaugguccccauguaguguaacuuguggaaaugguauucaaguuagaauaaagccuggcucugcuaauaaaccuaaagacgaauuagauuaugcaaaugauauugaaaaaaaaauuuguaaaauggaaaaauguuccaguguguuuaaugucguaaauaguucaauaggauuaauaaugguauuauccuucuuguuccuuaauuagggacuaguuauaagacugacuagcccgaugggccucccaacgggcccuccuccccuccuugcaccgagauuaaucaaaggcucuuuucagagccaccaaaaaaaaaaaaaaaaaaaaaaaaaaaaaaaaaaaaaaaaaaaaaaaaaaaaaaaaaaaaaaaaaaaaaaaaaaaaaaaaaaaaaaaaaaaaaaaaaaaaagaauu

SEQ ID NO: 7771 - RNA, 1343 nt, Artificial Sequence
  mRNA Design i-3 (hSL-A100-N5) comprising derived and/or modified sequence from Pf(3D7)__XP_001351122.1__Pf-CSP(1-374) (wt)
aggagaaagcuuaccaugaugagaaaauuagcuauuuuaucuguuucuuccuuuuuauuuguugaggccuuauuccaggaauaccagugcuauggaaguucgucaaacacaaggguucuaaaugaauuaaauuaugauaaugcaggcacuaauuuauauaaugaauuagaaaugaauuauuaugggaaacaggaaaauugguauagucuuaaaaaaaauaguagaucacuuggagaaaaugaugauggaaauaacgaagacaacgagaaauuaaggaaaccaaaacauaaaaaauuaaagcaaccagcggaugguaauccugauccaaaugcaaacccaaauguagaucccaaugccaacccaaauguagauccaaaugcaaacccaaauguagauccaaaugcaaacccaaaugcaaacccaaaugcaaacccaaaugcaaacccaaaugcaaacccaaaugcaaacccaaaugcaaacccaaaugcaaacccaaaugcaaacccaaaugcaaacccaaaugcaaacccaaaugcaaacccaaaugcaaacccaaaugcaaaccccaaugcaaauccuaaugcaaacccaaaugcaaacccaaacguagauccuaaugcaaauccaaaugcaaacccaaacgcaaaccccaaugcaaauccuaaugcaaaccccaaugcaaauccuaaugcaaauccuaaugccaauccaaaugcaaauccaaaugcaaacccaaacgcaaaccccaaugcaaauccuaaugccaauccaaaugcaaauccaaaugcaaacccaaaugcaaacccaaaugcaaaccccaaugcaaauccuaauaaaaacaaucaagguaauggacaaggucacaauaugccaaaugacccaaaccgaaauguagaugaaaaugcuaaugccaacagugcuguaaaaaauaauaauaacgaagaaccaagugauaagcacauaaaagaauauuuaaacaaaauacaaaauucucuuucaacugaaugguccccauguaguguaacuuguggaaaugguauucaaguuagaauaaagccuggcucugcuaauaaaccuaaagacgaauuagauuaugcaaaugauauugaaaaaaaaauuuguaaaauggaaaaauguugaggacuaguuauaagacugacuagcccgaugggccucccaacgggcccuccuccccuccuugcaccgagauuaaucaaaggcucuuuucagagccaccaaaaaaaaaaaaaaaaaaaaaaaaaaaaaaaaaaaaaaaaaaaaaaaaaaaaaaaaaaaaaaaaaaaaaaaaaaaaaaaaaaaaaaaaaaaaaaaaaaaaagaauu

SEQ ID NO: 7772 - RNA, 1196 nt, Artificial Sequence
  mRNA Design i-3 (hSL-A100-N5) comprising derived and/or modified sequence from Pf(3D7)__XP_001351122.1__Pf-CSP(1-325) (wt)
aggagaaagcuuaccaugaugagaaaauuagcuauuuuaucuguuucuuccuuuuuauuuguugaggccuuauuccaggaauaccagugcuauggaaguucgucaaacacaaggguucuaaaugaauuaaauuaugauaaugcaggcacuaauuuauauaaugaauuagaaaugaauuauuaugggaaacaggaaaauugguauagucuuaaaaaaaauaguagaucacuuggagaaaaugaugauggaaauaacgaagacaacgagaaauuaaggaaaccaaaacauaaaaaauuaaagcaaccagcggaugguaauccugauccaaaugcaaacccaaauguagaucccaaugccaacccaaauguagauccaaaugcaaacccaaauguagauccaaaugcaaacccaaaugcaaacccaaaugcaaacccaaaugcaaacccaaaugcaaacccaaaugcaaacccaaaugcaaacccaaaugcaaacccaaaugcaaacccaaaugcaaacccaaaugcaaacccaaaugcaaacccaaaugcaaacccaaaugcaaaccccaaugcaaauccuaaugcaaacccaaaugcaaacccaaacguagauccuaaugcaaauccaaaugcaaacccaaacgcaaaccccaaugcaaauccuaaugcaaaccccaaugcaaauccuaaugcaaauccuaaugccaauccaaaugcaaauccaaaugcaaacccaaacgcaaaccccaaugcaaauccuaaugccaauccaaaugcaaauccaaaugcaaacccaaaugcaaacccaaaugcaaaccccaaugcaaauccuaauaaaaacaaucaagguaauggacaaggucacaauaugccaaaugacccaaaccgaaauguagaugaaaaugcuaaugccaacagugcuguaaaaaauaauaauaacgaagaaccaagugauaagcacauaaaagaauauuuaaacaaaauacaaaauugaggacuaguuauaagacugacuagcccgaugggccucccaacgggcccuccuccccuccuugcaccgagauuaaucaaaggcucuuuucagagccaccaaaaaaaaaaaaaaaaaaaaaaaaaaaaaaaaaaaaaaaaaaaaaaaaaaaaaaaaaaaaaaaaaaaaaaaaaaaaaaaaaaaaaaaaaaaaaaaaaaaaagaauu

SEQ ID NO: 7773 - RNA, 1412 nt, Artificial Sequence
  mRNA Design i-3 (hSL-A100-N5) comprising derived and/or modified sequence from Pf(3D7)__XP_001351122.1__Pf-CSP (opt1)
aggagaaagcuuaccaugaugcgcaagcuggccauccucagcguguccagcuuccuguucgucgaggcccuguuccaggaguaccagugcuacggcuccagcuccaacacccgggugcucaacgagcugaacuacgacaacgcggggaccaaccuguacaacgagcucgagaugaacuacuacggcaagcaggagaacugguacagccugaagaagaacucccgcagccugggggagaacgacgacggcaacaacgaggacaacgagaagcuccggaagcccaagcacaagaagcugaagcagccggccgacgggaaccccgaccccaacgccaaccccaacguggacccgaacgccaaccccaacgucgaccccaacgccaaccccaacguggacccgaacgcgaaccccaacgccaaccccaacgccaaccccaacgccaacccgaacgcgaaccccaacgccaaccccaacgccaaccccaacgccaacccgaacgccaaccccaacgcgaaccccaacgccaaccccaacgccaacccgaacgccaaccccaacgccaaccccaacgcgaaccccaacgccaacccgaacgccaaccccaacguggaccccaacgccaaccccaacgccaacccgaacgcgaaccccaacgccaaccccaacgccaacccgaacgccaaccccaacgccaaccccaacgcgaaccccaacgccaacccgaacgccaaccccaacgccaaccccaacgcgaaccccaacgccaacccgaacgccaaccccaacgccaaccccaacgccaaccccaacgcgaacccgaacgccaaccccaacaagaacaaccagggcaacggccaggggcacaacaugcccaacgaccccaaccgcaacgucgacgagaacgccaacgccaacuccgccgugaagaacaacaacaacgaggagccgagcgacaagcacaucaaggaguaccugaacaagauccagaacucccucagcacggaguggucccccugcagcgugaccugcggcaacgggauccagguccggaucaagcccggcuccgcgaacaagcccaaggacgagcuggacuacgccaacgacaucgagaagaagaucugcaagauggagaagugcagcuccguguucaacguggucaacagcuccaucgggcugaucauggugcucagcuuccuguuccugaacugaggacuaguuauaagacugacuagcccgaugggccucccaacgggcccuccuccccuccuugcaccgagauuaaucaaaggcucuuuucagagccaccaaaaaaaaaaaaaaaaaaaaaaaaaaaaaaaaaaaaaaaaaaaaaaaaaaaaaaaaaaaaaaaaaaaaaaaaaaaaaaaaaaaaaaaaaaaaaaaaaaaaagaauu

SEQ ID NO: 7774 - RNA, 1343 nt, Artificial Sequence
  mRNA Design i-3 (hSL-A100-N5) comprising derived and/or modified sequence from Pf(3D7)__XP_001351122.1__Pf-CSP(1-374) (opt1)
aggagaaagcuuaccaugaugcgcaagcuggccauccucagcguguccagcuuccuguucgucgaggcccuguuccaggaguaccagugcuacggcuccagcuccaacacccgggugcucaacgagcugaacuacgacaacgcggggaccaaccuguacaacgagcucgagaugaacuacuacggcaagcaggagaacugguacagccugaagaagaacucccgcagccugggggagaacgacgacggcaacaacgaggacaacgagaagcuccggaagcccaagcacaagaagcugaagcagccggccgacgggaaccccgaccccaacgccaaccccaacguggacccgaacgccaaccccaacgucgaccccaacgccaaccccaacguggacccgaacgcgaaccccaacgccaaccccaacgccaaccccaacgccaacccgaacgcgaaccccaacgccaaccccaacgccaaccccaacgccaacccgaacgccaaccccaacgcgaaccccaacgccaaccccaacgccaacccgaacgccaaccccaacgccaaccccaacgcgaaccccaacgccaacccgaacgccaaccccaacguggaccccaacgccaaccccaacgccaacccgaacgcgaaccccaacgccaaccccaacgccaacccgaacgccaaccccaacgccaaccccaacgcgaaccccaacgccaacccgaacgccaaccccaacgccaaccccaacgcgaaccccaacgccaacccgaacgccaaccccaacgccaaccccaacgccaaccccaacgcgaacccgaacgccaaccccaacaagaacaaccagggcaacggccaggggcacaacaugcccaacgaccccaaccgcaacgucgacgagaacgccaacgccaacuccgccgugaagaacaacaacaacgaggagccgagcgacaagcacaucaaggaguaccugaacaagauccagaacucccucagcacggaguggucccccugcagcgugaccugcggcaacgggauccagguccggaucaagcccggcuccgcgaacaagcccaaggacgagcuggacuacgccaacgacaucgagaagaagaucugcaagauggagaagugcugaggacuaguuauaagacugacuagcccgaugggccucccaacgggcccuccuccccuccuugcaccgagauuaaucaaaggcucuuuucagagccaccaaaaaaaaaaaaaaaaaaaaaaaaaaaaaaaaaaaaaaaaaaaaaaaaaaaaaaaaaaaaaaaaaaaaaaaaaaaaaaaaaaaaaaaaaaaaaaaaaaaaagaauu

SEQ ID NO: 7775 - RNA, 1196 nt, Artificial Sequence
  mRNA Design i-3 (hSL-A100-N5) comprising derived and/or modified sequence from Pf(3D7)__XP_001351122.1__Pf-CSP(1-325) (opt1)
aggagaaagcuuaccaugaugcgcaagcuggccauccucagcguguccagcuuccuguucgucgaggcccuguuccaggaguaccagugcuacggcuccagcuccaacacccgggugcucaacgagcugaacuacgacaacgcggggaccaaccuguacaacgagcucgagaugaacuacuacggcaagcaggagaacugguacagccugaagaagaacucccgcagccugggggagaacgacgacggcaacaacgaggacaacgagaagcuccggaagcccaagcacaagaagcugaagcagccggccgacgggaaccccgaccccaacgccaaccccaacguggacccgaacgccaaccccaacgucgaccccaacgccaaccccaacguggacccgaacgcgaaccccaacgccaaccccaacgccaaccccaacgccaacccgaacgcgaaccccaacgccaaccccaacgccaaccccaacgccaacccgaacgccaaccccaacgcgaaccccaacgccaaccccaacgccaacccgaacgccaaccccaacgccaaccccaacgcgaaccccaacgccaacccgaacgccaaccccaacguggaccccaacgccaaccccaacgccaacccgaacgcgaaccccaacgccaaccccaacgccaacccgaacgccaaccccaacgccaaccccaacgcgaaccccaacgccaacccgaacgccaaccccaacgccaaccccaacgcgaaccccaacgccaacccgaacgccaaccccaacgccaaccccaacgccaaccccaacgcgaacccgaacgccaaccccaacaagaacaaccagggcaacggccaggggcacaacaugcccaacgaccccaaccgcaacgucgacgagaacgccaacgccaacuccgccgugaagaacaacaacaacgaggagccgagcgacaagcacaucaaggaguaccugaacaagauccagaacugaggacuaguuauaagacugacuagcccgaugggccucccaacgggcccuccuccccuccuugcaccgagauuaaucaaaggcucuuuucagagccaccaaaaaaaaaaaaaaaaaaaaaaaaaaaaaaaaaaaaaaaaaaaaaaaaaaaaaaaaaaaaaaaaaaaaaaaaaaaaaaaaaaaaaaaaaaaaaaaaaaaaagaauu

SEQ ID NO: 7776 - RNA, 1412 nt, Artificial Sequence
  mRNA Design i-3 (hSL-A100-N5) comprising derived and/or modified sequence from Pf(3D7)__XP_001351122.1__HsALB_Pf-CSP(19-397) (opt1)
aggagaaagcuuaccaugaagugggugaccuucaucagccugcucuuccuguucuccagcgccuacucccuguuccaggaguaccagugcuacggcuccagcuccaacacccgggugcucaacgagcugaacuacgacaacgcggggaccaaccuguacaacgagcucgagaugaacuacuacggcaagcaggagaacugguacagccugaagaagaacucccgcagccugggggagaacgacgacggcaacaacgaggacaacgagaagcuccggaagcccaagcacaagaagcugaagcagccggccgacgggaaccccgaccccaacgccaaccccaacguggacccgaacgccaaccccaacgucgaccccaacgccaaccccaacguggacccgaacgcgaaccccaacgccaaccccaacgccaaccccaacgccaacccgaacgcgaaccccaacgccaaccccaacgccaaccccaacgccaacccgaacgccaaccccaacgcgaaccccaacgccaaccccaacgccaacccgaacgccaaccccaacgccaaccccaacgcgaaccccaacgccaacccgaacgccaaccccaacguggaccccaacgccaaccccaacgccaacccgaacgcgaaccccaacgccaaccccaacgccaacccgaacgccaaccccaacgccaaccccaacgcgaaccccaacgccaacccgaacgccaaccccaacgccaaccccaacgcgaaccccaacgccaacccgaacgccaaccccaacgccaaccccaacgccaaccccaacgcgaacccgaacgccaaccccaacaagaacaaccagggcaacggccaggggcacaacaugcccaacgaccccaaccgcaacgucgacgagaacgccaacgccaacuccgccgugaagaacaacaacaacgaggagccgagcgacaagcacaucaaggaguaccugaacaagauccagaacucccucagcacggaguggucccccugcagcgugaccugcggcaacgggauccagguccggaucaagcccggcuccgcgaacaagcccaaggacgagcuggacuacgccaacgacaucgagaagaagaucugcaagauggagaagugcagcuccguguucaacguggucaacagcuccaucgggcugaucauggugcucagcuuccuguuccugaacugaggacuaguuauaagacugacuagcccgaugggccucccaacgggcccuccuccccuccuugcaccgagauuaaucaaaggcucuuuucagagccaccaaaaaaaaaaaaaaaaaaaaaaaaaaaaaaaaaaaaaaaaaaaaaaaaaaaaaaaaaaaaaaaaaaaaaaaaaaaaaaaaaaaaaaaaaaaaaaaaaaaaagaauu

SEQ ID NO: 7777 - RNA, 1430 nt, Artificial Sequence
  mRNA Design i-3 (hSL-A100-N5) comprising derived and/or modified sequence from Pf(3D7)__XP_001351122.1__HsIns-iso1_Pf-CSP(19-397) (opt1)
aggagaaagcuuaccauggcccuguggaugcgccuccugccccugcucgcccugcuggcgcucuggggcccggaccccgccgccgcccuguuccaggaguaccagugcuacggcuccagcuccaacacccgggugcucaacgagcugaacuacgacaacgcggggaccaaccuguacaacgagcucgagaugaacuacuacggcaagcaggagaacugguacagccugaagaagaacucccgcagccugggggagaacgacgacggcaacaacgaggacaacgagaagcuccggaagcccaagcacaagaagcugaagcagccggccgacgggaaccccgaccccaacgccaaccccaacguggacccgaacgccaaccccaacgucgaccccaacgccaaccccaacguggacccgaacgcgaaccccaacgccaaccccaacgccaaccccaacgccaacccgaacgcgaaccccaacgccaaccccaacgccaaccccaacgccaacccgaacgccaaccccaacgcgaaccccaacgccaaccccaacgccaacccgaacgccaaccccaacgccaaccccaacgcgaaccccaacgccaacccgaacgccaaccccaacguggaccccaacgccaaccccaacgccaacccgaacgcgaaccccaacgccaaccccaacgccaacccgaacgccaaccccaacgccaaccccaacgcgaaccccaacgccaacccgaacgccaaccccaacgccaaccccaacgcgaaccccaacgccaacccgaacgccaaccccaacgccaaccccaacgccaaccccaacgcgaacccgaacgccaaccccaacaagaacaaccagggcaacggccaggggcacaacaugcccaacgaccccaaccgcaacgucgacgagaacgccaacgccaacuccgccgugaagaacaacaacaacgaggagccgagcgacaagcacaucaaggaguaccugaacaagauccagaacucccucagcacggaguggucccccugcagcgugaccugcggcaacgggauccagguccggaucaagcccggcuccgcgaacaagcccaaggacgagcuggacuacgccaacgacaucgagaagaagaucugcaagauggagaagugcagcuccguguucaacguggucaacagcuccaucgggcugaucauggugcucagcuuccuguuccugaacugaggacuaguuauaagacugacuagcccgaugggccucccaacgggcccuccuccccuccuugcaccgagauuaaucaaaggcucuuuucagagccaccaaaaaaaaaaaaaaaaaaaaaaaaaaaaaaaaaaaaaaaaaaaaaaaaaaaaaaaaaaaaaaaaaaaaaaaaaaaaaaaaaaaaaaaaaaaaaaaaaaaaagaauu

SEQ ID NO: 7778 - RNA, 1409 nt, Artificial Sequence
  mRNA Design i-3 (hSL-A100-N5) comprising derived and/or modified sequence from Pf(3D7)__XP_001351122.1__HsSPARC_Pf-CSP(19-397) (opt1)
aggagaaagcuuaccaugcgcgccuggaucuucuuccugcucugccuggccggccgggcccuggcccuguuccaggaguaccagugcuacggcuccagcuccaacacccgggugcucaacgagcugaacuacgacaacgcggggaccaaccuguacaacgagcucgagaugaacuacuacggcaagcaggagaacugguacagccugaagaagaacucccgcagccugggggagaacgacgacggcaacaacgaggacaacgagaagcuccggaagcccaagcacaagaagcugaagcagccggccgacgggaaccccgaccccaacgccaaccccaacguggacccgaacgccaaccccaacgucgaccccaacgccaaccccaacguggacccgaacgcgaaccccaacgccaaccccaacgccaaccccaacgccaacccgaacgcgaaccccaacgccaaccccaacgccaaccccaacgccaacccgaacgccaaccccaacgcgaaccccaacgccaaccccaacgccaacccgaacgccaaccccaacgccaaccccaacgcgaaccccaacgccaacccgaacgccaaccccaacguggaccccaacgccaaccccaacgccaacccgaacgcgaaccccaacgccaaccccaacgccaacccgaacgccaaccccaacgccaaccccaacgcgaaccccaacgccaacccgaacgccaaccccaacgccaaccccaacgcgaaccccaacgccaacccgaacgccaaccccaacgccaaccccaacgccaaccccaacgcgaacccgaacgccaaccccaacaagaacaaccagggcaacggccaggggcacaacaugcccaacgaccccaaccgcaacgucgacgagaacgccaacgccaacuccgccgugaagaacaacaacaacgaggagccgagcgacaagcacaucaaggaguaccugaacaagauccagaacucccucagcacggaguggucccccugcagcgugaccugcggcaacgggauccagguccggaucaagcccggcuccgcgaacaagcccaaggacgagcuggacuacgccaacgacaucgagaagaagaucugcaagauggagaagugcagcuccguguucaacguggucaacagcuccaucgggcugaucauggugcucagcuuccuguuccugaacugaggacuaguuauaagacugacuagcccgaugggccucccaacgggcccuccuccccuccuugcaccgagauuaaucaaaggcucuuuucagagccaccaaaaaaaaaaaaaaaaaaaaaaaaaaaaaaaaaaaaaaaaaaaaaaaaaaaaaaaaaaaaaaaaaaaaaaaaaaaaaaaaaaaaaaaaaaaaaaaaaaaaagaauu

SEQ ID NO: 7779 - RNA, 1412 nt, Artificial Sequence
  mRNA Design i-3 (hSL-A100-N5) comprising derived and/or modified sequence from Pf(3D7)__XP_001351122.1__IgE_Pf-CSP(19-397) (opt1)
aggagaaagcuuaccauggacuggaccuggauccuguuccucguggccgccgcgacccgcguccacagccuguuccaggaguaccagugcuacggcuccagcuccaacacccgggugcucaacgagcugaacuacgacaacgcggggaccaaccuguacaacgagcucgagaugaacuacuacggcaagcaggagaacugguacagccugaagaagaacucccgcagccugggggagaacgacgacggcaacaacgaggacaacgagaagcuccggaagcccaagcacaagaagcugaagcagccggccgacgggaaccccgaccccaacgccaaccccaacguggacccgaacgccaaccccaacgucgaccccaacgccaaccccaacguggacccgaacgcgaaccccaacgccaaccccaacgccaaccccaacgccaacccgaacgcgaaccccaacgccaaccccaacgccaaccccaacgccaacccgaacgccaaccccaacgcgaaccccaacgccaaccccaacgccaacccgaacgccaaccccaacgccaaccccaacgcgaaccccaacgccaacccgaacgccaaccccaacguggaccccaacgccaaccccaacgccaacccgaacgcgaaccccaacgccaaccccaacgccaacccgaacgccaaccccaacgccaaccccaacgcgaaccccaacgccaacccgaacgccaaccccaacgccaaccccaacgcgaaccccaacgccaacccgaacgccaaccccaacgccaaccccaacgccaaccccaacgcgaacccgaacgccaaccccaacaagaacaaccagggcaacggccaggggcacaacaugcccaacgaccccaaccgcaacgucgacgagaacgccaacgccaacuccgccgugaagaacaacaacaacgaggagccgagcgacaagcacaucaaggaguaccugaacaagauccagaacucccucagcacggaguggucccccugcagcgugaccugcggcaacgggauccagguccggaucaagcccggcuccgcgaacaagcccaaggacgagcuggacuacgccaacgacaucgagaagaagaucugcaagauggagaagugcagcuccguguucaacguggucaacagcuccaucgggcugaucauggugcucagcuuccuguuccugaacugaggacuaguuauaagacugacuagcccgaugggccucccaacgggcccuccuccccuccuugcaccgagauuaaucaaaggcucuuuucagagccaccaaaaaaaaaaaaaaaaaaaaaaaaaaaaaaaaaaaaaaaaaaaaaaaaaaaaaaaaaaaaaaaaaaaaaaaaaaaaaaaaaaaaaaaaaaaaaaaaaaaaagaauu

SEQ ID NO: 7780 - RNA, 1577 nt, Artificial Sequence
  mRNA Design i-3 (hSL-A100-N5) comprising derived and/or modified sequence from Pf(3D7)__XP_001351122.1__Pf-CSP_L(G4SG4)_TM domain HA (opt1)
aggagaaagcuuaccaugaugcgcaagcuggccauccucagcguguccagcuuccuguucgucgaggcccuguuccaggaguaccagugcuacggcuccagcuccaacacccgggugcucaacgagcugaacuacgacaacgcggggaccaaccuguacaacgagcucgagaugaacuacuacggcaagcaggagaacugguacagccugaagaagaacucccgcagccugggggagaacgacgacggcaacaacgaggacaacgagaagcuccggaagcccaagcacaagaagcugaagcagccggccgacgggaaccccgaccccaacgccaaccccaacguggacccgaacgccaaccccaacgucgaccccaacgccaaccccaacguggacccgaacgcgaaccccaacgccaaccccaacgccaaccccaacgccaacccgaacgcgaaccccaacgccaaccccaacgccaaccccaacgccaacccgaacgccaaccccaacgcgaaccccaacgccaaccccaacgccaacccgaacgccaaccccaacgccaaccccaacgcgaaccccaacgccaacccgaacgccaaccccaacguggaccccaacgccaaccccaacgccaacccgaacgcgaaccccaacgccaaccccaacgccaacccgaacgccaaccccaacgccaaccccaacgcgaaccccaacgccaacccgaacgccaaccccaacgccaaccccaacgcgaaccccaacgccaacccgaacgccaaccccaacgccaaccccaacgccaaccccaacgcgaacccgaacgccaaccccaacaagaacaaccagggcaacggccaggggcacaacaugcccaacgaccccaaccgcaacgucgacgagaacgccaacgccaacuccgccgugaagaacaacaacaacgaggagccgagcgacaagcacaucaaggaguaccugaacaagauccagaacucccucagcacggaguggucccccugcagcgugaccugcggcaacgggauccagguccggaucaagcccggcuccgcgaacaagcccaaggacgagcuggacuacgccaacgacaucgagaagaagaucugcaagauggagaagugcagcuccguguucaacguggucaacagcuccaucgggcugaucauggugcucagcuuccuguuccugaacggcgggggcgggagcggcgggggcggcaagcucgaguccacgcggaucuaccagauccuggcgaucuacagcaccgucgccagcucccuggugcucguggucagccugggggccaucuccuucuggaugugcagcaacggcucccugcagugccgcaucugcaucugaggacuaguuauaagacugacuagcccgaugggccucccaacgggcccuccuccccuccuugcaccgagauuaaucaaaggcucuuuucagagccaccaaaaaaaaaaaaaaaaaaaaaaaaaaaaaaaaaaaaaaaaaaaaaaaaaaaaaaaaaaaaaaaaaaaaaaaaaaaaaaaaaaaaaaaaaaaaaaaaaaaaagaauu

SEQ ID NO: 7781 - RNA, 1451 nt, Artificial Sequence
  mRNA Design i-3 (hSL-A100-N5) comprising derived and/or modified sequence from Pf(3D7)__XP_001351122.1__Pf-CSP(199-377)_L(PVTN)_HBsAg (opt1)
aggagaaagcuuaccauggaccccaacgccaaccccaacgccaacccgaacgcgaaccccaacgccaaccccaacgccaacccgaacgccaaccccaacgccaaccccaacgcgaaccccaacgccaacccgaacgccaaccccaacgccaaccccaacgcgaaccccaacgccaacccgaacgccaaccccaacgccaaccccaacgccaaccccaacgcgaacccgaacgccaaccccaacaagaacaaccagggcaacggccaggggcacaacaugcccaacgaccccaaccgcaacgucgacgagaacgccaacgccaacuccgccgugaagaacaacaacaacgaggagccgagcgacaagcacaucaaggaguaccugaacaagauccagaacucccucagcacggaguggucccccugcagcgugaccugcggcaacgggauccagguccggaucaagcccggcuccgcgaacaagcccaaggacgagcuggacuacgccaacgacaucgagaagaagaucugcaagauggagaagugcagcuccgugccggugacgaacauggagaacaucaccagcggcuuccuggggccccuccuggugcugcaggccggcuucuuccuccugacccgcauccugaccaucccgcagucccucgacagcugguggaccucccugaacuuccucgggggcagccccgucugccuggggcagaacucccagagccccaccuccaaccacagccccaccuccugcccgcccaucugccccggcuaccgguggaugugccugcgccgguucaucaucuuccuguucauccuccugcugugccucaucuuccugcuggugcuccuggacuaccagggcaugcugcccgugugcccgcucauccccgggagcacgaccaccaacaccggccccugcaagacgugcaccacccccgcccaggggaacuccauguucccgagcugcugcugcaccaagcccacggacggcaacugcacgugcauccccauccccuccagcugggcguucgccaaguaccugugggagugggccuccguccgcuucagcuggcugucccuccuggugccguucgugcagugguucgucgggcugagccccaccguguggcucuccgccaucuggaugaugugguacuggggccccagccuguacagcaucgugucccccuucaucccgcugcuccccaucuucuucugccugugggucuacaucugaggacuaguuauaagacugacuagcccgaugggccucccaacgggcccuccuccccuccuugcaccgagauuaaucaaaggcucuuuucagagccaccaaaaaaaaaaaaaaaaaaaaaaaaaaaaaaaaaaaaaaaaaaaaaaaaaaaaaaaaaaaaaaaaaaaaaaaaaaaaaaaaaaaaaaaaaaaaaaaaaaaaagaauu

SEQ ID NO: 7782 - RNA, 1493 nt, Artificial Sequence
  mRNA Design i-3 (hSL-A100-N5) comprising derived and/or modified sequence from Pf(3D7)__XP_001351122.1__Pf-CSP(199-387)_L(PVTN)_HBsAg (opt1)
aggagaaagcuuaccaugauggccccggaccccaacgccaaccccaacgccaacccgaacgcgaaccccaacgccaaccccaacgccaacccgaacgccaaccccaacgccaaccccaacgcgaaccccaacgccaacccgaacgccaaccccaacgccaaccccaacgcgaaccccaacgccaacccgaacgccaaccccaacgccaaccccaacgccaaccccaacgcgaacccgaacgccaaccccaacaagaacaaccagggcaacggccaggggcacaacaugcccaacgaccccaaccgcaacgucgacgagaacgccaacgccaacuccgccgugaagaacaacaacaacgaggagccgagcgacaagcacaucaaggaguaccugaacaagauccagaacucccucagcacggaguggucccccugcagcgugaccugcggcaacgggauccagguccggaucaagcccggcuccgcgaacaagcccaaggacgagcuggacuacgccaacgacaucgagaagaagaucugcaagauggagaagugcagcuccguguucaacguggucaacagcuccaucgggcuggggccggugacgaacauggagaacaucaccagcggcuuccuggggccccuccuggugcugcaggccggcuucuuccuccugacccgcauccugaccaucccgcagucccucgacagcugguggaccucccugaacuuccucgggggcagccccgucugccuggggcagaacucccagagccccaccuccaaccacagccccaccuccugcccgcccaucugccccggcuaccgguggaugugccugcgccgguucaucaucuuccuguucauccuccugcugugccucaucuuccugcuggugcuccuggacuaccagggcaugcugcccgugugcccgcucauccccgggagcacgaccaccaacaccggccccugcaagacgugcaccacccccgcccaggggaacuccauguucccgagcugcugcugcaccaagcccacggacggcaacugcacgugcauccccauccccuccagcugggcguucgccaaguaccugugggagugggccuccguccgcuucagcuggcugucccuccuggugccguucgugcagugguucgucgggcugagccccaccguguggcucuccgccaucuggaugaugugguacuggggccccagccuguacagcaucgugucccccuucaucccgcugcuccccaucuucuucugccugugggucuacaucugaggacuaguuauaagacugacuagcccgaugggccucccaacgggcccuccuccccuccuugcaccgagauuaaucaaaggcucuuuucagagccaccaaaaaaaaaaaaaaaaaaaaaaaaaaaaaaaaaaaaaaaaaaaaaaaaaaaaaaaaaaaaaaaaaaaaaaaaaaaaaaaaaaaaaaaaaaaaaaaaaaaaagaauu

SEQ ID NO: 7783 - RNA, 677 nt, Artificial Sequence
  mRNA Design i-3 (hSL-A100-N5) comprising derived and/or modified sequence from Pf(3D7)__XP_001351122.1__HsALB_Pf-CSP(19-152) (opt1)
aggagaaagcuuaccaugaagugggugaccuucaucagccugcucuuccuguucuccagcgccuacucccuguuccaggaguaccagugcuacggcuccagcuccaacacccgggugcucaacgagcugaacuacgacaacgcggggaccaaccuguacaacgagcucgagaugaacuacuacggcaagcaggagaacugguacagccugaagaagaacucccgcagccugggggagaacgacgacggcaacaacgaggacaacgagaagcuccggaagcccaagcacaagaagcugaagcagccggccgacgggaaccccgaccccaacgccaaccccaacguggacccgaacgccaaccccaacgucgaccccaacgccaaccccaacguggacccgaacgcgaaccccaacgccaaccccaacgccaaccccaacgccaacccgaacgcgaaccccaacgccaaccccugaggacuaguuauaagacugacuagcccgaugggccucccaacgggcccuccuccccuccuugcaccgagauuaaucaaaggcucuuuucagagccaccaaaaaaaaaaaaaaaaaaaaaaaaaaaaaaaaaaaaaaaaaaaaaaaaaaaaaaaaaaaaaaaaaaaaaaaaaaaaaaaaaaaaaaaaaaaaaaaaaaaaagaauu

SEQ ID NO: 7784 - RNA, 797 nt, Artificial Sequence
  mRNA Design i-3 (hSL-A100-N5) comprising derived and/or modified sequence from Pf(3D7)__XP_001351122.1__HsALB_Pf-CSP(19-192) (opt1)
aggagaaagcuuaccaugaagugggugaccuucaucagccugcucuuccuguucuccagcgccuacucccuguuccaggaguaccagugcuacggcuccagcuccaacacccgggugcucaacgagcugaacuacgacaacgcggggaccaaccuguacaacgagcucgagaugaacuacuacggcaagcaggagaacugguacagccugaagaagaacucccgcagccugggggagaacgacgacggcaacaacgaggacaacgagaagcuccggaagcccaagcacaagaagcugaagcagccggccgacgggaaccccgaccccaacgccaaccccaacguggacccgaacgccaaccccaacgucgaccccaacgccaaccccaacguggacccgaacgcgaaccccaacgccaaccccaacgccaaccccaacgccaacccgaacgcgaaccccaacgccaaccccaacgccaaccccaacgccaacccgaacgccaaccccaacgcgaaccccaacgccaaccccaacgccaacccgaacgccaaccccaacgccaaccccaacgcgaaccccaacgccaacccgugaggacuaguuauaagacugacuagcccgaugggccucccaacgggcccuccuccccuccuugcaccgagauuaaucaaaggcucuuuucagagccaccaaaaaaaaaaaaaaaaaaaaaaaaaaaaaaaaaaaaaaaaaaaaaaaaaaaaaaaaaaaaaaaaaaaaaaaaaaaaaaaaaaaaaaaaaaaaaaaaaaaaagaauu

SEQ ID NO: 7785 - RNA, 1037 nt, Artificial Sequence
  mRNA Design i-3 (hSL-A100-N5) comprising derived and/or modified sequence from Pf(3D7)__XP_001351122.1__HsALB_Pf-CSP(19-272) (opt1)
aggagaaagcuuaccaugaagugggugaccuucaucagccugcucuuccuguucuccagcgccuacucccuguuccaggaguaccagugcuacggcuccagcuccaacacccgggugcucaacgagcugaacuacgacaacgcggggaccaaccuguacaacgagcucgagaugaacuacuacggcaagcaggagaacugguacagccugaagaagaacucccgcagccugggggagaacgacgacggcaacaacgaggacaacgagaagcuccggaagcccaagcacaagaagcugaagcagccggccgacgggaaccccgaccccaacgccaaccccaacguggacccgaacgccaaccccaacgucgaccccaacgccaaccccaacguggacccgaacgcgaaccccaacgccaaccccaacgccaaccccaacgccaacccgaacgcgaaccccaacgccaaccccaacgccaaccccaacgccaacccgaacgccaaccccaacgcgaaccccaacgccaaccccaacgccaacccgaacgccaaccccaacgccaaccccaacgcgaaccccaacgccaacccgaacgccaaccccaacguggaccccaacgccaaccccaacgccaacccgaacgcgaaccccaacgccaaccccaacgccaacccgaacgccaaccccaacgccaaccccaacgcgaaccccaacgccaacccgaacgccaaccccaacgccaaccccaacgcgaaccccaacgccaacccgaacgccaaccccaacgccaaccccaacgccaaccccaacgcgaacccgaacgccaaccccugaggacuaguuauaagacugacuagcccgaugggccucccaacgggcccuccuccccuccuugcaccgagauuaaucaaaggcucuuuucagagccaccaaaaaaaaaaaaaaaaaaaaaaaaaaaaaaaaaaaaaaaaaaaaaaaaaaaaaaaaaaaaaaaaaaaaaaaaaaaaaaaaaaaaaaaaaaaaaaaaaaaaagaauu

SEQ ID NO: 7786 - RNA, 1199 nt, Artificial Sequence
  mRNA Design i-3 (hSL-A100-N5) comprising derived and/or modified sequence from Pf(3D7)__XP_001351122.1__HsALB_Pf-CSP(19-272)_L(AAY)_Pf-CSP(310-3 27)_L(AAY)_Pf-CSP(346-375) (opt1)
aggagaaagcuuaccaugaagugggugaccuucaucagccugcucuuccuguucuccagcgccuacucccuguuccaggaguaccagugcuacggcuccagcuccaacacccgggugcucaacgagcugaacuacgacaacgcggggaccaaccuguacaacgagcucgagaugaacuacuacggcaagcaggagaacugguacagccugaagaagaacucccgcagccugggggagaacgacgacggcaacaacgaggacaacgagaagcuccggaagcccaagcacaagaagcugaagcagccggccgacgggaaccccgaccccaacgccaaccccaacguggacccgaacgccaaccccaacgucgaccccaacgccaaccccaacguggacccgaacgcgaaccccaacgccaaccccaacgccaaccccaacgccaacccgaacgcgaaccccaacgccaaccccaacgccaaccccaacgccaacccgaacgccaaccccaacgcgaaccccaacgccaaccccaacgccaacccgaacgccaaccccaacgccaaccccaacgcgaaccccaacgccaacccgaacgccaaccccaacguggaccccaacgccaaccccaacgccaacccgaacgcgaaccccaacgccaaccccaacgccaacccgaacgccaaccccaacgccaaccccaacgcgaaccccaacgccaacccgaacgccaaccccaacgccaaccccaacgcgaaccccaacgccaacccgaacgccaaccccaacgccaaccccaacgccaaccccaacgcgaacccgaacgccaaccccgccgcguaugagccgagcgacaagcacaucaaggaguaccugaacaagauccagaacucccucgcggccuacaucaagcccggcuccgcgaacaagcccaaggacgagcuggacuacgccaacgacaucgagaagaagaucugcaagauggagaagugcagcugaggacuaguuauaagacugacuagcccgaugggccucccaacgggcccuccuccccuccuugcaccgagauuaaucaaaggcucuuuucagagccaccaaaaaaaaaaaaaaaaaaaaaaaaaaaaaaaaaaaaaaaaaaaaaaaaaaaaaaaaaaaaaaaaaaaaaaaaaaaaaaaaaaaaaaaaaaaaaaaaaaaaagaauu

SEQ ID NO: 7787 - RNA, 1160 nt, Artificial Sequence
  mRNA Design i-3 (hSL-A100-N5) comprising derived and/or modified sequence from Pf(3D7)__XP_001351122.1__HsALB_Pf-CSP(19-272)_L(AAY)_Pf-CSP(346-3 65)_L(AAY)_P2 (opt1)
aggagaaagcuuaccaugaagugggugaccuucaucagccugcucuuccuguucuccagcgccuacucccuguuccaggaguaccagugcuacggcuccagcuccaacacccgggugcucaacgagcugaacuacgacaacgcggggaccaaccuguacaacgagcucgagaugaacuacuacggcaagcaggagaacugguacagccugaagaagaacucccgcagccugggggagaacgacgacggcaacaacgaggacaacgagaagcuccggaagcccaagcacaagaagcugaagcagccggccgacgggaaccccgaccccaacgccaaccccaacguggacccgaacgccaaccccaacgucgaccccaacgccaaccccaacguggacccgaacgcgaaccccaacgccaaccccaacgccaaccccaacgccaacccgaacgcgaaccccaacgccaaccccaacgccaaccccaacgccaacccgaacgccaaccccaacgcgaaccccaacgccaaccccaacgccaacccgaacgccaaccccaacgccaaccccaacgcgaaccccaacgccaacccgaacgccaaccccaacguggaccccaacgccaaccccaacgccaacccgaacgcgaaccccaacgccaaccccaacgccaacccgaacgccaaccccaacgccaaccccaacgcgaaccccaacgccaacccgaacgccaaccccaacgccaaccccaacgcgaaccccaacgccaacccgaacgccaaccccaacgccaaccccaacgccaaccccaacgcgaacccgaacgccaaccccgccgcguauaucaagcccggcuccgcgaacaagcccaaggacgagcuggacuacgccaacgacaucgaggcggccuaccaguacaucaaggccaacagcaaguucaucggcaucaccgagcugugaggacuaguuauaagacugacuagcccgaugggccucccaacgggcccuccuccccuccuugcaccgagauuaaucaaaggcucuuuucagagccaccaaaaaaaaaaaaaaaaaaaaaaaaaaaaaaaaaaaaaaaaaaaaaaaaaaaaaaaaaaaaaaaaaaaaaaaaaaaaaaaaaaaaaaaaaaaaaaaaaaaaagaauu

SEQ ID NO: 7788 - RNA, 1154 nt, Artificial Sequence
  mRNA Design i-3 (hSL-A100-N5) comprising derived and/or modified sequence from Pf(3D7)__XP_001351122.1__HsALB_Pf-CSP(19-272)_L(AAY)_Pf-CSP(346-3 65)_L(AAY)_PADRE (opt1)
aggagaaagcuuaccaugaagugggugaccuucaucagccugcucuuccuguucuccagcgccuacucccuguuccaggaguaccagugcuacggcuccagcuccaacacccgggugcucaacgagcugaacuacgacaacgcggggaccaaccuguacaacgagcucgagaugaacuacuacggcaagcaggagaacugguacagccugaagaagaacucccgcagccugggggagaacgacgacggcaacaacgaggacaacgagaagcuccggaagcccaagcacaagaagcugaagcagccggccgacgggaaccccgaccccaacgccaaccccaacguggacccgaacgccaaccccaacgucgaccccaacgccaaccccaacguggacccgaacgcgaaccccaacgccaaccccaacgccaaccccaacgccaacccgaacgcgaaccccaacgccaaccccaacgccaaccccaacgccaacccgaacgccaaccccaacgcgaaccccaacgccaaccccaacgccaacccgaacgccaaccccaacgccaaccccaacgcgaaccccaacgccaacccgaacgccaaccccaacguggaccccaacgccaaccccaacgccaacccgaacgcgaaccccaacgccaaccccaacgccaacccgaacgccaaccccaacgccaaccccaacgcgaaccccaacgccaacccgaacgccaaccccaacgccaaccccaacgcgaaccccaacgccaacccgaacgccaaccccaacgccaaccccaacgccaaccccaacgcgaacccgaacgccaaccccgccgcguauaucaagcccggcuccgcgaacaagcccaaggacgagcuggacuacgccaacgacaucgaggcggccuacgccaaguucguggccgccuggacccugaaggcggccgccugaggacuaguuauaagacugacuagcccgaugggccucccaacgggcccuccuccccuccuugcaccgagauuaaucaaaggcucuuuucagagccaccaaaaaaaaaaaaaaaaaaaaaaaaaaaaaaaaaaaaaaaaaaaaaaaaaaaaaaaaaaaaaaaaaaaaaaaaaaaaaaaaaaaaaaaaaaaaaaaaaaaaagaauu

SEQ ID NO: 7789 - RNA, 1211 nt, Artificial Sequence
  mRNA Design i-3 (hSL-A100-N5) comprising derived and/or modified sequence from Pf(3D7)__XP_001351122.1__HsALB_Pf-CSP(19-272)_L(G4S)_Pf-CSP(310-3 27)_L(G4S)_Pf-CSP(346-375) (opt1)
aggagaaagcuuaccaugaagugggugaccuucaucagccugcucuuccuguucuccagcgccuacucccuguuccaggaguaccagugcuacggcuccagcuccaacacccgggugcucaacgagcugaacuacgacaacgcggggaccaaccuguacaacgagcucgagaugaacuacuacggcaagcaggagaacugguacagccugaagaagaacucccgcagccugggggagaacgacgacggcaacaacgaggacaacgagaagcuccggaagcccaagcacaagaagcugaagcagccggccgacgggaaccccgaccccaacgccaaccccaacguggacccgaacgccaaccccaacgucgaccccaacgccaaccccaacguggacccgaacgcgaaccccaacgccaaccccaacgccaaccccaacgccaacccgaacgcgaaccccaacgccaaccccaacgccaaccccaacgccaacccgaacgccaaccccaacgcgaaccccaacgccaaccccaacgccaacccgaacgccaaccccaacgccaaccccaacgcgaaccccaacgccaacccgaacgccaaccccaacguggaccccaacgccaaccccaacgccaacccgaacgcgaaccccaacgccaaccccaacgccaacccgaacgccaaccccaacgccaaccccaacgcgaaccccaacgccaacccgaacgccaaccccaacgccaaccccaacgcgaaccccaacgccaacccgaacgccaaccccaacgccaaccccaacgccaaccccaacgcgaacccgaacgccaaccccggaggcggaggaucugagccgagcgacaagcacaucaaggaguaccugaacaagauccagaacucccucggcggagguggaaguaucaagcccggcuccgcgaacaagcccaaggacgagcuggacuacgccaacgacaucgagaagaagaucugcaagauggagaagugcagcugaggacuaguuauaagacugacuagcccgaugggccucccaacgggcccuccuccccuccuugcaccgagauuaaucaaaggcucuuuucagagccaccaaaaaaaaaaaaaaaaaaaaaaaaaaaaaaaaaaaaaaaaaaaaaaaaaaaaaaaaaaaaaaaaaaaaaaaaaaaaaaaaaaaaaaaaaaaaaaaaaaaaagaauu

SEQ ID NO: 7790 - RNA, 1196 nt, Artificial Sequence
  mRNA Design i-3 (hSL-A100-N5) comprising derived and/or modified sequence from Pf(3D7)__XP_001351122.1__HsALB_Pf-CSP(19-272)_L(G4S)_Pf-CSP(310-3 27)_Pf-CSP(346-375) (opt1)
aggagaaagcuuaccaugaagugggugaccuucaucagccugcucuuccuguucuccagcgccuacucccuguuccaggaguaccagugcuacggcuccagcuccaacacccgggugcucaacgagcugaacuacgacaacgcggggaccaaccuguacaacgagcucgagaugaacuacuacggcaagcaggagaacugguacagccugaagaagaacucccgcagccugggggagaacgacgacggcaacaacgaggacaacgagaagcuccggaagcccaagcacaagaagcugaagcagccggccgacgggaaccccgaccccaacgccaaccccaacguggacccgaacgccaaccccaacgucgaccccaacgccaaccccaacguggacccgaacgcgaaccccaacgccaaccccaacgccaaccccaacgccaacccgaacgcgaaccccaacgccaaccccaacgccaaccccaacgccaacccgaacgccaaccccaacgcgaaccccaacgccaaccccaacgccaacccgaacgccaaccccaacgccaaccccaacgcgaaccccaacgccaacccgaacgccaaccccaacguggaccccaacgccaaccccaacgccaacccgaacgcgaaccccaacgccaaccccaacgccaacccgaacgccaaccccaacgccaaccccaacgcgaaccccaacgccaacccgaacgccaaccccaacgccaaccccaacgcgaaccccaacgccaacccgaacgccaaccccaacgccaaccccaacgccaaccccaacgcgaacccgaacgccaaccccggaggcggaggaucugagccgagcgacaagcacaucaaggaguaccugaacaagauccagaacucccucaucaagcccggcuccgcgaacaagcccaaggacgagcuggacuacgccaacgacaucgagaagaagaucugcaagauggagaagugcagcugaggacuaguuauaagacugacuagcccgaugggccucccaacgggcccuccuccccuccuugcaccgagauuaaucaaaggcucuuuucagagccaccaaaaaaaaaaaaaaaaaaaaaaaaaaaaaaaaaaaaaaaaaaaaaaaaaaaaaaaaaaaaaaaaaaaaaaaaaaaaaaaaaaaaaaaaaaaaaaaaaaaaagaauu

SEQ ID NO: 7791 - RNA, 1196 nt, Artificial Sequence
  mRNA Design i-3 (hSL-A100-N5) comprising derived and/or modified sequence from Pf(3D7)__XP_001351122.1__HsALB_Pf-CSP(19-325) (opt1)
aggagaaagcuuaccaugaagugggugaccuucaucagccugcucuuccuguucuccagcgccuacucccuguuccaggaguaccagugcuacggcuccagcuccaacacccgggugcucaacgagcugaacuacgacaacgcggggaccaaccuguacaacgagcucgagaugaacuacuacggcaagcaggagaacugguacagccugaagaagaacucccgcagccugggggagaacgacgacggcaacaacgaggacaacgagaagcuccggaagcccaagcacaagaagcugaagcagccggccgacgggaaccccgaccccaacgccaaccccaacguggacccgaacgccaaccccaacgucgaccccaacgccaaccccaacguggacccgaacgcgaaccccaacgccaaccccaacgccaaccccaacgccaacccgaacgcgaaccccaacgccaaccccaacgccaaccccaacgccaacccgaacgccaaccccaacgcgaaccccaacgccaaccccaacgccaacccgaacgccaaccccaacgccaaccccaacgcgaaccccaacgccaacccgaacgccaaccccaacguggaccccaacgccaaccccaacgccaacccgaacgcgaaccccaacgccaaccccaacgccaacccgaacgccaaccccaacgccaaccccaacgcgaaccccaacgccaacccgaacgccaaccccaacgccaaccccaacgcgaaccccaacgccaacccgaacgccaaccccaacgccaaccccaacgccaaccccaacgcgaacccgaacgccaaccccaacaagaacaaccagggcaacggccaggggcacaacaugcccaacgaccccaaccgcaacgucgacgagaacgccaacgccaacuccgccgugaagaacaacaacaacgaggagccgagcgacaagcacaucaaggaguaccugaacaagauccagaacugaggacuaguuauaagacugacuagcccgaugggccucccaacgggcccuccuccccuccuugcaccgagauuaaucaaaggcucuuuucagagccaccaaaaaaaaaaaaaaaaaaaaaaaaaaaaaaaaaaaaaaaaaaaaaaaaaaaaaaaaaaaaaaaaaaaaaaaaaaaaaaaaaaaaaaaaaaaaaaaaaaaaagaauu

SEQ ID NO: 7792 - RNA, 1373 nt, Artificial Sequence
  mRNA Design i-3 (hSL-A100-N5) comprising derived and/or modified sequence from Pf(3D7)__XP_001351122.1__HsALB_Pf-CSP(19-384) (opt1)
aggagaaagcuuaccaugaagugggugaccuucaucagccugcucuuccuguucuccagcgccuacucccuguuccaggaguaccagugcuacggcuccagcuccaacacccgggugcucaacgagcugaacuacgacaacgcggggaccaaccuguacaacgagcucgagaugaacuacuacggcaagcaggagaacugguacagccugaagaagaacucccgcagccugggggagaacgacgacggcaacaacgaggacaacgagaagcuccggaagcccaagcacaagaagcugaagcagccggccgacgggaaccccgaccccaacgccaaccccaacguggacccgaacgccaaccccaacgucgaccccaacgccaaccccaacguggacccgaacgcgaaccccaacgccaaccccaacgccaaccccaacgccaacccgaacgcgaaccccaacgccaaccccaacgccaaccccaacgccaacccgaacgccaaccccaacgcgaaccccaacgccaaccccaacgccaacccgaacgccaaccccaacgccaaccccaacgcgaaccccaacgccaacccgaacgccaaccccaacguggaccccaacgccaaccccaacgccaacccgaacgcgaaccccaacgccaaccccaacgccaacccgaacgccaaccccaacgccaaccccaacgcgaaccccaacgccaacccgaacgccaaccccaacgccaaccccaacgcgaaccccaacgccaacccgaacgccaaccccaacgccaaccccaacgccaaccccaacgcgaacccgaacgccaaccccaacaagaacaaccagggcaacggccaggggcacaacaugcccaacgaccccaaccgcaacgucgacgagaacgccaacgccaacuccgccgugaagaacaacaacaacgaggagccgagcgacaagcacaucaaggaguaccugaacaagauccagaacucccucagcacggaguggucccccugcagcgugaccugcggcaacgggauccagguccggaucaagcccggcuccgcgaacaagcccaaggacgagcuggacuacgccaacgacaucgagaagaagaucugcaagauggagaagugcagcuccguguucaacguggucaacagcuccugaggacuaguuauaagacugacuagcccgaugggccucccaacgggcccuccuccccuccuugcaccgagauuaaucaaaggcucuuuucagagccaccaaaaaaaaaaaaaaaaaaaaaaaaaaaaaaaaaaaaaaaaaaaaaaaaaaaaaaaaaaaaaaaaaaaaaaaaaaaaaaaaaaaaaaaaaaaaaaaaaaaaagaauu

SEQ ID NO: 7793 - RNA, 1511 nt, Artificial Sequence
  mRNA Design i-3 (hSL-A100-N5) comprising derived and/or modified sequence from Pf(3D7)__XP_001351122.1__HsALB_Pf-CSP(19-384)_TM domain HA (opt1)
aggagaaagcuuaccaugaagugggugaccuucaucagccugcucuuccuguucuccagcgccuacucccuguuccaggaguaccagugcuacggcuccagcuccaacacccgggugcucaacgagcugaacuacgacaacgcggggaccaaccuguacaacgagcucgagaugaacuacuacggcaagcaggagaacugguacagccugaagaagaacucccgcagccugggggagaacgacgacggcaacaacgaggacaacgagaagcuccggaagcccaagcacaagaagcugaagcagccggccgacgggaaccccgaccccaacgccaaccccaacguggacccgaacgccaaccccaacgucgaccccaacgccaaccccaacguggacccgaacgcgaaccccaacgccaaccccaacgccaaccccaacgccaacccgaacgcgaaccccaacgccaaccccaacgccaaccccaacgccaacccgaacgccaaccccaacgcgaaccccaacgccaaccccaacgccaacccgaacgccaaccccaacgccaaccccaacgcgaaccccaacgccaacccgaacgccaaccccaacguggaccccaacgccaaccccaacgccaacccgaacgcgaaccccaacgccaaccccaacgccaacccgaacgccaaccccaacgccaaccccaacgcgaaccccaacgccaacccgaacgccaaccccaacgccaaccccaacgcgaaccccaacgccaacccgaacgccaaccccaacgccaaccccaacgccaaccccaacgcgaacccgaacgccaaccccaacaagaacaaccagggcaacggccaggggcacaacaugcccaacgaccccaaccgcaacgucgacgagaacgccaacgccaacuccgccgugaagaacaacaacaacgaggagccgagcgacaagcacaucaaggaguaccugaacaagauccagaacucccucagcacggaguggucccccugcagcgugaccugcggcaacgggauccagguccggaucaagcccggcuccgcgaacaagcccaaggacgagcuggacuacgccaacgacaucgagaagaagaucugcaagauggagaagugcagcuccguguucaacguggucaacagcuccaagcucgaguccacgcggaucuaccagauccuggcgaucuacagcaccgucgccagcucccuggugcucguggucagccugggggccaucuccuucuggaugugcagcaacggcucccugcagugccgcaucugcaucugaggacuaguuauaagacugacuagcccgaugggccucccaacgggcccuccuccccuccuugcaccgagauuaaucaaaggcucuuuucagagccaccaaaaaaaaaaaaaaaaaaaaaaaaaaaaaaaaaaaaaaaaaaaaaaaaaaaaaaaaaaaaaaaaaaaaaaaaaaaaaaaaaaaaaaaaaaaaaaaaaaaaagaauu

SEQ ID NO: 7794 - RNA, 1223 nt, Artificial Sequence
  mRNA Design i-3 (hSL-A100-N5) comprising derived and/or modified sequence from Pf(3D7)__XP_001351122.1__HsALB_Pf-CSP(82-397) (opt1)
aggagaaagcuuaccaugaagugggugaccuucaucagccugcucuuccuguucuccagcgccuacuccgacaacgagaagcuccggaagcccaagcacaagaagcugaagcagccggccgacgggaaccccgaccccaacgccaaccccaacguggacccgaacgccaaccccaacgucgaccccaacgccaaccccaacguggacccgaacgcgaaccccaacgccaaccccaacgccaaccccaacgccaacccgaacgcgaaccccaacgccaaccccaacgccaaccccaacgccaacccgaacgccaaccccaacgcgaaccccaacgccaaccccaacgccaacccgaacgccaaccccaacgccaaccccaacgcgaaccccaacgccaacccgaacgccaaccccaacguggaccccaacgccaaccccaacgccaacccgaacgcgaaccccaacgccaaccccaacgccaacccgaacgccaaccccaacgccaaccccaacgcgaaccccaacgccaacccgaacgccaaccccaacgccaaccccaacgcgaaccccaacgccaacccgaacgccaaccccaacgccaaccccaacgccaaccccaacgcgaacccgaacgccaaccccaacaagaacaaccagggcaacggccaggggcacaacaugcccaacgaccccaaccgcaacgucgacgagaacgccaacgccaacuccgccgugaagaacaacaacaacgaggagccgagcgacaagcacaucaaggaguaccugaacaagauccagaacucccucagcacggaguggucccccugcagcgugaccugcggcaacgggauccagguccggaucaagcccggcuccgcgaacaagcccaaggacgagcuggacuacgccaacgacaucgagaagaagaucugcaagauggagaagugcagcuccguguucaacguggucaacagcuccaucgggcugaucauggugcucagcuuccuguuccugaacugaggacuaguuauaagacugacuagcccgaugggccucccaacgggcccuccuccccuccuugcaccgagauuaaucaaaggcucuuuucagagccaccaaaaaaaaaaaaaaaaaaaaaaaaaaaaaaaaaaaaaaaaaaaaaaaaaaaaaaaaaaaaaaaaaaaaaaaaaaaaaaaaaaaaaaaaaaaaaaaaaaaaagaauu

SEQ ID NO: 7795 - RNA, 575 nt, Artificial Sequence
  mRNA Design i-3 (hSL-A100-N5) comprising derived and/or modified sequence from Pf(3D7)__XP_001351122.1__HsALB_Pf-CSP(93-192) (opt1)
aggagaaagcuuaccaugaagugggugaccuucaucagccugcucuuccuguucuccagcgccuacuccaagcugaagcagccggccgacgggaaccccgaccccaacgccaaccccaacguggacccgaacgccaaccccaacgucgaccccaacgccaaccccaacguggacccgaacgcgaaccccaacgccaaccccaacgccaaccccaacgccaacccgaacgcgaaccccaacgccaaccccaacgccaaccccaacgccaacccgaacgccaaccccaacgcgaaccccaacgccaaccccaacgccaacccgaacgccaaccccaacgccaaccccaacgcgaaccccaacgccaacccgugaggacuaguuauaagacugacuagcccgaugggccucccaacgggcccuccuccccuccuugcaccgagauuaaucaaaggcucuuuucagagccaccaaaaaaaaaaaaaaaaaaaaaaaaaaaaaaaaaaaaaaaaaaaaaaaaaaaaaaaaaaaaaaaaaaaaaaaaaaaaaaaaaaaaaaaaaaaaaaaaaaaaagaauu

SEQ ID NO: 7796 - RNA, 815 nt, Artificial Sequence
  mRNA Design i-3 (hSL-A100-N5) comprising derived and/or modified sequence from Pf(3D7)__XP_001351122.1__HsALB_Pf-CSP(93-272) (opt1)
aggagaaagcuuaccaugaagugggugaccuucaucagccugcucuuccuguucuccagcgccuacuccaagcugaagcagccggccgacgggaaccccgaccccaacgccaaccccaacguggacccgaacgccaaccccaacgucgaccccaacgccaaccccaacguggacccgaacgcgaaccccaacgccaaccccaacgccaaccccaacgccaacccgaacgcgaaccccaacgccaaccccaacgccaaccccaacgccaacccgaacgccaaccccaacgcgaaccccaacgccaaccccaacgccaacccgaacgccaaccccaacgccaaccccaacgcgaaccccaacgccaacccgaacgccaaccccaacguggaccccaacgccaaccccaacgccaacccgaacgcgaaccccaacgccaaccccaacgccaacccgaacgccaaccccaacgccaaccccaacgcgaaccccaacgccaacccgaacgccaaccccaacgccaaccccaacgcgaaccccaacgccaacccgaacgccaaccccaacgccaaccccaacgccaaccccaacgcgaacccgaacgccaaccccugaggacuaguuauaagacugacuagcccgaugggccucccaacgggcccuccuccccuccuugcaccgagauuaaucaaaggcucuuuucagagccaccaaaaaaaaaaaaaaaaaaaaaaaaaaaaaaaaaaaaaaaaaaaaaaaaaaaaaaaaaaaaaaaaaaaaaaaaaaaaaaaaaaaaaaaaaaaaaaaaaaaaagaauu

SEQ ID NO: 7797 - RNA, 1190 nt, Artificial Sequence
  mRNA Design i-3 (hSL-A100-N5) comprising derived and/or modified sequence from Pf(3D7)__XP_001351122.1__HsALB_Pf-CSP(93-397) (opt1)
aggagaaagcuuaccaugaagugggugaccuucaucagccugcucuuccuguucuccagcgccuacuccaagcugaagcagccggccgacgggaaccccgaccccaacgccaaccccaacguggacccgaacgccaaccccaacgucgaccccaacgccaaccccaacguggacccgaacgcgaaccccaacgccaaccccaacgccaaccccaacgccaacccgaacgcgaaccccaacgccaaccccaacgccaaccccaacgccaacccgaacgccaaccccaacgcgaaccccaacgccaaccccaacgccaacccgaacgccaaccccaacgccaaccccaacgcgaaccccaacgccaacccgaacgccaaccccaacguggaccccaacgccaaccccaacgccaacccgaacgcgaaccccaacgccaaccccaacgccaacccgaacgccaaccccaacgccaaccccaacgcgaaccccaacgccaacccgaacgccaaccccaacgccaaccccaacgcgaaccccaacgccaacccgaacgccaaccccaacgccaaccccaacgccaaccccaacgcgaacccgaacgccaaccccaacaagaacaaccagggcaacggccaggggcacaacaugcccaacgaccccaaccgcaacgucgacgagaacgccaacgccaacuccgccgugaagaacaacaacaacgaggagccgagcgacaagcacaucaaggaguaccugaacaagauccagaacucccucagcacggaguggucccccugcagcgugaccugcggcaacgggauccagguccggaucaagcccggcuccgcgaacaagcccaaggacgagcuggacuacgccaacgacaucgagaagaagaucugcaagauggagaagugcagcuccguguucaacguggucaacagcuccaucgggcugaucauggugcucagcuuccuguuccugaacugaggacuaguuauaagacugacuagcccgaugggccucccaacgggcccuccuccccuccuugcaccgagauuaaucaaaggcucuuuucagagccaccaaaaaaaaaaaaaaaaaaaaaaaaaaaaaaaaaaaaaaaaaaaaaaaaaaaaaaaaaaaaaaaaaaaaaaaaaaaaaaaaaaaaaaaaaaaaaaaaaaaaagaauu

SEQ ID NO: 7798 - RNA, 560 nt, Artificial Sequence
  mRNA Design i-3 (hSL-A100-N5) comprising derived and/or modified sequence from Pf(3D7)__XP_001351122.1__HsALB_Pf-CSP(98-192) (opt1)
aggagaaagcuuaccaugaagugggugaccuucaucagccugcucuuccuguucuccagcgccuacuccgccgacgggaaccccgaccccaacgccaaccccaacguggacccgaacgccaaccccaacgucgaccccaacgccaaccccaacguggacccgaacgcgaaccccaacgccaaccccaacgccaaccccaacgccaacccgaacgcgaaccccaacgccaaccccaacgccaaccccaacgccaacccgaacgccaaccccaacgcgaaccccaacgccaaccccaacgccaacccgaacgccaaccccaacgccaaccccaacgcgaaccccaacgccaacccgugaggacuaguuauaagacugacuagcccgaugggccucccaacgggcccuccuccccuccuugcaccgagauuaaucaaaggcucuuuucagagccaccaaaaaaaaaaaaaaaaaaaaaaaaaaaaaaaaaaaaaaaaaaaaaaaaaaaaaaaaaaaaaaaaaaaaaaaaaaaaaaaaaaaaaaaaaaaaaaaaaaaaagaauu

SEQ ID NO: 7799 - RNA, 800 nt, Artificial Sequence
  mRNA Design i-3 (hSL-A100-N5) comprising derived and/or modified sequence from Pf(3D7)__XP_001351122.1__HsALB_Pf-CSP(98-272) (opt1)
aggagaaagcuuaccaugaagugggugaccuucaucagccugcucuuccuguucuccagcgccuacuccgccgacgggaaccccgaccccaacgccaaccccaacguggacccgaacgccaaccccaacgucgaccccaacgccaaccccaacguggacccgaacgcgaaccccaacgccaaccccaacgccaaccccaacgccaacccgaacgcgaaccccaacgccaaccccaacgccaaccccaacgccaacccgaacgccaaccccaacgcgaaccccaacgccaaccccaacgccaacccgaacgccaaccccaacgccaaccccaacgcgaaccccaacgccaacccgaacgccaaccccaacguggaccccaacgccaaccccaacgccaacccgaacgcgaaccccaacgccaaccccaacgccaacccgaacgccaaccccaacgccaaccccaacgcgaaccccaacgccaacccgaacgccaaccccaacgccaaccccaacgcgaaccccaacgccaacccgaacgccaaccccaacgccaaccccaacgccaaccccaacgcgaacccgaacgccaaccccugaggacuaguuauaagacugacuagcccgaugggccucccaacgggcccuccuccccuccuugcaccgagauuaaucaaaggcucuuuucagagccaccaaaaaaaaaaaaaaaaaaaaaaaaaaaaaaaaaaaaaaaaaaaaaaaaaaaaaaaaaaaaaaaaaaaaaaaaaaaaaaaaaaaaaaaaaaaaaaaaaaaaagaauu

SEQ ID NO: 7800 - RNA, 1106 nt, Artificial Sequence
  mRNA Design i-3 (hSL-A100-N5) comprising derived and/or modified sequence from Pf(3D7)__XP_001351122.1__HsALB_Pf-CSP(98-374) (opt1)
aggagaaagcuuaccaugaagugggugaccuucaucagccugcucuuccuguucuccagcgccuacuccgccgacgggaaccccgaccccaacgccaaccccaacguggacccgaacgccaaccccaacgucgaccccaacgccaaccccaacguggacccgaacgcgaaccccaacgccaaccccaacgccaaccccaacgccaacccgaacgcgaaccccaacgccaaccccaacgccaaccccaacgccaacccgaacgccaaccccaacgcgaaccccaacgccaaccccaacgccaacccgaacgccaaccccaacgccaaccccaacgcgaaccccaacgccaacccgaacgccaaccccaacguggaccccaacgccaaccccaacgccaacccgaacgcgaaccccaacgccaaccccaacgccaacccgaacgccaaccccaacgccaaccccaacgcgaaccccaacgccaacccgaacgccaaccccaacgccaaccccaacgcgaaccccaacgccaacccgaacgccaaccccaacgccaaccccaacgccaaccccaacgcgaacccgaacgccaaccccaacaagaacaaccagggcaacggccaggggcacaacaugcccaacgaccccaaccgcaacgucgacgagaacgccaacgccaacuccgccgugaagaacaacaacaacgaggagccgagcgacaagcacaucaaggaguaccugaacaagauccagaacucccucagcacggaguggucccccugcagcgugaccugcggcaacgggauccagguccggaucaagcccggcuccgcgaacaagcccaaggacgagcuggacuacgccaacgacaucgagaagaagaucugcaagauggagaagugcugaggacuaguuauaagacugacuagcccgaugggccucccaacgggcccuccuccccuccuugcaccgagauuaaucaaaggcucuuuucagagccaccaaaaaaaaaaaaaaaaaaaaaaaaaaaaaaaaaaaaaaaaaaaaaaaaaaaaaaaaaaaaaaaaaaaaaaaaaaaaaaaaaaaaaaaaaaaaaaaaaaaaagaauu

SEQ ID NO: 7801 - RNA, 1175 nt, Artificial Sequence
  mRNA Design i-3 (hSL-A100-N5) comprising derived and/or modified sequence from Pf(3D7)__XP_001351122.1__HsALB_Pf-CSP(98-397) (opt1)
aggagaaagcuuaccaugaagugggugaccuucaucagccugcucuuccuguucuccagcgccuacuccgccgacgggaaccccgaccccaacgccaaccccaacguggacccgaacgccaaccccaacgucgaccccaacgccaaccccaacguggacccgaacgcgaaccccaacgccaaccccaacgccaaccccaacgccaacccgaacgcgaaccccaacgccaaccccaacgccaaccccaacgccaacccgaacgccaaccccaacgcgaaccccaacgccaaccccaacgccaacccgaacgccaaccccaacgccaaccccaacgcgaaccccaacgccaacccgaacgccaaccccaacguggaccccaacgccaaccccaacgccaacccgaacgcgaaccccaacgccaaccccaacgccaacccgaacgccaaccccaacgccaaccccaacgcgaaccccaacgccaacccgaacgccaaccccaacgccaaccccaacgcgaaccccaacgccaacccgaacgccaaccccaacgccaaccccaacgccaaccccaacgcgaacccgaacgccaaccccaacaagaacaaccagggcaacggccaggggcacaacaugcccaacgaccccaaccgcaacgucgacgagaacgccaacgccaacuccgccgugaagaacaacaacaacgaggagccgagcgacaagcacaucaaggaguaccugaacaagauccagaacucccucagcacggaguggucccccugcagcgugaccugcggcaacgggauccagguccggaucaagcccggcuccgcgaacaagcccaaggacgagcuggacuacgccaacgacaucgagaagaagaucugcaagauggagaagugcagcuccguguucaacguggucaacagcuccaucgggcugaucauggugcucagcuuccuguuccugaacugaggacuaguuauaagacugacuagcccgaugggccucccaacgggcccuccuccccuccuugcaccgagauuaaucaaaggcucuuuucagagccaccaaaaaaaaaaaaaaaaaaaaaaaaaaaaaaaaaaaaaaaaaaaaaaaaaaaaaaaaaaaaaaaaaaaaaaaaaaaaaaaaaaaaaaaaaaaaaaaaaaaaagaauu

SEQ ID NO: 7802 - RNA, 1502 nt, Artificial Sequence
  mRNA Design i-3 (hSL-A100-N5) comprising derived and/or modified sequence from Pf(3D7)__XP_001351122.1__HsALB_Pf-CSP(199-377)_L(PVTN)_HBsAg (opt1)
aggagaaagcuuaccaugaaguggguaaccuuuauuucccuucuuuuucucuuuagcucggcuuauuccgaccccaacgccaaccccaacgccaacccgaacgcgaaccccaacgccaaccccaacgccaacccgaacgccaaccccaacgccaaccccaacgcgaaccccaacgccaacccgaacgccaaccccaacgccaaccccaacgcgaaccccaacgccaacccgaacgccaaccccaacgccaaccccaacgccaaccccaacgcgaacccgaacgccaaccccaacaagaacaaccagggcaacggccaggggcacaacaugcccaacgaccccaaccgcaacgucgacgagaacgccaacgccaacuccgccgugaagaacaacaacaacgaggagccgagcgacaagcacaucaaggaguaccugaacaagauccagaacucccucagcacggaguggucccccugcagcgugaccugcggcaacgggauccagguccggaucaagcccggcuccgcgaacaagcccaaggacgagcuggacuacgccaacgacaucgagaagaagaucugcaagauggagaagugcagcuccgugccggugacgaacauggagaacaucaccagcggcuuccuggggccccuccuggugcugcaggccggcuucuuccuccugacccgcauccugaccaucccgcagucccucgacagcugguggaccucccugaacuuccucgggggcagccccgucugccuggggcagaacucccagagccccaccuccaaccacagccccaccuccugcccgcccaucugccccggcuaccgguggaugugccugcgccgguucaucaucuuccuguucauccuccugcugugccucaucuuccugcuggugcuccuggacuaccagggcaugcugcccgugugcccgcucauccccgggagcacgaccaccaacaccggccccugcaagacgugcaccacccccgcccaggggaacuccauguucccgagcugcugcugcaccaagcccacggacggcaacugcacgugcauccccauccccuccagcugggcguucgccaaguaccugugggagugggccuccguccgcuucagcuggcugucccuccuggugccguucgugcagugguucgucgggcugagccccaccguguggcucuccgccaucuggaugaugugguacuggggccccagccuguacagcaucgugucccccuucaucccgcugcuccccaucuucuucugccugugggucuacaucugaggacuaguuauaagacugacuagcccgaugggccucccaacgggcccuccuccccuccuugcaccgagauuaaucaaaggcucuuuucagagccaccaaaaaaaaaaaaaaaaaaaaaaaaaaaaaaaaaaaaaaaaaaaaaaaaaaaaaaaaaaaaaaaaaaaaaaaaaaaaaaaaaaaaaaaaaaaaaaaaaaaaagaauu

SEQ ID NO: 7803 - RNA, 1412 nt, Artificial Sequence; identical to SEQ ID NO: 7773
  mRNA Design i-3 (hSL-A100-N5) comprising derived and/or modified sequence from Pf(3D7)__XP_001351122.1__Pf-CSP (opt1)

SEQ ID NO: 7804 - RNA, 1343 nt, Artificial Sequence; identical to SEQ ID NO: 7774
  mRNA Design i-3 (hSL-A100-N5) comprising derived and/or modified sequence from Pf(3D7)__XP_001351122.1__Pf-CSP(1-374) (opt1)

SEQ ID NO: 7805 - RNA, 1196 nt, Artificial Sequence; identical to SEQ ID NO: 7775
  mRNA Design i-3 (hSL-A100-N5) comprising derived and/or modified sequence from Pf(3D7)__XP_001351122.1__Pf-CSP(1-325) (opt1)

SEQ ID NO: 7806 - RNA, 1412 nt, Artificial Sequence
  mRNA Design i-3 (hSL-A100-N5) comprising derived and/or modified sequence from Pf(3D7)__XP_001351122.1__HsALB_Pf-CSP(19-397) (opt1)
aggagaaagcuuaccaugaagugggugaccuucaucagccuccuguuccuguucuccagcgccuacucccuguuccaggaguaccagugcuacggcagcuccagcaacacccgcguccucaacgagcugaacuacgacaacgccgggacgaaccuguacaacgagcucgagaugaacuacuacggcaagcaggagaacugguacucccugaagaagaacagccggucccugggggagaacgacgacggcaacaacgaggacaacgagaagcuccgcaagcccaagcacaagaagcugaagcagccggcggacgggaaccccgaccccaacgccaaccccaacguggacccgaacgccaaccccaacguggaccccaacgccaaccccaacgucgacccgaacgccaaccccaacgcgaaccccaacgccaaccccaacgccaacccgaacgccaaccccaacgcgaaccccaacgccaaccccaacgccaacccgaacgccaaccccaacgccaaccccaacgcgaaccccaacgccaacccgaacgccaaccccaacgccaaccccaacgccaaccccaacgcgaacccgaacgccaaccccaacguggaccccaacgccaaccccaacgccaacccgaacgccaaccccaacgcgaaccccaacgccaacccgaacgccaaccccaacgccaaccccaacgccaaccccaacgcgaacccgaacgccaaccccaacgccaaccccaacgccaaccccaacgcgaacccgaacgccaaccccaacgccaaccccaacgccaaccccaacgccaacccgaacgcgaaccccaacaagaacaaccagggcaacggccaggggcacaacaugcccaacgaccccaaccggaacguggacgagaacgccaacgccaacagcgccgucaagaacaacaacaacgaggagccguccgacaagcacaucaaggaguaccugaacaagauccagaacagccucuccaccgaguggagccccugcuccgugaccugcggcaacgggauccaggugcgcaucaagcccggcagcgccaacaagcccaaggacgagcuggacuacgcgaacgacaucgagaagaagaucugcaagauggagaagugcuccagcgucuucaacguggugaacuccagcaucgggcugaucaugguccucagcuuccuguuccugaacugaggacuaguuauaagacugacuagcccgaugggccucccaacgggcccuccuccccuccuugcaccgagauuaaucaaaggcucuuuucagagccaccaaaaaaaaaaaaaaaaaaaaaaaaaaaaaaaaaaaaaaaaaaaaaaaaaaaaaaaaaaaaaaaaaaaaaaaaaaaaaaaaaaaaaaaaaaaaaaaaaaaaagaauu

SEQ ID NO: 7807 - RNA, 1430 nt, Artificial Sequence
  mRNA Design i-3 (hSL-A100-N5) comprising derived and/or modified sequence from Pf(3D7)__XP_001351122.1__HsIns-iso1_Pf-CSP(19-397) (opt1)
aggagaaagcuuaccauggcccuguggaugcgccuccugccccugcucgcccugcuggcgcucuggggcccggaccccgccgccgcccuguuccaggaguaccagugcuacgggagcuccagcaacacccgggugcugaacgagcucaacuacgacaacgccggcaccaaccuguacaacgagcuggagaugaacuacuacgggaagcaggagaacugguacucccucaagaagaacagccgcucccugggcgagaacgacgacgggaacaacgaggacaacgagaagcugcggaagcccaagcacaagaagcucaagcagcccgcggacggcaacccggaccccaacgccaaccccaacgucgaccccaacgccaacccgaacguggaccccaacgccaaccccaacguggaccccaacgcgaacccgaacgccaaccccaacgccaaccccaacgccaaccccaacgccaacccgaacgcgaaccccaacgccaaccccaacgccaaccccaacgccaacccgaacgccaaccccaacgcgaaccccaacgccaaccccaacgccaacccgaacgccaaccccaacgccaaccccaacgcgaaccccaacgccaacccgaacgucgaccccaacgccaaccccaacgccaacccgaacgccaaccccaacgcgaaccccaacgccaaccccaacgccaacccgaacgccaaccccaacgcgaaccccaacgccaaccccaacgccaacccgaacgccaaccccaacgccaaccccaacgcgaaccccaacgccaacccgaacgccaaccccaacgccaaccccaacgccaaccccaacgcgaacccgaacaagaacaaccagggcaacgggcagggccacaacaugcccaacgaccccaaccgcaacguggacgagaacgccaacgccaacagcgccgugaagaacaacaacaacgaggagcccuccgacaagcacaucaaggaguaccugaacaagauccagaacagccuguccacggaguggagcccgugcuccgugaccugcgggaacggcauccagguccggaucaagcccgggagcgccaacaagcccaaggacgagcucgacuacgcgaacgacaucgagaagaagaucugcaagauggagaagugcuccagcguguucaacgucgugaacuccagcaucggccugaucauggugcuguccuuccucuuccugaacugaggacuaguuauaagacugacuagcccgaugggccucccaacgggcccuccuccccuccuugcaccgagauuaaucaaaggcucuuuucagagccaccaaaaaaaaaaaaaaaaaaaaaaaaaaaaaaaaaaaaaaaaaaaaaaaaaaaaaaaaaaaaaaaaaaaaaaaaaaaaaaaaaaaaaaaaaaaaaaaaaaaaagaauu

SEQ ID NO: 7808 - RNA, 1409 nt, Artificial Sequence
  mRNA Design i-3 (hSL-A100-N5) comprising derived and/or modified sequence from Pf(3D7)__XP_001351122.1__HsSPARC_Pf-CSP(19-397) (opt1)
aggagaaagcuuaccaugcgcgccuggaucuucuuccugcucugccuggccggccgggcgcuggcccucuuccaggaguaccagugcuacgggagcuccagcaacacccgcgugcugaacgagcugaacuacgacaacgccggcaccaaccucuacaacgagcuggagaugaacuacuacgggaagcaggagaacugguacucccugaagaagaacagccggucccucggcgagaacgacgacgggaacaacgaggacaacgagaagcugcgcaagcccaagcacaagaagcugaagcagccggccgacggcaaccccgaccccaacgccaaccccaacgucgacccgaacgcgaaccccaacguggaccccaacgccaaccccaacguggacccgaacgccaaccccaacgccaaccccaacgcgaaccccaacgccaacccgaacgccaaccccaacgccaaccccaacgccaaccccaacgcgaacccgaacgccaaccccaacgccaaccccaacgccaaccccaacgccaacccgaacgcgaaccccaacgccaaccccaacgccaaccccaacgccaacccgaacgccaaccccaacgucgaccccaacgcgaaccccaacgccaacccgaacgccaaccccaacgccaaccccaacgccaacccgaacgcgaaccccaacgccaaccccaacgccaaccccaacgccaacccgaacgcgaaccccaacgccaaccccaacgccaaccccaacgccaacccgaacgccaaccccaacgcgaaccccaacgccaaccccaacgccaacccgaacgccaaccccaacaagaacaaccagggcaacgggcagggccacaacaugcccaacgaccccaaccggaacguggacgagaacgccaacgcgaacagcgccgugaagaacaacaacaacgaggagccguccgacaagcacaucaaggaguaccucaacaagauccagaacagccuguccacggaguggagccccugcuccgugaccugcgggaacggcauccagguccgcaucaagcccgggagcgccaacaagcccaaggacgagcuggacuacgccaacgacaucgagaagaagaucugcaagauggagaagugcuccagcguguucaacgucgugaacuccagcaucggccucaucauggugcuguccuuccuguuccucaacugaggacuaguuauaagacugacuagcccgaugggccucccaacgggcccuccuccccuccuugcaccgagauuaaucaaaggcucuuuucagagccaccaaaaaaaaaaaaaaaaaaaaaaaaaaaaaaaaaaaaaaaaaaaaaaaaaaaaaaaaaaaaaaaaaaaaaaaaaaaaaaaaaaaaaaaaaaaaaaaaaaaaagaauu

SEQ ID NO: 7809 - RNA, 1412 nt, Artificial Sequence
  mRNA Design i-3 (hSL-A100-N5) comprising derived and/or modified sequence from Pf(3D7)__XP_001351122.1__IgE_Pf-CSP(19-397) (opt1)
aggagaaagcuuaccauggacuggaccuggauccuguuccucguggccgccgcgacccgcguccacagccuguuccaggaguaccagugcuacggcuccagcuccaacacgcgggugcugaacgagcucaacuacgacaacgccgggaccaaccuguacaacgagcuggagaugaacuacuacggcaagcaggagaacugguacagccucaagaagaacucccgcagccugggggagaacgacgacggcaacaacgaggacaacgagaagcugcggaagcccaagcacaagaagcucaagcagccggccgacgggaaccccgaccccaacgccaaccccaacguggacccgaacgccaaccccaacgucgaccccaacgcgaaccccaacguggacccgaacgccaaccccaacgccaaccccaacgccaaccccaacgcgaacccgaacgccaaccccaacgccaaccccaacgccaaccccaacgccaacccgaacgcgaaccccaacgccaaccccaacgccaaccccaacgccaacccgaacgccaaccccaacgcgaaccccaacgccaaccccaacgccaacccgaacgccaaccccaacguggaccccaacgccaaccccaacgcgaacccgaacgccaaccccaacgccaaccccaacgccaacccgaacgccaaccccaacgcgaaccccaacgccaaccccaacgccaacccgaacgccaaccccaacgcgaaccccaacgccaaccccaacgccaacccgaacgccaaccccaacgccaaccccaacgcgaaccccaacgccaacccgaacgccaaccccaacaagaacaaccagggcaacggccaggggcacaacaugcccaacgaccccaaccgcaacgucgacgagaacgccaacgccaacuccgcggugaagaacaacaacaacgaggagccgagcgacaagcacaucaaggaguaccugaacaagauccagaacucccugagcaccgaguggucccccugcagcgugaccugcggcaacgggauccagguccggaucaagcccggcuccgccaacaagcccaaggacgagcucgacuacgccaacgacaucgagaagaagaucugcaagauggagaagugcagcuccguguucaacguggucaacagcuccaucgggcugaucauggugcugagcuuccucuuccugaacugaggacuaguuauaagacugacuagcccgaugggccucccaacgggcccuccuccccuccuugcaccgagauuaaucaaaggcucuuuucagagccaccaaaaaaaaaaaaaaaaaaaaaaaaaaaaaaaaaaaaaaaaaaaaaaaaaaaaaaaaaaaaaaaaaaaaaaaaaaaaaaaaaaaaaaaaaaaaaaaaaaaaagaauu

SEQ ID NO: 7810 - RNA, 1577 nt, Artificial Sequence
  mRNA Design i-3 (hSL-A100-N5) comprising derived and/or modified sequence from Pf(3D7)__XP_001351122.1__Pf-CSP_L(G4SG4)_TM domain HA (opt1)
aggagaaagcuuaccaugaugcgcaagcuggccauccucagcguguccagcuuccuguucgucgaggcccuguuccaggaguaccagugcuacggcuccagcuccaacacccgggugcucaacgagcugaacuacgacaacgcggggaccaaccuguacaacgagcucgagaugaacuacuacggcaagcaggagaacugguacagccugaagaagaacucccgcagccugggggagaacgacgacggcaacaacgaggacaacgagaagcuccggaagcccaagcacaagaagcugaagcagccggccgacgggaaccccgaccccaacgccaaccccaacguggacccgaacgccaaccccaacgucgaccccaacgccaaccccaacguggacccgaacgcgaaccccaacgccaaccccaacgccaaccccaacgccaacccgaacgcgaaccccaacgccaaccccaacgccaaccccaacgccaacccgaacgccaaccccaacgcgaaccccaacgccaaccccaacgccaacccgaacgccaaccccaacgccaaccccaacgcgaaccccaacgccaacccgaacgccaaccccaacguggaccccaacgccaaccccaacgccaacccgaacgcgaaccccaacgccaaccccaacgccaacccgaacgccaaccccaacgccaaccccaacgcgaaccccaacgccaacccgaacgccaaccccaacgccaaccccaacgcgaaccccaacgccaacccgaacgccaaccccaacgccaaccccaacgccaaccccaacgcgaacccgaacgccaaccccaacaagaacaaccagggcaacggccaggggcacaacaugcccaacgaccccaaccgcaacgucgacgagaacgccaacgccaacuccgccgugaagaacaacaacaacgaggagccgagcgacaagcacaucaaggaguaccugaacaagauccagaacucccucagcacggaguggucccccugcagcgugaccugcggcaacgggauccagguccggaucaagcccggcuccgcgaacaagcccaaggacgagcuggacuacgccaacgacaucgagaagaagaucugcaagauggagaagugcagcuccguguucaacguggucaacagcuccaucgggcugaucauggugcucagcuuccuguuccugaacggcggcgggggcagcgggggcggcgggaagcucgaguccacccgcaucuaccagauccuggccaucuacagcaccguggccuccagccugguccucguggugucccugggcgccaucagcuucuggaugugcuccaacgggagccugcagugccggaucugcaucugaggacuaguuauaagacugacuagcccgaugggccucccaacgggcccuccuccccuccuugcaccgagauuaaucaaaggcucuuuucagagccaccaaaaaaaaaaaaaaaaaaaaaaaaaaaaaaaaaaaaaaaaaaaaaaaaaaaaaaaaaaaaaaaaaaaaaaaaaaaaaaaaaaaaaaaaaaaaaaaaaaaaagaauu

SEQ ID NO: 7811 - RNA, 1451 nt, Artificial Sequence
  mRNA Design i-3 (hSL-A100-N5) comprising derived and/or modified sequence from Pf(3D7)__XP_001351122.1__Pf-CSP(199-377)_L(PVTN)_HBsAg (opt1)
aggagaaagcuuaccauggaccccaacgccaacccgaacgccaaccccaacgcgaaccccaacgccaaccccaacgccaacccgaacgccaaccccaacgccaaccccaacgcgaaccccaacgccaacccgaacgccaaccccaacgccaaccccaacgcgaaccccaacgccaacccgaacgccaaccccaacgccaaccccaacgccaaccccaacgcgaacccgaacgccaaccccaacaagaacaaccagggcaacgggcagggccacaacaugcccaacgaccccaaccgcaacguggacgagaacgccaacgccaacagcgccgucaagaacaacaacaacgaggagccguccgacaagcacaucaaggaguaccugaacaagauccagaacagccucuccaccgaguggagccccugcuccgugaccugcgggaacggcauccaggugcggaucaagcccgggagcgcgaacaagcccaaggacgagcuggacuacgccaacgacaucgagaagaagaucugcaagauggagaagugcuccagcgucccggugacgaacauggagaacaucaccuccggcuuccugggcccccuccuggugcugcaggccggguucuuccuccugacccgcauccugaccaucccccagagccucgacuccugguggacgagccugaacuuccugggcgggucccccgucugccucggccagaacagccaguccccgaccagcaaccacucccccaccagcugcccgcccaucugccccggguaccgguggaugugccugcgccgguucaucaucuuccuguucauccuccugcugugccucaucuuccugcuggugcuccuggacuaccagggcaugcugcccgugugcccccucaucccgggcuccaccacgaccaacaccgggcccugcaagaccugcacgacccccgcccagggcaacagcauguuccccagcugcugcugcaccaagccgaccgacgggaacugcacgugcauccccauccccuccagcugggccuucgcgaaguaccugugggagugggccuccguccgcuucagcuggcugucccuccuggugcccuucgugcagugguucgucggccugagcccgaccguguggcucuccgccaucuggaugaugugguacuggggccccagccuguacuccaucgugagccccuucaucccccugcucccgaucuucuucugccugugggucuacaucugaggacuaguuauaagacugacuagcccgaugggccucccaacgggcccuccuccccuccuugcaccgagauuaaucaaaggcucuuuucagagccaccaaaaaaaaaaaaaaaaaaaaaaaaaaaaaaaaaaaaaaaaaaaaaaaaaaaaaaaaaaaaaaaaaaaaaaaaaaaaaaaaaaaaaaaaaaaaaaaaaaaaagaauu

SEQ ID NO: 7812 - RNA, 1493 nt, Artificial Sequence
  mRNA Design i-3 (hSL-A100-N5) comprising derived and/or modified sequence from Pf(3D7)__XP_001351122.1__Pf-CSP(199-387)_L(PVTN)_HBsAg (opt1)
aggagaaagcuuaccaugauggcccccgacccgaacgccaaccccaacgcgaaccccaacgccaaccccaacgccaacccgaacgccaaccccaacgccaaccccaacgcgaaccccaacgccaacccgaacgccaaccccaacgccaaccccaacgcgaaccccaacgccaacccgaacgccaaccccaacgccaaccccaacgccaaccccaacgcgaacccgaacgccaaccccaacgccaaccccaacaagaacaaccagggcaacgggcagggccacaacaugcccaacgacccgaaccgcaacguggacgagaacgccaacgccaacagcgcggucaagaacaacaacaacgaggagcccuccgacaagcacaucaaggaguaccugaacaagauccagaacagccucuccaccgaguggagccccugcuccgugaccugcgggaacggcauccaggugcggaucaagcccgggagcgccaacaagccgaaggacgagcuggacuacgccaacgacaucgagaagaagaucugcaagauggagaagugcuccagcgucuucaacguggugaacuccagcaucggccugggccccgucacgaacauggagaacaucaccuccggguuccucggcccccugcuggugcuccaggccggguucuuccugcugacccgcauccucaccaucccccagagccuggacuccugguggacgagccugaacuuccucggcggguccccggugugccugggccagaacagccagucccccaccagcaaccacucccccaccagcugcccgcccaucugccccggcuaccgguggaugugccugcgccgguucaucaucuuccucuucauccugcugcucugccugaucuuccugcucguccugcuggacuaccaggggaugcuccccgugugcccgcugauccccggcagcaccacgaccaacaccgggcccugcaagaccugcacgacccccgcccagggcaacuccauguucccgagcugcugcugcaccaagcccaccgacggcaacugcacgugcauccccauccccuccagcugggcguucgccaaguaccugugggagugggccuccgugcgcuucagcuggcucucccugcuggucccguucgugcagugguucguggggcucagccccaccgucuggcuguccgccaucuggaugaugugguacuggggccccagccuguacuccaucgugagccccuucaucccgcuccugcccaucuucuucugccuguggguguacaucugaggacuaguuauaagacugacuagcccgaugggccucccaacgggcccuccuccccuccuugcaccgagauuaaucaaaggcucuuuucagagccaccaaaaaaaaaaaaaaaaaaaaaaaaaaaaaaaaaaaaaaaaaaaaaaaaaaaaaaaaaaaaaaaaaaaaaaaaaaaaaaaaaaaaaaaaaaaaaaaaaaaaagaauu

SEQ ID NO: 7813 - RNA, 677 nt, Artificial Sequence
  mRNA Design i-3 (hSL-A100-N5) comprising derived and/or modified sequence from Pf(3D7)__XP_001351122.1__HsALB_Pf-CSP(19-152) (opt1)
aggagaaagcuuaccaugaagugggugaccuucaucagccuccuguuccuguucuccagcgccuacucccuguuccaggaguaccagugcuacggcagcuccagcaacacccgcguccucaacgagcugaacuacgacaacgccgggacgaaccuguacaacgagcucgagaugaacuacuacggcaagcaggagaacugguacucccugaagaagaacagccggucccugggggagaacgacgacggcaacaacgaggacaacgagaagcuccgcaagcccaagcacaagaagcugaagcagccggcggacgggaaccccgaccccaacgccaaccccaacguggacccgaacgccaaccccaacguggaccccaacgccaaccccaacgucgacccgaacgccaaccccaacgcgaaccccaacgccaaccccaacgccaacccgaacgccaaccccaacgcgaaccccugaggacuaguuauaagacugacuagcccgaugggccucccaacgggcccuccuccccuccuugcaccgagauuaaucaaaggcucuuuucagagccaccaaaaaaaaaaaaaaaaaaaaaaaaaaaaaaaaaaaaaaaaaaaaaaaaaaaaaaaaaaaaaaaaaaaaaaaaaaaaaaaaaaaaaaaaaaaaaaaaaaaaagaauu

SEQ ID NO: 7814 - RNA, 797 nt, Artificial Sequence
  mRNA Design i-3 (hSL-A100-N5) comprising derived and/or modified sequence from Pf(3D7)__XP_001351122.1__HsALB_Pf-CSP(19-192) (opt1)
aggagaaagcuuaccaugaagugggugaccuucaucagccuccuguuccuguucuccagcgccuacucccuguuccaggaguaccagugcuacggcagcuccagcaacacccgcguccucaacgagcugaacuacgacaacgccgggacgaaccuguacaacgagcucgagaugaacuacuacggcaagcaggagaacugguacucccugaagaagaacagccggucccugggggagaacgacgacggcaacaacgaggacaacgagaagcuccgcaagcccaagcacaagaagcugaagcagccggcggacgggaaccccgaccccaacgccaaccccaacguggacccgaacgccaaccccaacguggaccccaacgccaaccccaacgucgacccgaacgccaaccccaacgcgaaccccaacgccaaccccaacgccaacccgaacgccaaccccaacgcgaaccccaacgccaaccccaacgccaacccgaacgccaaccccaacgccaaccccaacgcgaaccccaacgccaacccgaacgccaaccccaacgccaaccccaacgccaaccccaacgcgaacccgugaggacuaguuauaagacugacuagcccgaugggccucccaacgggcccuccuccccuccuugcaccgagauuaaucaaaggcucuuuucagagccaccaaaaaaaaaaaaaaaaaaaaaaaaaaaaaaaaaaaaaaaaaaaaaaaaaaaaaaaaaaaaaaaaaaaaaaaaaaaaaaaaaaaaaaaaaaaaaaaaaaaaagaauu

SEQ ID NO: 7815 - RNA, 1037 nt, Artificial Sequence
  mRNA Design i-3 (hSL-A100-N5) comprising derived and/or modified sequence from Pf(3D7)__XP_001351122.1__HsALB_Pf-CSP(19-272) (opt1)
aggagaaagcuuaccaugaagugggugaccuucaucagccuccuguuccuguucuccagcgccuacucccuguuccaggaguaccagugcuacggcagcuccagcaacacccgcguccucaacgagcugaacuacgacaacgccgggacgaaccuguacaacgagcucgagaugaacuacuacggcaagcaggagaacugguacucccugaagaagaacagccggucccugggggagaacgacgacggcaacaacgaggacaacgagaagcuccgcaagcccaagcacaagaagcugaagcagccggcggacgggaaccccgaccccaacgccaaccccaacguggacccgaacgccaaccccaacguggaccccaacgccaaccccaacgucgacccgaacgccaaccccaacgcgaaccccaacgccaaccccaacgccaacccgaacgccaaccccaacgcgaaccccaacgccaaccccaacgccaacccgaacgccaaccccaacgccaaccccaacgcgaaccccaacgccaacccgaacgccaaccccaacgccaaccccaacgccaaccccaacgcgaacccgaacgccaaccccaacguggaccccaacgccaaccccaacgccaacccgaacgccaaccccaacgcgaaccccaacgccaacccgaacgccaaccccaacgccaaccccaacgccaaccccaacgcgaacccgaacgccaaccccaacgccaaccccaacgccaaccccaacgcgaacccgaacgccaaccccaacgccaaccccaacgccaaccccaacgccaacccgaacgcgaaccccugaggacuaguuauaagacugacuagcccgaugggccucccaacgggcccuccuccccuccuugcaccgagauuaaucaaaggcucuuuucagagccaccaaaaaaaaaaaaaaaaaaaaaaaaaaaaaaaaaaaaaaaaaaaaaaaaaaaaaaaaaaaaaaaaaaaaaaaaaaaaaaaaaaaaaaaaaaaaaaaaaaaaagaauu

SEQ ID NO: 7816 - RNA, 1199 nt, Artificial Sequence
  mRNA Design i-3 (hSL-A100-N5) comprising derived and/or modified sequence from Pf(3D7)__XP_001351122.1__HsALB_Pf-CSP(19-272)_L(AAY)_Pf-CSP(310-3 27)_L(AAY)_Pf-CSP(346-375) (opt1)
aggagaaagcuuaccaugaagugggugaccuucaucagccuccuguuccuguucuccagcgccuacucccuguuccaggaguaccagugcuacggcagcuccagcaacacccgcguccucaacgagcugaacuacgacaacgccgggacgaaccuguacaacgagcucgagaugaacuacuacggcaagcaggagaacugguacucccugaagaagaacagccggucccugggggagaacgacgacggcaacaacgaggacaacgagaagcuccgcaagcccaagcacaagaagcugaagcagccggcggacgggaaccccgaccccaacgccaaccccaacguggacccgaacgccaaccccaacguggaccccaacgccaaccccaacgucgacccgaacgccaaccccaacgcgaaccccaacgccaaccccaacgccaacccgaacgccaaccccaacgcgaaccccaacgccaaccccaacgccaacccgaacgccaaccccaacgccaaccccaacgcgaaccccaacgccaacccgaacgccaaccccaacgccaaccccaacgccaaccccaacgcgaacccgaacgccaaccccaacguggaccccaacgccaaccccaacgccaacccgaacgccaaccccaacgcgaaccccaacgccaacccgaacgccaaccccaacgccaaccccaacgccaaccccaacgcgaacccgaacgccaaccccaacgccaaccccaacgccaaccccaacgcgaacccgaacgccaaccccaacgccaaccccaacgccaaccccaacgccaacccgaacgcgaaccccgccgccuacgagcccagcgacaagcacaucaaggaguaccugaacaagauccagaacucccucgccgccuacaucaagcccggcagcgcgaacaagccgaaggacgagcuggacuacgccaacgacaucgagaagaagaucugcaagauggagaagugcuccugaggacuaguuauaagacugacuagcccgaugggccucccaacgggcccuccuccccuccuugcaccgagauuaaucaaaggcucuuuucagagccaccaaaaaaaaaaaaaaaaaaaaaaaaaaaaaaaaaaaaaaaaaaaaaaaaaaaaaaaaaaaaaaaaaaaaaaaaaaaaaaaaaaaaaaaaaaaaaaaaaaaaagaauu

SEQ ID NO: 7817 - RNA, 1160 nt, Artificial Sequence
  mRNA Design i-3 (hSL-A100-N5) comprising derived and/or modified sequence from Pf(3D7)__XP_001351122.1__HsALB_Pf-CSP(19-272)_L(AAY)_Pf-CSP(346-3 65)_L(AAY)_P2 (opt1)
aggagaaagcuuaccaugaagugggugaccuucaucagccuccuguuccuguucuccagcgccuacucccuguuccaggaguaccagugcuacggcagcuccagcaacacccgcguccucaacgagcugaacuacgacaacgccgggacgaaccuguacaacgagcucgagaugaacuacuacggcaagcaggagaacugguacucccugaagaagaacagccggucccugggggagaacgacgacggcaacaacgaggacaacgagaagcuccgcaagcccaagcacaagaagcugaagcagccggcggacgggaaccccgaccccaacgccaaccccaacguggacccgaacgccaaccccaacguggaccccaacgccaaccccaacgucgacccgaacgccaaccccaacgcgaaccccaacgccaaccccaacgccaacccgaacgccaaccccaacgcgaaccccaacgccaaccccaacgccaacccgaacgccaaccccaacgccaaccccaacgcgaaccccaacgccaacccgaacgccaaccccaacgccaaccccaacgccaaccccaacgcgaacccgaacgccaaccccaacguggaccccaacgccaaccccaacgccaacccgaacgccaaccccaacgcgaaccccaacgccaacccgaacgccaaccccaacgccaaccccaacgccaaccccaacgcgaacccgaacgccaaccccaacgccaaccccaacgccaaccccaacgcgaacccgaacgccaaccccaacgccaaccccaacgccaaccccaacgccaacccgaacgcgaaccccgccgccuacaucaagcccggcagcgccaacaagcccaaggacgagcuggacuacgccaacgacaucgaggcggccuaccaguacaucaaggccaacuccaaguucaucggcaucaccgagcucugaggacuaguuauaagacugacuagcccgaugggccucccaacgggcccuccuccccuccuugcaccgagauuaaucaaaggcucuuuucagagccaccaaaaaaaaaaaaaaaaaaaaaaaaaaaaaaaaaaaaaaaaaaaaaaaaaaaaaaaaaaaaaaaaaaaaaaaaaaaaaaaaaaaaaaaaaaaaaaaaaaaaagaauu

SEQ ID NO: 7818 - RNA, 1154 nt, Artificial Sequence
  mRNA Design i-3 (hSL-A100-N5) comprising derived and/or modified sequence from Pf(3D7)__XP_001351122.1__HsALB_Pf-CSP(19-272)_L(AAY)_Pf-CSP(346-3 65)_L(AAY)_PADRE (opt1)
aggagaaagcuuaccaugaagugggugaccuucaucagccuccuguuccuguucuccagcgccuacucccuguuccaggaguaccagugcuacggcagcuccagcaacacccgcguccucaacgagcugaacuacgacaacgccgggacgaaccuguacaacgagcucgagaugaacuacuacggcaagcaggagaacugguacucccugaagaagaacagccggucccugggggagaacgacgacggcaacaacgaggacaacgagaagcuccgcaagcccaagcacaagaagcugaagcagccggcggacgggaaccccgaccccaacgccaaccccaacguggacccgaacgccaaccccaacguggaccccaacgccaaccccaacgucgacccgaacgccaaccccaacgcgaaccccaacgccaaccccaacgccaacccgaacgccaaccccaacgcgaaccccaacgccaaccccaacgccaacccgaacgccaaccccaacgccaaccccaacgcgaaccccaacgccaacccgaacgccaaccccaacgccaaccccaacgccaaccccaacgcgaacccgaacgccaaccccaacguggaccccaacgccaaccccaacgccaacccgaacgccaaccccaacgcgaaccccaacgccaacccgaacgccaaccccaacgccaaccccaacgccaaccccaacgcgaacccgaacgccaaccccaacgccaaccccaacgccaaccccaacgcgaacccgaacgccaaccccaacgccaaccccaacgccaaccccaacgccaacccgaacgcgaaccccgccgccuacaucaagcccggcagcgccaacaagcccaaggacgagcuggacuacgccaacgacaucgaggcggccuacgccaaguucguggccgccuggacccucaaggcggccgccugaggacuaguuauaagacugacuagcccgaugggccucccaacgggcccuccuccccuccuugcaccgagauuaaucaaaggcucuuuucagagccaccaaaaaaaaaaaaaaaaaaaaaaaaaaaaaaaaaaaaaaaaaaaaaaaaaaaaaaaaaaaaaaaaaaaaaaaaaaaaaaaaaaaaaaaaaaaaaaaaaaaaagaauu

SEQ ID NO: 7819 - RNA, 1211 nt, Artificial Sequence
  mRNA Design i-3 (hSL-A100-N5) comprising derived and/or modified sequence from Pf(3D7)__XP_001351122.1__HsALB_Pf-CSP(19-272)_L(G4S)_Pf-CSP(310-3 27)_L(G4S)_Pf-CSP(346-375) (opt1)
aggagaaagcuuaccaugaagugggugaccuucaucagccuccuguuccuguucuccagcgccuacucccuguuccaggaguaccagugcuacggcagcuccagcaacacccgcguccucaacgagcugaacuacgacaacgccgggacgaaccuguacaacgagcucgagaugaacuacuacggcaagcaggagaacugguacucccugaagaagaacagccggucccugggggagaacgacgacggcaacaacgaggacaacgagaagcuccgcaagcccaagcacaagaagcugaagcagccggcggacgggaaccccgaccccaacgccaaccccaacguggacccgaacgccaaccccaacguggaccccaacgccaaccccaacgucgacccgaacgccaaccccaacgcgaaccccaacgccaaccccaacgccaacccgaacgccaaccccaacgcgaaccccaacgccaaccccaacgccaacccgaacgccaaccccaacgccaaccccaacgcgaaccccaacgccaacccgaacgccaaccccaacgccaaccccaacgccaaccccaacgcgaacccgaacgccaaccccaacguggaccccaacgccaaccccaacgccaacccgaacgccaaccccaacgcgaaccccaacgccaacccgaacgccaaccccaacgccaaccccaacgccaaccccaacgcgaacccgaacgccaaccccaacgccaaccccaacgccaaccccaacgcgaacccgaacgccaaccccaacgccaaccccaacgccaaccccaacgccaacccgaacgcgaaccccggcggcgggggcagcgagcccuccgacaagcacaucaaggaguaccugaacaagauccagaacagccucgggggcgggggcuccaucaagcccggcagcgccaacaagccgaaggacgagcuggacuacgccaacgacaucgagaagaagaucugcaagauggagaagugcuccugaggacuaguuauaagacugacuagcccgaugggccucccaacgggcccuccuccccuccuugcaccgagauuaaucaaaggcucuuuucagagccaccaaaaaaaaaaaaaaaaaaaaaaaaaaaaaaaaaaaaaaaaaaaaaaaaaaaaaaaaaaaaaaaaaaaaaaaaaaaaaaaaaaaaaaaaaaaaaaaaaaaaagaauu

SEQ ID NO: 7820 - RNA, 1196 nt, Artificial Sequence
  mRNA Design i-3 (hSL-A100-N5) comprising derived and/or modified sequence from Pf(3D7)__XP_001351122.1__HsALB_Pf-CSP(19-272)_L(G4S)_Pf-CSP(310-3 27)_Pf-CSP(346-375) (opt1)
aggagaaagcuuaccaugaagugggugaccuucaucagccuccuguuccuguucuccagcgccuacucccuguuccaggaguaccagugcuacggcagcuccagcaacacccgcguccucaacgagcugaacuacgacaacgccgggacgaaccuguacaacgagcucgagaugaacuacuacggcaagcaggagaacugguacucccugaagaagaacagccggucccugggggagaacgacgacggcaacaacgaggacaacgagaagcuccgcaagcccaagcacaagaagcugaagcagccggcggacgggaaccccgaccccaacgccaaccccaacguggacccgaacgccaaccccaacguggaccccaacgccaaccccaacgucgacccgaacgccaaccccaacgcgaaccccaacgccaaccccaacgccaacccgaacgccaaccccaacgcgaaccccaacgccaaccccaacgccaacccgaacgccaaccccaacgccaaccccaacgcgaaccccaacgccaacccgaacgccaaccccaacgccaaccccaacgccaaccccaacgcgaacccgaacgccaaccccaacguggaccccaacgccaaccccaacgccaacccgaacgccaaccccaacgcgaaccccaacgccaacccgaacgccaaccccaacgccaaccccaacgccaaccccaacgcgaacccgaacgccaaccccaacgccaaccccaacgccaaccccaacgcgaacccgaacgccaaccccaacgccaaccccaacgccaaccccaacgccaacccgaacgcgaaccccggcggcgggggcagcgagcccuccgacaagcacaucaaggaguaccugaacaagauccagaacagccucaucaagcccggguccgccaacaagccgaaggacgagcuggacuacgccaacgacaucgagaagaagaucugcaagauggagaagugcagcugaggacuaguuauaagacugacuagcccgaugggccucccaacgggcccuccuccccuccuugcaccgagauuaaucaaaggcucuuuucagagccaccaaaaaaaaaaaaaaaaaaaaaaaaaaaaaaaaaaaaaaaaaaaaaaaaaaaaaaaaaaaaaaaaaaaaaaaaaaaaaaaaaaaaaaaaaaaaaaaaaaaaagaauu

SEQ ID NO: 7821 - RNA, 1196 nt, Artificial Sequence
  mRNA Design i-3 (hSL-A100-N5) comprising derived and/or modified sequence from Pf(3D7)__XP_001351122.1__HsALB_Pf-CSP(19-325) (opt1)
aggagaaagcuuaccaugaagugggugaccuucaucagccuccuguuccuguucuccagcgccuacucccuguuccaggaguaccagugcuacggcagcuccagcaacacccgcguccucaacgagcugaacuacgacaacgccgggacgaaccuguacaacgagcucgagaugaacuacuacggcaagcaggagaacugguacucccugaagaagaacagccggucccugggggagaacgacgacggcaacaacgaggacaacgagaagcuccgcaagcccaagcacaagaagcugaagcagccggcggacgggaaccccgaccccaacgccaaccccaacguggacccgaacgccaaccccaacguggaccccaacgccaaccccaacgucgacccgaacgccaaccccaacgcgaaccccaacgccaaccccaacgccaacccgaacgccaaccccaacgcgaaccccaacgccaaccccaacgccaacccgaacgccaaccccaacgccaaccccaacgcgaaccccaacgccaacccgaacgccaaccccaacgccaaccccaacgccaaccccaacgcgaacccgaacgccaaccccaacguggaccccaacgccaaccccaacgccaacccgaacgccaaccccaacgcgaaccccaacgccaacccgaacgccaaccccaacgccaaccccaacgccaaccccaacgcgaacccgaacgccaaccccaacgccaaccccaacgccaaccccaacgcgaacccgaacgccaaccccaacgccaaccccaacgccaaccccaacgccaacccgaacgcgaaccccaacaagaacaaccagggcaacggccaggggcacaacaugcccaacgaccccaaccggaacguggacgagaacgccaacgccaacagcgccgucaagaacaacaacaacgaggagccguccgacaagcacaucaaggaguaccugaacaagauccagaacugaggacuaguuauaagacugacuagcccgaugggccucccaacgggcccuccuccccuccuugcaccgagauuaaucaaaggcucuuuucagagccaccaaaaaaaaaaaaaaaaaaaaaaaaaaaaaaaaaaaaaaaaaaaaaaaaaaaaaaaaaaaaaaaaaaaaaaaaaaaaaaaaaaaaaaaaaaaaaaaaaaaaagaauu

SEQ ID NO: 7822 - RNA, 1373 nt, Artificial Sequence
  mRNA Design i-3 (hSL-A100-N5) comprising derived and/or modified sequence from Pf(3D7)__XP_001351122.1__HsALB_Pf-CSP(19-384) (opt1)
aggagaaagcuuaccaugaagugggugaccuucaucagccuccuguuccuguucuccagcgccuacucccuguuccaggaguaccagugcuacggcagcuccagcaacacccgcguccucaacgagcugaacuacgacaacgccgggacgaaccuguacaacgagcucgagaugaacuacuacggcaagcaggagaacugguacucccugaagaagaacagccggucccugggggagaacgacgacggcaacaacgaggacaacgagaagcuccgcaagcccaagcacaagaagcugaagcagccggcggacgggaaccccgaccccaacgccaaccccaacguggacccgaacgccaaccccaacguggaccccaacgccaaccccaacgucgacccgaacgccaaccccaacgcgaaccccaacgccaaccccaacgccaacccgaacgccaaccccaacgcgaaccccaacgccaaccccaacgccaacccgaacgccaaccccaacgccaaccccaacgcgaaccccaacgccaacccgaacgccaaccccaacgccaaccccaacgccaaccccaacgcgaacccgaacgccaaccccaacguggaccccaacgccaaccccaacgccaacccgaacgccaaccccaacgcgaaccccaacgccaacccgaacgccaaccccaacgccaaccccaacgccaaccccaacgcgaacccgaacgccaaccccaacgccaaccccaacgccaaccccaacgcgaacccgaacgccaaccccaacgccaaccccaacgccaaccccaacgccaacccgaacgcgaaccccaacaagaacaaccagggcaacggccaggggcacaacaugcccaacgaccccaaccggaacguggacgagaacgccaacgccaacagcgccgucaagaacaacaacaacgaggagccguccgacaagcacaucaaggaguaccugaacaagauccagaacagccucuccaccgaguggagccccugcuccgugaccugcggcaacgggauccaggugcgcaucaagcccggcagcgccaacaagcccaaggacgagcuggacuacgcgaacgacaucgagaagaagaucugcaagauggagaagugcuccagcgucuucaacguggugaacuccagcugaggacuaguuauaagacugacuagcccgaugggccucccaacgggcccuccuccccuccuugcaccgagauuaaucaaaggcucuuuucagagccaccaaaaaaaaaaaaaaaaaaaaaaaaaaaaaaaaaaaaaaaaaaaaaaaaaaaaaaaaaaaaaaaaaaaaaaaaaaaaaaaaaaaaaaaaaaaaaaaaaaaaagaauu

SEQ ID NO: 7823 - RNA, 1511 nt, Artificial Sequence
  mRNA Design i-3 (hSL-A100-N5) comprising derived and/or modified sequence from Pf(3D7)__XP_001351122.1__HsALB_Pf-CSP(19-384)_TM domain HA (opt1)
aggagaaagcuuaccaugaagugggugaccuucaucagccuccuguuccuguucuccagcgccuacucccuguuccaggaguaccagugcuacggcagcuccagcaacacccgcguccucaacgagcugaacuacgacaacgccgggacgaaccuguacaacgagcucgagaugaacuacuacggcaagcaggagaacugguacucccugaagaagaacagccggucccugggggagaacgacgacggcaacaacgaggacaacgagaagcuccgcaagcccaagcacaagaagcugaagcagccggcggacgggaaccccgaccccaacgccaaccccaacguggacccgaacgccaaccccaacguggaccccaacgccaaccccaacgucgacccgaacgccaaccccaacgcgaaccccaacgccaaccccaacgccaacccgaacgccaaccccaacgcgaaccccaacgccaaccccaacgccaacccgaacgccaaccccaacgccaaccccaacgcgaaccccaacgccaacccgaacgccaaccccaacgccaaccccaacgccaaccccaacgcgaacccgaacgccaaccccaacguggaccccaacgccaaccccaacgccaacccgaacgccaaccccaacgcgaaccccaacgccaacccgaacgccaaccccaacgccaaccccaacgccaaccccaacgcgaacccgaacgccaaccccaacgccaaccccaacgccaaccccaacgcgaacccgaacgccaaccccaacgccaaccccaacgccaaccccaacgccaacccgaacgcgaaccccaacaagaacaaccagggcaacggccaggggcacaacaugcccaacgaccccaaccggaacguggacgagaacgccaacgccaacagcgccgucaagaacaacaacaacgaggagccguccgacaagcacaucaaggaguaccugaacaagauccagaacagccucuccaccgaguggagccccugcuccgugaccugcggcaacgggauccaggugcgcaucaagcccggcagcgccaacaagcccaaggacgagcuggacuacgcgaacgacaucgagaagaagaucugcaagauggagaagugcuccagcgucuucaacguggugaacuccagcaagcuggagagcacccggaucuaccagauccucgccaucuacuccacggucgccagcucccuggugcugguggucagccucggggccaucuccuucuggaugugcagcaacggcucccugcagugccgcaucugcaucugaggacuaguuauaagacugacuagcccgaugggccucccaacgggcccuccuccccuccuugcaccgagauuaaucaaaggcucuuuucagagccaccaaaaaaaaaaaaaaaaaaaaaaaaaaaaaaaaaaaaaaaaaaaaaaaaaaaaaaaaaaaaaaaaaaaaaaaaaaaaaaaaaaaaaaaaaaaaaaaaaaaaagaauu

SEQ ID NO: 7824 - RNA, 1223 nt, Artificial Sequence
  mRNA Design i-3 (hSL-A100-N5) comprising derived and/or modified sequence from Pf(3D7)__XP_001351122.1__HsALB_Pf-CSP(82-397) (opt1)
aggagaaagcuuaccaugaagugggugaccuucaucagccuccuguuccuguucuccagcgccuacuccgacaacgagaagcugcgcaagcccaagcacaagaagcucaagcagccggccgacggcaaccccgaccccaacgcgaaccccaacgucgacccgaacgccaaccccaacguggaccccaacgccaaccccaacguggacccgaacgccaaccccaacgccaaccccaacgcgaaccccaacgccaacccgaacgccaaccccaacgccaaccccaacgcgaaccccaacgccaacccgaacgccaaccccaacgccaaccccaacgccaaccccaacgcgaacccgaacgccaaccccaacgccaaccccaacgccaaccccaacgccaacccgaacgcgaaccccaacgucgaccccaacgccaaccccaacgccaacccgaacgccaaccccaacgccaaccccaacgcgaacccgaacgccaaccccaacgccaaccccaacgccaaccccaacgccaacccgaacgcgaaccccaacgccaaccccaacgccaaccccaacgccaacccgaacgcgaaccccaacgccaaccccaacgccaaccccaacgccaacccgaacgccaaccccaacaagaacaaccaggggaacggccaggggcacaacaugcccaacgaccccaaccggaacguggacgagaacgcgaacgccaacagcgccgugaagaacaacaacaacgaggagccguccgacaagcacaucaaggaguaccugaacaagauccagaacagccuguccaccgaguggagccccugcuccgucacgugcggcaacgggauccaggugcgcaucaagcccggcagcgccaacaagcccaaggacgagcucgacuacgccaacgacaucgagaagaagaucugcaagauggagaagugcuccagcguguucaacgucgugaacuccagcaucggccugaucauggugcuguccuuccucuuccugaacugaggacuaguuauaagacugacuagcccgaugggccucccaacgggcccuccuccccuccuugcaccgagauuaaucaaaggcucuuuucagagccaccaaaaaaaaaaaaaaaaaaaaaaaaaaaaaaaaaaaaaaaaaaaaaaaaaaaaaaaaaaaaaaaaaaaaaaaaaaaaaaaaaaaaaaaaaaaaaaaaaaaaagaauu

SEQ ID NO: 7825 - RNA, 575 nt, Artificial Sequence
  mRNA Design i-3 (hSL-A100-N5) comprising derived and/or modified sequence from Pf(3D7)__XP_001351122.1__HsALB_Pf-CSP(93-192) (opt1)
aggagaaagcuuaccaugaagugggugaccuucaucagccuccuguuccuguucuccagcgccuacuccaagcugaagcagcccgccgacggcaacccggaccccaacgcgaaccccaacgucgaccccaacgccaacccgaacguggaccccaacgccaaccccaacguggaccccaacgccaacccgaacgccaaccccaacgcgaaccccaacgccaaccccaacgccaacccgaacgccaaccccaacgcgaaccccaacgccaaccccaacgccaacccgaacgccaaccccaacgccaaccccaacgcgaaccccaacgccaacccgaacgccaaccccaacgccaaccccaacgccaaccccugaggacuaguuauaagacugacuagcccgaugggccucccaacgggcccuccuccccuccuugcaccgagauuaaucaaaggcucuuuucagagccaccaaaaaaaaaaaaaaaaaaaaaaaaaaaaaaaaaaaaaaaaaaaaaaaaaaaaaaaaaaaaaaaaaaaaaaaaaaaaaaaaaaaaaaaaaaaaaaaaaaaaagaauu

SEQ ID NO: 7826 - RNA, 815 nt, Artificial Sequence
  mRNA Design i-3 (hSL-A100-N5) comprising derived and/or modified sequence from Pf(3D7)__XP_001351122.1__HsALB_Pf-CSP(93-272) (opt1)
aggagaaagcuuaccaugaagugggugaccuucaucagccuccuguuccuguucuccagcgccuacuccaagcugaagcagcccgccgacggcaacccggaccccaacgcgaaccccaacgucgaccccaacgccaacccgaacguggaccccaacgccaaccccaacguggaccccaacgccaacccgaacgccaaccccaacgcgaaccccaacgccaaccccaacgccaacccgaacgccaaccccaacgcgaaccccaacgccaaccccaacgccaacccgaacgccaaccccaacgccaaccccaacgcgaaccccaacgccaacccgaacgccaaccccaacgccaaccccaacgccaaccccaacgcgaacccgaacgucgaccccaacgccaaccccaacgccaaccccaacgccaacccgaacgccaaccccaacgcgaaccccaacgccaacccgaacgccaaccccaacgccaaccccaacgccaaccccaacgcgaacccgaacgccaaccccaacgccaaccccaacgccaaccccaacgcgaacccgaacgccaaccccaacgccaaccccaacgccaaccccaacgccaacccgugaggacuaguuauaagacugacuagcccgaugggccucccaacgggcccuccuccccuccuugcaccgagauuaaucaaaggcucuuuucagagccaccaaaaaaaaaaaaaaaaaaaaaaaaaaaaaaaaaaaaaaaaaaaaaaaaaaaaaaaaaaaaaaaaaaaaaaaaaaaaaaaaaaaaaaaaaaaaaaaaaaaaagaauu

SEQ ID NO: 7827 - RNA, 1190 nt, Artificial Sequence
  mRNA Design i-3 (hSL-A100-N5) comprising derived and/or modified sequence from Pf(3D7)__XP_001351122.1__HsALB_Pf-CSP(93-397) (opt1)
aggagaaagcuuaccaugaagugggugaccuucaucagccuccuguuccuguucuccagcgccuacuccaagcugaagcagcccgccgacggcaacccggaccccaacgcgaaccccaacgucgaccccaacgccaacccgaacguggaccccaacgccaaccccaacguggaccccaacgccaacccgaacgccaaccccaacgcgaaccccaacgccaaccccaacgccaacccgaacgccaaccccaacgcgaaccccaacgccaaccccaacgccaacccgaacgccaaccccaacgccaaccccaacgcgaaccccaacgccaacccgaacgccaaccccaacgccaaccccaacgccaaccccaacgcgaacccgaacgucgaccccaacgccaaccccaacgccaaccccaacgccaacccgaacgccaaccccaacgcgaaccccaacgccaacccgaacgccaaccccaacgccaaccccaacgccaaccccaacgcgaacccgaacgccaaccccaacgccaaccccaacgccaaccccaacgcgaacccgaacgccaaccccaacgccaaccccaacgccaaccccaacgccaacccgaacaagaacaaccaggggaacggccaggggcacaacaugcccaacgaccccaaccgcaacguggacgagaacgcgaacgccaacagcgccgugaagaacaacaacaacgaggagcccuccgacaagcacaucaaggaguaccucaacaagauccagaacagccuguccaccgaguggagcccgugcuccgucacgugcggcaacgggauccaggugcggaucaagcccggcagcgccaacaagcccaaggacgagcuggacuacgccaacgacaucgagaagaagaucugcaagauggagaagugcuccagcguguucaacgucgugaacuccagcaucggccucaucauggugcuguccuuccuguuccucaacugaggacuaguuauaagacugacuagcccgaugggccucccaacgggcccuccuccccuccuugcaccgagauuaaucaaaggcucuuuucagagccaccaaaaaaaaaaaaaaaaaaaaaaaaaaaaaaaaaaaaaaaaaaaaaaaaaaaaaaaaaaaaaaaaaaaaaaaaaaaaaaaaaaaaaaaaaaaaaaaaaaaaagaauu

SEQ ID NO: 7828 - RNA, 560 nt, Artificial Sequence
  mRNA Design i-3 (hSL-A100-N5) comprising derived and/or modified sequence from Pf(3D7)__XP_001351122.1__HsALB_Pf-CSP(98-192) (opt1)
aggagaaagcuuaccaugaagugggugaccuucaucagccuccuguuccuguucuccagcgccuacuccgccgacggcaaccccgacccgaacgcgaaccccaacgucgaccccaacgccaaccccaacguggacccgaacgccaaccccaacguggaccccaacgccaaccccaacgccaacccgaacgcgaaccccaacgccaaccccaacgccaaccccaacgccaacccgaacgcgaaccccaacgccaaccccaacgccaaccccaacgccaacccgaacgccaaccccaacgcgaaccccaacgccaaccccaacgccaacccgaacgccaaccccaacgccaaccccugaggacuaguuauaagacugacuagcccgaugggccucccaacgggcccuccuccccuccuugcaccgagauuaaucaaaggcucuuuucagagccaccaaaaaaaaaaaaaaaaaaaaaaaaaaaaaaaaaaaaaaaaaaaaaaaaaaaaaaaaaaaaaaaaaaaaaaaaaaaaaaaaaaaaaaaaaaaaaaaaaaaaagaauu

SEQ ID NO: 7829 - RNA, 800 nt, Artificial Sequence
  mRNA Design i-3 (hSL-A100-N5) comprising derived and/or modified sequence from Pf(3D7)__XP_001351122.1__HsALB_Pf-CSP(98-272) (opt1)
aggagaaagcuuaccaugaagugggugaccuucaucagccuccuguuccuguucuccagcgccuacuccgccgacggcaaccccgacccgaacgcgaaccccaacgucgaccccaacgccaaccccaacguggacccgaacgccaaccccaacguggaccccaacgccaaccccaacgccaacccgaacgcgaaccccaacgccaaccccaacgccaaccccaacgccaacccgaacgcgaaccccaacgccaaccccaacgccaaccccaacgccaacccgaacgccaaccccaacgcgaaccccaacgccaaccccaacgccaacccgaacgccaaccccaacgccaaccccaacgcgaaccccaacgucgacccgaacgccaaccccaacgccaaccccaacgccaaccccaacgccaacccgaacgcgaaccccaacgccaaccccaacgccaacccgaacgccaaccccaacgccaaccccaacgcgaaccccaacgccaacccgaacgccaaccccaacgccaaccccaacgcgaaccccaacgccaacccgaacgccaaccccaacgccaaccccaacgccaaccccugaggacuaguuauaagacugacuagcccgaugggccucccaacgggcccuccuccccuccuugcaccgagauuaaucaaaggcucuuuucagagccaccaaaaaaaaaaaaaaaaaaaaaaaaaaaaaaaaaaaaaaaaaaaaaaaaaaaaaaaaaaaaaaaaaaaaaaaaaaaaaaaaaaaaaaaaaaaaaaaaaaaaagaauu

SEQ ID NO: 7830 - RNA, 1106 nt, Artificial Sequence
  mRNA Design i-3 (hSL-A100-N5) comprising derived and/or modified sequence from Pf(3D7)__XP_001351122.1__HsALB_Pf-CSP(98-374) (opt1)
aggagaaagcuuaccaugaagugggugaccuucaucagccuccuguuccuguucuccagcgccuacuccgccgacggcaaccccgacccgaacgcgaaccccaacgucgaccccaacgccaaccccaacguggacccgaacgccaaccccaacguggaccccaacgccaaccccaacgccaacccgaacgcgaaccccaacgccaaccccaacgccaaccccaacgccaacccgaacgcgaaccccaacgccaaccccaacgccaaccccaacgccaacccgaacgccaaccccaacgcgaaccccaacgccaaccccaacgccaacccgaacgccaaccccaacgccaaccccaacgcgaaccccaacgucgacccgaacgccaaccccaacgccaaccccaacgccaaccccaacgccaacccgaacgcgaaccccaacgccaaccccaacgccaacccgaacgccaaccccaacgccaaccccaacgcgaaccccaacgccaacccgaacgccaaccccaacgccaaccccaacgcgaaccccaacgccaacccgaacgccaaccccaacgccaaccccaacgccaaccccaacaagaacaaccaggggaacggccaggggcacaacaugccgaacgaccccaaccgcaacguggacgagaacgcgaacgccaacagcgccgugaagaacaacaacaacgaggagcccuccgacaagcacaucaaggaguaccugaacaagauccagaacagccucuccaccgaguggagccccugcuccgucacgugcggcaacgggauccaggugcggaucaagccgggcagcgccaacaagcccaaggacgagcuggacuacgccaacgacaucgagaagaagaucugcaagauggagaagugcugaggacuaguuauaagacugacuagcccgaugggccucccaacgggcccuccuccccuccuugcaccgagauuaaucaaaggcucuuuucagagccaccaaaaaaaaaaaaaaaaaaaaaaaaaaaaaaaaaaaaaaaaaaaaaaaaaaaaaaaaaaaaaaaaaaaaaaaaaaaaaaaaaaaaaaaaaaaaaaaaaaaaagaauu

SEQ ID NO: 7831 - RNA, 1175 nt, Artificial Sequence
  mRNA Design i-3 (hSL-A100-N5) comprising derived and/or modified sequence from Pf(3D7)__XP_001351122.1__HsALB_Pf-CSP(98-397) (opt1)
aggagaaagcuuaccaugaagugggugaccuucaucagccuccuguuccuguucuccagcgccuacuccgccgacggcaaccccgacccgaacgcgaaccccaacgucgaccccaacgccaaccccaacguggacccgaacgccaaccccaacguggaccccaacgccaaccccaacgccaacccgaacgcgaaccccaacgccaaccccaacgccaaccccaacgccaacccgaacgcgaaccccaacgccaaccccaacgccaaccccaacgccaacccgaacgccaaccccaacgcgaaccccaacgccaaccccaacgccaacccgaacgccaaccccaacgccaaccccaacgcgaaccccaacgucgacccgaacgccaaccccaacgccaaccccaacgccaaccccaacgccaacccgaacgcgaaccccaacgccaaccccaacgccaacccgaacgccaaccccaacgccaaccccaacgcgaaccccaacgccaacccgaacgccaaccccaacgccaaccccaacgcgaaccccaacgccaacccgaacgccaaccccaacgccaaccccaacgccaaccccaacaagaacaaccaggggaacggccaggggcacaacaugccgaacgaccccaaccgcaacguggacgagaacgcgaacgccaacagcgccgugaagaacaacaacaacgaggagcccuccgacaagcacaucaaggaguaccugaacaagauccagaacagccucuccaccgaguggagccccugcuccgucacgugcggcaacgggauccaggugcggaucaagccgggcagcgccaacaagcccaaggacgagcuggacuacgccaacgacaucgagaagaagaucugcaagauggagaagugcuccagcguguucaacgucgugaacuccagcaucggccugaucauggugcucuccuuccuguuccugaacugaggacuaguuauaagacugacuagcccgaugggccucccaacgggcccuccuccccuccuugcaccgagauuaaucaaaggcucuuuucagagccaccaaaaaaaaaaaaaaaaaaaaaaaaaaaaaaaaaaaaaaaaaaaaaaaaaaaaaaaaaaaaaaaaaaaaaaaaaaaaaaaaaaaaaaaaaaaaaaaaaaaaagaauu

SEQ ID NO: 7832 - RNA, 1502 nt, Artificial Sequence
  mRNA Design i-3 (hSL-A100-N5) comprising derived and/or modified sequence from Pf(3D7)__XP_001351122.1__HsALB_Pf-CSP(199-377)_L(PVTN)_HBsAg (opt1)
aggagaaagcuuaccaugaagugggugaccuucaucagccuccuguuccuguucuccagcgccuacuccgaccccaacgccaacccgaacgcgaaccccaacgccaaccccaacgccaaccccaacgccaacccgaacgccaaccccaacgcgaaccccaacgccaaccccaacgccaacccgaacgccaaccccaacgcgaaccccaacgccaaccccaacgccaacccgaacgccaaccccaacgccaaccccaacgcgaaccccaacgccaacccgaacgccaaccccaacaagaacaaccagggcaacgggcagggccacaacaugcccaacgaccccaaccgcaacgucgacgagaacgccaacgccaacagcgcggugaagaacaacaacaacgaggagccguccgacaagcacaucaaggaguaccugaacaagauccagaacagccucuccaccgaguggagccccugcuccgugaccugcgggaacggcauccagguccggaucaagcccgggagcgccaacaagcccaaggacgagcuggacuacgccaacgacaucgagaagaagaucugcaagauggagaagugcuccagcgugccggugaccaacauggagaacaucaccuccggcuuccugggcccccuccugguccugcaggccggguucuuccuccugacccgcauccugacgaucccccagagccucgacuccugguggaccagccugaacuuccugggcgggucccccgugugccucggccagaacagccaguccccgaccagcaaccacagccccaccuccugcccgcccaucugccccggguaccgguggaugugccugcgccgguucaucaucuuccuguucauccuccugcugugccucaucuuccugcuggugcuccuggacuaccagggcaugcugcccgucugcccccucaucccgggcagcacgaccaccaacaccgggcccugcaagacgugcaccacccccgcccagggcaacuccauguuccccagcugcugcugcaccaagccgacggacgggaacugcacgugcauccccauccccuccagcugggcguucgccaaguaccugugggagugggccuccgugcgcuucagcuggcugucccuccuggugcccuucguccagugguucgugggccugagcccgaccguguggcucuccgccaucuggaugaugugguacuggggccccagccuguacuccaucgucagccccuucaucccccugcucccgaucuucuucugccuguggguguacaucugaggacuaguuauaagacugacuagcccgaugggccucccaacgggcccuccuccccuccuugcaccgagauuaaucaaaggcucuuuucagagccaccaaaaaaaaaaaaaaaaaaaaaaaaaaaaaaaaaaaaaaaaaaaaaaaaaaaaaaaaaaaaaaaaaaaaaaaaaaaaaaaaaaaaaaaaaaaaaaaaaaaaagaauu

SEQ ID NO: 7833 - RNA, 1412 nt, Artificial Sequence
  mRNA Design i-3 (hSL-A100-N5) comprising derived and/or modified sequence from Pf(3D7)__XP_001351122.1__Pf-CSP (opt2)
aggagaaagcuuaccaugaugcgcaagcucgccauccucuccgucuccuccuuccucuucgucgaggcccucuuccaggaguaccagugcuacggcuccuccuccaacacccgcguccucaacgagcucaacuacgacaacgccggcaccaaccucuacaacgagcucgagaugaacuacuacggcaagcaggagaacugguacucccucaagaagaacucccgcucccucggcgagaacgacgacggcaacaacgaggacaacgagaagcuccgcaagcccaagcacaagaagcucaagcagcccgccgacggcaaccccgaccccaacgccaaccccaacgucgaccccaacgccaaccccaacgucgaccccaacgccaaccccaacgucgaccccaacgccaaccccaacgccaaccccaacgccaaccccaacgccaaccccaacgccaaccccaacgccaaccccaacgccaaccccaacgccaaccccaacgccaaccccaacgccaaccccaacgccaaccccaacgccaaccccaacgccaaccccaacgccaaccccaacgccaaccccaacgccaaccccaacgccaaccccaacgucgaccccaacgccaaccccaacgccaaccccaacgccaaccccaacgccaaccccaacgccaaccccaacgccaaccccaacgccaaccccaacgccaaccccaacgccaaccccaacgccaaccccaacgccaaccccaacgccaaccccaacgccaaccccaacgccaaccccaacgccaaccccaacgccaaccccaacgccaaccccaacgccaaccccaacaagaacaaccagggcaacggccagggccacaacaugcccaacgaccccaaccgcaacgucgacgagaacgccaacgccaacuccgccgucaagaacaacaacaacgaggagcccuccgacaagcacaucaaggaguaccucaacaagauccagaacucccucuccaccgaguggucccccugcuccgucaccugcggcaacggcauccagguccgcaucaagcccggcuccgccaacaagcccaaggacgagcucgacuacgccaacgacaucgagaagaagaucugcaagauggagaagugcuccuccgucuucaacgucgucaacuccuccaucggccucaucaugguccucuccuuccucuuccucaacugaggacuaguuauaagacugacuagcccgaugggccucccaacgggcccuccuccccuccuugcaccgagauuaaucaaaggcucuuuucagagccaccaaaaaaaaaaaaaaaaaaaaaaaaaaaaaaaaaaaaaaaaaaaaaaaaaaaaaaaaaaaaaaaaaaaaaaaaaaaaaaaaaaaaaaaaaaaaaaaaaaaaagaauu

SEQ ID NO: 7834 - RNA, 1343 nt, Artificial Sequence
  mRNA Design i-3 (hSL-A100-N5) comprising derived and/or modified sequence from Pf(3D7)__XP_001351122.1__Pf-CSP(1-374) (opt2)
aggagaaagcuuaccaugaugcgcaagcucgccauccucuccgucuccuccuuccucuucgucgaggcccucuuccaggaguaccagugcuacggcuccuccuccaacacccgcguccucaacgagcucaacuacgacaacgccggcaccaaccucuacaacgagcucgagaugaacuacuacggcaagcaggagaacugguacucccucaagaagaacucccgcucccucggcgagaacgacgacggcaacaacgaggacaacgagaagcuccgcaagcccaagcacaagaagcucaagcagcccgccgacggcaaccccgaccccaacgccaaccccaacgucgaccccaacgccaaccccaacgucgaccccaacgccaaccccaacgucgaccccaacgccaaccccaacgccaaccccaacgccaaccccaacgccaaccccaacgccaaccccaacgccaaccccaacgccaaccccaacgccaaccccaacgccaaccccaacgccaaccccaacgccaaccccaacgccaaccccaacgccaaccccaacgccaaccccaacgccaaccccaacgccaaccccaacgccaaccccaacgucgaccccaacgccaaccccaacgccaaccccaacgccaaccccaacgccaaccccaacgccaaccccaacgccaaccccaacgccaaccccaacgccaaccccaacgccaaccccaacgccaaccccaacgccaaccccaacgccaaccccaacgccaaccccaacgccaaccccaacgccaaccccaacgccaaccccaacgccaaccccaacgccaaccccaacaagaacaaccagggcaacggccagggccacaacaugcccaacgaccccaaccgcaacgucgacgagaacgccaacgccaacuccgccgucaagaacaacaacaacgaggagcccuccgacaagcacaucaaggaguaccucaacaagauccagaacucccucuccaccgaguggucccccugcuccgucaccugcggcaacggcauccagguccgcaucaagcccggcuccgccaacaagcccaaggacgagcucgacuacgccaacgacaucgagaagaagaucugcaagauggagaagugcugaggacuaguuauaagacugacuagcccgaugggccucccaacgggcccuccuccccuccuugcaccgagauuaaucaaaggcucuuuucagagccaccaaaaaaaaaaaaaaaaaaaaaaaaaaaaaaaaaaaaaaaaaaaaaaaaaaaaaaaaaaaaaaaaaaaaaaaaaaaaaaaaaaaaaaaaaaaaaaaaaaaaagaauu

SEQ ID NO: 7835 - RNA, 1196 nt, Artificial Sequence
  mRNA Design i-3 (hSL-A100-N5) comprising derived and/or modified sequence from Pf(3D7)__XP_001351122.1__Pf-CSP(1-325) (opt2)
aggagaaagcuuaccaugaugcgcaagcucgccauccucuccgucuccuccuuccucuucgucgaggcccucuuccaggaguaccagugcuacggcuccuccuccaacacccgcguccucaacgagcucaacuacgacaacgccggcaccaaccucuacaacgagcucgagaugaacuacuacggcaagcaggagaacugguacucccucaagaagaacucccgcucccucggcgagaacgacgacggcaacaacgaggacaacgagaagcuccgcaagcccaagcacaagaagcucaagcagcccgccgacggcaaccccgaccccaacgccaaccccaacgucgaccccaacgccaaccccaacgucgaccccaacgccaaccccaacgucgaccccaacgccaaccccaacgccaaccccaacgccaaccccaacgccaaccccaacgccaaccccaacgccaaccccaacgccaaccccaacgccaaccccaacgccaaccccaacgccaaccccaacgccaaccccaacgccaaccccaacgccaaccccaacgccaaccccaacgccaaccccaacgccaaccccaacgccaaccccaacgucgaccccaacgccaaccccaacgccaaccccaacgccaaccccaacgccaaccccaacgccaaccccaacgccaaccccaacgccaaccccaacgccaaccccaacgccaaccccaacgccaaccccaacgccaaccccaacgccaaccccaacgccaaccccaacgccaaccccaacgccaaccccaacgccaaccccaacgccaaccccaacgccaaccccaacaagaacaaccagggcaacggccagggccacaacaugcccaacgaccccaaccgcaacgucgacgagaacgccaacgccaacuccgccgucaagaacaacaacaacgaggagcccuccgacaagcacaucaaggaguaccucaacaagauccagaacugaggacuaguuauaagacugacuagcccgaugggccucccaacgggcccuccuccccuccuugcaccgagauuaaucaaaggcucuuuucagagccaccaaaaaaaaaaaaaaaaaaaaaaaaaaaaaaaaaaaaaaaaaaaaaaaaaaaaaaaaaaaaaaaaaaaaaaaaaaaaaaaaaaaaaaaaaaaaaaaaaaaaagaauu

SEQ ID NO: 7836 - RNA, 1412 nt, Artificial Sequence
  mRNA Design i-3 (hSL-A100-N5) comprising derived and/or modified sequence from Pf(3D7)__XP_001351122.1__HsALB_Pf-CSP(19-397) (opt2)
aggagaaagcuuaccaugaagugggucaccuucaucucccuccucuuccucuucuccuccgccuacucccucuuccaggaguaccagugcuacggcuccuccuccaacacccgcguccucaacgagcucaacuacgacaacgccggcaccaaccucuacaacgagcucgagaugaacuacuacggcaagcaggagaacugguacucccucaagaagaacucccgcucccucggcgagaacgacgacggcaacaacgaggacaacgagaagcuccgcaagcccaagcacaagaagcucaagcagcccgccgacggcaaccccgaccccaacgccaaccccaacgucgaccccaacgccaaccccaacgucgaccccaacgccaaccccaacgucgaccccaacgccaaccccaacgccaaccccaacgccaaccccaacgccaaccccaacgccaaccccaacgccaaccccaacgccaaccccaacgccaaccccaacgccaaccccaacgccaaccccaacgccaaccccaacgccaaccccaacgccaaccccaacgccaaccccaacgccaaccccaacgccaaccccaacgccaaccccaacgucgaccccaacgccaaccccaacgccaaccccaacgccaaccccaacgccaaccccaacgccaaccccaacgccaaccccaacgccaaccccaacgccaaccccaacgccaaccccaacgccaaccccaacgccaaccccaacgccaaccccaacgccaaccccaacgccaaccccaacgccaaccccaacgccaaccccaacgccaaccccaacgccaaccccaacaagaacaaccagggcaacggccagggccacaacaugcccaacgaccccaaccgcaacgucgacgagaacgccaacgccaacuccgccgucaagaacaacaacaacgaggagcccuccgacaagcacaucaaggaguaccucaacaagauccagaacucccucuccaccgaguggucccccugcuccgucaccugcggcaacggcauccagguccgcaucaagcccggcuccgccaacaagcccaaggacgagcucgacuacgccaacgacaucgagaagaagaucugcaagauggagaagugcuccuccgucuucaacgucgucaacuccuccaucggccucaucaugguccucuccuuccucuuccucaacugaggacuaguuauaagacugacuagcccgaugggccucccaacgggcccuccuccccuccuugcaccgagauuaaucaaaggcucuuuucagagccaccaaaaaaaaaaaaaaaaaaaaaaaaaaaaaaaaaaaaaaaaaaaaaaaaaaaaaaaaaaaaaaaaaaaaaaaaaaaaaaaaaaaaaaaaaaaaaaaaaaaaagaauu

SEQ ID NO: 7837 - RNA, 1430 nt, Artificial Sequence
  mRNA Design i-3 (hSL-A100-N5) comprising derived and/or modified sequence from Pf(3D7)__XP_001351122.1__HsIns-iso1_Pf-CSP(19-397) (opt2)
aggagaaagcuuaccauggcccucuggaugcgccuccucccccuccucgcccuccucgcccucuggggccccgaccccgccgccgcccucuuccaggaguaccagugcuacggcuccuccuccaacacccgcguccucaacgagcucaacuacgacaacgccggcaccaaccucuacaacgagcucgagaugaacuacuacggcaagcaggagaacugguacucccucaagaagaacucccgcucccucggcgagaacgacgacggcaacaacgaggacaacgagaagcuccgcaagcccaagcacaagaagcucaagcagcccgccgacggcaaccccgaccccaacgccaaccccaacgucgaccccaacgccaaccccaacgucgaccccaacgccaaccccaacgucgaccccaacgccaaccccaacgccaaccccaacgccaaccccaacgccaaccccaacgccaaccccaacgccaaccccaacgccaaccccaacgccaaccccaacgccaaccccaacgccaaccccaacgccaaccccaacgccaaccccaacgccaaccccaacgccaaccccaacgccaaccccaacgccaaccccaacgccaaccccaacgucgaccccaacgccaaccccaacgccaaccccaacgccaaccccaacgccaaccccaacgccaaccccaacgccaaccccaacgccaaccccaacgccaaccccaacgccaaccccaacgccaaccccaacgccaaccccaacgccaaccccaacgccaaccccaacgccaaccccaacgccaaccccaacgccaaccccaacgccaaccccaacgccaaccccaacaagaacaaccagggcaacggccagggccacaacaugcccaacgaccccaaccgcaacgucgacgagaacgccaacgccaacuccgccgucaagaacaacaacaacgaggagcccuccgacaagcacaucaaggaguaccucaacaagauccagaacucccucuccaccgaguggucccccugcuccgucaccugcggcaacggcauccagguccgcaucaagcccggcuccgccaacaagcccaaggacgagcucgacuacgccaacgacaucgagaagaagaucugcaagauggagaagugcuccuccgucuucaacgucgucaacuccuccaucggccucaucaugguccucuccuuccucuuccucaacugaggacuaguuauaagacugacuagcccgaugggccucccaacgggcccuccuccccuccuugcaccgagauuaaucaaaggcucuuuucagagccaccaaaaaaaaaaaaaaaaaaaaaaaaaaaaaaaaaaaaaaaaaaaaaaaaaaaaaaaaaaaaaaaaaaaaaaaaaaaaaaaaaaaaaaaaaaaaaaaaaaaaagaauu

SEQ ID NO: 7838 - RNA, 1409 nt, Artificial Sequence
  mRNA Design i-3 (hSL-A100-N5) comprising derived and/or modified sequence from Pf(3D7)__XP_001351122.1__HsSPARC_Pf-CSP(19-397) (opt2)
aggagaaagcuuaccaugcgcgccuggaucuucuuccuccucugccucgccggccgcgcccucgcccucuuccaggaguaccagugcuacggcuccuccuccaacacccgcguccucaacgagcucaacuacgacaacgccggcaccaaccucuacaacgagcucgagaugaacuacuacggcaagcaggagaacugguacucccucaagaagaacucccgcucccucggcgagaacgacgacggcaacaacgaggacaacgagaagcuccgcaagcccaagcacaagaagcucaagcagcccgccgacggcaaccccgaccccaacgccaaccccaacgucgaccccaacgccaaccccaacgucgaccccaacgccaaccccaacgucgaccccaacgccaaccccaacgccaaccccaacgccaaccccaacgccaaccccaacgccaaccccaacgccaaccccaacgccaaccccaacgccaaccccaacgccaaccccaacgccaaccccaacgccaaccccaacgccaaccccaacgccaaccccaacgccaaccccaacgccaaccccaacgccaaccccaacgccaaccccaacgucgaccccaacgccaaccccaacgccaaccccaacgccaaccccaacgccaaccccaacgccaaccccaacgccaaccccaacgccaaccccaacgccaaccccaacgccaaccccaacgccaaccccaacgccaaccccaacgccaaccccaacgccaaccccaacgccaaccccaacgccaaccccaacgccaaccccaacgccaaccccaacgccaaccccaacaagaacaaccagggcaacggccagggccacaacaugcccaacgaccccaaccgcaacgucgacgagaacgccaacgccaacuccgccgucaagaacaacaacaacgaggagcccuccgacaagcacaucaaggaguaccucaacaagauccagaacucccucuccaccgaguggucccccugcuccgucaccugcggcaacggcauccagguccgcaucaagcccggcuccgccaacaagcccaaggacgagcucgacuacgccaacgacaucgagaagaagaucugcaagauggagaagugcuccuccgucuucaacgucgucaacuccuccaucggccucaucaugguccucuccuuccucuuccucaacugaggacuaguuauaagacugacuagcccgaugggccucccaacgggcccuccuccccuccuugcaccgagauuaaucaaaggcucuuuucagagccaccaaaaaaaaaaaaaaaaaaaaaaaaaaaaaaaaaaaaaaaaaaaaaaaaaaaaaaaaaaaaaaaaaaaaaaaaaaaaaaaaaaaaaaaaaaaaaaaaaaaaagaauu

SEQ ID NO: 7839 - RNA, 1412 nt, Artificial Sequence
  mRNA Design i-3 (hSL-A100-N5) comprising derived and/or modified sequence from Pf(3D7)__XP_001351122.1__IgE_Pf-CSP(19-397) (opt2)
aggagaaagcuuaccauggacuggaccuggauccucuuccucgucgccgccgccacccgcguccacucccucuuccaggaguaccagugcuacggcuccuccuccaacacccgcguccucaacgagcucaacuacgacaacgccggcaccaaccucuacaacgagcucgagaugaacuacuacggcaagcaggagaacugguacucccucaagaagaacucccgcucccucggcgagaacgacgacggcaacaacgaggacaacgagaagcuccgcaagcccaagcacaagaagcucaagcagcccgccgacggcaaccccgaccccaacgccaaccccaacgucgaccccaacgccaaccccaacgucgaccccaacgccaaccccaacgucgaccccaacgccaaccccaacgccaaccccaacgccaaccccaacgccaaccccaacgccaaccccaacgccaaccccaacgccaaccccaacgccaaccccaacgccaaccccaacgccaaccccaacgccaaccccaacgccaaccccaacgccaaccccaacgccaaccccaacgccaaccccaacgccaaccccaacgccaaccccaacgucgaccccaacgccaaccccaacgccaaccccaacgccaaccccaacgccaaccccaacgccaaccccaacgccaaccccaacgccaaccccaacgccaaccccaacgccaaccccaacgccaaccccaacgccaaccccaacgccaaccccaacgccaaccccaacgccaaccccaacgccaaccccaacgccaaccccaacgccaaccccaacgccaaccccaacaagaacaaccagggcaacggccagggccacaacaugcccaacgaccccaaccgcaacgucgacgagaacgccaacgccaacuccgccgucaagaacaacaacaacgaggagcccuccgacaagcacaucaaggaguaccucaacaagauccagaacucccucuccaccgaguggucccccugcuccgucaccugcggcaacggcauccagguccgcaucaagcccggcuccgccaacaagcccaaggacgagcucgacuacgccaacgacaucgagaagaagaucugcaagauggagaagugcuccuccgucuucaacgucgucaacuccuccaucggccucaucaugguccucuccuuccucuuccucaacugaggacuaguuauaagacugacuagcccgaugggccucccaacgggcccuccuccccuccuugcaccgagauuaaucaaaggcucuuuucagagccaccaaaaaaaaaaaaaaaaaaaaaaaaaaaaaaaaaaaaaaaaaaaaaaaaaaaaaaaaaaaaaaaaaaaaaaaaaaaaaaaaaaaaaaaaaaaaaaaaaaaaagaauu

SEQ ID NO: 7840 - RNA, 1577 nt, Artificial Sequence
  mRNA Design i-3 (hSL-A100-N5) comprising derived and/or modified sequence from Pf(3D7)__XP_001351122.1__Pf-CSP_L(G4SG4)_TM domain HA (opt2)
aggagaaagcuuaccaugaugcgcaagcucgccauccucuccgucuccuccuuccucuucgucgaggcccucuuccaggaguaccagugcuacggcuccuccuccaacacccgcguccucaacgagcucaacuacgacaacgccggcaccaaccucuacaacgagcucgagaugaacuacuacggcaagcaggagaacugguacucccucaagaagaacucccgcucccucggcgagaacgacgacggcaacaacgaggacaacgagaagcuccgcaagcccaagcacaagaagcucaagcagcccgccgacggcaaccccgaccccaacgccaaccccaacgucgaccccaacgccaaccccaacgucgaccccaacgccaaccccaacgucgaccccaacgccaaccccaacgccaaccccaacgccaaccccaacgccaaccccaacgccaaccccaacgccaaccccaacgccaaccccaacgccaaccccaacgccaaccccaacgccaaccccaacgccaaccccaacgccaaccccaacgccaaccccaacgccaaccccaacgccaaccccaacgccaaccccaacgccaaccccaacgucgaccccaacgccaaccccaacgccaaccccaacgccaaccccaacgccaaccccaacgccaaccccaacgccaaccccaacgccaaccccaacgccaaccccaacgccaaccccaacgccaaccccaacgccaaccccaacgccaaccccaacgccaaccccaacgccaaccccaacgccaaccccaacgccaaccccaacgccaaccccaacgccaaccccaacaagaacaaccagggcaacggccagggccacaacaugcccaacgaccccaaccgcaacgucgacgagaacgccaacgccaacuccgccgucaagaacaacaacaacgaggagcccuccgacaagcacaucaaggaguaccucaacaagauccagaacucccucuccaccgaguggucccccugcuccgucaccugcggcaacggcauccagguccgcaucaagcccggcuccgccaacaagcccaaggacgagcucgacuacgccaacgacaucgagaagaagaucugcaagauggagaagugcuccuccgucuucaacgucgucaacuccuccaucggccucaucaugguccucuccuuccucuuccucaacggcggcggcggcuccggcggcggcggcaagcucgaguccacccgcaucuaccagauccucgccaucuacuccaccgucgccuccucccucguccucgucgucucccucggcgccaucuccuucuggaugugcuccaacggcucccuccagugccgcaucugcaucugaggacuaguuauaagacugacuagcccgaugggccucccaacgggcccuccuccccuccuugcaccgagauuaaucaaaggcucuuuucagagccaccaaaaaaaaaaaaaaaaaaaaaaaaaaaaaaaaaaaaaaaaaaaaaaaaaaaaaaaaaaaaaaaaaaaaaaaaaaaaaaaaaaaaaaaaaaaaaaaaaaaaagaauu

SEQ ID NO: 7841 - RNA, 1451 nt, Artificial Sequence
  mRNA Design i-3 (hSL-A100-N5) comprising derived and/or modified sequence from Pf(3D7)__XP_001351122.1__Pf-CSP(199-377)_L(PVTN)_HBsAg (opt2)
aggagaaagcuuaccauggaccccaacgccaaccccaacgccaaccccaacgccaaccccaacgccaaccccaacgccaaccccaacgccaaccccaacgccaaccccaacgccaaccccaacgccaaccccaacgccaaccccaacgccaaccccaacgccaaccccaacgccaaccccaacgccaaccccaacgccaaccccaacgccaaccccaacgccaaccccaacgccaaccccaacaagaacaaccagggcaacggccagggccacaacaugcccaacgaccccaaccgcaacgucgacgagaacgccaacgccaacuccgccgucaagaacaacaacaacgaggagcccuccgacaagcacaucaaggaguaccucaacaagauccagaacucccucuccaccgaguggucccccugcuccgucaccugcggcaacggcauccagguccgcaucaagcccggcuccgccaacaagcccaaggacgagcucgacuacgccaacgacaucgagaagaagaucugcaagauggagaagugcuccuccguccccgucaccaacauggagaacaucaccuccggcuuccucggcccccuccucguccuccaggccggcuucuuccuccucacccgcauccucaccaucccccagucccucgacuccugguggaccucccucaacuuccucggcggcucccccgucugccucggccagaacucccagucccccaccuccaaccacucccccaccuccugcccccccaucugccccggcuaccgcuggaugugccuccgccgcuucaucaucuuccucuucauccuccuccucugccucaucuuccuccucguccuccucgacuaccagggcaugcuccccgucugcccccucauccccggcuccaccaccaccaacaccggccccugcaagaccugcaccacccccgcccagggcaacuccauguuccccuccugcugcugcaccaagcccaccgacggcaacugcaccugcauccccauccccuccuccugggccuucgccaaguaccucugggagugggccuccguccgcuucuccuggcucucccuccucguccccuucguccagugguucgucggccucucccccaccgucuggcucuccgccaucuggaugaugugguacuggggccccucccucuacuccaucgucucccccuucaucccccuccuccccaucuucuucugccucugggucuacaucugaggacuaguuauaagacugacuagcccgaugggccucccaacgggcccuccuccccuccuugcaccgagauuaaucaaaggcucuuuucagagccaccaaaaaaaaaaaaaaaaaaaaaaaaaaaaaaaaaaaaaaaaaaaaaaaaaaaaaaaaaaaaaaaaaaaaaaaaaaaaaaaaaaaaaaaaaaaaaaaaaaaaagaauu

SEQ ID NO: 7842 - RNA, 1493 nt, Artificial Sequence
  mRNA Design i-3 (hSL-A100-N5) comprising derived and/or modified sequence from Pf(3D7)__XP_001351122.1__Pf-CSP(199-387)_L(PVTN)_HBsAg (opt2)
aggagaaagcuuaccaugauggcccccgaccccaacgccaaccccaacgccaaccccaacgccaaccccaacgccaaccccaacgccaaccccaacgccaaccccaacgccaaccccaacgccaaccccaacgccaaccccaacgccaaccccaacgccaaccccaacgccaaccccaacgccaaccccaacgccaaccccaacgccaaccccaacgccaaccccaacgccaaccccaacgccaaccccaacaagaacaaccagggcaacggccagggccacaacaugcccaacgaccccaaccgcaacgucgacgagaacgccaacgccaacuccgccgucaagaacaacaacaacgaggagcccuccgacaagcacaucaaggaguaccucaacaagauccagaacucccucuccaccgaguggucccccugcuccgucaccugcggcaacggcauccagguccgcaucaagcccggcuccgccaacaagcccaaggacgagcucgacuacgccaacgacaucgagaagaagaucugcaagauggagaagugcuccuccgucuucaacgucgucaacuccuccaucggccucggccccgucaccaacauggagaacaucaccuccggcuuccucggcccccuccucguccuccaggccggcuucuuccuccucacccgcauccucaccaucccccagucccucgacuccugguggaccucccucaacuuccucggcggcucccccgucugccucggccagaacucccagucccccaccuccaaccacucccccaccuccugcccccccaucugccccggcuaccgcuggaugugccuccgccgcuucaucaucuuccucuucauccuccuccucugccucaucuuccuccucguccuccucgacuaccagggcaugcuccccgucugcccccucauccccggcuccaccaccaccaacaccggccccugcaagaccugcaccacccccgcccagggcaacuccauguuccccuccugcugcugcaccaagcccaccgacggcaacugcaccugcauccccauccccuccuccugggccuucgccaaguaccucugggagugggccuccguccgcuucuccuggcucucccuccucguccccuucguccagugguucgucggccucucccccaccgucuggcucuccgccaucuggaugaugugguacuggggccccucccucuacuccaucgucucccccuucaucccccuccuccccaucuucuucugccucugggucuacaucugaggacuaguuauaagacugacuagcccgaugggccucccaacgggcccuccuccccuccuugcaccgagauuaaucaaaggcucuuuucagagccaccaaaaaaaaaaaaaaaaaaaaaaaaaaaaaaaaaaaaaaaaaaaaaaaaaaaaaaaaaaaaaaaaaaaaaaaaaaaaaaaaaaaaaaaaaaaaaaaaaaaaagaauu

SEQ ID NO: 7843 - RNA, 677 nt, Artificial Sequence
  mRNA Design i-3 (hSL-A100-N5) comprising derived and/or modified sequence from Pf(3D7)__XP_001351122.1__HsALB_Pf-CSP(19-152) (opt2)
aggagaaagcuuaccaugaagugggucaccuucaucucccuccucuuccucuucuccuccgccuacucccucuuccaggaguaccagugcuacggcuccuccuccaacacccgcguccucaacgagcucaacuacgacaacgccggcaccaaccucuacaacgagcucgagaugaacuacuacggcaagcaggagaacugguacucccucaagaagaacucccgcucccucggcgagaacgacgacggcaacaacgaggacaacgagaagcuccgcaagcccaagcacaagaagcucaagcagcccgccgacggcaaccccgaccccaacgccaaccccaacgucgaccccaacgccaaccccaacgucgaccccaacgccaaccccaacgucgaccccaacgccaaccccaacgccaaccccaacgccaaccccaacgccaaccccaacgccaaccccaacgccaaccccugaggacuaguuauaagacugacuagcccgaugggccucccaacgggcccuccuccccuccuugcaccgagauuaaucaaaggcucuuuucagagccaccaaaaaaaaaaaaaaaaaaaaaaaaaaaaaaaaaaaaaaaaaaaaaaaaaaaaaaaaaaaaaaaaaaaaaaaaaaaaaaaaaaaaaaaaaaaaaaaaaaaaagaauu

SEQ ID NO: 7844 - RNA, 797 nt, Artificial Sequence
  mRNA Design i-3 (hSL-A100-N5) comprising derived and/or modified sequence from Pf(3D7)__XP_001351122.1__HsALB_Pf-CSP(19-192) (opt2)
aggagaaagcuuaccaugaagugggucaccuucaucucccuccucuuccucuucuccuccgccuacucccucuuccaggaguaccagugcuacggcuccuccuccaacacccgcguccucaacgagcucaacuacgacaacgccggcaccaaccucuacaacgagcucgagaugaacuacuacggcaagcaggagaacugguacucccucaagaagaacucccgcucccucggcgagaacgacgacggcaacaacgaggacaacgagaagcuccgcaagcccaagcacaagaagcucaagcagcccgccgacggcaaccccgaccccaacgccaaccccaacgucgaccccaacgccaaccccaacgucgaccccaacgccaaccccaacgucgaccccaacgccaaccccaacgccaaccccaacgccaaccccaacgccaaccccaacgccaaccccaacgccaaccccaacgccaaccccaacgccaaccccaacgccaaccccaacgccaaccccaacgccaaccccaacgccaaccccaacgccaaccccaacgccaaccccaacgccaaccccaacgccaaccccugaggacuaguuauaagacugacuagcccgaugggccucccaacgggcccuccuccccuccuugcaccgagauuaaucaaaggcucuuuucagagccaccaaaaaaaaaaaaaaaaaaaaaaaaaaaaaaaaaaaaaaaaaaaaaaaaaaaaaaaaaaaaaaaaaaaaaaaaaaaaaaaaaaaaaaaaaaaaaaaaaaaaagaauu

SEQ ID NO: 7845 - RNA, 1037 nt, Artificial Sequence
  mRNA Design i-3 (hSL-A100-N5) comprising derived and/or modified sequence from Pf(3D7)__XP_001351122.1__HsALB_Pf-CSP(19-272) (opt2)
aggagaaagcuuaccaugaagugggucaccuucaucucccuccucuuccucuucuccuccgccuacucccucuuccaggaguaccagugcuacggcuccuccuccaacacccgcguccucaacgagcucaacuacgacaacgccggcaccaaccucuacaacgagcucgagaugaacuacuacggcaagcaggagaacugguacucccucaagaagaacucccgcucccucggcgagaacgacgacggcaacaacgaggacaacgagaagcuccgcaagcccaagcacaagaagcucaagcagcccgccgacggcaaccccgaccccaacgccaaccccaacgucgaccccaacgccaaccccaacgucgaccccaacgccaaccccaacgucgaccccaacgccaaccccaacgccaaccccaacgccaaccccaacgccaaccccaacgccaaccccaacgccaaccccaacgccaaccccaacgccaaccccaacgccaaccccaacgccaaccccaacgccaaccccaacgccaaccccaacgccaaccccaacgccaaccccaacgccaaccccaacgccaaccccaacgccaaccccaacgucgaccccaacgccaaccccaacgccaaccccaacgccaaccccaacgccaaccccaacgccaaccccaacgccaaccccaacgccaaccccaacgccaaccccaacgccaaccccaacgccaaccccaacgccaaccccaacgccaaccccaacgccaaccccaacgccaaccccaacgccaaccccaacgccaaccccaacgccaaccccaacgccaaccccugaggacuaguuauaagacugacuagcccgaugggccucccaacgggcccuccuccccuccuugcaccgagauuaaucaaaggcucuuuucagagccaccaaaaaaaaaaaaaaaaaaaaaaaaaaaaaaaaaaaaaaaaaaaaaaaaaaaaaaaaaaaaaaaaaaaaaaaaaaaaaaaaaaaaaaaaaaaaaaaaaaaaagaauu

SEQ ID NO: 7846 - RNA, 1199 nt, Artificial Sequence
  mRNA Design i-3 (hSL-A100-N5) comprising derived and/or modified sequence from Pf(3D7)__XP_001351122.1__HsALB_Pf-CSP(19-272)_L(AAY)_Pf-CSP(310-3 27)_L(AAY)_Pf-CSP(346-375) (opt2)
aggagaaagcuuaccaugaagugggucaccuucaucucccuccucuuccucuucuccuccgccuacucccucuuccaggaguaccagugcuacggcuccuccuccaacacccgcguccucaacgagcucaacuacgacaacgccggcaccaaccucuacaacgagcucgagaugaacuacuacggcaagcaggagaacugguacucccucaagaagaacucccgcucccucggcgagaacgacgacggcaacaacgaggacaacgagaagcuccgcaagcccaagcacaagaagcucaagcagcccgccgacggcaaccccgaccccaacgccaaccccaacgucgaccccaacgccaaccccaacgucgaccccaacgccaaccccaacgucgaccccaacgccaaccccaacgccaaccccaacgccaaccccaacgccaaccccaacgccaaccccaacgccaaccccaacgccaaccccaacgccaaccccaacgccaaccccaacgccaaccccaacgccaaccccaacgccaaccccaacgccaaccccaacgccaaccccaacgccaaccccaacgccaaccccaacgccaaccccaacgucgaccccaacgccaaccccaacgccaaccccaacgccaaccccaacgccaaccccaacgccaaccccaacgccaaccccaacgccaaccccaacgccaaccccaacgccaaccccaacgccaaccccaacgccaaccccaacgccaaccccaacgccaaccccaacgccaaccccaacgccaaccccaacgccaaccccaacgccaaccccaacgccaaccccgccgccuacgagcccuccgacaagcacaucaaggaguaccucaacaagauccagaacucccucgccgccuacaucaagcccggcuccgccaacaagcccaaggacgagcucgacuacgccaacgacaucgagaagaagaucugcaagauggagaagugcuccugaggacuaguuauaagacugacuagcccgaugggccucccaacgggcccuccuccccuccuugcaccgagauuaaucaaaggcucuuuucagagccaccaaaaaaaaaaaaaaaaaaaaaaaaaaaaaaaaaaaaaaaaaaaaaaaaaaaaaaaaaaaaaaaaaaaaaaaaaaaaaaaaaaaaaaaaaaaaaaaaaaaaagaauu

SEQ ID NO: 7847 - RNA, 1160 nt, Artificial Sequence
  mRNA Design i-3 (hSL-A100-N5) comprising derived and/or modified sequence from Pf(3D7)__XP_001351122.1__HsALB_Pf-CSP(19-272)_L(AAY)_Pf-CSP(346-3 65)_L(AAY)_P2 (opt2)
aggagaaagcuuaccaugaagugggucaccuucaucucccuccucuuccucuucuccuccgccuacucccucuuccaggaguaccagugcuacggcuccuccuccaacacccgcguccucaacgagcucaacuacgacaacgccggcaccaaccucuacaacgagcucgagaugaacuacuacggcaagcaggagaacugguacucccucaagaagaacucccgcucccucggcgagaacgacgacggcaacaacgaggacaacgagaagcuccgcaagcccaagcacaagaagcucaagcagcccgccgacggcaaccccgaccccaacgccaaccccaacgucgaccccaacgccaaccccaacgucgaccccaacgccaaccccaacgucgaccccaacgccaaccccaacgccaaccccaacgccaaccccaacgccaaccccaacgccaaccccaacgccaaccccaacgccaaccccaacgccaaccccaacgccaaccccaacgccaaccccaacgccaaccccaacgccaaccccaacgccaaccccaacgccaaccccaacgccaaccccaacgccaaccccaacgccaaccccaacgucgaccccaacgccaaccccaacgccaaccccaacgccaaccccaacgccaaccccaacgccaaccccaacgccaaccccaacgccaaccccaacgccaaccccaacgccaaccccaacgccaaccccaacgccaaccccaacgccaaccccaacgccaaccccaacgccaaccccaacgccaaccccaacgccaaccccaacgccaaccccaacgccaaccccgccgccuacaucaagcccggcuccgccaacaagcccaaggacgagcucgacuacgccaacgacaucgaggccgccuaccaguacaucaaggccaacuccaaguucaucggcaucaccgagcucugaggacuaguuauaagacugacuagcccgaugggccucccaacgggcccuccuccccuccuugcaccgagauuaaucaaaggcucuuuucagagccaccaaaaaaaaaaaaaaaaaaaaaaaaaaaaaaaaaaaaaaaaaaaaaaaaaaaaaaaaaaaaaaaaaaaaaaaaaaaaaaaaaaaaaaaaaaaaaaaaaaaaagaauu

SEQ ID NO: 7848 - RNA, 1154 nt, Artificial Sequence
  mRNA Design i-3 (hSL-A100-N5) comprising derived and/or modified sequence from Pf(3D7)__XP_001351122.1__HsALB_Pf-CSP(19-272)_L(AAY)_Pf-CSP(346-3 65)_L(AAY)_PADRE (opt2)
aggagaaagcuuaccaugaagugggucaccuucaucucccuccucuuccucuucuccuccgccuacucccucuuccaggaguaccagugcuacggcuccuccuccaacacccgcguccucaacgagcucaacuacgacaacgccggcaccaaccucuacaacgagcucgagaugaacuacuacggcaagcaggagaacugguacucccucaagaagaacucccgcucccucggcgagaacgacgacggcaacaacgaggacaacgagaagcuccgcaagcccaagcacaagaagcucaagcagcccgccgacggcaaccccgaccccaacgccaaccccaacgucgaccccaacgccaaccccaacgucgaccccaacgccaaccccaacgucgaccccaacgccaaccccaacgccaaccccaacgccaaccccaacgccaaccccaacgccaaccccaacgccaaccccaacgccaaccccaacgccaaccccaacgccaaccccaacgccaaccccaacgccaaccccaacgccaaccccaacgccaaccccaacgccaaccccaacgccaaccccaacgccaaccccaacgccaaccccaacgucgaccccaacgccaaccccaacgccaaccccaacgccaaccccaacgccaaccccaacgccaaccccaacgccaaccccaacgccaaccccaacgccaaccccaacgccaaccccaacgccaaccccaacgccaaccccaacgccaaccccaacgccaaccccaacgccaaccccaacgccaaccccaacgccaaccccaacgccaaccccaacgccaaccccgccgccuacaucaagcccggcuccgccaacaagcccaaggacgagcucgacuacgccaacgacaucgaggccgccuacgccaaguucgucgccgccuggacccucaaggccgccgccugaggacuaguuauaagacugacuagcccgaugggccucccaacgggcccuccuccccuccuugcaccgagauuaaucaaaggcucuuuucagagccaccaaaaaaaaaaaaaaaaaaaaaaaaaaaaaaaaaaaaaaaaaaaaaaaaaaaaaaaaaaaaaaaaaaaaaaaaaaaaaaaaaaaaaaaaaaaaaaaaaaaaagaauu

SEQ ID NO: 7849 - RNA, 1211 nt, Artificial Sequence
  mRNA Design i-3 (hSL-A100-N5) comprising derived and/or modified sequence from Pf(3D7)__XP_001351122.1__HsALB_Pf-CSP(19-272)_L(G4S)_Pf-CSP(310-3 27)_L(G4S)_Pf-CSP(346-375) (opt2)
aggagaaagcuuaccaugaagugggucaccuucaucucccuccucuuccucuucuccuccgccuacucccucuuccaggaguaccagugcuacggcuccuccuccaacacccgcguccucaacgagcucaacuacgacaacgccggcaccaaccucuacaacgagcucgagaugaacuacuacggcaagcaggagaacugguacucccucaagaagaacucccgcucccucggcgagaacgacgacggcaacaacgaggacaacgagaagcuccgcaagcccaagcacaagaagcucaagcagcccgccgacggcaaccccgaccccaacgccaaccccaacgucgaccccaacgccaaccccaacgucgaccccaacgccaaccccaacgucgaccccaacgccaaccccaacgccaaccccaacgccaaccccaacgccaaccccaacgccaaccccaacgccaaccccaacgccaaccccaacgccaaccccaacgccaaccccaacgccaaccccaacgccaaccccaacgccaaccccaacgccaaccccaacgccaaccccaacgccaaccccaacgccaaccccaacgccaaccccaacgucgaccccaacgccaaccccaacgccaaccccaacgccaaccccaacgccaaccccaacgccaaccccaacgccaaccccaacgccaaccccaacgccaaccccaacgccaaccccaacgccaaccccaacgccaaccccaacgccaaccccaacgccaaccccaacgccaaccccaacgccaaccccaacgccaaccccaacgccaaccccaacgccaaccccggcggcggcggcuccgagcccuccgacaagcacaucaaggaguaccucaacaagauccagaacucccucggcggcggcggcuccaucaagcccggcuccgccaacaagcccaaggacgagcucgacuacgccaacgacaucgagaagaagaucugcaagauggagaagugcuccugaggacuaguuauaagacugacuagcccgaugggccucccaacgggcccuccuccccuccuugcaccgagauuaaucaaaggcucuuuucagagccaccaaaaaaaaaaaaaaaaaaaaaaaaaaaaaaaaaaaaaaaaaaaaaaaaaaaaaaaaaaaaaaaaaaaaaaaaaaaaaaaaaaaaaaaaaaaaaaaaaaaaagaauu

SEQ ID NO: 7850 - RNA, 1196 nt, Artificial Sequence
  mRNA Design i-3 (hSL-A100-N5) comprising derived and/or modified sequence from Pf(3D7)__XP_001351122.1__HsALB_Pf-CSP(19-272)_L(G4S)_Pf-CSP(310-3 27)_Pf-CSP(346-375) (opt2)
aggagaaagcuuaccaugaagugggucaccuucaucucccuccucuuccucuucuccuccgccuacucccucuuccaggaguaccagugcuacggcuccuccuccaacacccgcguccucaacgagcucaacuacgacaacgccggcaccaaccucuacaacgagcucgagaugaacuacuacggcaagcaggagaacugguacucccucaagaagaacucccgcucccucggcgagaacgacgacggcaacaacgaggacaacgagaagcuccgcaagcccaagcacaagaagcucaagcagcccgccgacggcaaccccgaccccaacgccaaccccaacgucgaccccaacgccaaccccaacgucgaccccaacgccaaccccaacgucgaccccaacgccaaccccaacgccaaccccaacgccaaccccaacgccaaccccaacgccaaccccaacgccaaccccaacgccaaccccaacgccaaccccaacgccaaccccaacgccaaccccaacgccaaccccaacgccaaccccaacgccaaccccaacgccaaccccaacgccaaccccaacgccaaccccaacgccaaccccaacgucgaccccaacgccaaccccaacgccaaccccaacgccaaccccaacgccaaccccaacgccaaccccaacgccaaccccaacgccaaccccaacgccaaccccaacgccaaccccaacgccaaccccaacgccaaccccaacgccaaccccaacgccaaccccaacgccaaccccaacgccaaccccaacgccaaccccaacgccaaccccaacgccaaccccggcggcggcggcuccgagcccuccgacaagcacaucaaggaguaccucaacaagauccagaacucccucaucaagcccggcuccgccaacaagcccaaggacgagcucgacuacgccaacgacaucgagaagaagaucugcaagauggagaagugcuccugaggacuaguuauaagacugacuagcccgaugggccucccaacgggcccuccuccccuccuugcaccgagauuaaucaaaggcucuuuucagagccaccaaaaaaaaaaaaaaaaaaaaaaaaaaaaaaaaaaaaaaaaaaaaaaaaaaaaaaaaaaaaaaaaaaaaaaaaaaaaaaaaaaaaaaaaaaaaaaaaaaaaagaauu

SEQ ID NO: 7851 - RNA, 1196 nt, Artificial Sequence
  mRNA Design i-3 (hSL-A100-N5) comprising derived and/or modified sequence from Pf(3D7)__XP_001351122.1__HsALB_Pf-CSP(19-325) (opt2)
aggagaaagcuuaccaugaagugggucaccuucaucucccuccucuuccucuucuccuccgccuacucccucuuccaggaguaccagugcuacggcuccuccuccaacacccgcguccucaacgagcucaacuacgacaacgccggcaccaaccucuacaacgagcucgagaugaacuacuacggcaagcaggagaacugguacucccucaagaagaacucccgcucccucggcgagaacgacgacggcaacaacgaggacaacgagaagcuccgcaagcccaagcacaagaagcucaagcagcccgccgacggcaaccccgaccccaacgccaaccccaacgucgaccccaacgccaaccccaacgucgaccccaacgccaaccccaacgucgaccccaacgccaaccccaacgccaaccccaacgccaaccccaacgccaaccccaacgccaaccccaacgccaaccccaacgccaaccccaacgccaaccccaacgccaaccccaacgccaaccccaacgccaaccccaacgccaaccccaacgccaaccccaacgccaaccccaacgccaaccccaacgccaaccccaacgccaaccccaacgucgaccccaacgccaaccccaacgccaaccccaacgccaaccccaacgccaaccccaacgccaaccccaacgccaaccccaacgccaaccccaacgccaaccccaacgccaaccccaacgccaaccccaacgccaaccccaacgccaaccccaacgccaaccccaacgccaaccccaacgccaaccccaacgccaaccccaacgccaaccccaacgccaaccccaacaagaacaaccagggcaacggccagggccacaacaugcccaacgaccccaaccgcaacgucgacgagaacgccaacgccaacuccgccgucaagaacaacaacaacgaggagcccuccgacaagcacaucaaggaguaccucaacaagauccagaacugaggacuaguuauaagacugacuagcccgaugggccucccaacgggcccuccuccccuccuugcaccgagauuaaucaaaggcucuuuucagagccaccaaaaaaaaaaaaaaaaaaaaaaaaaaaaaaaaaaaaaaaaaaaaaaaaaaaaaaaaaaaaaaaaaaaaaaaaaaaaaaaaaaaaaaaaaaaaaaaaaaaaagaauu

SEQ ID NO: 7852 - RNA, 1373 nt, Artificial Sequence
  mRNA Design i-3 (hSL-A100-N5) comprising derived and/or modified sequence from Pf(3D7)__XP_001351122.1__HsALB_Pf-CSP(19-384) (opt2)
aggagaaagcuuaccaugaagugggucaccuucaucucccuccucuuccucuucuccuccgccuacucccucuuccaggaguaccagugcuacggcuccuccuccaacacccgcguccucaacgagcucaacuacgacaacgccggcaccaaccucuacaacgagcucgagaugaacuacuacggcaagcaggagaacugguacucccucaagaagaacucccgcucccucggcgagaacgacgacggcaacaacgaggacaacgagaagcuccgcaagcccaagcacaagaagcucaagcagcccgccgacggcaaccccgaccccaacgccaaccccaacgucgaccccaacgccaaccccaacgucgaccccaacgccaaccccaacgucgaccccaacgccaaccccaacgccaaccccaacgccaaccccaacgccaaccccaacgccaaccccaacgccaaccccaacgccaaccccaacgccaaccccaacgccaaccccaacgccaaccccaacgccaaccccaacgccaaccccaacgccaaccccaacgccaaccccaacgccaaccccaacgccaaccccaacgccaaccccaacgucgaccccaacgccaaccccaacgccaaccccaacgccaaccccaacgccaaccccaacgccaaccccaacgccaaccccaacgccaaccccaacgccaaccccaacgccaaccccaacgccaaccccaacgccaaccccaacgccaaccccaacgccaaccccaacgccaaccccaacgccaaccccaacgccaaccccaacgccaaccccaacgccaaccccaacaagaacaaccagggcaacggccagggccacaacaugcccaacgaccccaaccgcaacgucgacgagaacgccaacgccaacuccgccgucaagaacaacaacaacgaggagcccuccgacaagcacaucaaggaguaccucaacaagauccagaacucccucuccaccgaguggucccccugcuccgucaccugcggcaacggcauccagguccgcaucaagcccggcuccgccaacaagcccaaggacgagcucgacuacgccaacgacaucgagaagaagaucugcaagauggagaagugcuccuccgucuucaacgucgucaacuccuccugaggacuaguuauaagacugacuagcccgaugggccucccaacgggcccuccuccccuccuugcaccgagauuaaucaaaggcucuuuucagagccaccaaaaaaaaaaaaaaaaaaaaaaaaaaaaaaaaaaaaaaaaaaaaaaaaaaaaaaaaaaaaaaaaaaaaaaaaaaaaaaaaaaaaaaaaaaaaaaaaaaaaagaauu

SEQ ID NO: 7853 - RNA, 1511 nt, Artificial Sequence
  mRNA Design i-3 (hSL-A100-N5) comprising derived and/or modified sequence from Pf(3D7)__XP_001351122.1__HsALB_Pf-CSP(19-384)_TM domain HA (opt2)
aggagaaagcuuaccaugaagugggucaccuucaucucccuccucuuccucuucuccuccgccuacucccucuuccaggaguaccagugcuacggcuccuccuccaacacccgcguccucaacgagcucaacuacgacaacgccggcaccaaccucuacaacgagcucgagaugaacuacuacggcaagcaggagaacugguacucccucaagaagaacucccgcucccucggcgagaacgacgacggcaacaacgaggacaacgagaagcuccgcaagcccaagcacaagaagcucaagcagcccgccgacggcaaccccgaccccaacgccaaccccaacgucgaccccaacgccaaccccaacgucgaccccaacgccaaccccaacgucgaccccaacgccaaccccaacgccaaccccaacgccaaccccaacgccaaccccaacgccaaccccaacgccaaccccaacgccaaccccaacgccaaccccaacgccaaccccaacgccaaccccaacgccaaccccaacgccaaccccaacgccaaccccaacgccaaccccaacgccaaccccaacgccaaccccaacgccaaccccaacgucgaccccaacgccaaccccaacgccaaccccaacgccaaccccaacgccaaccccaacgccaaccccaacgccaaccccaacgccaaccccaacgccaaccccaacgccaaccccaacgccaaccccaacgccaaccccaacgccaaccccaacgccaaccccaacgccaaccccaacgccaaccccaacgccaaccccaacgccaaccccaacgccaaccccaacaagaacaaccagggcaacggccagggccacaacaugcccaacgaccccaaccgcaacgucgacgagaacgccaacgccaacuccgccgucaagaacaacaacaacgaggagcccuccgacaagcacaucaaggaguaccucaacaagauccagaacucccucuccaccgaguggucccccugcuccgucaccugcggcaacggcauccagguccgcaucaagcccggcuccgccaacaagcccaaggacgagcucgacuacgccaacgacaucgagaagaagaucugcaagauggagaagugcuccuccgucuucaacgucgucaacuccuccaagcucgaguccacccgcaucuaccagauccucgccaucuacuccaccgucgccuccucccucguccucgucgucucccucggcgccaucuccuucuggaugugcuccaacggcucccuccagugccgcaucugcaucugaggacuaguuauaagacugacuagcccgaugggccucccaacgggcccuccuccccuccuugcaccgagauuaaucaaaggcucuuuucagagccaccaaaaaaaaaaaaaaaaaaaaaaaaaaaaaaaaaaaaaaaaaaaaaaaaaaaaaaaaaaaaaaaaaaaaaaaaaaaaaaaaaaaaaaaaaaaaaaaaaaaaagaauu

SEQ ID NO: 7854 - RNA, 1223 nt, Artificial Sequence
  mRNA Design i-3 (hSL-A100-N5) comprising derived and/or modified sequence from Pf(3D7)__XP_001351122.1__HsALB_Pf-CSP(82-397) (opt2)
aggagaaagcuuaccaugaagugggucaccuucaucucccuccucuuccucuucuccuccgccuacuccgacaacgagaagcuccgcaagcccaagcacaagaagcucaagcagcccgccgacggcaaccccgaccccaacgccaaccccaacgucgaccccaacgccaaccccaacgucgaccccaacgccaaccccaacgucgaccccaacgccaaccccaacgccaaccccaacgccaaccccaacgccaaccccaacgccaaccccaacgccaaccccaacgccaaccccaacgccaaccccaacgccaaccccaacgccaaccccaacgccaaccccaacgccaaccccaacgccaaccccaacgccaaccccaacgccaaccccaacgccaaccccaacgccaaccccaacgucgaccccaacgccaaccccaacgccaaccccaacgccaaccccaacgccaaccccaacgccaaccccaacgccaaccccaacgccaaccccaacgccaaccccaacgccaaccccaacgccaaccccaacgccaaccccaacgccaaccccaacgccaaccccaacgccaaccccaacgccaaccccaacgccaaccccaacgccaaccccaacgccaaccccaacaagaacaaccagggcaacggccagggccacaacaugcccaacgaccccaaccgcaacgucgacgagaacgccaacgccaacuccgccgucaagaacaacaacaacgaggagcccuccgacaagcacaucaaggaguaccucaacaagauccagaacucccucuccaccgaguggucccccugcuccgucaccugcggcaacggcauccagguccgcaucaagcccggcuccgccaacaagcccaaggacgagcucgacuacgccaacgacaucgagaagaagaucugcaagauggagaagugcuccuccgucuucaacgucgucaacuccuccaucggccucaucaugguccucuccuuccucuuccucaacugaggacuaguuauaagacugacuagcccgaugggccucccaacgggcccuccuccccuccuugcaccgagauuaaucaaaggcucuuuucagagccaccaaaaaaaaaaaaaaaaaaaaaaaaaaaaaaaaaaaaaaaaaaaaaaaaaaaaaaaaaaaaaaaaaaaaaaaaaaaaaaaaaaaaaaaaaaaaaaaaaaaaagaauu

SEQ ID NO: 7855 - RNA, 575 nt, Artificial Sequence
  mRNA Design i-3 (hSL-A100-N5) comprising derived and/or modified sequence from Pf(3D7)__XP_001351122.1__HsALB_Pf-CSP(93-192) (opt2)
aggagaaagcuuaccaugaagugggucaccuucaucucccuccucuuccucuucuccuccgccuacuccaagcucaagcagcccgccgacggcaaccccgaccccaacgccaaccccaacgucgaccccaacgccaaccccaacgucgaccccaacgccaaccccaacgucgaccccaacgccaaccccaacgccaaccccaacgccaaccccaacgccaaccccaacgccaaccccaacgccaaccccaacgccaaccccaacgccaaccccaacgccaaccccaacgccaaccccaacgccaaccccaacgccaaccccaacgccaaccccaacgccaaccccaacgccaaccccaacgccaaccccugaggacuaguuauaagacugacuagcccgaugggccucccaacgggcccuccuccccuccuugcaccgagauuaaucaaaggcucuuuucagagccaccaaaaaaaaaaaaaaaaaaaaaaaaaaaaaaaaaaaaaaaaaaaaaaaaaaaaaaaaaaaaaaaaaaaaaaaaaaaaaaaaaaaaaaaaaaaaaaaaaaaaagaauu

SEQ ID NO: 7856 - RNA, 815 nt, Artificial Sequence
  mRNA Design i-3 (hSL-A100-N5) comprising derived and/or modified sequence from Pf(3D7)__XP_001351122.1__HsALB_Pf-CSP(93-272) (opt2)
aggagaaagcuuaccaugaagugggucaccuucaucucccuccucuuccucuucuccuccgccuacuccaagcucaagcagcccgccgacggcaaccccgaccccaacgccaaccccaacgucgaccccaacgccaaccccaacgucgaccccaacgccaaccccaacgucgaccccaacgccaaccccaacgccaaccccaacgccaaccccaacgccaaccccaacgccaaccccaacgccaaccccaacgccaaccccaacgccaaccccaacgccaaccccaacgccaaccccaacgccaaccccaacgccaaccccaacgccaaccccaacgccaaccccaacgccaaccccaacgccaaccccaacgccaaccccaacgucgaccccaacgccaaccccaacgccaaccccaacgccaaccccaacgccaaccccaacgccaaccccaacgccaaccccaacgccaaccccaacgccaaccccaacgccaaccccaacgccaaccccaacgccaaccccaacgccaaccccaacgccaaccccaacgccaaccccaacgccaaccccaacgccaaccccaacgccaaccccaacgccaaccccugaggacuaguuauaagacugacuagcccgaugggccucccaacgggcccuccuccccuccuugcaccgagauuaaucaaaggcucuuuucagagccaccaaaaaaaaaaaaaaaaaaaaaaaaaaaaaaaaaaaaaaaaaaaaaaaaaaaaaaaaaaaaaaaaaaaaaaaaaaaaaaaaaaaaaaaaaaaaaaaaaaaaagaauu

SEQ ID NO: 7857 - RNA, 1190 nt, Artificial Sequence
  mRNA Design i-3 (hSL-A100-N5) comprising derived and/or modified sequence from Pf(3D7)__XP_001351122.1__HsALB_Pf-CSP(93-397) (opt2)
aggagaaagcuuaccaugaagugggucaccuucaucucccuccucuuccucuucuccuccgccuacuccaagcucaagcagcccgccgacggcaaccccgaccccaacgccaaccccaacgucgaccccaacgccaaccccaacgucgaccccaacgccaaccccaacgucgaccccaacgccaaccccaacgccaaccccaacgccaaccccaacgccaaccccaacgccaaccccaacgccaaccccaacgccaaccccaacgccaaccccaacgccaaccccaacgccaaccccaacgccaaccccaacgccaaccccaacgccaaccccaacgccaaccccaacgccaaccccaacgccaaccccaacgccaaccccaacgucgaccccaacgccaaccccaacgccaaccccaacgccaaccccaacgccaaccccaacgccaaccccaacgccaaccccaacgccaaccccaacgccaaccccaacgccaaccccaacgccaaccccaacgccaaccccaacgccaaccccaacgccaaccccaacgccaaccccaacgccaaccccaacgccaaccccaacgccaaccccaacgccaaccccaacaagaacaaccagggcaacggccagggccacaacaugcccaacgaccccaaccgcaacgucgacgagaacgccaacgccaacuccgccgucaagaacaacaacaacgaggagcccuccgacaagcacaucaaggaguaccucaacaagauccagaacucccucuccaccgaguggucccccugcuccgucaccugcggcaacggcauccagguccgcaucaagcccggcuccgccaacaagcccaaggacgagcucgacuacgccaacgacaucgagaagaagaucugcaagauggagaagugcuccuccgucuucaacgucgucaacuccuccaucggccucaucaugguccucuccuuccucuuccucaacugaggacuaguuauaagacugacuagcccgaugggccucccaacgggcccuccuccccuccuugcaccgagauuaaucaaaggcucuuuucagagccaccaaaaaaaaaaaaaaaaaaaaaaaaaaaaaaaaaaaaaaaaaaaaaaaaaaaaaaaaaaaaaaaaaaaaaaaaaaaaaaaaaaaaaaaaaaaaaaaaaaaaagaauu

SEQ ID NO: 7858 - RNA, 560 nt, Artificial Sequence
  mRNA Design i-3 (hSL-A100-N5) comprising derived and/or modified sequence from Pf(3D7)__XP_001351122.1__HsALB_Pf-CSP(98-192) (opt2)
aggagaaagcuuaccaugaagugggucaccuucaucucccuccucuuccucuucuccuccgccuacuccgccgacggcaaccccgaccccaacgccaaccccaacgucgaccccaacgccaaccccaacgucgaccccaacgccaaccccaacgucgaccccaacgccaaccccaacgccaaccccaacgccaaccccaacgccaaccccaacgccaaccccaacgccaaccccaacgccaaccccaacgccaaccccaacgccaaccccaacgccaaccccaacgccaaccccaacgccaaccccaacgccaaccccaacgccaaccccaacgccaaccccaacgccaaccccugaggacuaguuauaagacugacuagcccgaugggccucccaacgggcccuccuccccuccuugcaccgagauuaaucaaaggcucuuuucagagccaccaaaaaaaaaaaaaaaaaaaaaaaaaaaaaaaaaaaaaaaaaaaaaaaaaaaaaaaaaaaaaaaaaaaaaaaaaaaaaaaaaaaaaaaaaaaaaaaaaaaaagaauu

SEQ ID NO: 7859 - RNA, 800 nt, Artificial Sequence
  mRNA Design i-3 (hSL-A100-N5) comprising derived and/or modified sequence from Pf(3D7)__XP_001351122.1__HsALB_Pf-CSP(98-272) (opt2)
aggagaaagcuuaccaugaagugggucaccuucaucucccuccucuuccucuucuccuccgccuacuccgccgacggcaaccccgaccccaacgccaaccccaacgucgaccccaacgccaaccccaacgucgaccccaacgccaaccccaacgucgaccccaacgccaaccccaacgccaaccccaacgccaaccccaacgccaaccccaacgccaaccccaacgccaaccccaacgccaaccccaacgccaaccccaacgccaaccccaacgccaaccccaacgccaaccccaacgccaaccccaacgccaaccccaacgccaaccccaacgccaaccccaacgccaaccccaacgccaaccccaacgucgaccccaacgccaaccccaacgccaaccccaacgccaaccccaacgccaaccccaacgccaaccccaacgccaaccccaacgccaaccccaacgccaaccccaacgccaaccccaacgccaaccccaacgccaaccccaacgccaaccccaacgccaaccccaacgccaaccccaacgccaaccccaacgccaaccccaacgccaaccccaacgccaaccccugaggacuaguuauaagacugacuagcccgaugggccucccaacgggcccuccuccccuccuugcaccgagauuaaucaaaggcucuuuucagagccaccaaaaaaaaaaaaaaaaaaaaaaaaaaaaaaaaaaaaaaaaaaaaaaaaaaaaaaaaaaaaaaaaaaaaaaaaaaaaaaaaaaaaaaaaaaaaaaaaaaaaagaauu

SEQ ID NO: 7860 - RNA, 1106 nt, Artificial Sequence
  mRNA Design i-3 (hSL-A100-N5) comprising derived and/or modified sequence from Pf(3D7)__XP_001351122.1__HsALB_Pf-CSP(98-374) (opt2)
aggagaaagcuuaccaugaagugggucaccuucaucucccuccucuuccucuucuccuccgccuacuccgccgacggcaaccccgaccccaacgccaaccccaacgucgaccccaacgccaaccccaacgucgaccccaacgccaaccccaacgucgaccccaacgccaaccccaacgccaaccccaacgccaaccccaacgccaaccccaacgccaaccccaacgccaaccccaacgccaaccccaacgccaaccccaacgccaaccccaacgccaaccccaacgccaaccccaacgccaaccccaacgccaaccccaacgccaaccccaacgccaaccccaacgccaaccccaacgccaaccccaacgucgaccccaacgccaaccccaacgccaaccccaacgccaaccccaacgccaaccccaacgccaaccccaacgccaaccccaacgccaaccccaacgccaaccccaacgccaaccccaacgccaaccccaacgccaaccccaacgccaaccccaacgccaaccccaacgccaaccccaacgccaaccccaacgccaaccccaacgccaaccccaacgccaaccccaacaagaacaaccagggcaacggccagggccacaacaugcccaacgaccccaaccgcaacgucgacgagaacgccaacgccaacuccgccgucaagaacaacaacaacgaggagcccuccgacaagcacaucaaggaguaccucaacaagauccagaacucccucuccaccgaguggucccccugcuccgucaccugcggcaacggcauccagguccgcaucaagcccggcuccgccaacaagcccaaggacgagcucgacuacgccaacgacaucgagaagaagaucugcaagauggagaagugcugaggacuaguuauaagacugacuagcccgaugggccucccaacgggcccuccuccccuccuugcaccgagauuaaucaaaggcucuuuucagagccaccaaaaaaaaaaaaaaaaaaaaaaaaaaaaaaaaaaaaaaaaaaaaaaaaaaaaaaaaaaaaaaaaaaaaaaaaaaaaaaaaaaaaaaaaaaaaaaaaaaaaagaauu

SEQ ID NO: 7861 - RNA, 1175 nt, Artificial Sequence
  mRNA Design i-3 (hSL-A100-N5) comprising derived and/or modified sequence from Pf(3D7)__XP_001351122.1__HsALB_Pf-CSP(98-397) (opt2)
aggagaaagcuuaccaugaagugggucaccuucaucucccuccucuuccucuucuccuccgccuacuccgccgacggcaaccccgaccccaacgccaaccccaacgucgaccccaacgccaaccccaacgucgaccccaacgccaaccccaacgucgaccccaacgccaaccccaacgccaaccccaacgccaaccccaacgccaaccccaacgccaaccccaacgccaaccccaacgccaaccccaacgccaaccccaacgccaaccccaacgccaaccccaacgccaaccccaacgccaaccccaacgccaaccccaacgccaaccccaacgccaaccccaacgccaaccccaacgccaaccccaacgucgaccccaacgccaaccccaacgccaaccccaacgccaaccccaacgccaaccccaacgccaaccccaacgccaaccccaacgccaaccccaacgccaaccccaacgccaaccccaacgccaaccccaacgccaaccccaacgccaaccccaacgccaaccccaacgccaaccccaacgccaaccccaacgccaaccccaacgccaaccccaacgccaaccccaacaagaacaaccagggcaacggccagggccacaacaugcccaacgaccccaaccgcaacgucgacgagaacgccaacgccaacuccgccgucaagaacaacaacaacgaggagcccuccgacaagcacaucaaggaguaccucaacaagauccagaacucccucuccaccgaguggucccccugcuccgucaccugcggcaacggcauccagguccgcaucaagcccggcuccgccaacaagcccaaggacgagcucgacuacgccaacgacaucgagaagaagaucugcaagauggagaagugcuccuccgucuucaacgucgucaacuccuccaucggccucaucaugguccucuccuuccucuuccucaacugaggacuaguuauaagacugacuagcccgaugggccucccaacgggcccuccuccccuccuugcaccgagauuaaucaaaggcucuuuucagagccaccaaaaaaaaaaaaaaaaaaaaaaaaaaaaaaaaaaaaaaaaaaaaaaaaaaaaaaaaaaaaaaaaaaaaaaaaaaaaaaaaaaaaaaaaaaaaaaaaaaaaagaauu

SEQ ID NO: 7862 - RNA, 1502 nt, Artificial Sequence
  mRNA Design i-3 (hSL-A100-N5) comprising derived and/or modified sequence from Pf(3D7)__XP_001351122.1__HsALB_Pf-CSP(199-377)_L(PVTN)_HBsAg (opt2)
aggagaaagcuuaccaugaagugggucaccuucaucucccuccucuuccucuucuccuccgccuacuccgaccccaacgccaaccccaacgccaaccccaacgccaaccccaacgccaaccccaacgccaaccccaacgccaaccccaacgccaaccccaacgccaaccccaacgccaaccccaacgccaaccccaacgccaaccccaacgccaaccccaacgccaaccccaacgccaaccccaacgccaaccccaacgccaaccccaacgccaaccccaacgccaaccccaacaagaacaaccagggcaacggccagggccacaacaugcccaacgaccccaaccgcaacgucgacgagaacgccaacgccaacuccgccgucaagaacaacaacaacgaggagcccuccgacaagcacaucaaggaguaccucaacaagauccagaacucccucuccaccgaguggucccccugcuccgucaccugcggcaacggcauccagguccgcaucaagcccggcuccgccaacaagcccaaggacgagcucgacuacgccaacgacaucgagaagaagaucugcaagauggagaagugcuccuccguccccgucaccaacauggagaacaucaccuccggcuuccucggcccccuccucguccuccaggccggcuucuuccuccucacccgcauccucaccaucccccagucccucgacuccugguggaccucccucaacuuccucggcggcucccccgucugccucggccagaacucccagucccccaccuccaaccacucccccaccuccugcccccccaucugccccggcuaccgcuggaugugccuccgccgcuucaucaucuuccucuucauccuccuccucugccucaucuuccuccucguccuccucgacuaccagggcaugcuccccgucugcccccucauccccggcuccaccaccaccaacaccggccccugcaagaccugcaccacccccgcccagggcaacuccauguuccccuccugcugcugcaccaagcccaccgacggcaacugcaccugcauccccauccccuccuccugggccuucgccaaguaccucugggagugggccuccguccgcuucuccuggcucucccuccucguccccuucguccagugguucgucggccucucccccaccgucuggcucuccgccaucuggaugaugugguacuggggccccucccucuacuccaucgucucccccuucaucccccuccuccccaucuucuucugccucugggucuacaucugaggacuaguuauaagacugacuagcccgaugggccucccaacgggcccuccuccccuccuugcaccgagauuaaucaaaggcucuuuucagagccaccaaaaaaaaaaaaaaaaaaaaaaaaaaaaaaaaaaaaaaaaaaaaaaaaaaaaaaaaaaaaaaaaaaaaaaaaaaaaaaaaaaaaaaaaaaaaaaaaaaaaagaauu

SEQ ID NO: 7863 - RNA, 1412 nt, Artificial Sequence
  mRNA Design i-3 (hSL-A100-N5) comprising derived and/or modified sequence from Pf(3D7)__XP_001351122.1__Pf-CSP (opt3)
aggagaaagcuuaccaugaugagaaagcuggccauccucagcguguccucuuuccuuuuugucgaggcucuguuccaggaauaccaaugcuauggcucaaguagcaacaccaggguuuugaaugaguuaaacuacgacaaugcagggacaaaccuguauaaugaacuagagaugaacuacuauggaaaacaggaaaauugguacucccucaagaaaaacucucggucgcugggugagaaugaugacggcaacaaugaggauaacgaaaaacuucgcaagcccaagcacaagaaacugaagcagccugccgacgggaauccagauccgaacgcgaaucccaacguggacccuaacgcuaauccaaacguagaucccaaugccaacccuaauguggacccaaacgcaaaucccaacgccaauccuaacgcuaauccaaacgcaaauccgaacgccaaucccaacgcuaacccuaaugccaacccaaaugcgaaccccaaugcaaacccuaaugccaacccaaaugcuaaccccaaugccaacccgaaugcaaacccuaaugcuaaccccaacgccaauccaaacgcgaauccuaacgccaaucccaacgucgauccaaaugcaaaccccaaugcuaacccuaaugccaacccaaaugcuaacccgaaugccaaccccaacgcaaauccuaacgccaauccaaacgcuaaucccaacgcgaauccuaacgcaaauccaaacgccaaucccaacgcuaauccgaacgccaauccuaacgcaaauccaaacgccaaccccaaugcuaacccuaaugccaaccccaaugcaaacccaaauaaaaacaaucagggaaacggccaaggucauaauaugccuaacgaccccaaucgaaacguggaugagaaugcgaacgcuaacucagccguuaagaauaacaauaacgaggaaccaagcgacaaacacauuaaggaguauuugaauaagauacagaacagucucuccacugaauggucuccguguagcgugacgugcgggaauggaauccagguccguauuaaaccuggcuccgcaaacaagcccaaagaugagcuggacuacgccaaugacaucgaaaagaaaauuuguaagauggagaaaugcucaaguguguuuaacguaguuaauagcucuaucggccugauaauggugcucuccuucuuauuucugaacugaggacuaguuauaagacugacuagcccgaugggccucccaacgggcccuccuccccuccuugcaccgagauuaaucaaaggcucuuuucagagccaccaaaaaaaaaaaaaaaaaaaaaaaaaaaaaaaaaaaaaaaaaaaaaaaaaaaaaaaaaaaaaaaaaaaaaaaaaaaaaaaaaaaaaaaaaaaaaaaaaaaaagaauu

SEQ ID NO: 7864 - RNA, 1343 nt, Artificial Sequence
  mRNA Design i-3 (hSL-A100-N5) comprising derived and/or modified sequence from Pf(3D7)__XP_001351122.1__Pf-CSP(1-374) (opt3)
aggagaaagcuuaccaugaugagaaagcuggccauccucagcguguccucuuuccuuuuugucgaggcucuguuccaggaauaccaaugcuauggcucaaguagcaacaccaggguuuugaaugaguuaaacuacgacaaugcagggacaaaccuguauaaugaacuagagaugaacuacuauggaaaacaggaaaauugguacucccucaagaaaaacucucggucgcugggugagaaugaugacggcaacaaugaggauaacgaaaaacuucgcaagcccaagcacaagaaacugaagcagccugccgacgggaauccagauccgaacgcgaaucccaacguggacccuaacgcuaauccaaacguagaucccaaugccaacccuaauguggacccaaacgcaaaucccaacgccaauccuaacgcuaauccaaacgcaaauccgaacgccaaucccaacgcuaacccuaaugccaacccaaaugcgaaccccaaugcaaacccuaaugccaacccaaaugcuaaccccaaugccaacccgaaugcaaacccuaaugcuaaccccaacgccaauccaaacgcgaauccuaacgccaaucccaacgucgauccaaaugcaaaccccaaugcuaacccuaaugccaacccaaaugcuaacccgaaugccaaccccaacgcaaauccuaacgccaauccaaacgcuaaucccaacgcgaauccuaacgcaaauccaaacgccaaucccaacgcuaauccgaacgccaauccuaacgcaaauccaaacgccaaccccaaugcuaacccuaaugccaaccccaaugcaaacccaaauaaaaacaaucagggaaacggccaaggucauaauaugccuaacgaccccaaucgaaacguggaugagaaugcgaacgcuaacucagccguuaagaauaacaauaacgaggaaccaagcgacaaacacauuaaggaguauuugaauaagauacagaacagucucuccacugaauggucuccguguagcgugacgugcgggaauggaauccagguccguauuaaaccuggcuccgcaaacaagcccaaagaugagcuggacuacgccaaugacaucgaaaagaaaauuuguaagauggagaaaugcugaggacuaguuauaagacugacuagcccgaugggccucccaacgggcccuccuccccuccuugcaccgagauuaaucaaaggcucuuuucagagccaccaaaaaaaaaaaaaaaaaaaaaaaaaaaaaaaaaaaaaaaaaaaaaaaaaaaaaaaaaaaaaaaaaaaaaaaaaaaaaaaaaaaaaaaaaaaaaaaaaaaaagaauu

SEQ ID NO: 7865 - RNA, 1196 nt, Artificial Sequence
  mRNA Design i-3 (hSL-A100-N5) comprising derived and/or modified sequence from Pf(3D7)__XP_001351122.1__Pf-CSP(1-325) (opt3)
aggagaaagcuuaccaugaugagaaagcuggccauccucagcguguccucuuuccuuuuugucgaggcucuguuccaggaauaccaaugcuauggcucaaguagcaacaccaggguuuugaaugaguuaaacuacgacaaugcagggacaaaccuguauaaugaacuagagaugaacuacuauggaaaacaggaaaauugguacucccucaagaaaaacucucggucgcugggugagaaugaugacggcaacaaugaggauaacgaaaaacuucgcaagcccaagcacaagaaacugaagcagccugccgacgggaauccagauccgaacgcgaaucccaacguggacccuaacgcuaauccaaacguagaucccaaugccaacccuaauguggacccaaacgcaaaucccaacgccaauccuaacgcuaauccaaacgcaaauccgaacgccaaucccaacgcuaacccuaaugccaacccaaaugcgaaccccaaugcaaacccuaaugccaacccaaaugcuaaccccaaugccaacccgaaugcaaacccuaaugcuaaccccaacgccaauccaaacgcgaauccuaacgccaaucccaacgucgauccaaaugcaaaccccaaugcuaacccuaaugccaacccaaaugcuaacccgaaugccaaccccaacgcaaauccuaacgccaauccaaacgcuaaucccaacgcgaauccuaacgcaaauccaaacgccaaucccaacgcuaauccgaacgccaauccuaacgcaaauccaaacgccaaccccaaugcuaacccuaaugccaaccccaaugcaaacccaaauaaaaacaaucagggaaacggccaaggucauaauaugccuaacgaccccaaucgaaacguggaugagaaugcgaacgcuaacucagccguuaagaauaacaauaacgaggaaccaagcgacaaacacauuaaggaguauuugaauaagauacagaacugaggacuaguuauaagacugacuagcccgaugggccucccaacgggcccuccuccccuccuugcaccgagauuaaucaaaggcucuuuucagagccaccaaaaaaaaaaaaaaaaaaaaaaaaaaaaaaaaaaaaaaaaaaaaaaaaaaaaaaaaaaaaaaaaaaaaaaaaaaaaaaaaaaaaaaaaaaaaaaaaaaaaagaauu

SEQ ID NO: 7866 - RNA, 1412 nt, Artificial Sequence
  mRNA Design i-3 (hSL-A100-N5) comprising derived and/or modified sequence from Pf(3D7)__XP_001351122.1__HsALB_Pf-CSP(19-397) (opt3)
aggagaaagcuuaccaugaagugggugaccuucaucagccugcucuuucuuuucuccucugccuacucacuguuucaggaguaucaaugcuacggcaguagcuccaacacaagagucuugaaugaauuaaacuaugacaaugcugggacuaaccuguacaaugagcuagaaaugaacuauuacggaaaacaggagaauugguauucucucaagaaaaacucgaggucacugggugaaaaugaugacggcaacaaugaggauaacgagaaacuucggaagcccaagcacaagaaacugaagcagccugcagacgggaauccagauccgaacgccaaucccaacguugacccuaacgcgaauccaaacguggaucccaaugcuaacccuaauguagacccaaacgccaaucccaacgcaaauccuaacgccaauccaaacgcuaauccgaacgcaaaucccaacgccaacccuaaugcuaacccaaaugccaaccccaaugcgaacccuaaugcaaacccaaaugccaaccccaaugcuaacccgaaugccaacccuaaugcaaaccccaacgcuaauccaaacgccaauccuaacgcgaaucccaacguggauccaaaugccaaccccaaugcaaacccuaaugcuaacccaaaugccaacccgaaugcuaaccccaacgccaauccuaacgcaaauccaaacgccaaucccaacgcuaauccuaacgcgaauccaaacgcaaaucccaacgccaauccgaacgcuaauccuaacgccaauccaaacgcaaaccccaaugccaacccuaaugcuaaccccaaugccaacccaaauaaaaacaaucagggaaacggccaaggucauaauaugccuaacgaccccaaucgcaacgucgaugaaaaugcaaacgcgaacagcgcugugaagaauaacaauaacgaggaaccaagugacaaacacauuaaggaguacuugaauaagauacagaacucccucucuacggaguggagcccguguuccguuaccugcgggaauggaauccaggugcgaauuaaaccuggcucagccaacaagcccaaagaugaacuggacuacgcaaaugacaucgagaagaaaauuuguaagauggaaaaaugcaguagcgucuucaacgugguaaauucuuccaucggccugauaaugguucucucauuuuuauuccugaacugaggacuaguuauaagacugacuagcccgaugggccucccaacgggcccuccuccccuccuugcaccgagauuaaucaaaggcucuuuucagagccaccaaaaaaaaaaaaaaaaaaaaaaaaaaaaaaaaaaaaaaaaaaaaaaaaaaaaaaaaaaaaaaaaaaaaaaaaaaaaaaaaaaaaaaaaaaaaaaaaaaaaagaauu

SEQ ID NO: 7867 - RNA, 1430 nt, Artificial Sequence
  mRNA Design i-3 (hSL-A100-N5) comprising derived and/or modified sequence from Pf(3D7)__XP_001351122.1__HsIns-iso1_Pf-CSP(19-397) (opt3)
aggagaaagcuuaccauggcccuguggaugagacuccuuccccuguuggcuuuacuggcacuauggggcccugacccagccgcggcucucuuccaggaguaccaaugcuaugggagcuccucuaacaccagggugcugaaugaacuuaacuacgauaaugccggaacaaaccuguauaaugaguuggaaaugaacuacuaugguaagcaggagaauugguacucacucaaaaagaacagucggagccugggcgaaaaugacgaugggaacaaugaggacaacgagaaacugcgcaagccgaaacacaagaagcucaaacagcccgcagauggaaauccugacccaaacgccaaucccaacgucgauccuaacgcuaauccaaacguugaccccaaugcaaacccuaauguggauccaaacgccaauccgaacgcuaaucccaacgccaauccuaacgcgaauccaaacgcaaaucccaacgccaacccuaaugcuaacccaaaugccaaccccaaugcaaacccgaaugcuaacccuaaugccaaccccaaugcgaacccaaaugccaacccuaaugcaaaccccaacgcuaauccaaacgccaaucccaacgcuaauccuaacguagacccaaaugccaacccgaaugcaaaccccaaugccaacccuaaugcuaacccaaaugcgaaccccaacgcaaauccuaacgccaauccaaacgcuaaucccaacgccaauccgaacgcaaauccuaacgccaauccaaacgcuaaucccaacgccaauccuaacgcaaaucccaacgcgaacccaaaugcuaacccuaaugccaaccccaaugcaaacccaaauaagaacaaucagggcaacggucaagggcauaauaugccgaacgauccuaaucgaaacguggacgaaaaugccaacgcuaacuccgccgucaaaaauaacaauaacgaggaacccucugauaagcacaucaaagaguauuuaaauaagauucagaacucgcugucaacugaguggagcccauguagugugacgugcggaaauggcauacagguucguaucaagcccggcuccgcaaacaaaccuaaggacgaacuugacuacgcuaaugauauugagaaaaagaucuguaaaauggaaaagugcucuagcguguuuaacgucguaaauuccucaauuggguugaucauggugcugaguuuccuauuucucaacugaggacuaguuauaagacugacuagcccgaugggccucccaacgggcccuccuccccuccuugcaccgagauuaaucaaaggcucuuuucagagccaccaaaaaaaaaaaaaaaaaaaaaaaaaaaaaaaaaaaaaaaaaaaaaaaaaaaaaaaaaaaaaaaaaaaaaaaaaaaaaaaaaaaaaaaaaaaaaaaaaaaaagaauu

SEQ ID NO: 7868 - RNA, 1409 nt, Artificial Sequence
  mRNA Design i-3 (hSL-A100-N5) comprising derived and/or modified sequence from Pf(3D7)__XP_001351122.1__HsSPARC_Pf-CSP(19-397) (opt3)
aggagaaagcuuaccaugagagccuggaucuucuuucugcucugccuugcuggcagggcacuggccuuguuccaggaguaccaauguuaugggagcuccucuaacacccggguguuaaaugaacugaacuacgacaaugcgggaacaaaccuauauaaugagcucgaaaugaacuacuaugguaagcaggagaauugguacucacugaaaaagaacagucgcagccuuggcgaaaaugaugacgggaacaaugaggauaacgagaaacugcgaaagcccaaacacaagaaguugaaacagccugcugacggaaauccagauccgaacgccaaucccaacgucgacccuaacgcaaauccaaacguugaucccaaugccaacccuaauguggacccaaacgcuaaucccaacgcaaauccuaacgccaauccaaacgcuaauccgaacgccaaucccaacgcgaacccuaaugcaaacccaaaugccaaccccaaugcuaacccuaaugccaacccaaaugcaaaccccaaugcuaacccgaaugccaacccuaaugcgaaccccaacgccaauccaaacgcaaauccuaacgcuaaucccaacguagauccaaaugccaaccccaaugcuaacccuaaugccaacccaaaugcaaacccgaaugccaaccccaacgcuaauccuaacgcgaauccaaacgcaaaucccaacgccaauccuaacgcuaauccaaacgccaaucccaacgcaaauccgaacgccaauccuaacgcuaauccaaacgccaaccccaaugcaaacccuaaugcgaaccccaaugcuaacccaaauaagaacaaucagggcaacggucaagggcauaauaugccuaacgaccccaaucguaacguggaugaaaaugccaacgcaaacuccgccgucaaaaauaacaauaacgaggaaccaucugacaagcacauuaaagaguaucucaauaagauacagaacucgcugucaacugaguggagcccgugcagugugacguguggaaauggcauccagguuagaauuaagccuggcuccgcuaacaaacccaaggaugaacuggacuacgccaaugacaucgagaaaaagauuugcaaaauggaaaaguguucuagcguguuuaacgucguaaauuccucaaucgggcucauaaugguguuaaguuuccuguuucuuaacugaggacuaguuauaagacugacuagcccgaugggccucccaacgggcccuccuccccuccuugcaccgagauuaaucaaaggcucuuuucagagccaccaaaaaaaaaaaaaaaaaaaaaaaaaaaaaaaaaaaaaaaaaaaaaaaaaaaaaaaaaaaaaaaaaaaaaaaaaaaaaaaaaaaaaaaaaaaaaaaaaaaaagaauu

SEQ ID NO: 7869 - RNA, 1412 nt, Artificial Sequence
  mRNA Design i-3 (hSL-A100-N5) comprising derived and/or modified sequence from Pf(3D7)__XP_001351122.1__IgE_Pf-CSP(19-397) (opt3)
aggagaaagcuuaccauggacuggaccuggauccuguuccucguggccgcugcaacaagaguccacagccuuuuucaggaguaccaaugcuauggcuccucuucaaacacuaggguucugaaugaauugaacuacgauaaugccgggacgaacuuauauaaugagcuggaaaugaacuacuauggaaagcaggagaauugguacagucuaaagaagaacagccggucccucggugaaaaugacgauggcaacaaugaggacaacgagaaacugcgcaagcccaaacauaagaaacuuaaacagccugcggaugggaauccagacccgaacgcuaaucccaacguggauccuaacgccaauccaaacguagaccccaaugcaaacccuaauguggauccaaacgccaaucccaacgcuaauccuaacgcaaauccaaacgccaauccgaacgcuaaucccaacgccaacccuaaugcgaacccaaaugcaaaccccaaugccaacccuaaugcuaacccaaaugccaaccccaaugcaaacccgaaugcuaacccuaaugccaaccccaacgcgaauccaaacgccaauccuaacgcaaaucccaacgucgacccaaaugcuaaccccaaugccaacccuaaugcuaacccaaaugccaacccgaaugcaaaccccaacgccaauccuaacgcuaauccaaacgcgaaucccaacgcaaauccuaacgccaauccaaacgcuaaucccaacgccaauccgaacgcaaauccuaacgccaauccaaacgcuaaccccaaugccaacccuaaugcaaaccccaaugcgaacccaaauaagaacaaucagggaaacggccaaggucacaauaugccuaacgaucccaaucgaaacguggacgaaaaugcuaacgccaacucugcaguuaaaaauaacaauaacgaggaaccaucggauaagcauauuaaagaguaucugaauaagauacagaacucauugagcaccgaguggaguccguguuccgugacaugcgggaauggaauccagguccguauuaagccuggcucugccaacaaacccaaggacgaacucgacuacgcuaaugauaucgagaaaaagauuuguaaaauggaaaagugcagcuccguguucaacguaguuaauucaaguaucggccugauaauggugcugagcuuucucuucuuaaacugaggacuaguuauaagacugacuagcccgaugggccucccaacgggcccuccuccccuccuugcaccgagauuaaucaaaggcucuuuucagagccaccaaaaaaaaaaaaaaaaaaaaaaaaaaaaaaaaaaaaaaaaaaaaaaaaaaaaaaaaaaaaaaaaaaaaaaaaaaaaaaaaaaaaaaaaaaaaaaaaaaaaagaauu

SEQ ID NO: 7870 - RNA, 1577 nt, Artificial Sequence
  mRNA Design i-3 (hSL-A100-N5) comprising derived and/or modified sequence from Pf(3D7)__XP_001351122.1__Pf-CSP_L(G4SG4)_TM domain HA (opt3)
aggagaaagcuuaccaugaugagaaagcuggccauccucagcguguccucuuuccuuuuugucgaggcucuguuccaggaauaccaaugcuauggcucaaguagcaacaccaggguuuugaaugaguuaaacuacgacaaugcagggacaaaccuguauaaugaacuagagaugaacuacuauggaaagcaggaaaauugguacucccucaagaaaaacucucggucgcugggugagaaugaugacggcaacaaugaggauaacgaaaaacuucgcaagcccaagcacaagaaacugaagcagccugccgacgggaauccagauccgaacgcgaaucccaacguggacccuaacgcuaauccaaacguagaucccaaugccaacccuaauguggacccaaacgcaaaucccaacgccaauccuaacgcuaauccaaacgcaaauccgaacgccaaucccaacgcuaacccuaaugccaacccaaaugcgaaccccaaugcaaacccuaaugccaacccaaaugcuaaccccaaugccaacccgaaugcaaacccuaaugcuaaccccaacgccaauccaaacgcgaauccuaacgccaaucccaacgucgauccaaaugcaaaccccaaugcuaacccuaaugccaacccaaaugcuaacccgaaugccaaccccaacgcaaauccuaacgccaauccaaacgcuaaucccaacgcgaauccuaacgcaaauccaaacgccaaucccaacgcuaauccgaacgccaauccuaacgcaaauccaaacgccaaccccaaugcuaacccuaaugccaaccccaaugcaaacccaaauaaaaacaaucagggaaacggccaaggucauaauaugccuaacgaccccaaucgaaacguggaugagaaugcgaacgcuaacucagccguuaagaauaacaauaacgaggaaccaagcgacaaacacauuaaggaguauuugaauaagauacagaacagucucuccacugaauggucuccguguagcgugacgugcgggaauggaauccagguccguauuaaaccuggcuccgcaaacaagcccaaagaugagcuggacuacgccaaugacaucgaaaagaaaauuuguaagauggagaaaugcucaaguguguuuaacguaguuaauagcucuaucggccugauaauggugcucuccuucuuauuucugaacgggggagguggcucagggggaggcgguaaacuugaaagcaccagaaucuaccagauuuuggcuaucuauaguacagucgccucuucccuggugcuaguggucagccucggggcaauuucguucuggauguguucuaauggaucccugcaaugcaggaucuguauaugaggacuaguuauaagacugacuagcccgaugggccucccaacgggcccuccuccccuccuugcaccgagauuaaucaaaggcucuuuucagagccaccaaaaaaaaaaaaaaaaaaaaaaaaaaaaaaaaaaaaaaaaaaaaaaaaaaaaaaaaaaaaaaaaaaaaaaaaaaaaaaaaaaaaaaaaaaaaaaaaaaaaagaauu

SEQ ID NO: 7871 - RNA, 1451 nt, Artificial Sequence
  mRNA Design i-3 (hSL-A100-N5) comprising derived and/or modified sequence from Pf(3D7)__XP_001351122.1__Pf-CSP(199-377)_L(PVTN)_HBsAg (opt3)
aggagaaagcuuaccauggaccccaacgccaauccuaacgcuaauccaaacgcaaauccgaacgccaaucccaacgcgaauccuaacgcuaauccaaacgccaaucccaacgcaaauccuaacgccaacccaaaugcuaaccccaaugcaaacccuaaugccaacccaaaugcuaacccgaaugccaaccccaaugcgaacccuaaugcaaacccaaaugccaaccccaacgcuaauccuaacaagaauaaccagggcaaugggcaaggacacaacaugccaaaugaucccaacagaaauguggacgagaacgccaaugcaaacagcgcugucaaaaauaacaauaacgaggaaccguccgauaagcauaucaaagaauaccugaacaagauucaaaauucucucucaaccgaguggaguccuugcagcguuacaugugguaacggcauacaggugaggaucaaacccggguccgccaauaagccaaaggacgaacuugauuaugcgaacgacauugagaaaaagaucugcaaaauggagaaguguucuucgguaccugugacuaauauggaaaacauuacgucaggauuccugggccccuuguuaguccugcaggccggguuuuuccuacucacccggauccugacaauaccacagagccuugauaguugguggacuucccugaauuuucucgguggaucucccgugugcuugggccagaacagccaguccccuaccucaaaucacaguccaacaagcuguccgcccaucugcccuggcuaccgcuggaugugucugcgacguuucauuaucuuucuguucauucucuuacugugccuuaucuuuuugcugguucuacucgacuaucaggggaugcugccaguguguccccuuauaccuggaucuaccacuacaaacaccgguccaugcaaaacguguacuacccccgcacaaggcaauuccauguucccgucaugcugcuguacaaagccuacugaugggaacugcaccuguauuccaauccccagcaguugggcuuuugccaaguaccugugggagugggcuucugucagauucuccugguugagccuccuggugccuuuuguacagugguucguuggauuaucgcccacaguguggcugucugccauuuggaugaugugguauuggggcccaucccucuacucaaucgucaguccuuuuaucccccuucugccaauuuucuucugcuuguggguguauauaugaggacuaguuauaagacugacuagcccgaugggccucccaacgggcccuccuccccuccuugcaccgagauuaaucaaaggcucuuuucagagccaccaaaaaaaaaaaaaaaaaaaaaaaaaaaaaaaaaaaaaaaaaaaaaaaaaaaaaaaaaaaaaaaaaaaaaaaaaaaaaaaaaaaaaaaaaaaaaaaaaaaaagaauu

SEQ ID NO: 7872 - RNA, 1493 nt, Artificial Sequence
  mRNA Design i-3 (hSL-A100-N5) comprising derived and/or modified sequence from Pf(3D7)__XP_001351122.1__Pf-CSP(199-387)_L(PVTN)_HBsAg (opt3)
aggagaaagcuuaccaugauggcccccgacccuaacgcuaauccaaacgcaaauccgaacgccaaucccaacgcgaauccuaacgcuaauccaaacgccaaucccaacgcaaauccuaacgccaauccaaacgcuaaccccaaugcaaacccuaaugccaacccaaaugcuaacccgaaugccaaccccaaugcgaacccuaaugcaaacccaaaugccaaccccaaugcuaacccuaacgccaauccaaacaagaauaaccagggcaaugggcaaggacacaacaugcccaaugauccgaacagaaauguggacgagaacgcaaaugcuaacagcgccgucaaaaauaacaauaacgaggaaccuuccgauaagcauaucaaagaauaccugaacaagauucaaaauucucucucaaccgaguggagucccugcagcguuacaugugguaacggcauacaggugaggaucaaaccaggguccgcgaauaagccuaaggacgaacuugauuaugccaacgacauugagaaaaagaucugcaaaauggagaaguguucuucgguauucaauguggucaacucaagcauuggacugggccccgugacuaauauggaaaacaucacgaguggguuuuuggguccauuacugguucuacaggcaggauucuuucuccugacccggauacuuacaaucccccagucccuggauucuugguggacuagcuugaauuuccucggcggcuccccugugugccuggggcagaacucacagaguccaaccagcaaucacucuccgacauccugucccccuauuugcccaggauaccgcuggaugugucugcgacguuuuaucauuuuccucuuuaucuuacugcuuugcuugauauuccugcuaguccuccuggacuaucaggguaugcuucccguguguccucugauuccaggcucaaccacuacaaacaccgggcccugcaaaacguguacuaccccggcucaaggaaauagcauguuuccuaguugcugcuguacaaagccaacugauggcaacugcaccuguauccccauuccuucuuccugggccuucgcuaaguacuugugggagugggccagcguaagauuuucguggcucucucuguuaguucccuucgugcagugguuugucggucuguccccaacaguguggcucucagcaaucuggaugaugugguauugggggccuagucuuuacagcaucgugucccccuucauuccacuguugccgauauucuuuugccuaugggucuauaucugaggacuaguuauaagacugacuagcccgaugggccucccaacgggcccuccuccccuccuugcaccgagauuaaucaaaggcucuuuucagagccaccaaaaaaaaaaaaaaaaaaaaaaaaaaaaaaaaaaaaaaaaaaaaaaaaaaaaaaaaaaaaaaaaaaaaaaaaaaaaaaaaaaaaaaaaaaaaaaaaaaaaagaauu

SEQ ID NO: 7873 - RNA, 677 nt, Artificial Sequence
  mRNA Design i-3 (hSL-A100-N5) comprising derived and/or modified sequence from Pf(3D7)__XP_001351122.1__HsALB_Pf-CSP(19-152) (opt3)
aggagaaagcuuaccaugaagugggugaccuucaucagccugcucuuucuuuucuccucugccuacucacuguuucaggaguaucaaugcuacggcaguagcuccaacacaagagucuugaaugaauuaaacuaugacaaugcugggacuaaccuguacaaugagcuagaaaugaacuauuacggaaaacaggagaauugguauucucucaagaaaaacucgaggucacugggugaaaaugaugacggcaacaaugaggauaacgagaaacuucggaagcccaagcacaagaaacugaagcagccugcagacgggaauccagauccgaacgccaaucccaacguugacccuaacgcgaauccaaacguggaucccaaugcuaacccuaauguagacccaaacgccaaucccaacgcaaauccuaacgccaauccaaacgcuaauccgaacgcaaaucccaacgccaacccuugaggacuaguuauaagacugacuagcccgaugggccucccaacgggcccuccuccccuccuugcaccgagauuaaucaaaggcucuuuucagagccaccaaaaaaaaaaaaaaaaaaaaaaaaaaaaaaaaaaaaaaaaaaaaaaaaaaaaaaaaaaaaaaaaaaaaaaaaaaaaaaaaaaaaaaaaaaaaaaaaaaaaagaauu

SEQ ID NO: 7874 - RNA, 797 nt, Artificial Sequence
  mRNA Design i-3 (hSL-A100-N5) comprising derived and/or modified sequence from Pf(3D7)__XP_001351122.1__HsALB_Pf-CSP(19-192) (opt3)
aggagaaagcuuaccaugaagugggugaccuucaucagccugcucuuucuuuucuccucugccuacucacuguuucaggaguaucaaugcuacggcaguagcuccaacacaagagucuugaaugaauuaaacuaugacaaugcugggacuaaccuguacaaugagcuagaaaugaacuauuacggaaaacaggagaauugguauucucucaagaaaaacucgaggucacugggugaaaaugaugacggcaacaaugaggauaacgagaaacuucggaagcccaagcacaagaaacugaagcagccugcagacgggaauccagauccgaacgccaaucccaacguugacccuaacgcgaauccaaacguggaucccaaugcuaacccuaauguagacccaaacgccaaucccaacgcaaauccuaacgccaauccaaacgcuaauccgaacgcaaaucccaacgccaacccuaaugcuaacccaaaugccaaccccaaugcgaacccuaaugcaaacccaaaugccaaccccaaugcuaacccgaaugccaacccuaaugcaaaccccaacgcuaauccaaacgccaauccuugaggacuaguuauaagacugacuagcccgaugggccucccaacgggcccuccuccccuccuugcaccgagauuaaucaaaggcucuuuucagagccaccaaaaaaaaaaaaaaaaaaaaaaaaaaaaaaaaaaaaaaaaaaaaaaaaaaaaaaaaaaaaaaaaaaaaaaaaaaaaaaaaaaaaaaaaaaaaaaaaaaaaagaauu

SEQ ID NO: 7875 - RNA, 1037 nt, Artificial Sequence
  mRNA Design i-3 (hSL-A100-N5) comprising derived and/or modified sequence from Pf(3D7)__XP_001351122.1__HsALB_Pf-CSP(19-272) (opt3)
aggagaaagcuuaccaugaagugggugaccuucaucagccugcucuuucuuuucuccucugccuacucacuguuucaggaguaucaaugcuacggcaguagcuccaacacaagagucuugaaugaauuaaacuaugacaaugcugggacuaaccuguacaaugagcuagaaaugaacuauuacggaaaacaggagaauugguauucucucaagaaaaacucgaggucacugggugaaaaugaugacggcaacaaugaggauaacgagaaacuucggaagcccaagcacaagaaacugaagcagccugcagacgggaauccagauccgaacgccaaucccaacguugacccuaacgcgaauccaaacguggaucccaaugcuaacccuaauguagacccaaacgccaaucccaacgcaaauccuaacgccaauccaaacgcuaauccgaacgcaaaucccaacgccaacccuaaugcuaacccaaaugccaaccccaaugcgaacccuaaugcaaacccaaaugccaaccccaaugcuaacccgaaugccaacccuaaugcaaaccccaacgcuaauccaaacgccaauccuaacgcgaaucccaacguggauccaaaugccaaccccaaugcaaacccuaaugcuaacccaaaugccaacccgaaugcuaaccccaacgccaauccuaacgcaaauccaaacgccaaucccaacgcuaauccuaacgcgaauccaaacgcaaaucccaacgccaauccgaacgcuaauccuaacgccaauccaaacgcaaaccccaaugccaacccuaaugcuaaccccaaugccaacccaugaggacuaguuauaagacugacuagcccgaugggccucccaacgggcccuccuccccuccuugcaccgagauuaaucaaaggcucuuuucagagccaccaaaaaaaaaaaaaaaaaaaaaaaaaaaaaaaaaaaaaaaaaaaaaaaaaaaaaaaaaaaaaaaaaaaaaaaaaaaaaaaaaaaaaaaaaaaaaaaaaaaaagaauu

SEQ ID NO: 7876 - RNA, 1199 nt, Artificial Sequence
  mRNA Design i-3 (hSL-A100-N5) comprising derived and/or modified sequence from Pf(3D7)__XP_001351122.1__HsALB_Pf-CSP(19-272)_L(AAY)_Pf-CSP(310-3 27)_L(AAY)_Pf-CSP(346-375) (opt3)
aggagaaagcuuaccaugaagugggugaccuucaucagccugcucuuucuuuucuccucugccuacucacuguuucaggaguaucaaugcuacggcaguagcuccaacacaagagucuugaaugaauuaaacuaugacaaugcugggacuaaccuguacaaugagcuagaaaugaacuauuacggaaaacaggagaauugguauucucucaagaaaaacucgaggucacugggugaaaaugaugacggcaacaaugaggauaacgagaaacuucggaagcccaagcacaagaaacugaagcagccugcagacgggaauccagauccgaacgccaaucccaacguugacccuaacgcgaauccaaacguggaucccaaugcuaacccuaauguagacccaaacgccaaucccaacgcaaauccuaacgccaauccaaacgcuaauccgaacgcaaaucccaacgccaacccuaaugcuaacccaaaugccaaccccaaugcgaacccuaaugcaaacccaaaugccaaccccaaugcuaacccgaaugccaacccuaaugcaaaccccaacgcuaauccaaacgccaauccuaacgcgaaucccaacguggauccaaaugccaaccccaaugcaaacccuaaugcuaacccaaaugccaacccgaaugcuaaccccaacgccaauccuaacgcaaauccaaacgccaaucccaacgcuaauccuaacgcgaauccaaacgcaaaucccaacgccaauccgaacgcuaauccuaacgccaauccaaacgcaaaccccaaugccaacccuaaugcuaaccccaaugccaacccagcagcguacgaaccuagcgacaaacauauuaaggaguacuugaauaaaauacagaacagucucgcugccuauaucaagcccggauccgcaaauaagccaaaagaugaacuggacuacgccaacgauauugagaagaaaaucuguaagauggagaaaugcucuugaggacuaguuauaagacugacuagcccgaugggccucccaacgggcccuccuccccuccuugcaccgagauuaaucaaaggcucuuuucagagccaccaaaaaaaaaaaaaaaaaaaaaaaaaaaaaaaaaaaaaaaaaaaaaaaaaaaaaaaaaaaaaaaaaaaaaaaaaaaaaaaaaaaaaaaaaaaaaaaaaaaaagaauu

SEQ ID NO: 7877 - RNA, 1160 nt, Artificial Sequence
  mRNA Design i-3 (hSL-A100-N5) comprising derived and/or modified sequence from Pf(3D7)__XP_001351122.1__HsALB_Pf-CSP(19-272)_L(AAY)_Pf-CSP(346-3 65)_L(AAY)_P2 (opt3)
aggagaaagcuuaccaugaagugggugaccuucaucagccugcucuuucuuuucuccucugccuacucacuguuucaggaguaucaaugcuacggcaguagcuccaacacaagagucuugaaugaauuaaacuaugacaaugcugggacuaaccuguacaaugagcuagaaaugaacuauuacggaaaacaggagaauugguauucucucaagaaaaacucgaggucacugggugaaaaugaugacggcaacaaugaggauaacgagaaacuucggaagcccaagcacaagaaacugaagcagccugcagacgggaauccagauccgaacgccaaucccaacguugacccuaacgcgaauccaaacguggaucccaaugcuaacccuaauguagacccaaacgccaaucccaacgcaaauccuaacgccaauccaaacgcuaauccgaacgcaaaucccaacgccaacccuaaugcuaacccaaaugccaaccccaaugcgaacccuaaugcaaacccaaaugccaaccccaaugcuaacccgaaugccaacccuaaugcaaaccccaacgcuaauccaaacgccaauccuaacgcgaaucccaacguggauccaaaugccaaccccaaugcaaacccuaaugcuaacccaaaugccaacccgaaugcuaaccccaacgccaauccuaacgcaaauccaaacgccaaucccaacgcuaauccuaacgcgaauccaaacgcaaaucccaacgccaauccgaacgcuaauccuaacgccaauccaaacgcaaaccccaaugccaacccuaaugcuaaccccaaugccaacccagcagcguacauuaaaccuggaagcgcuaauaagcccaaagacgaauuggauuacgccaacgacauagaggcagccuaucaguacaucaaggcuaauaguaaguucauuggcaucacggaacucugaggacuaguuauaagacugacuagcccgaugggccucccaacgggcccuccuccccuccuugcaccgagauuaaucaaaggcucuuuucagagccaccaaaaaaaaaaaaaaaaaaaaaaaaaaaaaaaaaaaaaaaaaaaaaaaaaaaaaaaaaaaaaaaaaaaaaaaaaaaaaaaaaaaaaaaaaaaaaaaaaaaaagaauu

SEQ ID NO: 7878 - RNA, 1154 nt, Artificial Sequence
  mRNA Design i-3 (hSL-A100-N5) comprising derived and/or modified sequence from Pf(3D7)__XP_001351122.1__HsALB_Pf-CSP(19-272)_L(AAY)_Pf-CSP(346-3 65)_L(AAY)_PADRE (opt3)
aggagaaagcuuaccaugaagugggugaccuucaucagccugcucuuucuuuucuccucugccuacucacuguuucaggaguaucaaugcuacggcaguagcuccaacacaagagucuugaaugaauuaaacuaugacaaugcugggacuaaccuguacaaugagcuagaaaugaacuauuacggaaaacaggagaauugguauucucucaagaaaaacucgaggucacugggugaaaaugaugacggcaacaaugaggauaacgagaaacuucggaagcccaagcacaagaaacugaagcagccugcagacgggaauccagauccgaacgccaaucccaacguugacccuaacgcgaauccaaacguggaucccaaugcuaacccuaauguagacccaaacgccaaucccaacgcaaauccuaacgccaauccaaacgcuaauccgaacgcaaaucccaacgccaacccuaaugcuaacccaaaugccaaccccaaugcgaacccuaaugcaaacccaaaugccaaccccaaugcuaacccgaaugccaacccuaaugcaaaccccaacgcuaauccaaacgccaauccuaacgcgaaucccaacguggauccaaaugccaaccccaaugcaaacccuaaugcuaacccaaaugccaacccgaaugcuaaccccaacgccaauccuaacgcaaauccaaacgccaaucccaacgcuaauccuaacgcgaauccaaacgcaaaucccaacgccaauccgaacgcuaauccuaacgccaauccaaacgcaaaccccaaugccaacccuaaugcuaaccccaaugccaacccagcagcguacauuaaaccuggaagcgcuaauaagcccaaagacgaauuggauuacgccaacgacauagaggcagccuaugcuaaguucgucgccgcauggacgcucaaggcugccgcgugaggacuaguuauaagacugacuagcccgaugggccucccaacgggcccuccuccccuccuugcaccgagauuaaucaaaggcucuuuucagagccaccaaaaaaaaaaaaaaaaaaaaaaaaaaaaaaaaaaaaaaaaaaaaaaaaaaaaaaaaaaaaaaaaaaaaaaaaaaaaaaaaaaaaaaaaaaaaaaaaaaaaagaauu

SEQ ID NO: 7879 - RNA, 1211 nt, Artificial Sequence
  mRNA Design i-3 (hSL-A100-N5) comprising derived and/or modified sequence from Pf(3D7)__XP_001351122.1__HsALB_Pf-CSP(19-272)_L(G4S)_Pf-CSP(310-3 27)_L(G4S)_Pf-CSP(346-375) (opt3)
aggagaaagcuuaccaugaagugggugaccuucaucagccugcucuuucuuuucuccucugccuacucacuguuucaggaguaucaaugcuacggcaguagcuccaacacaagagucuugaaugaauuaaacuaugacaaugcugggacuaaccuguacaaugagcuagaaaugaacuauuacggaaaacaggagaauugguauucucucaagaaaaacucgaggucacugggugaaaaugaugacggcaacaaugaggauaacgagaaacuucggaagcccaagcacaagaaacugaagcagccugcagacgggaauccagauccgaacgccaaucccaacguugacccuaacgcgaauccaaacguggaucccaaugcuaacccuaauguagacccaaacgccaaucccaacgcaaauccuaacgccaauccaaacgcuaauccgaacgcaaaucccaacgccaacccuaaugcuaacccaaaugccaaccccaaugcgaacccuaaugcaaacccaaaugccaaccccaaugcuaacccgaaugccaacccuaaugcaaaccccaacgcuaauccaaacgccaauccuaacgcgaaucccaacguggauccaaaugccaaccccaaugcaaacccuaaugcuaacccaaaugccaacccgaaugcuaaccccaacgccaauccuaacgcaaauccaaacgccaaucccaacgcuaauccuaacgcgaauccaaacgcaaaucccaacgccaauccgaacgcuaauccuaacgccaauccaaacgcaaaccccaaugccaacccuaaugcuaaccccaaugccaacccaggaggcggugggagcgaaccuagugacaaacauauuaaggaguacuugaauaaaauacagaacucccucggaggcggcgggucuaucaagcccggaagcgcaaauaagccaaaagaugaacuggacuacgcgaacgauauugagaagaaaaucuguaagauggagaaaugcuccugaggacuaguuauaagacugacuagcccgaugggccucccaacgggcccuccuccccuccuugcaccgagauuaaucaaaggcucuuuucagagccaccaaaaaaaaaaaaaaaaaaaaaaaaaaaaaaaaaaaaaaaaaaaaaaaaaaaaaaaaaaaaaaaaaaaaaaaaaaaaaaaaaaaaaaaaaaaaaaaaaaaaagaauu

SEQ ID NO: 7880 - RNA, 1196 nt, Artificial Sequence
  mRNA Design i-3 (hSL-A100-N5) comprising derived and/or modified sequence from Pf(3D7)__XP_001351122.1__HsALB_Pf-CSP(19-272)_L(G4S)_Pf-CSP(310-3 27)_Pf-CSP(346-375) (opt3)
aggagaaagcuuaccaugaagugggugaccuucaucagccugcucuuucuuuucuccucugccuacucacuguuucaggaguaucaaugcuacggcaguagcuccaacacaagagucuugaaugaauuaaacuaugacaaugcugggacuaaccuguacaaugagcuagaaaugaacuauuacggaaaacaggagaauugguauucucucaagaaaaacucgaggucacugggugaaaaugaugacggcaacaaugaggauaacgagaaacuucggaagcccaagcacaagaaacugaagcagccugcagacgggaauccagauccgaacgccaaucccaacguugacccuaacgcgaauccaaacguggaucccaaugcuaacccuaauguagacccaaacgccaaucccaacgcaaauccuaacgccaauccaaacgcuaauccgaacgcaaaucccaacgccaacccuaaugcuaacccaaaugccaaccccaaugcgaacccuaaugcaaacccaaaugccaaccccaaugcuaacccgaaugccaacccuaaugcaaaccccaacgcuaauccaaacgccaauccuaacgcgaaucccaacguggauccaaaugccaaccccaaugcaaacccuaaugcuaacccaaaugccaacccgaaugcuaaccccaacgccaauccuaacgcaaauccaaacgccaaucccaacgcuaauccuaacgcgaauccaaacgcaaaucccaacgccaauccgaacgcuaauccuaacgccaauccaaacgcaaaccccaaugccaacccuaaugcuaaccccaaugccaacccaggaggcggugggagcgaaccuagugacaaacauauuaaggaguacuugaauaaaauacagaacucccucaucaagcccggaucugcaaauaagccaaaagaugaacuggacuacgcgaacgauauugagaagaaaaucuguaagauggagaaaugcagcugaggacuaguuauaagacugacuagcccgaugggccucccaacgggcccuccuccccuccuugcaccgagauuaaucaaaggcucuuuucagagccaccaaaaaaaaaaaaaaaaaaaaaaaaaaaaaaaaaaaaaaaaaaaaaaaaaaaaaaaaaaaaaaaaaaaaaaaaaaaaaaaaaaaaaaaaaaaaaaaaaaaaagaauu

SEQ ID NO: 7881 - RNA, 1196 nt, Artificial Sequence
  mRNA Design i-3 (hSL-A100-N5) comprising derived and/or modified sequence from Pf(3D7)__XP_001351122.1__HsALB_Pf-CSP(19-325) (opt3)
aggagaaagcuuaccaugaagugggugaccuucaucagccugcucuuucuuuucuccucugccuacucacuguuucaggaguaucaaugcuacggcaguagcuccaacacaagagucuugaaugaauuaaacuaugacaaugcugggacuaaccuguacaaugagcuagaaaugaacuauuacggaaaacaggagaauugguauucucucaagaaaaacucgaggucacugggugaaaaugaugacggcaacaaugaggauaacgagaaacuucggaagcccaagcacaagaaacugaagcagccugcagacgggaauccagauccgaacgccaaucccaacguugacccuaacgcgaauccaaacguggaucccaaugcuaacccuaauguagacccaaacgccaaucccaacgcaaauccuaacgccaauccaaacgcuaauccgaacgcaaaucccaacgccaacccuaaugcuaacccaaaugccaaccccaaugcgaacccuaaugcaaacccaaaugccaaccccaaugcuaacccgaaugccaacccuaaugcaaaccccaacgcuaauccaaacgccaauccuaacgcgaaucccaacguggauccaaaugccaaccccaaugcaaacccuaaugcuaacccaaaugccaacccgaaugcuaaccccaacgccaauccuaacgcaaauccaaacgccaaucccaacgcuaauccuaacgcgaauccaaacgcaaaucccaacgccaauccgaacgcuaauccuaacgccaauccaaacgcaaaccccaaugccaacccuaaugcuaaccccaaugccaacccaaauaaaaacaaucagggaaacggccaaggucauaauaugccuaacgaccccaaucgcaacgucgaugaaaaugcaaacgcgaacagcgcugugaagaauaacaauaacgaggaaccaagugacaaacacauuaaggaguacuugaauaagauacagaacugaggacuaguuauaagacugacuagcccgaugggccucccaacgggcccuccuccccuccuugcaccgagauuaaucaaaggcucuuuucagagccaccaaaaaaaaaaaaaaaaaaaaaaaaaaaaaaaaaaaaaaaaaaaaaaaaaaaaaaaaaaaaaaaaaaaaaaaaaaaaaaaaaaaaaaaaaaaaaaaaaaaaagaauu

SEQ ID NO: 7882 - RNA, 1373 nt, Artificial Sequence
  mRNA Design i-3 (hSL-A100-N5) comprising derived and/or modified sequence from Pf(3D7)__XP_001351122.1__HsALB_Pf-CSP(19-384) (opt3)
aggagaaagcuuaccaugaagugggugaccuucaucagccugcucuuucuuuucuccucugccuacucacuguuucaggaguaucaaugcuacggcaguagcuccaacacaagagucuugaaugaauuaaacuaugacaaugcugggacuaaccuguacaaugagcuagaaaugaacuauuacggaaaacaggagaauugguauucucucaagaaaaacucgaggucacugggugaaaaugaugacggcaacaaugaggauaacgagaaacuucggaagcccaagcacaagaaacugaagcagccugcagacgggaauccagauccgaacgccaaucccaacguugacccuaacgcgaauccaaacguggaucccaaugcuaacccuaauguagacccaaacgccaaucccaacgcaaauccuaacgccaauccaaacgcuaauccgaacgcaaaucccaacgccaacccuaaugcuaacccaaaugccaaccccaaugcgaacccuaaugcaaacccaaaugccaaccccaaugcuaacccgaaugccaacccuaaugcaaaccccaacgcuaauccaaacgccaauccuaacgcgaaucccaacguggauccaaaugccaaccccaaugcaaacccuaaugcuaacccaaaugccaacccgaaugcuaaccccaacgccaauccuaacgcaaauccaaacgccaaucccaacgcuaauccuaacgcgaauccaaacgcaaaucccaacgccaauccgaacgcuaauccuaacgccaauccaaacgcaaaccccaaugccaacccuaaugcuaaccccaaugccaacccaaauaaaaacaaucagggaaacggccaaggucauaauaugccuaacgaccccaaucgcaacgucgaugaaaaugcaaacgcgaacagcgcugugaagaauaacaauaacgaggaaccaagugacaaacacauuaaggaguacuugaauaagauacagaacucccucucuacggaguggagcccguguuccguuaccugcgggaauggaauccaggugcgaauuaaaccuggcucagccaacaagcccaaagaugaacuggacuacgcaaaugacaucgagaagaaaauuuguaagauggaaaaaugcaguagcgucuucaacgugguaaauucuuccugaggacuaguuauaagacugacuagcccgaugggccucccaacgggcccuccuccccuccuugcaccgagauuaaucaaaggcucuuuucagagccaccaaaaaaaaaaaaaaaaaaaaaaaaaaaaaaaaaaaaaaaaaaaaaaaaaaaaaaaaaaaaaaaaaaaaaaaaaaaaaaaaaaaaaaaaaaaaaaaaaaaaagaauu

SEQ ID NO: 7883 - RNA, 1511 nt, Artificial Sequence
  mRNA Design i-3 (hSL-A100-N5) comprising derived and/or modified sequence from Pf(3D7)__XP_001351122.1__HsALB_Pf-CSP(19-384)_TM domain HA (opt3)
aggagaaagcuuaccaugaagugggugaccuucaucagccugcucuuucuuuucuccucugccuacucacuguuucaggaguaucaaugcuacggcaguagcuccaacacaagagucuugaaugaauuaaacuaugacaaugcugggacuaaccuguacaaugagcuagaaaugaacuauuacggaaaacaggagaauugguauucucucaagaaaaacucgaggucacugggugaaaaugaugacggcaacaaugaggauaacgagaaacuucggaagcccaagcacaagaaacugaagcagccugcagacgggaauccagauccgaacgccaaucccaacguugacccuaacgcgaauccaaacguggaucccaaugcuaacccuaauguagacccaaacgccaaucccaacgcaaauccuaacgccaauccaaacgcuaauccgaacgcaaaucccaacgccaacccuaaugcuaacccaaaugccaaccccaaugcgaacccuaaugcaaacccaaaugccaaccccaaugcuaacccgaaugccaacccuaaugcaaaccccaacgcuaauccaaacgccaauccuaacgcgaaucccaacguggauccaaaugccaaccccaaugcaaacccuaaugcuaacccaaaugccaacccgaaugcuaaccccaacgccaauccuaacgcaaauccaaacgccaaucccaacgcuaauccuaacgcgaauccaaacgcaaaucccaacgccaauccgaacgcuaauccuaacgccaauccaaacgcaaaccccaaugccaacccuaaugcuaaccccaaugccaacccaaauaaaaacaaucagggaaacggccaaggucauaauaugccuaacgaccccaaucgcaacgucgaugaaaaugcaaacgcgaacagcgcugugaagaauaacaauaacgaggaaccaagugacaaacacauuaaggaguacuugaauaagauacagaacucccucucuacggaguggagcccguguuccguuaccugcgggaauggaauccaggugcgaauuaaaccuggcucagccaacaagcccaaagaugaacuggacuacgcaaaugacaucgagaagaaaauuuguaagauggaaaaaugcaguagcgucuucaacgugguaaauucuuccaagcuggagucaacacguaucuaucagauacucgccaucuacagcacuguugcuaguucuuuagugcuggucgugucccuuggcgccauuagcuuuuggauguguucgaacgggucuuugcaaugcagaaucuguauuugaggacuaguuauaagacugacuagcccgaugggccucccaacgggcccuccuccccuccuugcaccgagauuaaucaaaggcucuuuucagagccaccaaaaaaaaaaaaaaaaaaaaaaaaaaaaaaaaaaaaaaaaaaaaaaaaaaaaaaaaaaaaaaaaaaaaaaaaaaaaaaaaaaaaaaaaaaaaaaaaaaaaagaauu

SEQ ID NO: 7884 - RNA, 1223 nt, Artificial Sequence
  mRNA Design i-3 (hSL-A100-N5) comprising derived and/or modified sequence from Pf(3D7)__XP_001351122.1__HsALB_Pf-CSP(82-397) (opt3)
aggagaaagcuuaccaugaagugggugaccuucaucagccugcucuuucuuuucuccucugccuacucagacaacgagaaacugagaaagcccaaacacaagaaauugaagcagccugcugauggcaauccagacccgaacgcaaaucccaacgucgauccuaaugccaacccaaauguugaccccaacgcgaauccuaacguggauccaaaugcuaaccccaaugccaacccuaaugcaaacccaaacgccaauccgaacgcuaaucccaacgcaaauccuaacgccaauccaaacgcuaaucccaacgccaauccuaacgcgaauccaaacgcaaaucccaacgccaacccgaaugcuaacccuaaugccaaccccaaugcaaacccaaaugcuaacccuaaugccaaccccaauguagacccaaacgcgaaucccaacgccaauccuaacgcaaacccaaaugcuaacccgaaugccaaccccaaugcuaacccuaaugccaacccaaaugcaaaccccaaugccaacccuaaugcuaacccaaaugcgaaccccaacgcaaauccgaacgccaauccuaacgcuaauccaaacgccaaucccaacgcaaauccuaacgccaaucccaacgcuaauccaaacaagaauaaccaggggaauggacagggucauaacaugccuaacgaucccaauaggaacguggacgaaaaugccaacgcaaauagugcggucaaaaacaauaacaaugaggaaccaagcgauaagcacauuaaagaguauuuaaacaagauacaaaauucccugucuacagaauggucgccgugcucagugacuuguggcaacgggauccagguucggauuaaaccuggaagcgcuaauaagcccaaggacgagcuagauuacgccaacgacaucgagaaaaagauuugcaaaauggaaaaguguaguuccguguuuaaugucgugaacucuagcaucggccucauaaugguacuguccuuccuuuuucugaacugaggacuaguuauaagacugacuagcccgaugggccucccaacgggcccuccuccccuccuugcaccgagauuaaucaaaggcucuuuucagagccaccaaaaaaaaaaaaaaaaaaaaaaaaaaaaaaaaaaaaaaaaaaaaaaaaaaaaaaaaaaaaaaaaaaaaaaaaaaaaaaaaaaaaaaaaaaaaaaaaaaaaagaauu

SEQ ID NO: 7885 - RNA, 575 nt, Artificial Sequence
  mRNA Design i-3 (hSL-A100-N5) comprising derived and/or modified sequence from Pf(3D7)__XP_001351122.1__HsALB_Pf-CSP(93-192) (opt3)
aggagaaagcuuaccaugaagugggugaccuucaucagccugcucuuucuuuucuccucugccuacucaaaacugaagcagcccgcugacggcaacccugauccaaaugcaaacccgaaugucgaccccaacgccaauccuaacguugauccaaaugcgaaccccaauguggacccuaacgcuaauccaaacgccaaucccaacgcaaauccuaacgccaacccaaaugcuaacccgaaugcaaaccccaaugccaacccuaaugcuaacccaaaugccaaccccaaugcgaacccuaaugcaaacccaaaugccaaccccaacgcuaauccgaacgccaauccuaacgcaaaucccaacgcuaauccaugaggacuaguuauaagacugacuagcccgaugggccucccaacgggcccuccuccccuccuugcaccgagauuaaucaaaggcucuuuucagagccaccaaaaaaaaaaaaaaaaaaaaaaaaaaaaaaaaaaaaaaaaaaaaaaaaaaaaaaaaaaaaaaaaaaaaaaaaaaaaaaaaaaaaaaaaaaaaaaaaaaaaagaauu

SEQ ID NO: 7886 - RNA, 815 nt, Artificial Sequence
  mRNA Design i-3 (hSL-A100-N5) comprising derived and/or modified sequence from Pf(3D7)__XP_001351122.1__HsALB_Pf-CSP(93-272) (opt3)
aggagaaagcuuaccaugaagugggugaccuucaucagccugcucuuucuuuucuccucugccuacucaaaacugaagcagcccgcugacggcaacccugauccaaaugcaaacccgaaugucgaccccaacgccaauccuaacguugauccaaaugcgaaccccaauguggacccuaacgcuaauccaaacgccaaucccaacgcaaauccuaacgccaacccaaaugcuaacccgaaugcaaaccccaaugccaacccuaaugcuaacccaaaugccaaccccaaugcgaacccuaaugcaaacccaaaugccaaccccaacgcuaauccgaacgccaauccuaacgcaaaucccaacgcuaauccaaacgccaauccuaacguagaucccaaugcgaacccaaaugccaaccccaaugcaaacccuaacgcuaauccaaacgccaauccgaacgcuaaucccaacgccaauccuaacgcaaauccaaacgccaaucccaacgcuaauccuaacgcgaauccaaacgcaaaccccaaugccaacccgaaugcuaacccuaaugccaacccaaaugcaaaccccaaugccaacccuaaugcuaaccccugaggacuaguuauaagacugacuagcccgaugggccucccaacgggcccuccuccccuccuugcaccgagauuaaucaaaggcucuuuucagagccaccaaaaaaaaaaaaaaaaaaaaaaaaaaaaaaaaaaaaaaaaaaaaaaaaaaaaaaaaaaaaaaaaaaaaaaaaaaaaaaaaaaaaaaaaaaaaaaaaaaaaagaauu

SEQ ID NO: 7887 - RNA, 1190 nt, Artificial Sequence
  mRNA Design i-3 (hSL-A100-N5) comprising derived and/or modified sequence from Pf(3D7)__XP_001351122.1__HsALB_Pf-CSP(93-397) (opt3)
aggagaaagcuuaccaugaagugggugaccuucaucagccugcucuuucuuuucuccucugccuacucaaaacugaagcagcccgcugacggcaacccugauccaaaugcaaacccgaaugucgaccccaacgccaauccuaacguugauccaaaugcgaaccccaauguggacccuaacgcuaauccaaacgccaaucccaacgcaaauccuaacgccaacccaaaugcuaacccgaaugcaaaccccaaugccaacccuaaugcuaacccaaaugccaaccccaaugcgaacccuaaugcaaacccaaaugccaaccccaacgcuaauccgaacgccaauccuaacgcaaaucccaacgcuaauccaaacgccaauccuaacguagaucccaaugcgaacccaaaugccaaccccaaugcaaacccuaacgcuaauccaaacgccaauccgaacgcuaaucccaacgccaauccuaacgcaaauccaaacgccaaucccaacgcuaauccuaacgcgaauccaaacgcaaaccccaaugccaacccgaaugcuaacccuaaugccaacccaaaugcaaaccccaaugccaacccuaaugcuaaccccaauaaaaacaaucaagggaacggacagggucacaauaugccaaacgacccuaacagaaauguggaugagaacgccaaugcaaacagugcggucaagaauaacaauaacgaggaacccagcgacaaacauauuaaggaauauuugaauaagauacagaacuccuuaucuacagaguggucgccaugcucagugacuuguggcaaugggauccagguuaggauuaaaccgggaagcgcuaacaagccuaaagaugaacuggacuacgccaaugauaucgagaagaaaauuugcaagauggagaaguguaguuccguguuuaacgucguaaauucuagcaucggccuaauaauggugcucuccuuccuguuucuuaacugaggacuaguuauaagacugacuagcccgaugggccucccaacgggcccuccuccccuccuugcaccgagauuaaucaaaggcucuuuucagagccaccaaaaaaaaaaaaaaaaaaaaaaaaaaaaaaaaaaaaaaaaaaaaaaaaaaaaaaaaaaaaaaaaaaaaaaaaaaaaaaaaaaaaaaaaaaaaaaaaaaaaagaauu

SEQ ID NO: 7888 - RNA, 560 nt, Artificial Sequence
  mRNA Design i-3 (hSL-A100-N5) comprising derived and/or modified sequence from Pf(3D7)__XP_001351122.1__HsALB_Pf-CSP(98-192) (opt3)
aggagaaagcuuaccaugaagugggugaccuucaucagccugcucuuucuuuucuccucugccuacucagcugacggcaaccccgauccuaaugcaaacccaaaugucgacccgaacgccaaucccaacguugauccuaaugcgaacccaaauguggaccccaacgcuaauccuaacgccaauccaaacgcaaaucccaacgccaacccuaaugcuaacccaaaugcaaacccgaaugccaaccccaaugcuaacccuaaugccaacccaaaugcgaaccccaaugcaaacccuaaugccaacccaaacgcuaaucccaacgccaauccgaacgcaaauccuaacgcuaaucccugaggacuaguuauaagacugacuagcccgaugggccucccaacgggcccuccuccccuccuugcaccgagauuaaucaaaggcucuuuucagagccaccaaaaaaaaaaaaaaaaaaaaaaaaaaaaaaaaaaaaaaaaaaaaaaaaaaaaaaaaaaaaaaaaaaaaaaaaaaaaaaaaaaaaaaaaaaaaaaaaaaaaagaauu

SEQ ID NO: 7889 - RNA, 800 nt, Artificial Sequence
  mRNA Design i-3 (hSL-A100-N5) comprising derived and/or modified sequence from Pf(3D7)__XP_001351122.1__HsALB_Pf-CSP(98-272) (opt3)
aggagaaagcuuaccaugaagugggugaccuucaucagccugcucuuucuuuucuccucugccuacucagcugacggcaaccccgauccuaaugcaaacccaaaugucgacccgaacgccaaucccaacguugauccuaaugcgaacccaaauguggaccccaacgcuaauccuaacgccaauccaaacgcaaaucccaacgccaacccuaaugcuaacccaaaugcaaacccgaaugccaaccccaaugcuaacccuaaugccaacccaaaugcgaaccccaaugcaaacccuaaugccaacccaaacgcuaaucccaacgccaauccgaacgcaaauccuaacgcuaaucccaacgccaauccaaacguagauccuaaugcgaaccccaaugccaacccaaaugcaaaccccaacgcuaauccuaacgccaauccaaacgcuaauccgaacgccaaucccaacgcaaauccuaacgccaauccaaacgcuaaucccaacgcgaauccuaacgcaaacccaaaugccaaccccaaugcuaacccgaaugccaacccuaaugcaaacccaaaugccaaccccaaugcuaacccuugaggacuaguuauaagacugacuagcccgaugggccucccaacgggcccuccuccccuccuugcaccgagauuaaucaaaggcucuuuucagagccaccaaaaaaaaaaaaaaaaaaaaaaaaaaaaaaaaaaaaaaaaaaaaaaaaaaaaaaaaaaaaaaaaaaaaaaaaaaaaaaaaaaaaaaaaaaaaaaaaaaaaagaauu

SEQ ID NO: 7890 - RNA, 1106 nt, Artificial Sequence
  mRNA Design i-3 (hSL-A100-N5) comprising derived and/or modified sequence from Pf(3D7)__XP_001351122.1__HsALB_Pf-CSP(98-374) (opt3)
aggagaaagcuuaccaugaagugggugaccuucaucagccugcucuuucuuuucuccucugccuacucagcugacggcaaccccgauccuaaugcaaacccaaaugucgacccgaacgccaaucccaacguugauccuaaugcgaacccaaauguggaccccaacgcuaauccuaacgccaauccaaacgcaaaucccaacgccaacccuaaugcuaacccaaaugcaaacccgaaugccaaccccaaugcuaacccuaaugccaacccaaaugcgaaccccaaugcaaacccuaaugccaacccaaacgcuaaucccaacgccaauccgaacgcaaauccuaacgcuaaucccaacgccaauccaaacguagauccuaaugcgaaccccaaugccaacccaaaugcaaaccccaacgcuaauccuaacgccaauccaaacgcuaauccgaacgccaaucccaacgcaaauccuaacgccaauccaaacgcuaaucccaacgcgaauccuaacgcaaacccaaaugccaaccccaaugcuaacccgaaugccaacccuaaugcaaacccaaaugccaaccccaaugcuaacccuaauaaaaacaaucaggggaacggacaaggucacaauaugcccaacgacccaaacagaaauguggaugagaacgccaaugcaaacagugcggucaagaauaacaauaacgaggaaccuagcgacaaacauauuaaggaauaucugaauaaaauacagaacuccuugucuacagaguggucgcccugcucagugacuuguggcaaugggauccagguuaggauuaagccaggaagcgcuaacaagccgaaagaugaauuagacuacgccaaugauaucgagaagaaaauuugcaagauggagaaauguugaggacuaguuauaagacugacuagcccgaugggccucccaacgggcccuccuccccuccuugcaccgagauuaaucaaaggcucuuuucagagccaccaaaaaaaaaaaaaaaaaaaaaaaaaaaaaaaaaaaaaaaaaaaaaaaaaaaaaaaaaaaaaaaaaaaaaaaaaaaaaaaaaaaaaaaaaaaaaaaaaaaaagaauu

SEQ ID NO: 7891 - RNA, 1175 nt, Artificial Sequence
  mRNA Design i-3 (hSL-A100-N5) comprising derived and/or modified sequence from Pf(3D7)__XP_001351122.1__HsALB_Pf-CSP(98-397) (opt3)
aggagaaagcuuaccaugaagugggugaccuucaucagccugcucuuucuuuucuccucugccuacucagcugacggcaaccccgauccuaaugcaaacccaaaugucgacccgaacgccaaucccaacguugauccuaaugcgaacccaaauguggaccccaacgcuaauccuaacgccaauccaaacgcaaaucccaacgccaacccuaaugcuaacccaaaugcaaacccgaaugccaaccccaaugcuaacccuaaugccaacccaaaugcgaaccccaaugcaaacccuaaugccaacccaaacgcuaaucccaacgccaauccgaacgcaaauccuaacgcuaaucccaacgccaauccaaacguagauccuaaugcgaaccccaaugccaacccaaaugcaaaccccaacgcuaauccuaacgccaauccaaacgcuaauccgaacgccaaucccaacgcaaauccuaacgccaauccaaacgcuaaucccaacgcgaauccuaacgcaaacccaaaugccaaccccaaugcuaacccgaaugccaacccuaaugcaaacccaaaugccaaccccaaugcuaacccuaauaaaaacaaucaggggaacggacaaggucacaauaugcccaacgacccaaacagaaauguggaugagaacgccaaugcaaacagugcggucaagaauaacaauaacgaggaaccuagcgacaaacauauuaaggaauaucugaauaaaauacagaacuccuugucuacagaguggucgcccugcucagugacuuguggcaaugggauccagguuaggauuaagccaggaagcgcuaacaagccgaaagaugaauuagacuacgccaaugauaucgagaagaaaauuugcaagauggagaaauguaguuccguguuuaacgucguaaauucuagcaucggccugauaauggugcuauccuuccucuuucugaacugaggacuaguuauaagacugacuagcccgaugggccucccaacgggcccuccuccccuccuugcaccgagauuaaucaaaggcucuuuucagagccaccaaaaaaaaaaaaaaaaaaaaaaaaaaaaaaaaaaaaaaaaaaaaaaaaaaaaaaaaaaaaaaaaaaaaaaaaaaaaaaaaaaaaaaaaaaaaaaaaaaaaagaauu

SEQ ID NO: 7892 - RNA, 1502 nt, Artificial Sequence
  mRNA Design i-3 (hSL-A100-N5) comprising derived and/or modified sequence from Pf(3D7)__XP_001351122.1__HsALB_Pf-CSP(199-377)_L(PVTN)_HBsAg (opt3)
aggagaaagcuuaccaugaagugggugaccuucaucagccugcucuuucuuuucuccucugccuacucagaccccaacgcuaauccuaacgcaaauccaaacgccaauccgaacgcgaaucccaacgcuaauccuaacgccaauccaaacgcaaaucccaacgccaauccuaacgcuaacccaaaugcaaaccccaaugccaacccuaaugcuaacccaaaugccaacccgaaugcgaaccccaaugcaaacccuaaugccaacccaaaugcuaaccccaacgccaauccuaacaaaaauaaccagggcaaugggcaaggacacaacaugccaaaugaucccaacagaaaugucgacgagaacgcaaaugcuaacagugccguuaagaauaacaauaacgaggaaccgagcgauaaacauauuaaggaauaucugaacaaaauacaaaauuccuugucuacagaguggucgccuugcucagugacuugugguaacggcauccagguaaggauuaagcccgggagcgcgaauaagccaaaagacgaauuagauuacgccaacgacaucgagaagaaaauuugcaagauggagaaauguaguuccgugccugucacgaauauggaaaacaucaccucuggauuucugggcccccuacucgugcugcaggcagguuucuuucuucugacacggauauugacuaucccacagagccucgauuccugguggaccucacugaauuuccucgggggaagucccguuugccugggccagaacagccagucuccuacauccaaucacucaccaaccagcuguccgcccauuugcccuggcuaucgcuggauguguuuacgacguuuuaucauuuuccuguuuauccuuuugcugugccuaauauuccuccuggugcuucuggacuaccaggggauguugccagucuguccccucauuccuggaaguacuacaaccaacacggguccaugcaagacuuguaccacacccgcucaaggcaauucuauguuuccguccugcugcuguacuaagccuaccgaugggaacugcacauguaucccaauucccagcucgugggccuucgcuaaauaucugugggagugggccucugugagauuuuccugguuaucacugcucguaccuuucguucagugguucgugggacuuagucccaccgucuggcugagcgcaaucuggaugaugugguacuggggcccauccuuguauucuaucgugagcccuuuuauuccccuacugccaauauucuuuugccucuggguguacaucugaggacuaguuauaagacugacuagcccgaugggccucccaacgggcccuccuccccuccuugcaccgagauuaaucaaaggcucuuuucagagccaccaaaaaaaaaaaaaaaaaaaaaaaaaaaaaaaaaaaaaaaaaaaaaaaaaaaaaaaaaaaaaaaaaaaaaaaaaaaaaaaaaaaaaaaaaaaaaaaaaaaaagaauu

SEQ ID NO: 7893 - RNA, 1412 nt, Artificial Sequence
  mRNA Design i-3 (hSL-A100-N5) comprising derived and/or modified sequence from Pf(3D7)__XP_001351122.1__Pf-CSP (opt4)
aggagaaagcuuaccaugaugagaaagcuggccauccugagcgugagcagcuuccuguucguggaggcccuguuccaggaguaccagugcuacggcagcagcagcaacaccagagugcugaacgagcugaacuacgacaacgccggcaccaaccuguacaacgagcuggagaugaacuacuacggcaagcaggagaacugguacagccugaagaagaacagcagaagccugggcgagaacgacgacggcaacaacgaggacaacgagaagcugagaaagcccaagcacaagaagcugaagcagcccgccgacggcaaccccgaccccaacgccaaccccaacguggaccccaacgccaaccccaacguggaccccaacgccaaccccaacguggaccccaacgccaaccccaacgccaaccccaacgccaaccccaacgccaaccccaacgccaaccccaacgccaaccccaacgccaaccccaacgccaaccccaacgccaaccccaacgccaaccccaacgccaaccccaacgccaaccccaacgccaaccccaacgccaaccccaacgccaaccccaacgccaaccccaacgccaaccccaacguggaccccaacgccaaccccaacgccaaccccaacgccaaccccaacgccaaccccaacgccaaccccaacgccaaccccaacgccaaccccaacgccaaccccaacgccaaccccaacgccaaccccaacgccaaccccaacgccaaccccaacgccaaccccaacgccaaccccaacgccaaccccaacgccaaccccaacgccaaccccaacgccaaccccaacaagaacaaccagggcaacggccagggccacaacaugcccaacgaccccaacagaaacguggacgagaacgccaacgccaacagcgccgugaagaacaacaacaacgaggagcccagcgacaagcacaucaaggaguaccugaacaagauccagaacagccugagcaccgaguggagccccugcagcgugaccugcggcaacggcauccaggugagaaucaagcccggcagcgccaacaagcccaaggacgagcuggacuacgccaacgacaucgagaagaagaucugcaagauggagaagugcagcagcguguucaacguggugaacagcagcaucggccugaucauggugcugagcuuccuguuccugaacugaggacuaguuauaagacugacuagcccgaugggccucccaacgggcccuccuccccuccuugcaccgagauuaaucaaaggcucuuuucagagccaccaaaaaaaaaaaaaaaaaaaaaaaaaaaaaaaaaaaaaaaaaaaaaaaaaaaaaaaaaaaaaaaaaaaaaaaaaaaaaaaaaaaaaaaaaaaaaaaaaaaaagaauu

SEQ ID NO: 7894 - RNA, 1343 nt, Artificial Sequence
  mRNA Design i-3 (hSL-A100-N5) comprising derived and/or modified sequence from Pf(3D7)__XP_001351122.1__Pf-CSP(1-374) (opt4)
aggagaaagcuuaccaugaugagaaagcuggccauccugagcgugagcagcuuccuguucguggaggcccuguuccaggaguaccagugcuacggcagcagcagcaacaccagagugcugaacgagcugaacuacgacaacgccggcaccaaccuguacaacgagcuggagaugaacuacuacggcaagcaggagaacugguacagccugaagaagaacagcagaagccugggcgagaacgacgacggcaacaacgaggacaacgagaagcugagaaagcccaagcacaagaagcugaagcagcccgccgacggcaaccccgaccccaacgccaaccccaacguggaccccaacgccaaccccaacguggaccccaacgccaaccccaacguggaccccaacgccaaccccaacgccaaccccaacgccaaccccaacgccaaccccaacgccaaccccaacgccaaccccaacgccaaccccaacgccaaccccaacgccaaccccaacgccaaccccaacgccaaccccaacgccaaccccaacgccaaccccaacgccaaccccaacgccaaccccaacgccaaccccaacgccaaccccaacguggaccccaacgccaaccccaacgccaaccccaacgccaaccccaacgccaaccccaacgccaaccccaacgccaaccccaacgccaaccccaacgccaaccccaacgccaaccccaacgccaaccccaacgccaaccccaacgccaaccccaacgccaaccccaacgccaaccccaacgccaaccccaacgccaaccccaacgccaaccccaacgccaaccccaacaagaacaaccagggcaacggccagggccacaacaugcccaacgaccccaacagaaacguggacgagaacgccaacgccaacagcgccgugaagaacaacaacaacgaggagcccagcgacaagcacaucaaggaguaccugaacaagauccagaacagccugagcaccgaguggagccccugcagcgugaccugcggcaacggcauccaggugagaaucaagcccggcagcgccaacaagcccaaggacgagcuggacuacgccaacgacaucgagaagaagaucugcaagauggagaagugcugaggacuaguuauaagacugacuagcccgaugggccucccaacgggcccuccuccccuccuugcaccgagauuaaucaaaggcucuuuucagagccaccaaaaaaaaaaaaaaaaaaaaaaaaaaaaaaaaaaaaaaaaaaaaaaaaaaaaaaaaaaaaaaaaaaaaaaaaaaaaaaaaaaaaaaaaaaaaaaaaaaaaagaauu

SEQ ID NO: 7895 - RNA, 1196 nt, Artificial Sequence
  mRNA Design i-3 (hSL-A100-N5) comprising derived and/or modified sequence from Pf(3D7)__XP_001351122.1__Pf-CSP(1-325) (opt4)
aggagaaagcuuaccaugaugagaaagcuggccauccugagcgugagcagcuuccuguucguggaggcccuguuccaggaguaccagugcuacggcagcagcagcaacaccagagugcugaacgagcugaacuacgacaacgccggcaccaaccuguacaacgagcuggagaugaacuacuacggcaagcaggagaacugguacagccugaagaagaacagcagaagccugggcgagaacgacgacggcaacaacgaggacaacgagaagcugagaaagcccaagcacaagaagcugaagcagcccgccgacggcaaccccgaccccaacgccaaccccaacguggaccccaacgccaaccccaacguggaccccaacgccaaccccaacguggaccccaacgccaaccccaacgccaaccccaacgccaaccccaacgccaaccccaacgccaaccccaacgccaaccccaacgccaaccccaacgccaaccccaacgccaaccccaacgccaaccccaacgccaaccccaacgccaaccccaacgccaaccccaacgccaaccccaacgccaaccccaacgccaaccccaacgccaaccccaacguggaccccaacgccaaccccaacgccaaccccaacgccaaccccaacgccaaccccaacgccaaccccaacgccaaccccaacgccaaccccaacgccaaccccaacgccaaccccaacgccaaccccaacgccaaccccaacgccaaccccaacgccaaccccaacgccaaccccaacgccaaccccaacgccaaccccaacgccaaccccaacgccaaccccaacaagaacaaccagggcaacggccagggccacaacaugcccaacgaccccaacagaaacguggacgagaacgccaacgccaacagcgccgugaagaacaacaacaacgaggagcccagcgacaagcacaucaaggaguaccugaacaagauccagaacugaggacuaguuauaagacugacuagcccgaugggccucccaacgggcccuccuccccuccuugcaccgagauuaaucaaaggcucuuuucagagccaccaaaaaaaaaaaaaaaaaaaaaaaaaaaaaaaaaaaaaaaaaaaaaaaaaaaaaaaaaaaaaaaaaaaaaaaaaaaaaaaaaaaaaaaaaaaaaaaaaaaaagaauu

SEQ ID NO: 7896 - RNA, 1412 nt, Artificial Sequence
  mRNA Design i-3 (hSL-A100-N5) comprising derived and/or modified sequence from Pf(3D7)__XP_001351122.1__HsALB_Pf-CSP(19-397) (opt4)
aggagaaagcuuaccaugaagugggugaccuucaucagccugcuguuccuguucagcagcgccuacagccuguuccaggaguaccagugcuacggcagcagcagcaacaccagagugcugaacgagcugaacuacgacaacgccggcaccaaccuguacaacgagcuggagaugaacuacuacggcaagcaggagaacugguacagccugaagaagaacagcagaagccugggcgagaacgacgacggcaacaacgaggacaacgagaagcugagaaagcccaagcacaagaagcugaagcagcccgccgacggcaaccccgaccccaacgccaaccccaacguggaccccaacgccaaccccaacguggaccccaacgccaaccccaacguggaccccaacgccaaccccaacgccaaccccaacgccaaccccaacgccaaccccaacgccaaccccaacgccaaccccaacgccaaccccaacgccaaccccaacgccaaccccaacgccaaccccaacgccaaccccaacgccaaccccaacgccaaccccaacgccaaccccaacgccaaccccaacgccaaccccaacgccaaccccaacguggaccccaacgccaaccccaacgccaaccccaacgccaaccccaacgccaaccccaacgccaaccccaacgccaaccccaacgccaaccccaacgccaaccccaacgccaaccccaacgccaaccccaacgccaaccccaacgccaaccccaacgccaaccccaacgccaaccccaacgccaaccccaacgccaaccccaacgccaaccccaacgccaaccccaacaagaacaaccagggcaacggccagggccacaacaugcccaacgaccccaacagaaacguggacgagaacgccaacgccaacagcgccgugaagaacaacaacaacgaggagcccagcgacaagcacaucaaggaguaccugaacaagauccagaacagccugagcaccgaguggagccccugcagcgugaccugcggcaacggcauccaggugagaaucaagcccggcagcgccaacaagcccaaggacgagcuggacuacgccaacgacaucgagaagaagaucugcaagauggagaagugcagcagcguguucaacguggugaacagcagcaucggccugaucauggugcugagcuuccuguuccugaacugaggacuaguuauaagacugacuagcccgaugggccucccaacgggcccuccuccccuccuugcaccgagauuaaucaaaggcucuuuucagagccaccaaaaaaaaaaaaaaaaaaaaaaaaaaaaaaaaaaaaaaaaaaaaaaaaaaaaaaaaaaaaaaaaaaaaaaaaaaaaaaaaaaaaaaaaaaaaaaaaaaaaagaauu

SEQ ID NO: 7897 - RNA, 1430 nt, Artificial Sequence
  mRNA Design i-3 (hSL-A100-N5) comprising derived and/or modified sequence from Pf(3D7)__XP_001351122.1__HsIns-iso1_Pf-CSP(19-397) (opt4)
aggagaaagcuuaccauggcccuguggaugagacugcugccccugcuggcccugcuggcccuguggggccccgaccccgccgccgcccuguuccaggaguaccagugcuacggcagcagcagcaacaccagagugcugaacgagcugaacuacgacaacgccggcaccaaccuguacaacgagcuggagaugaacuacuacggcaagcaggagaacugguacagccugaagaagaacagcagaagccugggcgagaacgacgacggcaacaacgaggacaacgagaagcugagaaagcccaagcacaagaagcugaagcagcccgccgacggcaaccccgaccccaacgccaaccccaacguggaccccaacgccaaccccaacguggaccccaacgccaaccccaacguggaccccaacgccaaccccaacgccaaccccaacgccaaccccaacgccaaccccaacgccaaccccaacgccaaccccaacgccaaccccaacgccaaccccaacgccaaccccaacgccaaccccaacgccaaccccaacgccaaccccaacgccaaccccaacgccaaccccaacgccaaccccaacgccaaccccaacgccaaccccaacguggaccccaacgccaaccccaacgccaaccccaacgccaaccccaacgccaaccccaacgccaaccccaacgccaaccccaacgccaaccccaacgccaaccccaacgccaaccccaacgccaaccccaacgccaaccccaacgccaaccccaacgccaaccccaacgccaaccccaacgccaaccccaacgccaaccccaacgccaaccccaacgccaaccccaacaagaacaaccagggcaacggccagggccacaacaugcccaacgaccccaacagaaacguggacgagaacgccaacgccaacagcgccgugaagaacaacaacaacgaggagcccagcgacaagcacaucaaggaguaccugaacaagauccagaacagccugagcaccgaguggagccccugcagcgugaccugcggcaacggcauccaggugagaaucaagcccggcagcgccaacaagcccaaggacgagcuggacuacgccaacgacaucgagaagaagaucugcaagauggagaagugcagcagcguguucaacguggugaacagcagcaucggccugaucauggugcugagcuuccuguuccugaacugaggacuaguuauaagacugacuagcccgaugggccucccaacgggcccuccuccccuccuugcaccgagauuaaucaaaggcucuuuucagagccaccaaaaaaaaaaaaaaaaaaaaaaaaaaaaaaaaaaaaaaaaaaaaaaaaaaaaaaaaaaaaaaaaaaaaaaaaaaaaaaaaaaaaaaaaaaaaaaaaaaaaagaauu

SEQ ID NO: 7898 - RNA, 1409 nt, Artificial Sequence
  mRNA Design i-3 (hSL-A100-N5) comprising derived and/or modified sequence from Pf(3D7)__XP_001351122.1__HsSPARC_Pf-CSP(19-397) (opt4)
aggagaaagcuuaccaugagagccuggaucuucuuccugcugugccuggccggcagagcccuggcccuguuccaggaguaccagugcuacggcagcagcagcaacaccagagugcugaacgagcugaacuacgacaacgccggcaccaaccuguacaacgagcuggagaugaacuacuacggcaagcaggagaacugguacagccugaagaagaacagcagaagccugggcgagaacgacgacggcaacaacgaggacaacgagaagcugagaaagcccaagcacaagaagcugaagcagcccgccgacggcaaccccgaccccaacgccaaccccaacguggaccccaacgccaaccccaacguggaccccaacgccaaccccaacguggaccccaacgccaaccccaacgccaaccccaacgccaaccccaacgccaaccccaacgccaaccccaacgccaaccccaacgccaaccccaacgccaaccccaacgccaaccccaacgccaaccccaacgccaaccccaacgccaaccccaacgccaaccccaacgccaaccccaacgccaaccccaacgccaaccccaacgccaaccccaacguggaccccaacgccaaccccaacgccaaccccaacgccaaccccaacgccaaccccaacgccaaccccaacgccaaccccaacgccaaccccaacgccaaccccaacgccaaccccaacgccaaccccaacgccaaccccaacgccaaccccaacgccaaccccaacgccaaccccaacgccaaccccaacgccaaccccaacgccaaccccaacgccaaccccaacaagaacaaccagggcaacggccagggccacaacaugcccaacgaccccaacagaaacguggacgagaacgccaacgccaacagcgccgugaagaacaacaacaacgaggagcccagcgacaagcacaucaaggaguaccugaacaagauccagaacagccugagcaccgaguggagccccugcagcgugaccugcggcaacggcauccaggugagaaucaagcccggcagcgccaacaagcccaaggacgagcuggacuacgccaacgacaucgagaagaagaucugcaagauggagaagugcagcagcguguucaacguggugaacagcagcaucggccugaucauggugcugagcuuccuguuccugaacugaggacuaguuauaagacugacuagcccgaugggccucccaacgggcccuccuccccuccuugcaccgagauuaaucaaaggcucuuuucagagccaccaaaaaaaaaaaaaaaaaaaaaaaaaaaaaaaaaaaaaaaaaaaaaaaaaaaaaaaaaaaaaaaaaaaaaaaaaaaaaaaaaaaaaaaaaaaaaaaaaaaaagaauu

SEQ ID NO: 7899 - RNA, 1412 nt, Artificial Sequence
  mRNA Design i-3 (hSL-A100-N5) comprising derived and/or modified sequence from Pf(3D7)__XP_001351122.1__IgE_Pf-CSP(19-397) (opt4)
aggagaaagcuuaccauggacuggaccuggauccuguuccugguggccgccgccaccagagugcacagccuguuccaggaguaccagugcuacggcagcagcagcaacaccagagugcugaacgagcugaacuacgacaacgccggcaccaaccuguacaacgagcuggagaugaacuacuacggcaagcaggagaacugguacagccugaagaagaacagcagaagccugggcgagaacgacgacggcaacaacgaggacaacgagaagcugagaaagcccaagcacaagaagcugaagcagcccgccgacggcaaccccgaccccaacgccaaccccaacguggaccccaacgccaaccccaacguggaccccaacgccaaccccaacguggaccccaacgccaaccccaacgccaaccccaacgccaaccccaacgccaaccccaacgccaaccccaacgccaaccccaacgccaaccccaacgccaaccccaacgccaaccccaacgccaaccccaacgccaaccccaacgccaaccccaacgccaaccccaacgccaaccccaacgccaaccccaacgccaaccccaacgccaaccccaacguggaccccaacgccaaccccaacgccaaccccaacgccaaccccaacgccaaccccaacgccaaccccaacgccaaccccaacgccaaccccaacgccaaccccaacgccaaccccaacgccaaccccaacgccaaccccaacgccaaccccaacgccaaccccaacgccaaccccaacgccaaccccaacgccaaccccaacgccaaccccaacgccaaccccaacaagaacaaccagggcaacggccagggccacaacaugcccaacgaccccaacagaaacguggacgagaacgccaacgccaacagcgccgugaagaacaacaacaacgaggagcccagcgacaagcacaucaaggaguaccugaacaagauccagaacagccugagcaccgaguggagccccugcagcgugaccugcggcaacggcauccaggugagaaucaagcccggcagcgccaacaagcccaaggacgagcuggacuacgccaacgacaucgagaagaagaucugcaagauggagaagugcagcagcguguucaacguggugaacagcagcaucggccugaucauggugcugagcuuccuguuccugaacugaggacuaguuauaagacugacuagcccgaugggccucccaacgggcccuccuccccuccuugcaccgagauuaaucaaaggcucuuuucagagccaccaaaaaaaaaaaaaaaaaaaaaaaaaaaaaaaaaaaaaaaaaaaaaaaaaaaaaaaaaaaaaaaaaaaaaaaaaaaaaaaaaaaaaaaaaaaaaaaaaaaaagaauu

SEQ ID NO: 7900 - RNA, 1577 nt, Artificial Sequence
  mRNA Design i-3 (hSL-A100-N5) comprising derived and/or modified sequence from Pf(3D7)__XP_001351122.1__Pf-CSP_L(G4SG4)_TM domain HA (opt4)
aggagaaagcuuaccaugaugagaaagcuggccauccugagcgugagcagcuuccuguucguggaggcccuguuccaggaguaccagugcuacggcagcagcagcaacaccagagugcugaacgagcugaacuacgacaacgccggcaccaaccuguacaacgagcuggagaugaacuacuacggcaagcaggagaacugguacagccugaagaagaacagcagaagccugggcgagaacgacgacggcaacaacgaggacaacgagaagcugagaaagcccaagcacaagaagcugaagcagcccgccgacggcaaccccgaccccaacgccaaccccaacguggaccccaacgccaaccccaacguggaccccaacgccaaccccaacguggaccccaacgccaaccccaacgccaaccccaacgccaaccccaacgccaaccccaacgccaaccccaacgccaaccccaacgccaaccccaacgccaaccccaacgccaaccccaacgccaaccccaacgccaaccccaacgccaaccccaacgccaaccccaacgccaaccccaacgccaaccccaacgccaaccccaacgccaaccccaacguggaccccaacgccaaccccaacgccaaccccaacgccaaccccaacgccaaccccaacgccaaccccaacgccaaccccaacgccaaccccaacgccaaccccaacgccaaccccaacgccaaccccaacgccaaccccaacgccaaccccaacgccaaccccaacgccaaccccaacgccaaccccaacgccaaccccaacgccaaccccaacgccaaccccaacaagaacaaccagggcaacggccagggccacaacaugcccaacgaccccaacagaaacguggacgagaacgccaacgccaacagcgccgugaagaacaacaacaacgaggagcccagcgacaagcacaucaaggaguaccugaacaagauccagaacagccugagcaccgaguggagccccugcagcgugaccugcggcaacggcauccaggugagaaucaagcccggcagcgccaacaagcccaaggacgagcuggacuacgccaacgacaucgagaagaagaucugcaagauggagaagugcagcagcguguucaacguggugaacagcagcaucggccugaucauggugcugagcuuccuguuccugaacggcggcggcggcagcggcggcggcggcaagcuggagagcaccagaaucuaccagauccuggccaucuacagcaccguggccagcagccuggugcugguggugagccugggcgccaucagcuucuggaugugcagcaacggcagccugcagugcagaaucugcaucugaggacuaguuauaagacugacuagcccgaugggccucccaacgggcccuccuccccuccuugcaccgagauuaaucaaaggcucuuuucagagccaccaaaaaaaaaaaaaaaaaaaaaaaaaaaaaaaaaaaaaaaaaaaaaaaaaaaaaaaaaaaaaaaaaaaaaaaaaaaaaaaaaaaaaaaaaaaaaaaaaaaaagaauu

SEQ ID NO: 7901 - RNA, 1451 nt, Artificial Sequence
  mRNA Design i-3 (hSL-A100-N5) comprising derived and/or modified sequence from Pf(3D7)__XP_001351122.1__Pf-CSP(199-377)_L(PVTN)_HBsAg (opt4)
aggagaaagcuuaccauggaccccaacgccaaccccaacgccaaccccaacgccaaccccaacgccaaccccaacgccaaccccaacgccaaccccaacgccaaccccaacgccaaccccaacgccaaccccaacgccaaccccaacgccaaccccaacgccaaccccaacgccaaccccaacgccaaccccaacgccaaccccaacgccaaccccaacgccaaccccaacgccaaccccaacaagaacaaccagggcaacggccagggccacaacaugcccaacgaccccaacagaaacguggacgagaacgccaacgccaacagcgccgugaagaacaacaacaacgaggagcccagcgacaagcacaucaaggaguaccugaacaagauccagaacagccugagcaccgaguggagccccugcagcgugaccugcggcaacggcauccaggugagaaucaagcccggcagcgccaacaagcccaaggacgagcuggacuacgccaacgacaucgagaagaagaucugcaagauggagaagugcagcagcgugcccgugaccaacauggagaacaucaccagcggcuuccugggcccccugcuggugcugcaggccggcuucuuccugcugaccagaauccugaccaucccccagagccuggacagcugguggaccagccugaacuuccugggcggcagccccgugugccugggccagaacagccagagccccaccagcaaccacagccccaccagcugcccccccaucugccccggcuacagauggaugugccugagaagauucaucaucuuccuguucauccugcugcugugccugaucuuccugcuggugcugcuggacuaccagggcaugcugcccgugugcccccugauccccggcagcaccaccaccaacaccggccccugcaagaccugcaccacccccgcccagggcaacagcauguuccccagcugcugcugcaccaagcccaccgacggcaacugcaccugcauccccauccccagcagcugggccuucgccaaguaccugugggagugggccagcgugagauucagcuggcugagccugcuggugcccuucgugcagugguucgugggccugagccccaccguguggcugagcgccaucuggaugaugugguacuggggccccagccuguacagcaucgugagccccuucaucccccugcugcccaucuucuucugccuguggguguacaucugaggacuaguuauaagacugacuagcccgaugggccucccaacgggcccuccuccccuccuugcaccgagauuaaucaaaggcucuuuucagagccaccaaaaaaaaaaaaaaaaaaaaaaaaaaaaaaaaaaaaaaaaaaaaaaaaaaaaaaaaaaaaaaaaaaaaaaaaaaaaaaaaaaaaaaaaaaaaaaaaaaaaagaauu

SEQ ID NO: 7902 - RNA, 1493 nt, Artificial Sequence
  mRNA Design i-3 (hSL-A100-N5) comprising derived and/or modified sequence from Pf(3D7)__XP_001351122.1__Pf-CSP(199-387)_L(PVTN)_HBsAg (opt4)
aggagaaagcuuaccaugauggcccccgaccccaacgccaaccccaacgccaaccccaacgccaaccccaacgccaaccccaacgccaaccccaacgccaaccccaacgccaaccccaacgccaaccccaacgccaaccccaacgccaaccccaacgccaaccccaacgccaaccccaacgccaaccccaacgccaaccccaacgccaaccccaacgccaaccccaacgccaaccccaacgccaaccccaacaagaacaaccagggcaacggccagggccacaacaugcccaacgaccccaacagaaacguggacgagaacgccaacgccaacagcgccgugaagaacaacaacaacgaggagcccagcgacaagcacaucaaggaguaccugaacaagauccagaacagccugagcaccgaguggagccccugcagcgugaccugcggcaacggcauccaggugagaaucaagcccggcagcgccaacaagcccaaggacgagcuggacuacgccaacgacaucgagaagaagaucugcaagauggagaagugcagcagcguguucaacguggugaacagcagcaucggccugggccccgugaccaacauggagaacaucaccagcggcuuccugggcccccugcuggugcugcaggccggcuucuuccugcugaccagaauccugaccaucccccagagccuggacagcugguggaccagccugaacuuccugggcggcagccccgugugccugggccagaacagccagagccccaccagcaaccacagccccaccagcugcccccccaucugccccggcuacagauggaugugccugagaagauucaucaucuuccuguucauccugcugcugugccugaucuuccugcuggugcugcuggacuaccagggcaugcugcccgugugcccccugauccccggcagcaccaccaccaacaccggccccugcaagaccugcaccacccccgcccagggcaacagcauguuccccagcugcugcugcaccaagcccaccgacggcaacugcaccugcauccccauccccagcagcugggccuucgccaaguaccugugggagugggccagcgugagauucagcuggcugagccugcuggugcccuucgugcagugguucgugggccugagccccaccguguggcugagcgccaucuggaugaugugguacuggggccccagccuguacagcaucgugagccccuucaucccccugcugcccaucuucuucugccuguggguguacaucugaggacuaguuauaagacugacuagcccgaugggccucccaacgggcccuccuccccuccuugcaccgagauuaaucaaaggcucuuuucagagccaccaaaaaaaaaaaaaaaaaaaaaaaaaaaaaaaaaaaaaaaaaaaaaaaaaaaaaaaaaaaaaaaaaaaaaaaaaaaaaaaaaaaaaaaaaaaaaaaaaaaaagaauu

SEQ ID NO: 7903 - RNA, 677 nt, Artificial Sequence
  mRNA Design i-3 (hSL-A100-N5) comprising derived and/or modified sequence from Pf(3D7)__XP_001351122.1__HsALB_Pf-CSP(19-152) (opt4)
aggagaaagcuuaccaugaagugggugaccuucaucagccugcuguuccuguucagcagcgccuacagccuguuccaggaguaccagugcuacggcagcagcagcaacaccagagugcugaacgagcugaacuacgacaacgccggcaccaaccuguacaacgagcuggagaugaacuacuacggcaagcaggagaacugguacagccugaagaagaacagcagaagccugggcgagaacgacgacggcaacaacgaggacaacgagaagcugagaaagcccaagcacaagaagcugaagcagcccgccgacggcaaccccgaccccaacgccaaccccaacguggaccccaacgccaaccccaacguggaccccaacgccaaccccaacguggaccccaacgccaaccccaacgccaaccccaacgccaaccccaacgccaaccccaacgccaaccccaacgccaaccccugaggacuaguuauaagacugacuagcccgaugggccucccaacgggcccuccuccccuccuugcaccgagauuaaucaaaggcucuuuucagagccaccaaaaaaaaaaaaaaaaaaaaaaaaaaaaaaaaaaaaaaaaaaaaaaaaaaaaaaaaaaaaaaaaaaaaaaaaaaaaaaaaaaaaaaaaaaaaaaaaaaaaagaauu

SEQ ID NO: 7904 - RNA, 797 nt, Artificial Sequence
  mRNA Design i-3 (hSL-A100-N5) comprising derived and/or modified sequence from Pf(3D7)__XP_001351122.1__HsALB_Pf-CSP(19-192) (opt4)
aggagaaagcuuaccaugaagugggugaccuucaucagccugcuguuccuguucagcagcgccuacagccuguuccaggaguaccagugcuacggcagcagcagcaacaccagagugcugaacgagcugaacuacgacaacgccggcaccaaccuguacaacgagcuggagaugaacuacuacggcaagcaggagaacugguacagccugaagaagaacagcagaagccugggcgagaacgacgacggcaacaacgaggacaacgagaagcugagaaagcccaagcacaagaagcugaagcagcccgccgacggcaaccccgaccccaacgccaaccccaacguggaccccaacgccaaccccaacguggaccccaacgccaaccccaacguggaccccaacgccaaccccaacgccaaccccaacgccaaccccaacgccaaccccaacgccaaccccaacgccaaccccaacgccaaccccaacgccaaccccaacgccaaccccaacgccaaccccaacgccaaccccaacgccaaccccaacgccaaccccaacgccaaccccaacgccaaccccaacgccaaccccugaggacuaguuauaagacugacuagcccgaugggccucccaacgggcccuccuccccuccuugcaccgagauuaaucaaaggcucuuuucagagccaccaaaaaaaaaaaaaaaaaaaaaaaaaaaaaaaaaaaaaaaaaaaaaaaaaaaaaaaaaaaaaaaaaaaaaaaaaaaaaaaaaaaaaaaaaaaaaaaaaaaaagaauu

SEQ ID NO: 7905 - RNA, 1037 nt, Artificial Sequence
  mRNA Design i-3 (hSL-A100-N5) comprising derived and/or modified sequence from Pf(3D7)__XP_001351122.1__HsALB_Pf-CSP(19-272) (opt4)
aggagaaagcuuaccaugaagugggugaccuucaucagccugcuguuccuguucagcagcgccuacagccuguuccaggaguaccagugcuacggcagcagcagcaacaccagagugcugaacgagcugaacuacgacaacgccggcaccaaccuguacaacgagcuggagaugaacuacuacggcaagcaggagaacugguacagccugaagaagaacagcagaagccugggcgagaacgacgacggcaacaacgaggacaacgagaagcugagaaagcccaagcacaagaagcugaagcagcccgccgacggcaaccccgaccccaacgccaaccccaacguggaccccaacgccaaccccaacguggaccccaacgccaaccccaacguggaccccaacgccaaccccaacgccaaccccaacgccaaccccaacgccaaccccaacgccaaccccaacgccaaccccaacgccaaccccaacgccaaccccaacgccaaccccaacgccaaccccaacgccaaccccaacgccaaccccaacgccaaccccaacgccaaccccaacgccaaccccaacgccaaccccaacgccaaccccaacguggaccccaacgccaaccccaacgccaaccccaacgccaaccccaacgccaaccccaacgccaaccccaacgccaaccccaacgccaaccccaacgccaaccccaacgccaaccccaacgccaaccccaacgccaaccccaacgccaaccccaacgccaaccccaacgccaaccccaacgccaaccccaacgccaaccccaacgccaaccccaacgccaaccccugaggacuaguuauaagacugacuagcccgaugggccucccaacgggcccuccuccccuccuugcaccgagauuaaucaaaggcucuuuucagagccaccaaaaaaaaaaaaaaaaaaaaaaaaaaaaaaaaaaaaaaaaaaaaaaaaaaaaaaaaaaaaaaaaaaaaaaaaaaaaaaaaaaaaaaaaaaaaaaaaaaaaagaauu

SEQ ID NO: 7906 - RNA, 1199 nt, Artificial Sequence
  mRNA Design i-3 (hSL-A100-N5) comprising derived and/or modified sequence from Pf(3D7)__XP_001351122.1__HsALB_Pf-CSP(19-272)_L(AAY)_Pf-CSP(310-3 27)_L(AAY)_Pf-CSP(346-375) (opt4)
aggagaaagcuuaccaugaagugggugaccuucaucagccugcuguuccuguucagcagcgccuacagccuguuccaggaguaccagugcuacggcagcagcagcaacaccagagugcugaacgagcugaacuacgacaacgccggcaccaaccuguacaacgagcuggagaugaacuacuacggcaagcaggagaacugguacagccugaagaagaacagcagaagccugggcgagaacgacgacggcaacaacgaggacaacgagaagcugagaaagcccaagcacaagaagcugaagcagcccgccgacggcaaccccgaccccaacgccaaccccaacguggaccccaacgccaaccccaacguggaccccaacgccaaccccaacguggaccccaacgccaaccccaacgccaaccccaacgccaaccccaacgccaaccccaacgccaaccccaacgccaaccccaacgccaaccccaacgccaaccccaacgccaaccccaacgccaaccccaacgccaaccccaacgccaaccccaacgccaaccccaacgccaaccccaacgccaaccccaacgccaaccccaacgccaaccccaacguggaccccaacgccaaccccaacgccaaccccaacgccaaccccaacgccaaccccaacgccaaccccaacgccaaccccaacgccaaccccaacgccaaccccaacgccaaccccaacgccaaccccaacgccaaccccaacgccaaccccaacgccaaccccaacgccaaccccaacgccaaccccaacgccaaccccaacgccaaccccaacgccaaccccgccgccuacgagcccagcgacaagcacaucaaggaguaccugaacaagauccagaacagccuggccgccuacaucaagcccggcagcgccaacaagcccaaggacgagcuggacuacgccaacgacaucgagaagaagaucugcaagauggagaagugcagcugaggacuaguuauaagacugacuagcccgaugggccucccaacgggcccuccuccccuccuugcaccgagauuaaucaaaggcucuuuucagagccaccaaaaaaaaaaaaaaaaaaaaaaaaaaaaaaaaaaaaaaaaaaaaaaaaaaaaaaaaaaaaaaaaaaaaaaaaaaaaaaaaaaaaaaaaaaaaaaaaaaaaagaauu

SEQ ID NO: 7907 - RNA, 1160 nt, Artificial Sequence
  mRNA Design i-3 (hSL-A100-N5) comprising derived and/or modified sequence from Pf(3D7)__XP_001351122.1__HsALB_Pf-CSP(19-272)_L(AAY)_Pf-CSP(346-3 65)_L(AAY)_P2 (opt4)
aggagaaagcuuaccaugaagugggugaccuucaucagccugcuguuccuguucagcagcgccuacagccuguuccaggaguaccagugcuacggcagcagcagcaacaccagagugcugaacgagcugaacuacgacaacgccggcaccaaccuguacaacgagcuggagaugaacuacuacggcaagcaggagaacugguacagccugaagaagaacagcagaagccugggcgagaacgacgacggcaacaacgaggacaacgagaagcugagaaagcccaagcacaagaagcugaagcagcccgccgacggcaaccccgaccccaacgccaaccccaacguggaccccaacgccaaccccaacguggaccccaacgccaaccccaacguggaccccaacgccaaccccaacgccaaccccaacgccaaccccaacgccaaccccaacgccaaccccaacgccaaccccaacgccaaccccaacgccaaccccaacgccaaccccaacgccaaccccaacgccaaccccaacgccaaccccaacgccaaccccaacgccaaccccaacgccaaccccaacgccaaccccaacgccaaccccaacguggaccccaacgccaaccccaacgccaaccccaacgccaaccccaacgccaaccccaacgccaaccccaacgccaaccccaacgccaaccccaacgccaaccccaacgccaaccccaacgccaaccccaacgccaaccccaacgccaaccccaacgccaaccccaacgccaaccccaacgccaaccccaacgccaaccccaacgccaaccccaacgccaaccccgccgccuacaucaagcccggcagcgccaacaagcccaaggacgagcuggacuacgccaacgacaucgaggccgccuaccaguacaucaaggccaacagcaaguucaucggcaucaccgagcugugaggacuaguuauaagacugacuagcccgaugggccucccaacgggcccuccuccccuccuugcaccgagauuaaucaaaggcucuuuucagagccaccaaaaaaaaaaaaaaaaaaaaaaaaaaaaaaaaaaaaaaaaaaaaaaaaaaaaaaaaaaaaaaaaaaaaaaaaaaaaaaaaaaaaaaaaaaaaaaaaaaaaagaauu

SEQ ID NO: 7908 - RNA, 1154 nt, Artificial Sequence
  mRNA Design i-3 (hSL-A100-N5) comprising derived and/or modified sequence from Pf(3D7)__XP_001351122.1__HsALB_Pf-CSP(19-272)_L(AAY)_Pf-CSP(346-3 65)_L(AAY)_PADRE (opt4)
aggagaaagcuuaccaugaagugggugaccuucaucagccugcuguuccuguucagcagcgccuacagccuguuccaggaguaccagugcuacggcagcagcagcaacaccagagugcugaacgagcugaacuacgacaacgccggcaccaaccuguacaacgagcuggagaugaacuacuacggcaagcaggagaacugguacagccugaagaagaacagcagaagccugggcgagaacgacgacggcaacaacgaggacaacgagaagcugagaaagcccaagcacaagaagcugaagcagcccgccgacggcaaccccgaccccaacgccaaccccaacguggaccccaacgccaaccccaacguggaccccaacgccaaccccaacguggaccccaacgccaaccccaacgccaaccccaacgccaaccccaacgccaaccccaacgccaaccccaacgccaaccccaacgccaaccccaacgccaaccccaacgccaaccccaacgccaaccccaacgccaaccccaacgccaaccccaacgccaaccccaacgccaaccccaacgccaaccccaacgccaaccccaacgccaaccccaacguggaccccaacgccaaccccaacgccaaccccaacgccaaccccaacgccaaccccaacgccaaccccaacgccaaccccaacgccaaccccaacgccaaccccaacgccaaccccaacgccaaccccaacgccaaccccaacgccaaccccaacgccaaccccaacgccaaccccaacgccaaccccaacgccaaccccaacgccaaccccaacgccaaccccgccgccuacaucaagcccggcagcgccaacaagcccaaggacgagcuggacuacgccaacgacaucgaggccgccuacgccaaguucguggccgccuggacccugaaggccgccgccugaggacuaguuauaagacugacuagcccgaugggccucccaacgggcccuccuccccuccuugcaccgagauuaaucaaaggcucuuuucagagccaccaaaaaaaaaaaaaaaaaaaaaaaaaaaaaaaaaaaaaaaaaaaaaaaaaaaaaaaaaaaaaaaaaaaaaaaaaaaaaaaaaaaaaaaaaaaaaaaaaaaaagaauu

SEQ ID NO: 7909 - RNA, 1211 nt, Artificial Sequence
  mRNA Design i-3 (hSL-A100-N5) comprising derived and/or modified sequence from Pf(3D7)__XP_001351122.1__HsALB_Pf-CSP(19-272)_L(G4S)_Pf-CSP(310-3 27)_L(G4S)_Pf-CSP(346-375) (opt4)
aggagaaagcuuaccaugaagugggugaccuucaucagccugcuguuccuguucagcagcgccuacagccuguuccaggaguaccagugcuacggcagcagcagcaacaccagagugcugaacgagcugaacuacgacaacgccggcaccaaccuguacaacgagcuggagaugaacuacuacggcaagcaggagaacugguacagccugaagaagaacagcagaagccugggcgagaacgacgacggcaacaacgaggacaacgagaagcugagaaagcccaagcacaagaagcugaagcagcccgccgacggcaaccccgaccccaacgccaaccccaacguggaccccaacgccaaccccaacguggaccccaacgccaaccccaacguggaccccaacgccaaccccaacgccaaccccaacgccaaccccaacgccaaccccaacgccaaccccaacgccaaccccaacgccaaccccaacgccaaccccaacgccaaccccaacgccaaccccaacgccaaccccaacgccaaccccaacgccaaccccaacgccaaccccaacgccaaccccaacgccaaccccaacgccaaccccaacguggaccccaacgccaaccccaacgccaaccccaacgccaaccccaacgccaaccccaacgccaaccccaacgccaaccccaacgccaaccccaacgccaaccccaacgccaaccccaacgccaaccccaacgccaaccccaacgccaaccccaacgccaaccccaacgccaaccccaacgccaaccccaacgccaaccccaacgccaaccccaacgccaaccccggcggcggcggcagcgagcccagcgacaagcacaucaaggaguaccugaacaagauccagaacagccugggcggcggcggcagcaucaagcccggcagcgccaacaagcccaaggacgagcuggacuacgccaacgacaucgagaagaagaucugcaagauggagaagugcagcugaggacuaguuauaagacugacuagcccgaugggccucccaacgggcccuccuccccuccuugcaccgagauuaaucaaaggcucuuuucagagccaccaaaaaaaaaaaaaaaaaaaaaaaaaaaaaaaaaaaaaaaaaaaaaaaaaaaaaaaaaaaaaaaaaaaaaaaaaaaaaaaaaaaaaaaaaaaaaaaaaaaaagaauu

SEQ ID NO: 7910 - RNA, 1196 nt, Artificial Sequence
  mRNA Design i-3 (hSL-A100-N5) comprising derived and/or modified sequence from Pf(3D7)__XP_001351122.1__HsALB_Pf-CSP(19-272)_L(G4S)_Pf-CSP(310-3 27)_Pf-CSP(346-375) (opt4)
aggagaaagcuuaccaugaagugggugaccuucaucagccugcuguuccuguucagcagcgccuacagccuguuccaggaguaccagugcuacggcagcagcagcaacaccagagugcugaacgagcugaacuacgacaacgccggcaccaaccuguacaacgagcuggagaugaacuacuacggcaagcaggagaacugguacagccugaagaagaacagcagaagccugggcgagaacgacgacggcaacaacgaggacaacgagaagcugagaaagcccaagcacaagaagcugaagcagcccgccgacggcaaccccgaccccaacgccaaccccaacguggaccccaacgccaaccccaacguggaccccaacgccaaccccaacguggaccccaacgccaaccccaacgccaaccccaacgccaaccccaacgccaaccccaacgccaaccccaacgccaaccccaacgccaaccccaacgccaaccccaacgccaaccccaacgccaaccccaacgccaaccccaacgccaaccccaacgccaaccccaacgccaaccccaacgccaaccccaacgccaaccccaacgccaaccccaacguggaccccaacgccaaccccaacgccaaccccaacgccaaccccaacgccaaccccaacgccaaccccaacgccaaccccaacgccaaccccaacgccaaccccaacgccaaccccaacgccaaccccaacgccaaccccaacgccaaccccaacgccaaccccaacgccaaccccaacgccaaccccaacgccaaccccaacgccaaccccaacgccaaccccggcggcggcggcagcgagcccagcgacaagcacaucaaggaguaccugaacaagauccagaacagccugaucaagcccggcagcgccaacaagcccaaggacgagcuggacuacgccaacgacaucgagaagaagaucugcaagauggagaagugcagcugaggacuaguuauaagacugacuagcccgaugggccucccaacgggcccuccuccccuccuugcaccgagauuaaucaaaggcucuuuucagagccaccaaaaaaaaaaaaaaaaaaaaaaaaaaaaaaaaaaaaaaaaaaaaaaaaaaaaaaaaaaaaaaaaaaaaaaaaaaaaaaaaaaaaaaaaaaaaaaaaaaaaagaauu

SEQ ID NO: 7911 - RNA, 1196 nt, Artificial Sequence
  mRNA Design i-3 (hSL-A100-N5) comprising derived and/or modified sequence from Pf(3D7)__XP_001351122.1__HsALB_Pf-CSP(19-325) (opt4)
aggagaaagcuuaccaugaagugggugaccuucaucagccugcuguuccuguucagcagcgccuacagccuguuccaggaguaccagugcuacggcagcagcagcaacaccagagugcugaacgagcugaacuacgacaacgccggcaccaaccuguacaacgagcuggagaugaacuacuacggcaagcaggagaacugguacagccugaagaagaacagcagaagccugggcgagaacgacgacggcaacaacgaggacaacgagaagcugagaaagcccaagcacaagaagcugaagcagcccgccgacggcaaccccgaccccaacgccaaccccaacguggaccccaacgccaaccccaacguggaccccaacgccaaccccaacguggaccccaacgccaaccccaacgccaaccccaacgccaaccccaacgccaaccccaacgccaaccccaacgccaaccccaacgccaaccccaacgccaaccccaacgccaaccccaacgccaaccccaacgccaaccccaacgccaaccccaacgccaaccccaacgccaaccccaacgccaaccccaacgccaaccccaacgccaaccccaacguggaccccaacgccaaccccaacgccaaccccaacgccaaccccaacgccaaccccaacgccaaccccaacgccaaccccaacgccaaccccaacgccaaccccaacgccaaccccaacgccaaccccaacgccaaccccaacgccaaccccaacgccaaccccaacgccaaccccaacgccaaccccaacgccaaccccaacgccaaccccaacgccaaccccaacaagaacaaccagggcaacggccagggccacaacaugcccaacgaccccaacagaaacguggacgagaacgccaacgccaacagcgccgugaagaacaacaacaacgaggagcccagcgacaagcacaucaaggaguaccugaacaagauccagaacugaggacuaguuauaagacugacuagcccgaugggccucccaacgggcccuccuccccuccuugcaccgagauuaaucaaaggcucuuuucagagccaccaaaaaaaaaaaaaaaaaaaaaaaaaaaaaaaaaaaaaaaaaaaaaaaaaaaaaaaaaaaaaaaaaaaaaaaaaaaaaaaaaaaaaaaaaaaaaaaaaaaaagaauu

SEQ ID NO: 7912 - RNA, 1373 nt, Artificial Sequence
  mRNA Design i-3 (hSL-A100-N5) comprising derived and/or modified sequence from Pf(3D7)__XP_001351122.1__HsALB_Pf-CSP(19-384) (opt4)
aggagaaagcuuaccaugaagugggugaccuucaucagccugcuguuccuguucagcagcgccuacagccuguuccaggaguaccagugcuacggcagcagcagcaacaccagagugcugaacgagcugaacuacgacaacgccggcaccaaccuguacaacgagcuggagaugaacuacuacggcaagcaggagaacugguacagccugaagaagaacagcagaagccugggcgagaacgacgacggcaacaacgaggacaacgagaagcugagaaagcccaagcacaagaagcugaagcagcccgccgacggcaaccccgaccccaacgccaaccccaacguggaccccaacgccaaccccaacguggaccccaacgccaaccccaacguggaccccaacgccaaccccaacgccaaccccaacgccaaccccaacgccaaccccaacgccaaccccaacgccaaccccaacgccaaccccaacgccaaccccaacgccaaccccaacgccaaccccaacgccaaccccaacgccaaccccaacgccaaccccaacgccaaccccaacgccaaccccaacgccaaccccaacgccaaccccaacguggaccccaacgccaaccccaacgccaaccccaacgccaaccccaacgccaaccccaacgccaaccccaacgccaaccccaacgccaaccccaacgccaaccccaacgccaaccccaacgccaaccccaacgccaaccccaacgccaaccccaacgccaaccccaacgccaaccccaacgccaaccccaacgccaaccccaacgccaaccccaacgccaaccccaacaagaacaaccagggcaacggccagggccacaacaugcccaacgaccccaacagaaacguggacgagaacgccaacgccaacagcgccgugaagaacaacaacaacgaggagcccagcgacaagcacaucaaggaguaccugaacaagauccagaacagccugagcaccgaguggagccccugcagcgugaccugcggcaacggcauccaggugagaaucaagcccggcagcgccaacaagcccaaggacgagcuggacuacgccaacgacaucgagaagaagaucugcaagauggagaagugcagcagcguguucaacguggugaacagcagcugaggacuaguuauaagacugacuagcccgaugggccucccaacgggcccuccuccccuccuugcaccgagauuaaucaaaggcucuuuucagagccaccaaaaaaaaaaaaaaaaaaaaaaaaaaaaaaaaaaaaaaaaaaaaaaaaaaaaaaaaaaaaaaaaaaaaaaaaaaaaaaaaaaaaaaaaaaaaaaaaaaaaagaauu

SEQ ID NO: 7913 - RNA, 1511 nt, Artificial Sequence
  mRNA Design i-3 (hSL-A100-N5) comprising derived and/or modified sequence from Pf(3D7)__XP_001351122.1__HsALB_Pf-CSP(19-384)_TM domain HA (opt4)
aggagaaagcuuaccaugaagugggugaccuucaucagccugcuguuccuguucagcagcgccuacagccuguuccaggaguaccagugcuacggcagcagcagcaacaccagagugcugaacgagcugaacuacgacaacgccggcaccaaccuguacaacgagcuggagaugaacuacuacggcaagcaggagaacugguacagccugaagaagaacagcagaagccugggcgagaacgacgacggcaacaacgaggacaacgagaagcugagaaagcccaagcacaagaagcugaagcagcccgccgacggcaaccccgaccccaacgccaaccccaacguggaccccaacgccaaccccaacguggaccccaacgccaaccccaacguggaccccaacgccaaccccaacgccaaccccaacgccaaccccaacgccaaccccaacgccaaccccaacgccaaccccaacgccaaccccaacgccaaccccaacgccaaccccaacgccaaccccaacgccaaccccaacgccaaccccaacgccaaccccaacgccaaccccaacgccaaccccaacgccaaccccaacgccaaccccaacguggaccccaacgccaaccccaacgccaaccccaacgccaaccccaacgccaaccccaacgccaaccccaacgccaaccccaacgccaaccccaacgccaaccccaacgccaaccccaacgccaaccccaacgccaaccccaacgccaaccccaacgccaaccccaacgccaaccccaacgccaaccccaacgccaaccccaacgccaaccccaacgccaaccccaacaagaacaaccagggcaacggccagggccacaacaugcccaacgaccccaacagaaacguggacgagaacgccaacgccaacagcgccgugaagaacaacaacaacgaggagcccagcgacaagcacaucaaggaguaccugaacaagauccagaacagccugagcaccgaguggagccccugcagcgugaccugcggcaacggcauccaggugagaaucaagcccggcagcgccaacaagcccaaggacgagcuggacuacgccaacgacaucgagaagaagaucugcaagauggagaagugcagcagcguguucaacguggugaacagcagcaagcuggagagcaccagaaucuaccagauccuggccaucuacagcaccguggccagcagccuggugcugguggugagccugggcgccaucagcuucuggaugugcagcaacggcagccugcagugcagaaucugcaucugaggacuaguuauaagacugacuagcccgaugggccucccaacgggcccuccuccccuccuugcaccgagauuaaucaaaggcucuuuucagagccaccaaaaaaaaaaaaaaaaaaaaaaaaaaaaaaaaaaaaaaaaaaaaaaaaaaaaaaaaaaaaaaaaaaaaaaaaaaaaaaaaaaaaaaaaaaaaaaaaaaaaagaauu

SEQ ID NO: 7914 - RNA, 1223 nt, Artificial Sequence
  mRNA Design i-3 (hSL-A100-N5) comprising derived and/or modified sequence from Pf(3D7)__XP_001351122.1__HsALB_Pf-CSP(82-397) (opt4)
aggagaaagcuuaccaugaagugggugaccuucaucagccugcuguuccuguucagcagcgccuacagcgacaacgagaagcugagaaagcccaagcacaagaagcugaagcagcccgccgacggcaaccccgaccccaacgccaaccccaacguggaccccaacgccaaccccaacguggaccccaacgccaaccccaacguggaccccaacgccaaccccaacgccaaccccaacgccaaccccaacgccaaccccaacgccaaccccaacgccaaccccaacgccaaccccaacgccaaccccaacgccaaccccaacgccaaccccaacgccaaccccaacgccaaccccaacgccaaccccaacgccaaccccaacgccaaccccaacgccaaccccaacgccaaccccaacguggaccccaacgccaaccccaacgccaaccccaacgccaaccccaacgccaaccccaacgccaaccccaacgccaaccccaacgccaaccccaacgccaaccccaacgccaaccccaacgccaaccccaacgccaaccccaacgccaaccccaacgccaaccccaacgccaaccccaacgccaaccccaacgccaaccccaacgccaaccccaacgccaaccccaacaagaacaaccagggcaacggccagggccacaacaugcccaacgaccccaacagaaacguggacgagaacgccaacgccaacagcgccgugaagaacaacaacaacgaggagcccagcgacaagcacaucaaggaguaccugaacaagauccagaacagccugagcaccgaguggagccccugcagcgugaccugcggcaacggcauccaggugagaaucaagcccggcagcgccaacaagcccaaggacgagcuggacuacgccaacgacaucgagaagaagaucugcaagauggagaagugcagcagcguguucaacguggugaacagcagcaucggccugaucauggugcugagcuuccuguuccugaacugaggacuaguuauaagacugacuagcccgaugggccucccaacgggcccuccuccccuccuugcaccgagauuaaucaaaggcucuuuucagagccaccaaaaaaaaaaaaaaaaaaaaaaaaaaaaaaaaaaaaaaaaaaaaaaaaaaaaaaaaaaaaaaaaaaaaaaaaaaaaaaaaaaaaaaaaaaaaaaaaaaaaagaauu

SEQ ID NO: 7915 - RNA, 575 nt, Artificial Sequence
  mRNA Design i-3 (hSL-A100-N5) comprising derived and/or modified sequence from Pf(3D7)__XP_001351122.1__HsALB_Pf-CSP(93-192) (opt4)
aggagaaagcuuaccaugaagugggugaccuucaucagccugcuguuccuguucagcagcgccuacagcaagcugaagcagcccgccgacggcaaccccgaccccaacgccaaccccaacguggaccccaacgccaaccccaacguggaccccaacgccaaccccaacguggaccccaacgccaaccccaacgccaaccccaacgccaaccccaacgccaaccccaacgccaaccccaacgccaaccccaacgccaaccccaacgccaaccccaacgccaaccccaacgccaaccccaacgccaaccccaacgccaaccccaacgccaaccccaacgccaaccccaacgccaaccccaacgccaaccccugaggacuaguuauaagacugacuagcccgaugggccucccaacgggcccuccuccccuccuugcaccgagauuaaucaaaggcucuuuucagagccaccaaaaaaaaaaaaaaaaaaaaaaaaaaaaaaaaaaaaaaaaaaaaaaaaaaaaaaaaaaaaaaaaaaaaaaaaaaaaaaaaaaaaaaaaaaaaaaaaaaaaagaauu

SEQ ID NO: 7916 - RNA, 815 nt, Artificial Sequence
  mRNA Design i-3 (hSL-A100-N5) comprising derived and/or modified sequence from Pf(3D7)__XP_001351122.1__HsALB_Pf-CSP(93-272) (opt4)
aggagaaagcuuaccaugaagugggugaccuucaucagccugcuguuccuguucagcagcgccuacagcaagcugaagcagcccgccgacggcaaccccgaccccaacgccaaccccaacguggaccccaacgccaaccccaacguggaccccaacgccaaccccaacguggaccccaacgccaaccccaacgccaaccccaacgccaaccccaacgccaaccccaacgccaaccccaacgccaaccccaacgccaaccccaacgccaaccccaacgccaaccccaacgccaaccccaacgccaaccccaacgccaaccccaacgccaaccccaacgccaaccccaacgccaaccccaacgccaaccccaacgccaaccccaacguggaccccaacgccaaccccaacgccaaccccaacgccaaccccaacgccaaccccaacgccaaccccaacgccaaccccaacgccaaccccaacgccaaccccaacgccaaccccaacgccaaccccaacgccaaccccaacgccaaccccaacgccaaccccaacgccaaccccaacgccaaccccaacgccaaccccaacgccaaccccaacgccaaccccugaggacuaguuauaagacugacuagcccgaugggccucccaacgggcccuccuccccuccuugcaccgagauuaaucaaaggcucuuuucagagccaccaaaaaaaaaaaaaaaaaaaaaaaaaaaaaaaaaaaaaaaaaaaaaaaaaaaaaaaaaaaaaaaaaaaaaaaaaaaaaaaaaaaaaaaaaaaaaaaaaaaaagaauu

SEQ ID NO: 7917 - RNA, 1190 nt, Artificial Sequence
  mRNA Design i-3 (hSL-A100-N5) comprising derived and/or modified sequence from Pf(3D7)__XP_001351122.1__HsALB_Pf-CSP(93-397) (opt4)
aggagaaagcuuaccaugaagugggugaccuucaucagccugcuguuccuguucagcagcgccuacagcaagcugaagcagcccgccgacggcaaccccgaccccaacgccaaccccaacguggaccccaacgccaaccccaacguggaccccaacgccaaccccaacguggaccccaacgccaaccccaacgccaaccccaacgccaaccccaacgccaaccccaacgccaaccccaacgccaaccccaacgccaaccccaacgccaaccccaacgccaaccccaacgccaaccccaacgccaaccccaacgccaaccccaacgccaaccccaacgccaaccccaacgccaaccccaacgccaaccccaacgccaaccccaacguggaccccaacgccaaccccaacgccaaccccaacgccaaccccaacgccaaccccaacgccaaccccaacgccaaccccaacgccaaccccaacgccaaccccaacgccaaccccaacgccaaccccaacgccaaccccaacgccaaccccaacgccaaccccaacgccaaccccaacgccaaccccaacgccaaccccaacgccaaccccaacgccaaccccaacaagaacaaccagggcaacggccagggccacaacaugcccaacgaccccaacagaaacguggacgagaacgccaacgccaacagcgccgugaagaacaacaacaacgaggagcccagcgacaagcacaucaaggaguaccugaacaagauccagaacagccugagcaccgaguggagccccugcagcgugaccugcggcaacggcauccaggugagaaucaagcccggcagcgccaacaagcccaaggacgagcuggacuacgccaacgacaucgagaagaagaucugcaagauggagaagugcagcagcguguucaacguggugaacagcagcaucggccugaucauggugcugagcuuccuguuccugaacugaggacuaguuauaagacugacuagcccgaugggccucccaacgggcccuccuccccuccuugcaccgagauuaaucaaaggcucuuuucagagccaccaaaaaaaaaaaaaaaaaaaaaaaaaaaaaaaaaaaaaaaaaaaaaaaaaaaaaaaaaaaaaaaaaaaaaaaaaaaaaaaaaaaaaaaaaaaaaaaaaaaaagaauu

SEQ ID NO: 7918 - RNA, 560 nt, Artificial Sequence
  mRNA Design i-3 (hSL-A100-N5) comprising derived and/or modified sequence from Pf(3D7)__XP_001351122.1__HsALB_Pf-CSP(98-192) (opt4)
aggagaaagcuuaccaugaagugggugaccuucaucagccugcuguuccuguucagcagcgccuacagcgccgacggcaaccccgaccccaacgccaaccccaacguggaccccaacgccaaccccaacguggaccccaacgccaaccccaacguggaccccaacgccaaccccaacgccaaccccaacgccaaccccaacgccaaccccaacgccaaccccaacgccaaccccaacgccaaccccaacgccaaccccaacgccaaccccaacgccaaccccaacgccaaccccaacgccaaccccaacgccaaccccaacgccaaccccaacgccaaccccaacgccaaccccugaggacuaguuauaagacugacuagcccgaugggccucccaacgggcccuccuccccuccuugcaccgagauuaaucaaaggcucuuuucagagccaccaaaaaaaaaaaaaaaaaaaaaaaaaaaaaaaaaaaaaaaaaaaaaaaaaaaaaaaaaaaaaaaaaaaaaaaaaaaaaaaaaaaaaaaaaaaaaaaaaaaaagaauu

SEQ ID NO: 7919 - RNA, 800 nt, Artificial Sequence
  mRNA Design i-3 (hSL-A100-N5) comprising derived and/or modified sequence from Pf(3D7)__XP_001351122.1__HsALB_Pf-CSP(98-272) (opt4)
aggagaaagcuuaccaugaagugggugaccuucaucagccugcuguuccuguucagcagcgccuacagcgccgacggcaaccccgaccccaacgccaaccccaacguggaccccaacgccaaccccaacguggaccccaacgccaaccccaacguggaccccaacgccaaccccaacgccaaccccaacgccaaccccaacgccaaccccaacgccaaccccaacgccaaccccaacgccaaccccaacgccaaccccaacgccaaccccaacgccaaccccaacgccaaccccaacgccaaccccaacgccaaccccaacgccaaccccaacgccaaccccaacgccaaccccaacgccaaccccaacguggaccccaacgccaaccccaacgccaaccccaacgccaaccccaacgccaaccccaacgccaaccccaacgccaaccccaacgccaaccccaacgccaaccccaacgccaaccccaacgccaaccccaacgccaaccccaacgccaaccccaacgccaaccccaacgccaaccccaacgccaaccccaacgccaaccccaacgccaaccccaacgccaaccccugaggacuaguuauaagacugacuagcccgaugggccucccaacgggcccuccuccccuccuugcaccgagauuaaucaaaggcucuuuucagagccaccaaaaaaaaaaaaaaaaaaaaaaaaaaaaaaaaaaaaaaaaaaaaaaaaaaaaaaaaaaaaaaaaaaaaaaaaaaaaaaaaaaaaaaaaaaaaaaaaaaaaagaauu

SEQ ID NO: 7920 - RNA, 1106 nt, Artificial Sequence
  mRNA Design i-3 (hSL-A100-N5) comprising derived and/or modified sequence from Pf(3D7)__XP_001351122.1__HsALB_Pf-CSP(98-374) (opt4)
aggagaaagcuuaccaugaagugggugaccuucaucagccugcuguuccuguucagcagcgccuacagcgccgacggcaaccccgaccccaacgccaaccccaacguggaccccaacgccaaccccaacguggaccccaacgccaaccccaacguggaccccaacgccaaccccaacgccaaccccaacgccaaccccaacgccaaccccaacgccaaccccaacgccaaccccaacgccaaccccaacgccaaccccaacgccaaccccaacgccaaccccaacgccaaccccaacgccaaccccaacgccaaccccaacgccaaccccaacgccaaccccaacgccaaccccaacgccaaccccaacguggaccccaacgccaaccccaacgccaaccccaacgccaaccccaacgccaaccccaacgccaaccccaacgccaaccccaacgccaaccccaacgccaaccccaacgccaaccccaacgccaaccccaacgccaaccccaacgccaaccccaacgccaaccccaacgccaaccccaacgccaaccccaacgccaaccccaacgccaaccccaacgccaaccccaacaagaacaaccagggcaacggccagggccacaacaugcccaacgaccccaacagaaacguggacgagaacgccaacgccaacagcgccgugaagaacaacaacaacgaggagcccagcgacaagcacaucaaggaguaccugaacaagauccagaacagccugagcaccgaguggagccccugcagcgugaccugcggcaacggcauccaggugagaaucaagcccggcagcgccaacaagcccaaggacgagcuggacuacgccaacgacaucgagaagaagaucugcaagauggagaagugcugaggacuaguuauaagacugacuagcccgaugggccucccaacgggcccuccuccccuccuugcaccgagauuaaucaaaggcucuuuucagagccaccaaaaaaaaaaaaaaaaaaaaaaaaaaaaaaaaaaaaaaaaaaaaaaaaaaaaaaaaaaaaaaaaaaaaaaaaaaaaaaaaaaaaaaaaaaaaaaaaaaaaagaauu

SEQ ID NO: 7921 - RNA, 1175 nt, Artificial Sequence
  mRNA Design i-3 (hSL-A100-N5) comprising derived and/or modified sequence from Pf(3D7)__XP_001351122.1__HsALB_Pf-CSP(98-397) (opt4)
aggagaaagcuuaccaugaagugggugaccuucaucagccugcuguuccuguucagcagcgccuacagcgccgacggcaaccccgaccccaacgccaaccccaacguggaccccaacgccaaccccaacguggaccccaacgccaaccccaacguggaccccaacgccaaccccaacgccaaccccaacgccaaccccaacgccaaccccaacgccaaccccaacgccaaccccaacgccaaccccaacgccaaccccaacgccaaccccaacgccaaccccaacgccaaccccaacgccaaccccaacgccaaccccaacgccaaccccaacgccaaccccaacgccaaccccaacgccaaccccaacguggaccccaacgccaaccccaacgccaaccccaacgccaaccccaacgccaaccccaacgccaaccccaacgccaaccccaacgccaaccccaacgccaaccccaacgccaaccccaacgccaaccccaacgccaaccccaacgccaaccccaacgccaaccccaacgccaaccccaacgccaaccccaacgccaaccccaacgccaaccccaacgccaaccccaacaagaacaaccagggcaacggccagggccacaacaugcccaacgaccccaacagaaacguggacgagaacgccaacgccaacagcgccgugaagaacaacaacaacgaggagcccagcgacaagcacaucaaggaguaccugaacaagauccagaacagccugagcaccgaguggagccccugcagcgugaccugcggcaacggcauccaggugagaaucaagcccggcagcgccaacaagcccaaggacgagcuggacuacgccaacgacaucgagaagaagaucugcaagauggagaagugcagcagcguguucaacguggugaacagcagcaucggccugaucauggugcugagcuuccuguuccugaacugaggacuaguuauaagacugacuagcccgaugggccucccaacgggcccuccuccccuccuugcaccgagauuaaucaaaggcucuuuucagagccaccaaaaaaaaaaaaaaaaaaaaaaaaaaaaaaaaaaaaaaaaaaaaaaaaaaaaaaaaaaaaaaaaaaaaaaaaaaaaaaaaaaaaaaaaaaaaaaaaaaaaagaauu

SEQ ID NO: 7922 - RNA, 1502 nt, Artificial Sequence
  mRNA Design i-3 (hSL-A100-N5) comprising derived and/or modified sequence from Pf(3D7)__XP_001351122.1__HsALB_Pf-CSP(199-377)_L(PVTN)_HBsAg (opt4)
aggagaaagcuuaccaugaagugggugaccuucaucagccugcuguuccuguucagcagcgccuacagcgaccccaacgccaaccccaacgccaaccccaacgccaaccccaacgccaaccccaacgccaaccccaacgccaaccccaacgccaaccccaacgccaaccccaacgccaaccccaacgccaaccccaacgccaaccccaacgccaaccccaacgccaaccccaacgccaaccccaacgccaaccccaacgccaaccccaacgccaaccccaacgccaaccccaacaagaacaaccagggcaacggccagggccacaacaugcccaacgaccccaacagaaacguggacgagaacgccaacgccaacagcgccgugaagaacaacaacaacgaggagcccagcgacaagcacaucaaggaguaccugaacaagauccagaacagccugagcaccgaguggagccccugcagcgugaccugcggcaacggcauccaggugagaaucaagcccggcagcgccaacaagcccaaggacgagcuggacuacgccaacgacaucgagaagaagaucugcaagauggagaagugcagcagcgugcccgugaccaacauggagaacaucaccagcggcuuccugggcccccugcuggugcugcaggccggcuucuuccugcugaccagaauccugaccaucccccagagccuggacagcugguggaccagccugaacuuccugggcggcagccccgugugccugggccagaacagccagagccccaccagcaaccacagccccaccagcugcccccccaucugccccggcuacagauggaugugccugagaagauucaucaucuuccuguucauccugcugcugugccugaucuuccugcuggugcugcuggacuaccagggcaugcugcccgugugcccccugauccccggcagcaccaccaccaacaccggccccugcaagaccugcaccacccccgcccagggcaacagcauguuccccagcugcugcugcaccaagcccaccgacggcaacugcaccugcauccccauccccagcagcugggccuucgccaaguaccugugggagugggccagcgugagauucagcuggcugagccugcuggugcccuucgugcagugguucgugggccugagccccaccguguggcugagcgccaucuggaugaugugguacuggggccccagccuguacagcaucgugagccccuucaucccccugcugcccaucuucuucugccuguggguguacaucugaggacuaguuauaagacugacuagcccgaugggccucccaacgggcccuccuccccuccuugcaccgagauuaaucaaaggcucuuuucagagccaccaaaaaaaaaaaaaaaaaaaaaaaaaaaaaaaaaaaaaaaaaaaaaaaaaaaaaaaaaaaaaaaaaaaaaaaaaaaaaaaaaaaaaaaaaaaaaaaaaaaaagaauu

SEQ ID NO: 7923 - RNA, 1412 nt, Artificial Sequence
  mRNA Design i-3 (hSL-A100-N5) comprising derived and/or modified sequence from Pf(3D7)__XP_001351122.1__Pf-CSP (opt5)
aggagaaagcuuaccaugaugagaaagcuggccauccucagcguguccucuuuccuguuugucgaggcucuuuuccaggaauaccaaugcuauggcagcuccucuaacacccggguucugaaugagcucaacuacgacaaugccgggacaaaccuguauaaugaacuugagaugaacuacuauggaaaacaggaaaauugguacagccugaagaaaaacucccgcucucucggcgagaaugaugacgggaacaaugaggauaacgaaaagcugagaaaacccaagcacaagaaacugaagcagccugcggacggaaauccggaucccaacgcuaauccuaacguggaccccaacgccaauccuaacguggaucccaaugccaacccuaaugucgacccgaacgcuaaucccaacgccaauccuaacgcuaaucccaacgccaauccuaacgcgaaucccaacgccaacccgaaugcuaacccuaaugccaaccccaaugcuaacccuaaugccaaccccaaugcgaaccccaaugccaacccuaaugcuaacccgaaugccaaccccaacgcuaauccuaacgccaaucccaacgccaauccuaacguggaucccaaugcuaacccgaaugcgaacccuaaugccaaccccaaugcuaacccuaaugccaaccccaacgccaauccuaacgcuaaucccaacgccaauccgaacgcgaauccuaacgcuaaucccaacgccaaucccaacgccaauccuaacgcuaauccgaacgccaaucccaacgcuaacccuaaugccaaccccaaugcgaacccuaaugccaaccccaauaaaaacaaucagggcaacgggcaaggacauaauaugccuaacgaccccaaucggaacguugaugagaaugcuaacgccaacagcgcugugaagaauaacaauaacgaggaaccguccgacaaacacauuaaggaguaucucaauaagauccagaacagccugucuacggaaugguccccuuguagcgugaccugcggcaauggcauucagguccgcaucaaacccgggucugccaacaagccuaaagaugagcuugacuacgcgaaugacauugaaaagaaaaucuguaagauggagaaaugcuccagcguuuuuaacguggucaauucuuccaucggacugauuauggugcucagcuuccuguuucuuaacugaggacuaguuauaagacugacuagcccgaugggccucccaacgggcccuccuccccuccuugcaccgagauuaaucaaaggcucuuuucagagccaccaaaaaaaaaaaaaaaaaaaaaaaaaaaaaaaaaaaaaaaaaaaaaaaaaaaaaaaaaaaaaaaaaaaaaaaaaaaaaaaaaaaaaaaaaaaaaaaaaaaaagaauu

SEQ ID NO: 7924 - RNA, 1343 nt, Artificial Sequence
  mRNA Design i-3 (hSL-A100-N5) comprising derived and/or modified sequence from Pf(3D7)__XP_001351122.1__Pf-CSP(1-374) (opt5)
aggagaaagcuuaccaugaugagaaagcuggccauccucagcguguccucuuuccuguuugucgaggcucuuuuccaggaauaccaaugcuauggcagcuccucuaacacccggguucugaaugagcucaacuacgacaaugccgggacaaaccuguauaaugaacuugagaugaacuacuauggaaaacaggaaaauugguacagccugaagaaaaacucccgcucucucggcgagaaugaugacgggaacaaugaggauaacgaaaagcugagaaaacccaagcacaagaaacugaagcagccugcggacggaaauccggaucccaacgcuaauccuaacguggaccccaacgccaauccuaacguggaucccaaugccaacccuaaugucgacccgaacgcuaaucccaacgccaauccuaacgcuaaucccaacgccaauccuaacgcgaaucccaacgccaacccgaaugcuaacccuaaugccaaccccaaugcuaacccuaaugccaaccccaaugcgaaccccaaugccaacccuaaugcuaacccgaaugccaaccccaacgcuaauccuaacgccaaucccaacgccaauccuaacguggaucccaaugcuaacccgaaugcgaacccuaaugccaaccccaaugcuaacccuaaugccaaccccaacgccaauccuaacgcuaaucccaacgccaauccgaacgcgaauccuaacgcuaaucccaacgccaaucccaacgccaauccuaacgcuaauccgaacgccaaucccaacgcuaacccuaaugccaaccccaaugcgaacccuaaugccaaccccaauaaaaacaaucagggcaacgggcaaggacauaauaugccuaacgaccccaaucggaacguugaugagaaugcuaacgccaacagcgcugugaagaauaacaauaacgaggaaccguccgacaaacacauuaaggaguaucucaauaagauccagaacagccugucuacggaaugguccccuuguagcgugaccugcggcaauggcauucagguccgcaucaaacccgggucugccaacaagccuaaagaugagcuugacuacgcgaaugacauugaaaagaaaaucuguaagauggagaaaugcugaggacuaguuauaagacugacuagcccgaugggccucccaacgggcccuccuccccuccuugcaccgagauuaaucaaaggcucuuuucagagccaccaaaaaaaaaaaaaaaaaaaaaaaaaaaaaaaaaaaaaaaaaaaaaaaaaaaaaaaaaaaaaaaaaaaaaaaaaaaaaaaaaaaaaaaaaaaaaaaaaaaaagaauu

SEQ ID NO: 7925 - RNA, 1196 nt, Artificial Sequence
  mRNA Design i-3 (hSL-A100-N5) comprising derived and/or modified sequence from Pf(3D7)__XP_001351122.1__Pf-CSP(1-325) (opt5)
aggagaaagcuuaccaugaugagaaagcuggccauccucagcguguccucuuuccuguuugucgaggcucuuuuccaggaauaccaaugcuauggcagcuccucuaacacccggguucugaaugagcucaacuacgacaaugccgggacaaaccuguauaaugaacuugagaugaacuacuauggaaaacaggaaaauugguacagccugaagaaaaacucccgcucucucggcgagaaugaugacgggaacaaugaggauaacgaaaagcugagaaaacccaagcacaagaaacugaagcagccugcggacggaaauccggaucccaacgcuaauccuaacguggaccccaacgccaauccuaacguggaucccaaugccaacccuaaugucgacccgaacgcuaaucccaacgccaauccuaacgcuaaucccaacgccaauccuaacgcgaaucccaacgccaacccgaaugcuaacccuaaugccaaccccaaugcuaacccuaaugccaaccccaaugcgaaccccaaugccaacccuaaugcuaacccgaaugccaaccccaacgcuaauccuaacgccaaucccaacgccaauccuaacguggaucccaaugcuaacccgaaugcgaacccuaaugccaaccccaaugcuaacccuaaugccaaccccaacgccaauccuaacgcuaaucccaacgccaauccgaacgcgaauccuaacgcuaaucccaacgccaaucccaacgccaauccuaacgcuaauccgaacgccaaucccaacgcuaacccuaaugccaaccccaaugcgaacccuaaugccaaccccaauaaaaacaaucagggcaacgggcaaggacauaauaugccuaacgaccccaaucggaacguugaugagaaugcuaacgccaacagcgcugugaagaauaacaauaacgaggaaccguccgacaaacacauuaaggaguaucucaauaagauccagaacugaggacuaguuauaagacugacuagcccgaugggccucccaacgggcccuccuccccuccuugcaccgagauuaaucaaaggcucuuuucagagccaccaaaaaaaaaaaaaaaaaaaaaaaaaaaaaaaaaaaaaaaaaaaaaaaaaaaaaaaaaaaaaaaaaaaaaaaaaaaaaaaaaaaaaaaaaaaaaaaaaaaaagaauu

SEQ ID NO: 7926 - RNA, 1412 nt, Artificial Sequence
  mRNA Design i-3 (hSL-A100-N5) comprising derived and/or modified sequence from Pf(3D7)__XP_001351122.1__HsALB_Pf-CSP(19-397) (opt5)
aggagaaagcuuaccaugaagugggugaccuucaucagccugcucuuucuguucuccucugccuacagccuuuuucaggaguaucaaugcuacggcuccucuagcaacacaagaguccugaaugaacucaacuaugacaaugcugggacgaaccuguacaaugagcuugaaaugaacuauuacggaaaacaggagaauugguauucccugaagaaaaacucucggagccucggcgaaaaugaugacgggaacaaugaggauaacgagaagcugcgcaaacccaagcacaagaaacugaagcagccugccgacggaaauccggaucccaacgcgaauccuaacguugaccccaacgcuaauccuaacguggaucccaaugccaacccuaauguggacccgaacgccaaucccaacgcuaauccuaacgccaaucccaacgcuaauccuaacgccaaucccaacgcgaacccgaaugccaacccuaaugcuaaccccaaugccaacccuaaugcuaaccccaaugccaaccccaaugcgaacccuaaugccaacccgaaugcuaaccccaacgccaauccuaacgcuaaucccaacgccaauccuaacgucgaucccaaugccaacccgaaugcuaacccuaaugcgaaccccaaugccaacccuaaugcuaaccccaacgccaauccuaacgccaaucccaacgcuaauccgaacgccaauccuaacgcgaaucccaacgcuaaucccaacgccaauccuaacgccaauccgaacgcuaaucccaacgccaacccuaaugcuaaccccaaugccaacccuaaugcgaaccccaauaaaaacaaucagggcaacgggcaaggacauaauaugccuaacgaccccaauagaaacguggaugaaaaugccaacgcuaacuccgccguuaagaauaacaauaacgaggaaccgagcgacaaacacauuaaggaguaccucaauaagauccagaacucucuguccaccgaguggagcccuuguucugugacaugcggcaauggcauucagguccggaucaaacccggguccgcuaacaagccuaaagaugaacuugacuacgccaaugacauugagaagaaaaucuguaagauggaaaaaugcagcucuguguucaacguugucaauuccagcaucggacugauuauggugcucuccuuucuguuccuuaacugaggacuaguuauaagacugacuagcccgaugggccucccaacgggcccuccuccccuccuugcaccgagauuaaucaaaggcucuuuucagagccaccaaaaaaaaaaaaaaaaaaaaaaaaaaaaaaaaaaaaaaaaaaaaaaaaaaaaaaaaaaaaaaaaaaaaaaaaaaaaaaaaaaaaaaaaaaaaaaaaaaaaagaauu

SEQ ID NO: 7927 - RNA, 1430 nt, Artificial Sequence
  mRNA Design i-3 (hSL-A100-N5) comprising derived and/or modified sequence from Pf(3D7)__XP_001351122.1__HsIns-iso1_Pf-CSP(19-397) (opt5)
aggagaaagcuuaccauggcccuguggaugagacuccugccccuucuggcucuccuggcccuuuggggcccugacccggcggcugcccuguuccaggaguaccaaugcuaugggagcuccucuaacacccgggugcucaaugaacugaacuacgauaaugccggaacaaaccuguauaaugagcucgaaaugaacuacuauggcaagcaggagaauugguacagccugaaaaagaacucccgcucucuuggggaaaaugacgauggaaacaaugaggacaacgagaaacugagaaagcccaaacacaagaagcucaaacagccugcugauggcaaucccgacccuaacgccaaucccaacgucgauccuaacgcuaauccgaacguugaccccaaugccaacccuaauguggaucccaacgcgaauccuaacgccaaucccaacgcuaauccgaacgccaauccuaacgcuaaucccaacgccaacccuaaugcgaaccccaaugccaaccccaaugcuaacccuaaugccaacccgaaugcuaaccccaaugccaacccuaaugccaaccccaaugcuaacccuaacgcgaaucccaacgccaauccgaacgcuaauccuaacguggaccccaaugccaacccuaaugccaaccccaaugcuaacccuaaugccaaccccaaugcgaacccgaacgcuaauccuaacgccaaucccaacgccaaucccaacgcuaauccuaacgccaauccgaacgcuaaucccaacgccaauccuaacgcgaaucccaacgccaauccuaacgcuaaccccaaugccaacccuaaugcuaaccccaaugccaacccgaauaagaacaaucaggggaacggacaaggccauaauaugccuaacgaucccaaucggaacgucgacgaaaaugcgaacgccaacagcgcugugaaaaauaacaauaacgaggaaccuuccgauaagcacaucaaagaguaucugaauaagauucagaacucucuuagcacggaguggucccccuguagcguuaccugcggcaaugggauccaggugcgcauuaagccgggaucugccaacaaaccuaaggacgaacuggacuacgcuaaugauaucgagaaaaagauuuguaaaauggaaaagugcuccagcgucuuuaacgugguuaauucuuccaucggccucaucauggugcugagcuuccuguuucucaacugaggacuaguuauaagacugacuagcccgaugggccucccaacgggcccuccuccccuccuugcaccgagauuaaucaaaggcucuuuucagagccaccaaaaaaaaaaaaaaaaaaaaaaaaaaaaaaaaaaaaaaaaaaaaaaaaaaaaaaaaaaaaaaaaaaaaaaaaaaaaaaaaaaaaaaaaaaaaaaaaaaaaagaauu

SEQ ID NO: 7928 - RNA, 1409 nt, Artificial Sequence
  mRNA Design i-3 (hSL-A100-N5) comprising derived and/or modified sequence from Pf(3D7)__XP_001351122.1__HsSPARC_Pf-CSP(19-397) (opt5)
aggagaaagcuuaccaugagagccuggaucuucuuucugcucugccuggcuggccgggcccuugcgcuguuccaggaguaccaauguuaugggagcuccucuaacacccgcgugcucaaugaacugaacuacgacaaugcuggaacaaaccuuuauaaugagcuggaaaugaacuacuauggcaagcaggagaauugguacagccucaaaaagaacuccagaucucugggggaaaaugaugacggaaacaaugaggauaacgagaaacugcggaagcccaaacacaagaagcucaaacagccugccgacggcaauccggaucccaacgccaauccuaacgucgaccccaacgcuaauccuaacguugaucccaaugccaacccuaauguggacccgaacgcuaaucccaacgccaauccuaacgcgaaucccaacgccaauccuaacgcuaaucccaacgccaacccgaaugcuaacccuaaugccaaccccaaugcgaacccuaaugccaaccccaaugcuaaccccaaugccaacccuaaugcuaacccgaaugccaaccccaacgccaauccuaacgcuaaucccaacgcgaauccuaacguggaucccaaugccaacccgaaugcuaacccuaaugccaaccccaaugccaacccuaaugcuaaccccaacgccaauccuaacgcgaaucccaacgcuaauccgaacgccaauccuaacgccaaucccaacgcuaaucccaacgccaauccuaacgcuaauccgaacgccaaucccaacgcgaacccuaaugccaaccccaaugcuaacccuaaugccaaccccaauaagaacaaucaggggaacggacaaggccauaauaugccuaacgaccccaaucgcaacgucgaugaaaaugcuaacgccaacagcgcggugaaaaauaacaauaacgaggaaccguccgacaagcacauuaaagaguaucugaauaagauccagaacucucuuagcacggagugguccccuugcagcguuaccuguggcaaugggauucaggugagaaucaagcccggaucugccaacaaaccuaaggaugaacuggacuacgcuaaugacauugagaaaaagaucugcaaaauggaaaaguguuccagcgucuuuaacgugguuaauucuuccaucggccucauuauggugcugagcuuccuuuuucugaacugaggacuaguuauaagacugacuagcccgaugggccucccaacgggcccuccuccccuccuugcaccgagauuaaucaaaggcucuuuucagagccaccaaaaaaaaaaaaaaaaaaaaaaaaaaaaaaaaaaaaaaaaaaaaaaaaaaaaaaaaaaaaaaaaaaaaaaaaaaaaaaaaaaaaaaaaaaaaaaaaaaaaagaauu

SEQ ID NO: 7929 - RNA, 1412 nt, Artificial Sequence
  mRNA Design i-3 (hSL-A100-N5) comprising derived and/or modified sequence from Pf(3D7)__XP_001351122.1__IgE_Pf-CSP(19-397) (opt5)
aggagaaagcuuaccauggacuggaccuggauccuguuccucguggccgcugccacaagaguccacagccuguuucaggaguaccaaugcuauggcuccucuagcaacacgcggguucuuaaugaacugaacuacgauaaugcggggaccaaccucuauaaugagcuggaaaugaacuacuauggaaagcaggagaauugguacucccuuaaaaagaacucucgcagccugggcgaaaaugacgaugggaacaaugaggacaacgagaaacucagaaagcccaaacauaagaagcugaaacagccugcugauggaaauccggaccccaacgccaauccuaacguggaucccaacgccaauccuaacguggaccccaaugcuaacccuaaugucgauccgaacgccaaucccaacgcuaauccuaacgccaaucccaacgcgaauccuaacgccaaucccaacgcuaacccgaaugccaacccuaaugcuaaccccaaugccaacccuaaugcgaaccccaaugccaaccccaaugcuaacccuaaugccaacccgaaugcuaaccccaacgccaauccuaacgccaaucccaacgcuaauccuaacguggaccccaaugcgaacccgaaugccaacccuaaugcuaaccccaaugccaacccuaaugccaaccccaacgcuaauccuaacgccaaucccaacgcgaauccgaacgcuaauccuaacgccaaucccaacgccaaucccaacgcuaauccuaacgccaauccgaacgcuaaucccaacgccaacccuaaugcgaaccccaaugccaacccuaaugcuaaccccaauaagaacaaucagggcaacgggcaaggacacaauaugccuaacgaucccaaucggaacguugacgaaaaugccaacgcuaacuccgccgugaaaaauaacaauaacgaggaaccgucugauaagcauauuaaagaguaucugaauaagauccagaacagccucuccacagaguggagcccuuguucugugaccugcggcaauggcauucagguccgcaucaagcccggguccgcgaacaaaccuaaggacgaacuggacuacgccaaugauauugagaaaaagaucuguaaaauggaaaagugcagcucuguuuucaacguggucaauuccagcaucggacuuauuauggugcugucuuuucucuuccugaacugaggacuaguuauaagacugacuagcccgaugggccucccaacgggcccuccuccccuccuugcaccgagauuaaucaaaggcucuuuucagagccaccaaaaaaaaaaaaaaaaaaaaaaaaaaaaaaaaaaaaaaaaaaaaaaaaaaaaaaaaaaaaaaaaaaaaaaaaaaaaaaaaaaaaaaaaaaaaaaaaaaaaagaauu

SEQ ID NO: 7930 - RNA, 1577 nt, Artificial Sequence
  mRNA Design i-3 (hSL-A100-N5) comprising derived and/or modified sequence from Pf(3D7)__XP_001351122.1__Pf-CSP_L(G4SG4)_TM domain HA (opt5)
aggagaaagcuuaccaugaugagaaagcuggccauccucagcguguccucuuuccuguuugucgaggcucuuuuccaggaauaccaaugcuauggcagcuccucuaacacccggguucugaaugagcucaacuacgacaaugccgggacaaaccuguauaaugaacuugagaugaacuacuauggaaaacaggaaaauugguacagccugaagaaaaacucccgcucucucggcgagaaugaugacgggaacaaugaggauaacgaaaagcugagaaaacccaagcacaagaaacugaagcagccugcggacggaaauccggaucccaacgcuaauccuaacguggaccccaacgccaauccuaacguggaucccaaugccaacccuaaugucgacccgaacgcuaaucccaacgccaauccuaacgcuaaucccaacgccaauccuaacgcgaaucccaacgccaacccgaaugcuaacccuaaugccaaccccaaugcuaacccuaaugccaaccccaaugcgaaccccaaugccaacccuaaugcuaacccgaaugccaaccccaacgcuaauccuaacgccaaucccaacgccaauccuaacguggaucccaaugcuaacccgaaugcgaacccuaaugccaaccccaaugcuaacccuaaugccaaccccaacgccaauccuaacgcuaaucccaacgccaauccgaacgcgaauccuaacgcuaaucccaacgccaaucccaacgccaauccuaacgcuaauccgaacgccaaucccaacgcuaacccuaaugccaaccccaaugcgaacccuaaugccaaccccaauaaaaacaaucagggcaacgggcaaggacauaauaugccuaacgaccccaaucggaacguugaugagaaugcuaacgccaacagcgcugugaagaauaacaauaacgaggaaccguccgacaaacacauuaaggaguaucucaauaagauccagaacagccugucuacggaaugguccccuuguagcgugaccugcggcaauggcauucagguccgcaucaaacccgggucugccaacaagccuaaagaugagcuugacuacgcgaaugacauugaaaagaaaaucuguaagauggagaaaugcuccagcguuuuuaacguggucaauucuuccaucggacugauuauggugcucagcuuccuguuucuuaacggcgggggaggcuccgggggaggcggcaagcuggaaucuacaagaaucuaccagauucucgccaucuauagcaccguggcuuccagccugguccugguugugucucucggggccauuuccuucuggauguguagcaauggaucucugcaaugccggaucuguauuugaggacuaguuauaagacugacuagcccgaugggccucccaacgggcccuccuccccuccuugcaccgagauuaaucaaaggcucuuuucagagccaccaaaaaaaaaaaaaaaaaaaaaaaaaaaaaaaaaaaaaaaaaaaaaaaaaaaaaaaaaaaaaaaaaaaaaaaaaaaaaaaaaaaaaaaaaaaaaaaaaaaaagaauu

SEQ ID NO: 7931 - RNA, 1451 nt, Artificial Sequence
  mRNA Design i-3 (hSL-A100-N5) comprising derived and/or modified sequence from Pf(3D7)__XP_001351122.1__Pf-CSP(199-377)_L(PVTN)_HBsAg (opt5)
aggagaaagcuuaccauggaccccaacgccaauccuaacgcuaauccgaacgccaaucccaacgcgaauccuaacgcuaaucccaacgccaauccuaacgccaaucccaacgcuaauccuaacgccaacccgaaugcuaaccccaaugccaacccuaaugcgaaccccaaugccaacccuaaugcuaaccccaaugccaacccgaaugcuaacccuaaugccaaccccaacgcgaauccuaacaagaauaaccagggcaaugggcaaggacacaacaugcccaaugaucccaacagaaauguggacgagaacgccaaugcuaacagcgccgucaaaaauaacaauaacgaggaaccuuccgauaagcauaucaaagaauaccugaacaagauucaaaauucucucagcaccgagugguccccgugcucuguuacauguggcaacgggauccaggugcggauuaaacccggaagcgcuaauaagccuaaggacgaacuggauuaugccaacgacaucgagaaaaagauuugcaaaauggagaaguguuccucugugcccgucacgaauauggaaaacaucaccagcggcuuccuugggccucugcucgugcugcaggccggauuuuuccuucugacacgcauccucaccauuccccagucccuggauagcugguggacaucucugaauuuucucggcggcuccccgguuugccuggggcagaacagccagucuccuaccuccaaucacagccccacaucuuguccucccaucugcccuggauacagauggaugugucuucggcgcuucauuaucuuucuguucauucuccugcuuugccugaucuuucuccuggugcugcucgacuaucagggcaugcugcccgucuguccgcuuauuccuggguccaccacgaccaacacaggacccugcaaaaccuguacaacccccgcucaaggcaauagcauguucccuuccugcugcuguacgaagccgacagaugggaacugcaccuguauccccaucccuucuagcugggcguuugccaaguaccugugggagugggcuuccgugagauucagcuggcucucucugcuuguucccuuugugcagugguucgucggacuguccccuacaguguggcucagcgccauuuggaugaugugguauuggggccccucucuguacagcaucguguccccuuuuauuccccugcucccgaucuucuucugccugugggucuauauuugaggacuaguuauaagacugacuagcccgaugggccucccaacgggcccuccuccccuccuugcaccgagauuaaucaaaggcucuuuucagagccaccaaaaaaaaaaaaaaaaaaaaaaaaaaaaaaaaaaaaaaaaaaaaaaaaaaaaaaaaaaaaaaaaaaaaaaaaaaaaaaaaaaaaaaaaaaaaaaaaaaaaagaauu

SEQ ID NO: 7932 - RNA, 1493 nt, Artificial Sequence
  mRNA Design i-3 (hSL-A100-N5) comprising derived and/or modified sequence from Pf(3D7)__XP_001351122.1__Pf-CSP(199-387)_L(PVTN)_HBsAg (opt5)
aggagaaagcuuaccaugauggcccccgacccuaacgcuaauccgaacgccaaucccaacgcgaauccuaacgcuaaucccaacgccaauccuaacgccaaucccaacgcuaauccuaacgccaauccgaacgcuaaccccaaugccaacccuaaugcgaaccccaaugccaacccuaaugcuaaccccaaugccaacccgaaugcuaacccuaaugccaaccccaaugcgaacccuaacgccaaucccaacaagaauaaccagggcaaugggcaaggacacaacaugcccaaugauccuaacagaaauguggacgagaacgcuaaugccaacagcgcugucaaaaauaacaauaacgaggaaccguccgauaagcauaucaaagaauaccugaacaagauucaaaauucucucagcaccgaguggucccccugcucuguuacauguggcaacgggauccaggugcggauuaaaccuggaagcgccaauaagcccaaggacgaacuggauuaugccaacgacaucgagaaaaagauuugcaaaauggagaaguguuccucuguguucaaugucgugaacagcuccaucggccuugggccuguuacgaauauggaaaacaucaccagcggauuucugggcccccuccuggugcuucaggcuggcuucuuucugcucacacgcauucugaccaucccgcagucucuggauuccugguggacaagccucaauuuccuugggggaucuccugucugccugggccagaacucccagagccccaccucuaaucacuccccuacaagcugucccccuauuugccccggguacagauggaugugucugcggcgcuuuaucauuuuccucuuuauccugcuucugugccucauuuuccugcuggugcuccuggacuaucagggaaugcuuccgguuuguccucugauccccggcuccaccacgaccaacacagggcccugcaaaaccuguacaaccccugcgcaaggaaauucuauguuuccgagcugcugcuguacgaagcccacagauggcaacugcaccuguaucccuauucccuccagcugggccuucgcuaaguaccucugggagugggccucugugagauuuuccuggcugagccuucuggucccuuucgugcagugguuugugggccucucucccacagucuggcugagcgccaucuggaugaugugguauugggggccuucccuguacucuauuguuagccccuucaucccgcuccugccuauuuucuuuugccuuuggguguauaucugaggacuaguuauaagacugacuagcccgaugggccucccaacgggcccuccuccccuccuugcaccgagauuaaucaaaggcucuuuucagagccaccaaaaaaaaaaaaaaaaaaaaaaaaaaaaaaaaaaaaaaaaaaaaaaaaaaaaaaaaaaaaaaaaaaaaaaaaaaaaaaaaaaaaaaaaaaaaaaaaaaaaagaauu

SEQ ID NO: 7933 - RNA, 677 nt, Artificial Sequence
  mRNA Design i-3 (hSL-A100-N5) comprising derived and/or modified sequence from Pf(3D7)__XP_001351122.1__HsALB_Pf-CSP(19-152) (opt5)
aggagaaagcuuaccaugaagugggugaccuucaucagccugcucuuucuguucuccucugccuacagccuuuuucaggaguaucaaugcuacggcuccucuagcaacacaagaguccugaaugaacucaacuaugacaaugcugggacgaaccuguacaaugagcuugaaaugaacuauuacggaaaacaggagaauugguauucccugaagaaaaacucucggagccucggcgaaaaugaugacgggaacaaugaggauaacgagaagcugcgcaaacccaagcacaagaaacugaagcagccugccgacggaaauccggaucccaacgcgaauccuaacguugaccccaacgcuaauccuaacguggaucccaaugccaacccuaauguggacccgaacgccaaucccaacgcuaauccuaacgccaaucccaacgcuaauccuaacgccaaucccaacgcgaacccgugaggacuaguuauaagacugacuagcccgaugggccucccaacgggcccuccuccccuccuugcaccgagauuaaucaaaggcucuuuucagagccaccaaaaaaaaaaaaaaaaaaaaaaaaaaaaaaaaaaaaaaaaaaaaaaaaaaaaaaaaaaaaaaaaaaaaaaaaaaaaaaaaaaaaaaaaaaaaaaaaaaaaagaauu

SEQ ID NO: 7934 - RNA, 797 nt, Artificial Sequence
  mRNA Design i-3 (hSL-A100-N5) comprising derived and/or modified sequence from Pf(3D7)__XP_001351122.1__HsALB_Pf-CSP(19-192) (opt5)
aggagaaagcuuaccaugaagugggugaccuucaucagccugcucuuucuguucuccucugccuacagccuuuuucaggaguaucaaugcuacggcuccucuagcaacacaagaguccugaaugaacucaacuaugacaaugcugggacgaaccuguacaaugagcuugaaaugaacuauuacggaaaacaggagaauugguauucccugaagaaaaacucucggagccucggcgaaaaugaugacgggaacaaugaggauaacgagaagcugcgcaaacccaagcacaagaaacugaagcagccugccgacggaaauccggaucccaacgcgaauccuaacguugaccccaacgcuaauccuaacguggaucccaaugccaacccuaauguggacccgaacgccaaucccaacgcuaauccuaacgccaaucccaacgcuaauccuaacgccaaucccaacgcgaacccgaaugccaacccuaaugcuaaccccaaugccaacccuaaugcuaaccccaaugccaaccccaaugcgaacccuaaugccaacccgaaugcuaaccccaacgccaauccuaacgcuaaucccugaggacuaguuauaagacugacuagcccgaugggccucccaacgggcccuccuccccuccuugcaccgagauuaaucaaaggcucuuuucagagccaccaaaaaaaaaaaaaaaaaaaaaaaaaaaaaaaaaaaaaaaaaaaaaaaaaaaaaaaaaaaaaaaaaaaaaaaaaaaaaaaaaaaaaaaaaaaaaaaaaaaaagaauu

SEQ ID NO: 7935 - RNA, 1037 nt, Artificial Sequence
  mRNA Design i-3 (hSL-A100-N5) comprising derived and/or modified sequence from Pf(3D7)__XP_001351122.1__HsALB_Pf-CSP(19-272) (opt5)
aggagaaagcuuaccaugaagugggugaccuucaucagccugcucuuucuguucuccucugccuacagccuuuuucaggaguaucaaugcuacggcuccucuagcaacacaagaguccugaaugaacucaacuaugacaaugcugggacgaaccuguacaaugagcuugaaaugaacuauuacggaaaacaggagaauugguauucccugaagaaaaacucucggagccucggcgaaaaugaugacgggaacaaugaggauaacgagaagcugcgcaaacccaagcacaagaaacugaagcagccugccgacggaaauccggaucccaacgcgaauccuaacguugaccccaacgcuaauccuaacguggaucccaaugccaacccuaauguggacccgaacgccaaucccaacgcuaauccuaacgccaaucccaacgcuaauccuaacgccaaucccaacgcgaacccgaaugccaacccuaaugcuaaccccaaugccaacccuaaugcuaaccccaaugccaaccccaaugcgaacccuaaugccaacccgaaugcuaaccccaacgccaauccuaacgcuaaucccaacgccaauccuaacgucgaucccaaugccaacccgaaugcuaacccuaaugcgaaccccaaugccaacccuaaugcuaaccccaacgccaauccuaacgccaaucccaacgcuaauccgaacgccaauccuaacgcgaaucccaacgcuaaucccaacgccaauccuaacgccaauccgaacgcuaaucccaacgccaacccuaaugcuaaccccaaugccaacccuaaugcgaaccccugaggacuaguuauaagacugacuagcccgaugggccucccaacgggcccuccuccccuccuugcaccgagauuaaucaaaggcucuuuucagagccaccaaaaaaaaaaaaaaaaaaaaaaaaaaaaaaaaaaaaaaaaaaaaaaaaaaaaaaaaaaaaaaaaaaaaaaaaaaaaaaaaaaaaaaaaaaaaaaaaaaaaagaauu

SEQ ID NO: 7936 - RNA, 1199 nt, Artificial Sequence
  mRNA Design i-3 (hSL-A100-N5) comprising derived and/or modified sequence from Pf(3D7)__XP_001351122.1__HsALB_Pf-CSP(19-272)_L(AAY)_Pf-CSP(310-3 27)_L(AAY)_Pf-CSP(346-375) (opt5)
aggagaaagcuuaccaugaagugggugaccuucaucagccugcucuuucuguucuccucugccuacagccuuuuucaggaguaucaaugcuacggcuccucuagcaacacaagaguccugaaugaacucaacuaugacaaugcugggacgaaccuguacaaugagcuugaaaugaacuauuacggaaaacaggagaauugguauucccugaagaaaaacucucggagccucggcgaaaaugaugacgggaacaaugaggauaacgagaagcugcgcaaacccaagcacaagaaacugaagcagccugccgacggaaauccggaucccaacgcgaauccuaacguugaccccaacgcuaauccuaacguggaucccaaugccaacccuaauguggacccgaacgccaaucccaacgcuaauccuaacgccaaucccaacgcuaauccuaacgccaaucccaacgcgaacccgaaugccaacccuaaugcuaaccccaaugccaacccuaaugcuaaccccaaugccaaccccaaugcgaacccuaaugccaacccgaaugcuaaccccaacgccaauccuaacgcuaaucccaacgccaauccuaacgucgaucccaaugccaacccgaaugcuaacccuaaugcgaaccccaaugccaacccuaaugcuaaccccaacgccaauccuaacgccaaucccaacgcuaauccgaacgccaauccuaacgcgaaucccaacgcuaaucccaacgccaauccuaacgccaauccgaacgcuaaucccaacgccaacccuaaugcuaaccccaaugccaacccuaaugcgaaccccgccgcuuacgaaccuuccgacaaacauauuaaggaguaccucaauaaaauccagaacagccuggccgcuuauauuaagcccggcucugccaauaagccgaaagaugaacuugacuacgcgaacgauaucgagaagaaaauuuguaagauggagaaaugcuccugaggacuaguuauaagacugacuagcccgaugggccucccaacgggcccuccuccccuccuugcaccgagauuaaucaaaggcucuuuucagagccaccaaaaaaaaaaaaaaaaaaaaaaaaaaaaaaaaaaaaaaaaaaaaaaaaaaaaaaaaaaaaaaaaaaaaaaaaaaaaaaaaaaaaaaaaaaaaaaaaaaaaagaauu

SEQ ID NO: 7937 - RNA, 1160 nt, Artificial Sequence
  mRNA Design i-3 (hSL-A100-N5) comprising derived and/or modified sequence from Pf(3D7)__XP_001351122.1__HsALB_Pf-CSP(19-272)_L(AAY)_Pf-CSP(346-3 65)_L(AAY)_P2 (opt5)
aggagaaagcuuaccaugaagugggugaccuucaucagccugcucuuucuguucuccucugccuacagccuuuuucaggaguaucaaugcuacggcuccucuagcaacacaagaguccugaaugaacucaacuaugacaaugcugggacgaaccuguacaaugagcuugaaaugaacuauuacggaaaacaggagaauugguauucccugaagaaaaacucucggagccucggcgaaaaugaugacgggaacaaugaggauaacgagaagcugcgcaaacccaagcacaagaaacugaagcagccugccgacggaaauccggaucccaacgcgaauccuaacguugaccccaacgcuaauccuaacguggaucccaaugccaacccuaauguggacccgaacgccaaucccaacgcuaauccuaacgccaaucccaacgcuaauccuaacgccaaucccaacgcgaacccgaaugccaacccuaaugcuaaccccaaugccaacccuaaugcuaaccccaaugccaaccccaaugcgaacccuaaugccaacccgaaugcuaaccccaacgccaauccuaacgcuaaucccaacgccaauccuaacgucgaucccaaugccaacccgaaugcuaacccuaaugcgaaccccaaugccaacccuaaugcuaaccccaacgccaauccuaacgccaaucccaacgcuaauccgaacgccaauccuaacgcgaaucccaacgcuaaucccaacgccaauccuaacgccaauccgaacgcuaaucccaacgccaacccuaaugcuaaccccaaugccaacccuaaugcgaaccccgccgcuuacauuaaaccuggcuccgccaauaagcccaaagacgaacucgauuacgcuaacgacaucgaggccgcguaucaguacauuaaggccaauagcaaguucaucgggauuaccgaacugugaggacuaguuauaagacugacuagcccgaugggccucccaacgggcccuccuccccuccuugcaccgagauuaaucaaaggcucuuuucagagccaccaaaaaaaaaaaaaaaaaaaaaaaaaaaaaaaaaaaaaaaaaaaaaaaaaaaaaaaaaaaaaaaaaaaaaaaaaaaaaaaaaaaaaaaaaaaaaaaaaaaaagaauu

SEQ ID NO: 7938 - RNA, 1154 nt, Artificial Sequence
  mRNA Design i-3 (hSL-A100-N5) comprising derived and/or modified sequence from Pf(3D7)__XP_001351122.1__HsALB_Pf-CSP(19-272)_L(AAY)_Pf-CSP(346-3 65)_L(AAY)_PADRE (opt5)
aggagaaagcuuaccaugaagugggugaccuucaucagccugcucuuucuguucuccucugccuacagccuuuuucaggaguaucaaugcuacggcuccucuagcaacacaagaguccugaaugaacucaacuaugacaaugcugggacgaaccuguacaaugagcuugaaaugaacuauuacggaaaacaggagaauugguauucccugaagaaaaacucucggagccucggcgaaaaugaugacgggaacaaugaggauaacgagaagcugcgcaaacccaagcacaagaaacugaagcagccugccgacggaaauccggaucccaacgcgaauccuaacguugaccccaacgcuaauccuaacguggaucccaaugccaacccuaauguggacccgaacgccaaucccaacgcuaauccuaacgccaaucccaacgcuaauccuaacgccaaucccaacgcgaacccgaaugccaacccuaaugcuaaccccaaugccaacccuaaugcuaaccccaaugccaaccccaaugcgaacccuaaugccaacccgaaugcuaaccccaacgccaauccuaacgcuaaucccaacgccaauccuaacgucgaucccaaugccaacccgaaugcuaacccuaaugcgaaccccaaugccaacccuaaugcuaaccccaacgccaauccuaacgccaaucccaacgcuaauccgaacgccaauccuaacgcgaaucccaacgcuaaucccaacgccaauccuaacgccaauccgaacgcuaaucccaacgccaacccuaaugcuaaccccaaugccaacccuaaugcgaaccccgccgcuuacauuaaaccuggcuccgccaauaagcccaaagacgaacucgauuacgcuaacgacaucgaggccgcguaugccaaguucguggcugccuggacccugaaggcugccgccugaggacuaguuauaagacugacuagcccgaugggccucccaacgggcccuccuccccuccuugcaccgagauuaaucaaaggcucuuuucagagccaccaaaaaaaaaaaaaaaaaaaaaaaaaaaaaaaaaaaaaaaaaaaaaaaaaaaaaaaaaaaaaaaaaaaaaaaaaaaaaaaaaaaaaaaaaaaaaaaaaaaaagaauu

SEQ ID NO: 7939 - RNA, 1211 nt, Artificial Sequence
  mRNA Design i-3 (hSL-A100-N5) comprising derived and/or modified sequence from Pf(3D7)__XP_001351122.1__HsALB_Pf-CSP(19-272)_L(G4S)_Pf-CSP(310-3 27)_L(G4S)_Pf-CSP(346-375) (opt5)
aggagaaagcuuaccaugaagugggugaccuucaucagccugcucuuucuguucuccucugccuacagccuuuuucaggaguaucaaugcuacggcuccucuagcaacacaagaguccugaaugaacucaacuaugacaaugcugggacgaaccuguacaaugagcuugaaaugaacuauuacggaaaacaggagaauugguauucccugaagaaaaacucucggagccucggcgaaaaugaugacgggaacaaugaggauaacgagaagcugcgcaaacccaagcacaagaaacugaagcagccugccgacggaaauccggaucccaacgcgaauccuaacguugaccccaacgcuaauccuaacguggaucccaaugccaacccuaauguggacccgaacgccaaucccaacgcuaauccuaacgccaaucccaacgcuaauccuaacgccaaucccaacgcgaacccgaaugccaacccuaaugcuaaccccaaugccaacccuaaugcuaaccccaaugccaaccccaaugcgaacccuaaugccaacccgaaugcuaaccccaacgccaauccuaacgcuaaucccaacgccaauccuaacgucgaucccaaugccaacccgaaugcuaacccuaaugcgaaccccaaugccaacccuaaugcuaaccccaacgccaauccuaacgccaaucccaacgcuaauccgaacgccaauccuaacgcgaaucccaacgcuaaucccaacgccaauccuaacgccaauccgaacgcuaaucccaacgccaacccuaaugcuaaccccaaugccaacccuaaugcgaaccccggcgggggaggcuccgaaccuagcgacaaacauauuaaggaguaccucaauaaaauccagaacucucugggcgggggaggcuccauuaagcccgggagcgccaauaagccgaaagaugaacuugacuacgcuaacgauaucgagaagaaaauuuguaagauggagaaaugcucuugaggacuaguuauaagacugacuagcccgaugggccucccaacgggcccuccuccccuccuugcaccgagauuaaucaaaggcucuuuucagagccaccaaaaaaaaaaaaaaaaaaaaaaaaaaaaaaaaaaaaaaaaaaaaaaaaaaaaaaaaaaaaaaaaaaaaaaaaaaaaaaaaaaaaaaaaaaaaaaaaaaaaagaauu

SEQ ID NO: 7940 - RNA, 1196 nt, Artificial Sequence
  mRNA Design i-3 (hSL-A100-N5) comprising derived and/or modified sequence from Pf(3D7)__XP_001351122.1__HsALB_Pf-CSP(19-272)_L(G4S)_Pf-CSP(310-3 27)_Pf-CSP(346-375) (opt5)
aggagaaagcuuaccaugaagugggugaccuucaucagccugcucuuucuguucuccucugccuacagccuuuuucaggaguaucaaugcuacggcuccucuagcaacacaagaguccugaaugaacucaacuaugacaaugcugggacgaaccuguacaaugagcuugaaaugaacuauuacggaaaacaggagaauugguauucccugaagaaaaacucucggagccucggcgaaaaugaugacgggaacaaugaggauaacgagaagcugcgcaaacccaagcacaagaaacugaagcagccugccgacggaaauccggaucccaacgcgaauccuaacguugaccccaacgcuaauccuaacguggaucccaaugccaacccuaauguggacccgaacgccaaucccaacgcuaauccuaacgccaaucccaacgcuaauccuaacgccaaucccaacgcgaacccgaaugccaacccuaaugcuaaccccaaugccaacccuaaugcuaaccccaaugccaaccccaaugcgaacccuaaugccaacccgaaugcuaaccccaacgccaauccuaacgcuaaucccaacgccaauccuaacgucgaucccaaugccaacccgaaugcuaacccuaaugcgaaccccaaugccaacccuaaugcuaaccccaacgccaauccuaacgccaaucccaacgcuaauccgaacgccaauccuaacgcgaaucccaacgcuaaucccaacgccaauccuaacgccaauccgaacgcuaaucccaacgccaacccuaaugcuaaccccaaugccaacccuaaugcgaaccccggcgggggaggcuccgaaccuagcgacaaacauauuaaggaguaccucaauaaaauccagaacucucugauuaagcccggcuccgccaauaagccgaaagaugaacuugacuacgcuaacgauaucgagaagaaaauuuguaagauggagaaaugcagcugaggacuaguuauaagacugacuagcccgaugggccucccaacgggcccuccuccccuccuugcaccgagauuaaucaaaggcucuuuucagagccaccaaaaaaaaaaaaaaaaaaaaaaaaaaaaaaaaaaaaaaaaaaaaaaaaaaaaaaaaaaaaaaaaaaaaaaaaaaaaaaaaaaaaaaaaaaaaaaaaaaaaagaauu

SEQ ID NO: 7941 - RNA, 1196 nt, Artificial Sequence
  mRNA Design i-3 (hSL-A100-N5) comprising derived and/or modified sequence from Pf(3D7)__XP_001351122.1__HsALB_Pf-CSP(19-325) (opt5)
aggagaaagcuuaccaugaagugggugaccuucaucagccugcucuuucuguucuccucugccuacagccuuuuucaggaguaucaaugcuacggcuccucuagcaacacaagaguccugaaugaacucaacuaugacaaugcugggacgaaccuguacaaugagcuugaaaugaacuauuacggaaaacaggagaauugguauucccugaagaaaaacucucggagccucggcgaaaaugaugacgggaacaaugaggauaacgagaagcugcgcaaacccaagcacaagaaacugaagcagccugccgacggaaauccggaucccaacgcgaauccuaacguugaccccaacgcuaauccuaacguggaucccaaugccaacccuaauguggacccgaacgccaaucccaacgcuaauccuaacgccaaucccaacgcuaauccuaacgccaaucccaacgcgaacccgaaugccaacccuaaugcuaaccccaaugccaacccuaaugcuaaccccaaugccaaccccaaugcgaacccuaaugccaacccgaaugcuaaccccaacgccaauccuaacgcuaaucccaacgccaauccuaacgucgaucccaaugccaacccgaaugcuaacccuaaugcgaaccccaaugccaacccuaaugcuaaccccaacgccaauccuaacgccaaucccaacgcuaauccgaacgccaauccuaacgcgaaucccaacgcuaaucccaacgccaauccuaacgccaauccgaacgcuaaucccaacgccaacccuaaugcuaaccccaaugccaacccuaaugcgaaccccaauaaaaacaaucagggcaacgggcaaggacauaauaugccuaacgaccccaauagaaacguggaugaaaaugccaacgcuaacuccgccguuaagaauaacaauaacgaggaaccgagcgacaaacacauuaaggaguaccucaauaagauccagaacugaggacuaguuauaagacugacuagcccgaugggccucccaacgggcccuccuccccuccuugcaccgagauuaaucaaaggcucuuuucagagccaccaaaaaaaaaaaaaaaaaaaaaaaaaaaaaaaaaaaaaaaaaaaaaaaaaaaaaaaaaaaaaaaaaaaaaaaaaaaaaaaaaaaaaaaaaaaaaaaaaaaaagaauu

SEQ ID NO: 7942 - RNA, 1373 nt, Artificial Sequence
  mRNA Design i-3 (hSL-A100-N5) comprising derived and/or modified sequence from Pf(3D7)__XP_001351122.1__HsALB_Pf-CSP(19-384) (opt5)
aggagaaagcuuaccaugaagugggugaccuucaucagccugcucuuucuguucuccucugccuacagccuuuuucaggaguaucaaugcuacggcuccucuagcaacacaagagugcugaaugaacucaacuaugacaaugcugggacgaaccuguacaaugagcuugaaaugaacuauuacggaaaacaggagaauugguauucccugaagaaaaacucucggagccucggcgaaaaugaugacgggaacaaugaggauaacgagaagcugcgcaaacccaagcacaagaaacugaagcagccugccgacggaaauccggaucccaacgcgaauccuaacguugaccccaacgcuaauccuaacguggaucccaaugccaacccuaauguggacccgaacgccaaucccaacgcuaauccuaacgccaaucccaacgcuaauccuaacgccaaucccaacgcgaacccgaaugccaacccuaaugcuaaccccaaugccaacccuaaugcuaaccccaaugccaaccccaaugcgaacccuaaugccaacccgaaugcuaaccccaacgccaauccuaacgcuaaucccaacgccaauccuaacgucgaucccaaugccaacccgaaugcuaacccuaaugcgaaccccaaugccaacccuaaugcuaaccccaacgccaauccuaacgccaaucccaacgcuaauccgaacgccaauccuaacgcgaaucccaacgcuaaucccaacgccaauccuaacgccaauccgaacgcuaaucccaacgccaacccuaaugcuaaccccaaugccaacccuaaugcgaaccccaauaaaaacaaucagggcaacgggcaaggacauaauaugccuaacgaccccaauagaaacguggaugaaaaugccaacgcuaacuccgccguuaagaauaacaauaacgaggaaccgagcgacaaacacauuaaggaguaccucaauaagauccagaacucucuguccaccgaguggagcccuuguucugugacaugcggcaauggcauucagguccggaucaaacccggguccgcuaacaagccuaaagaugaacuugacuacgccaaugacauugagaagaaaaucuguaagauggaaaaaugcagcucuguguucaacguugucaauuccagcugaggacuaguuauaagacugacuagcccgaugggccucccaacgggcccuccuccccuccuugcaccgagauuaaucaaaggcucuuuucagagccaccaaaaaaaaaaaaaaaaaaaaaaaaaaaaaaaaaaaaaaaaaaaaaaaaaaaaaaaaaaaaaaaaaaaaaaaaaaaaaaaaaaaaaaaaaaaaaaaaaaaaagaauu

SEQ ID NO: 7943 - RNA, 1511 nt, Artificial Sequence
  mRNA Design i-3 (hSL-A100-N5) comprising derived and/or modified sequence from Pf(3D7)__XP_001351122.1__HsALB_Pf-CSP(19-384)_TM domain HA (opt5)
aggagaaagcuuaccaugaagugggugaccuucaucagccugcucuuucuguucuccucugccuacagccuuuuucaggaguaucaaugcuacggcuccucuagcaacacaagaguccugaaugaacucaacuaugacaaugcugggacgaaccuguacaaugagcuugaaaugaacuauuacggaaaacaggagaauugguauucccugaagaaaaacucucggagccucggcgaaaaugaugacgggaacaaugaggauaacgagaagcugcgcaaacccaagcacaagaaacugaagcagccugccgacggaaauccggaucccaacgcgaauccuaacguugaccccaacgcuaauccuaacguggaucccaaugccaacccuaauguggacccgaacgccaaucccaacgcuaauccuaacgccaaucccaacgcuaauccuaacgccaaucccaacgcgaacccgaaugccaacccuaaugcuaaccccaaugccaacccuaaugcuaaccccaaugccaaccccaaugcgaacccuaaugccaacccgaaugcuaaccccaacgccaauccuaacgcuaaucccaacgccaauccuaacgucgaucccaaugccaacccgaaugcuaacccuaaugcgaaccccaaugccaacccuaaugcuaaccccaacgccaauccuaacgccaaucccaacgcuaauccgaacgccaauccuaacgcgaaucccaacgcuaaucccaacgccaauccuaacgccaauccgaacgcuaaucccaacgccaacccuaaugcuaaccccaaugccaacccuaaugcgaaccccaauaaaaacaaucagggcaacgggcaaggacauaauaugccuaacgaccccaauagaaacguggaugaaaaugccaacgcuaacuccgccguuaagaauaacaauaacgaggaaccgagcgacaaacacauuaaggaguaccucaauaagauccagaacucucuguccaccgaguggagcccuuguucugugacaugcggcaauggcauucagguccggaucaaacccggguccgcuaacaagccuaaagaugaacuugacuacgccaaugacauugagaagaaaaucuguaagauggaaaaaugcagcucuguguucaacguugucaauuccagcaagcuggaguccacccgcaucuaucagauucucgcgaucuacucuacaguggccagcucccuggugcuuguggucagccugggagcuauuucuuuuuggauguguuccaacggcagccuccaaugcagaaucuguauuugaggacuaguuauaagacugacuagcccgaugggccucccaacgggcccuccuccccuccuugcaccgagauuaaucaaaggcucuuuucagagccaccaaaaaaaaaaaaaaaaaaaaaaaaaaaaaaaaaaaaaaaaaaaaaaaaaaaaaaaaaaaaaaaaaaaaaaaaaaaaaaaaaaaaaaaaaaaaaaaaaaaaagaauu

SEQ ID NO: 7944 - RNA, 1223 nt, Artificial Sequence
  mRNA Design i-3 (hSL-A100-N5) comprising derived and/or modified sequence from Pf(3D7)__XP_001351122.1__HsALB_Pf-CSP(82-397) (opt5)
aggagaaagcuuaccaugaagugggugaccuucaucagccugcucuuucuguucuccucugccuacagcgacaacgagaaacuuagaaagcccaaacacaagaaacugaagcagccugcugauggcaauccggaccccaacgccaauccuaacgucgaucccaaugcgaacccuaauguugaccccaacgcuaauccuaacguggauccgaaugccaaccccaaugccaacccuaaugcuaaccccaacgccaauccuaacgcuaaucccaacgccaauccgaacgcgaauccuaacgccaaucccaacgcuaauccuaacgccaaucccaacgcuaaucccaacgccaacccuaaugcgaacccgaaugccaaccccaaugcuaacccuaaugccaaccccaaugcuaacccuaauguggaccccaacgccaauccgaacgccaauccuaacgcuaaccccaaugcgaacccuaaugccaaccccaaugcuaacccuaaugccaaccccaaugccaacccgaaugcuaacccuaaugccaaccccaaugcgaaccccaacgcuaauccuaacgccaauccgaacgccaaucccaacgcuaauccuaacgccaaucccaacgcuaauccuaacgccaaucccaacaagaauaaccaagggaauggacagggccauaacaugccuaacgaucccaaucggaacgucgacgaaaaugcgaacgccaauuccgcugugaaaaacaauaacaaugaggaaccgucugauaagcacauuaaagaguaucucaacaagauccagaauagccuguccacagaauggucuccuugcagcguuacgugugggaacggcauucaggugcgcaucaaacccggauccgccaauaagccuaaggacgagcuugauuacgcuaacgacauugagaaaaagaucugcaaaauggaaaaguguagcucugucuuuaaugugguuaacuccagcaucgggcugauuauggugcucucuuuccuguuucugaacugaggacuaguuauaagacugacuagcccgaugggccucccaacgggcccuccuccccuccuugcaccgagauuaaucaaaggcucuuuucagagccaccaaaaaaaaaaaaaaaaaaaaaaaaaaaaaaaaaaaaaaaaaaaaaaaaaaaaaaaaaaaaaaaaaaaaaaaaaaaaaaaaaaaaaaaaaaaaaaaaaaaaagaauu

SEQ ID NO: 7945 - RNA, 575 nt, Artificial Sequence
  mRNA Design i-3 (hSL-A100-N5) comprising derived and/or modified sequence from Pf(3D7)__XP_001351122.1__HsALB_Pf-CSP(93-192) (opt5)
aggagaaagcuuaccaugaagugggugaccuucaucagccugcucuuucuguucuccucugccuacagcaaacuuaagcagcccgcugacggcaacccugauccgaaugccaaccccaaugucgacccuaacgcgaaucccaacguugauccuaaugcuaaccccaauguggacccuaacgccaauccgaacgccaaucccaacgcuaauccuaacgccaaccccaaugcuaacccuaaugccaaccccaaugcgaacccgaaugccaacccuaaugcuaaccccaaugccaacccuaaugcuaaccccaaugccaaccccaacgcgaauccuaacgccaauccgaacgcuaaucccaacgccaauccuugaggacuaguuauaagacugacuagcccgaugggccucccaacgggcccuccuccccuccuugcaccgagauuaaucaaaggcucuuuucagagccaccaaaaaaaaaaaaaaaaaaaaaaaaaaaaaaaaaaaaaaaaaaaaaaaaaaaaaaaaaaaaaaaaaaaaaaaaaaaaaaaaaaaaaaaaaaaaaaaaaaaaagaauu

SEQ ID NO: 7946 - RNA, 815 nt, Artificial Sequence
  mRNA Design i-3 (hSL-A100-N5) comprising derived and/or modified sequence from Pf(3D7)__XP_001351122.1__HsALB_Pf-CSP(93-272) (opt5)
aggagaaagcuuaccaugaagugggugaccuucaucagccugcucuuucuguucuccucugccuacagcaaacuuaagcagcccgcugacggcaacccugauccgaaugccaaccccaaugucgacccuaacgcgaaucccaacguugauccuaaugcuaaccccaauguggacccuaacgccaauccgaacgccaaucccaacgcuaauccuaacgccaaccccaaugcuaacccuaaugccaaccccaaugcgaacccgaaugccaacccuaaugcuaaccccaaugccaacccuaaugcuaaccccaaugccaaccccaacgcgaauccuaacgccaauccgaacgcuaaucccaacgccaauccuaacgcuaaucccaacguggauccuaaugccaaccccaaugccaacccgaaugcuaacccuaacgcgaaucccaacgccaauccuaacgcuaaucccaacgccaauccuaacgccaaucccaacgcuaauccgaacgccaauccuaacgcgaaucccaacgcuaaccccaaugccaacccuaaugccaacccgaaugcuaaccccaaugccaacccuaaugcuaaccccaaugccaacccuugaggacuaguuauaagacugacuagcccgaugggccucccaacgggcccuccuccccuccuugcaccgagauuaaucaaaggcucuuuucagagccaccaaaaaaaaaaaaaaaaaaaaaaaaaaaaaaaaaaaaaaaaaaaaaaaaaaaaaaaaaaaaaaaaaaaaaaaaaaaaaaaaaaaaaaaaaaaaaaaaaaaaagaauu

SEQ ID NO: 7947 - RNA, 1190 nt, Artificial Sequence
  mRNA Design i-3 (hSL-A100-N5) comprising derived and/or modified sequence from Pf(3D7)__XP_001351122.1__HsALB_Pf-CSP(93-397) (opt5)
aggagaaagcuuaccaugaagugggugaccuucaucagccugcucuuucuguucuccucugccuacagcaaacuuaagcagcccgcugacggcaacccugauccgaaugccaaccccaaugucgacccuaacgcgaaucccaacguugauccuaaugcuaaccccaauguggacccuaacgccaauccgaacgccaaucccaacgcuaauccuaacgccaaccccaaugcuaacccuaaugccaaccccaaugcgaacccgaaugccaacccuaaugcuaaccccaaugccaacccuaaugcuaaccccaaugccaaccccaacgcgaauccuaacgccaauccgaacgcuaaucccaacgccaauccuaacgcuaaucccaacguggauccuaaugccaaccccaaugccaacccgaaugcuaacccuaacgcgaaucccaacgccaauccuaacgcuaaucccaacgccaauccuaacgccaaucccaacgcuaauccgaacgccaauccuaacgcgaaucccaacgcuaaccccaaugccaacccuaaugccaacccgaaugcuaaccccaaugccaacccuaaugcuaaccccaaugccaacccuaauaaaaacaaucaagggaacggacagggccacaauaugcccaacgacccuaacagaaaugucgaugagaacgcgaaugccaacuccgcugugaagaauaacaauaacgaggaacccucugacaaacauauuaaggaauaucugaauaagauccagaacagccucuccacagaguggucuccgugcagcguuacgugugggaauggcauucaggugcggaucaaaccuggauccgccaacaagcccaaagaugaacuggacuacgcuaaugauauugagaagaaaaucugcaagauggagaaguguagcucugucuuuaacgugguuaauuccagcaucgggcuuauuauggugcugucuuuccucuuucugaacugaggacuaguuauaagacugacuagcccgaugggccucccaacgggcccuccuccccuccuugcaccgagauuaaucaaaggcucuuuucagagccaccaaaaaaaaaaaaaaaaaaaaaaaaaaaaaaaaaaaaaaaaaaaaaaaaaaaaaaaaaaaaaaaaaaaaaaaaaaaaaaaaaaaaaaaaaaaaaaaaaaaaagaauu

SEQ ID NO: 7948 - RNA, 560 nt, Artificial Sequence
  mRNA Design i-3 (hSL-A100-N5) comprising derived and/or modified sequence from Pf(3D7)__XP_001351122.1__HsALB_Pf-CSP(98-192) (opt5)
aggagaaagcuuaccaugaagugggugaccuucaucagccugcucuuucuguucuccucugccuacagcgcugacggcaaccccgauccuaaugccaacccgaaugucgaccccaacgcgaauccuaacguugaucccaaugcuaacccuaauguggaccccaacgccaauccuaacgccaauccgaacgcuaaucccaacgccaacccuaaugcuaaccccaaugccaacccuaaugcgaaccccaaugccaacccgaaugcuaacccuaaugccaaccccaaugcuaacccuaaugccaaccccaacgcgaaucccaacgccaauccuaacgcuaauccgaacgccaaucccugaggacuaguuauaagacugacuagcccgaugggccucccaacgggcccuccuccccuccuugcaccgagauuaaucaaaggcucuuuucagagccaccaaaaaaaaaaaaaaaaaaaaaaaaaaaaaaaaaaaaaaaaaaaaaaaaaaaaaaaaaaaaaaaaaaaaaaaaaaaaaaaaaaaaaaaaaaaaaaaaaaaaagaauu

SEQ ID NO: 7949 - RNA, 800 nt, Artificial Sequence
  mRNA Design i-3 (hSL-A100-N5) comprising derived and/or modified sequence from Pf(3D7)__XP_001351122.1__HsALB_Pf-CSP(98-272) (opt5)
aggagaaagcuuaccaugaagugggugaccuucaucagccugcucuuucuguucuccucugccuacagcgcugacggcaaccccgauccuaaugccaacccgaaugucgaccccaacgcgaauccuaacguugaucccaaugcuaacccuaauguggaccccaacgccaauccuaacgccaauccgaacgcuaaucccaacgccaacccuaaugcuaaccccaaugccaacccuaaugcgaaccccaaugccaacccgaaugcuaacccuaaugccaaccccaaugcuaacccuaaugccaaccccaacgcgaaucccaacgccaauccuaacgcuaauccgaacgccaaucccaacgcuaauccuaacguggaucccaaugccaacccuaaugccaaccccaaugcuaacccgaacgcgaauccuaacgccaaucccaacgcuaauccuaacgccaaucccaacgccaauccuaacgcuaaucccaacgccaauccgaacgcgaauccuaacgcuaaccccaaugccaaccccaaugccaacccuaaugcuaacccgaaugccaaccccaaugcuaacccuaaugccaaccccugaggacuaguuauaagacugacuagcccgaugggccucccaacgggcccuccuccccuccuugcaccgagauuaaucaaaggcucuuuucagagccaccaaaaaaaaaaaaaaaaaaaaaaaaaaaaaaaaaaaaaaaaaaaaaaaaaaaaaaaaaaaaaaaaaaaaaaaaaaaaaaaaaaaaaaaaaaaaaaaaaaaaagaauu

SEQ ID NO: 7950 - RNA, 1106 nt, Artificial Sequence
  mRNA Design i-3 (hSL-A100-N5) comprising derived and/or modified sequence from Pf(3D7)__XP_001351122.1__HsALB_Pf-CSP(98-374) (opt5)
aggagaaagcuuaccaugaagugggugaccuucaucagccugcucuuucuguucuccucugccuacagcgcugacggcaaccccgauccuaaugccaacccgaaugucgaccccaacgcgaauccuaacguugaucccaaugcuaacccuaauguggaccccaacgccaauccuaacgccaauccgaacgcuaaucccaacgccaacccuaaugcuaaccccaaugccaacccuaaugcgaaccccaaugccaacccgaaugcuaacccuaaugccaaccccaaugcuaacccuaaugccaaccccaacgcgaaucccaacgccaauccuaacgcuaauccgaacgccaaucccaacgcuaauccuaacguggaucccaaugccaacccuaaugccaaccccaaugcuaacccgaacgcgaauccuaacgccaaucccaacgcuaauccuaacgccaaucccaacgccaauccuaacgcuaaucccaacgccaauccgaacgcgaauccuaacgcuaaccccaaugccaaccccaaugccaacccuaaugcuaacccgaaugccaaccccaaugcuaacccuaaugccaaccccaauaaaaacaaucaggggaacggacaaggccacaauaugccuaacgaccccaacagaaaugucgaugagaacgcgaaugccaacuccgcugugaagaauaacaauaacgaggaaccuucugacaaacauauuaaggaauaucuuaauaaaauccagaacagccuguccacagaguggucucccugcagcguuacgugugggaauggcauucaggugcggaucaagccgggauccgccaacaagccuaaagaugaacucgacuacgcuaaugauauugagaagaaaaucugcaagauggagaaauguugaggacuaguuauaagacugacuagcccgaugggccucccaacgggcccuccuccccuccuugcaccgagauuaaucaaaggcucuuuucagagccaccaaaaaaaaaaaaaaaaaaaaaaaaaaaaaaaaaaaaaaaaaaaaaaaaaaaaaaaaaaaaaaaaaaaaaaaaaaaaaaaaaaaaaaaaaaaaaaaaaaaaagaauu

SEQ ID NO: 7951 - RNA, 1175 nt, Artificial Sequence
  mRNA Design i-3 (hSL-A100-N5) comprising derived and/or modified sequence from Pf(3D7)__XP_001351122.1__HsALB_Pf-CSP(98-397) (opt5)
aggagaaagcuuaccaugaagugggugaccuucaucagccugcucuuucuguucuccucugccuacagcgcugacggcaaccccgauccuaaugccaacccgaaugucgaccccaacgcgaauccuaacguugaucccaaugcuaacccuaauguggaccccaacgccaauccuaacgccaauccgaacgcuaaucccaacgccaacccuaaugcuaaccccaaugccaacccuaaugcgaaccccaaugccaacccgaaugcuaacccuaaugccaaccccaaugcuaacccuaaugccaaccccaacgcgaaucccaacgccaauccuaacgcuaauccgaacgccaaucccaacgcuaauccuaacguggaucccaaugccaacccuaaugccaaccccaaugcuaacccgaacgcgaauccuaacgccaaucccaacgcuaauccuaacgccaaucccaacgccaauccuaacgcuaaucccaacgccaauccgaacgcgaauccuaacgcuaaccccaaugccaaccccaaugccaacccuaaugcuaacccgaaugccaaccccaaugcuaacccuaaugccaaccccaauaaaaacaaucaggggaacggacaaggccacaauaugccuaacgaccccaacagaaaugucgaugagaacgcgaaugccaacuccgcugugaagaauaacaauaacgaggaaccuucugacaaacauauuaaggaauaucuuaauaaaauccagaacagccuguccacagaguggucucccugcagcguuacgugugggaauggcauucaggugcggaucaagccgggauccgccaacaagccuaaagaugaacucgacuacgcuaaugauauugagaagaaaaucugcaagauggagaaauguagcucugucuuuaacgugguuaauuccagcaucgggcugauuauggugcuuucuuuccuguuucucaacugaggacuaguuauaagacugacuagcccgaugggccucccaacgggcccuccuccccuccuugcaccgagauuaaucaaaggcucuuuucagagccaccaaaaaaaaaaaaaaaaaaaaaaaaaaaaaaaaaaaaaaaaaaaaaaaaaaaaaaaaaaaaaaaaaaaaaaaaaaaaaaaaaaaaaaaaaaaaaaaaaaaaagaauu

SEQ ID NO: 7952 - RNA, 1502 nt, Artificial Sequence
  mRNA Design i-3 (hSL-A100-N5) comprising derived and/or modified sequence from Pf(3D7)__XP_001351122.1__HsALB_Pf-CSP(199-377)_L(PVTN)_HBsAg (opt5)
aggagaaagcuuaccaugaagugggugaccuucaucagccugcucuuucuguucuccucugccuacagcgaccccaacgcuaauccuaacgccaauccgaacgcgaaucccaacgcuaauccuaacgccaaucccaacgccaauccuaacgcuaaucccaacgccaauccuaacgcuaacccgaaugccaaccccaaugcgaacccuaaugccaaccccaaugcuaacccuaaugccaaccccaaugcuaacccgaaugccaacccuaaugcgaaccccaacgccaauccuaacaaaaauaaccagggcaaugggcaaggacacaacaugcccaaugaucccaacagaaaugucgacgagaacgcuaaugccaacuccgcuguuaagaauaacaauaacgaggaaccuucugauaaacauauuaaggaauaucuuaacaaaauccagaauagccuguccacagaguggucuccgugcagcgugacguguggcaacgggauucaggugcggaucaagcccggauccgccaauaagccuaaagacgaacucgauuacgccaacgacauugagaagaaaaucugcaagauggagaaauguagcucuguccccgugaccaauauggaaaacaucacauccggcuuucuggggccucuucugguucuccaggcuggauucuuucugcugacccgcauucucacaaucccccaaagccuggauucuugguggaccucccuuaauuuccugggcggcagcccggugugccucgggcagaacucucaguccccuacaagcaaucacucccccaccucuuguccucccauuugcccuggauauagauggaugugucugcggcgcuuuaucauuuuccuuuuuauccugcuccugugccugauuuuccuccugguccuucuggacuaccagggcaugcuccccguguguccgcugaucccugggagcacgaccacaaacaccggacccugcaagacauguaccacgcccgcgcaaggcaauuccauguuuccuagcugcugcuguacaaagccgaccgaugggaacugcacauguauccccauuccuucuuccugggccuucgcuaaauaucuuugggagugggccagcguuagauuuucuuggcugagccuccuggugcccuucguccagugguucgugggacuguccccuaccguguggcucucugccaucuggaugaugugguacuggggccccagccuguauuccauugucagcccuuuuaucccccuucugccgauuuucuuuugccucuggguuuacaucugaggacuaguuauaagacugacuagcccgaugggccucccaacgggcccuccuccccuccuugcaccgagauuaaucaaaggcucuuuucagagccaccaaaaaaaaaaaaaaaaaaaaaaaaaaaaaaaaaaaaaaaaaaaaaaaaaaaaaaaaaaaaaaaaaaaaaaaaaaaaaaaaaaaaaaaaaaaaaaaaaaaaagaauu

SEQ ID NO: 7953 - RNA, 1412 nt, Artificial Sequence
  mRNA Design i-3 (hSL-A100-N5) comprising derived and/or modified sequence from Pf(3D7)__XP_001351122.1__Pf-CSP (opt6)
aggagaaagcuuaccaugaugagaaaacuugcaauacuaagcguaucuucauuccuauucguagaagcacuauuccaagaauaucaaugcuauggaucaagcuccaacacaagaguacuuaacgaacuaaauuacgacaaugcaggaacaaaccuauacaaugaacuugaaaugaauuacuacggcaaacaagaaaacugguacucccuaaaaaaaaacucaaggucauuaggagaaaacgacgacggaaacaacgaagacaacgaaaaacuacgaaaacccaaacacaaaaaauuaaaacaaccagcagacggaaaccccgacccaaacgcaaacccaaacgucgacccaaacgcaaacccgaacguagacccaaacgcgaacccaaacguagacccaaacgcaaacccaaacgcaaacccaaacgcaaacccaaacgcaaacccaaaugcaaacccaaacgcaaacccaaacgccaauccaaacgccaacccaaacgcaaacccaaacgcaaacccaaacgcaaacccaaacgcaaaccccaacgcaaacccaaacgcuaacccaaacgcaaacccuaaugcaaacccuaacgcaaacccaaacgucgacccgaacgcaaacccaaaugcaaacccaaacgcaaacccaaacgcaaaccccaacgccaacccaaaugcaaacccaaaugcaaauccaaacgcaaacccaaacgcaaacccuaacgcaaacccaaacgcaaaccccaacgcaaacccaaacgcaaacccaaacgccaacccaaacgcaaaccccaaugcaaacccaaacgcaaacccaaacgcaaacccaaacaaaaacaaucaaggcaacggacaaggacacaacaugcccaacgacccaaaccgaaacgucgacgaaaacgccaacgcaaacagcgcaguaaaaaacaacaacaacgaagaacccucagacaaacacauaaaagaauacuuaaacaaaauacaaaacucacuaucuacagaauggucacccuguagcguaaccugcggcaacggaauacaaguaagaauaaaaccaggcucagcaaacaaaccaaaagaugaacuagacuacgccaaugauauagaaaaaaaaauauguaaaauggaaaaauguagcucagucuucaacguagucaacucaucaauaggacuaauaaugguacucuccuuccucuuccuaaauuaaggacuaguuauaagacugacuagcccgaugggccucccaacgggcccuccuccccuccuugcaccgagauuaaucaaaggcucuuuucagagccaccaaaaaaaaaaaaaaaaaaaaaaaaaaaaaaaaaaaaaaaaaaaaaaaaaaaaaaaaaaaaaaaaaaaaaaaaaaaaaaaaaaaaaaaaaaaaaaaaaaaaagaauu

SEQ ID NO: 7954 - RNA, 1343 nt, Artificial Sequence
  mRNA Design i-3 (hSL-A100-N5) comprising derived and/or modified sequence from Pf(3D7)__XP_001351122.1__Pf-CSP(1-374) (opt6)
aggagaaagcuuaccaugaugagaaaacuagcaauauuaagcguaagcucauuccuauucguugaagcauuauuccaagaauaccaaugcuacggcucaagcucaaacacaagaguauuaaacgaauuaaacuacgacaaugcaggaaccaaccucuacaacgaacuagaaaugaauuauuacggcaaacaagaaaacugguacucacucaaaaaaaacucacgaucccuaggagaaaacgaugacggaaacaaugaagauaacgaaaaauuaagaaaaccaaaacacaaaaaauuaaaacaaccugcagacggaaacccagacccaaacgcaaauccaaauguagacccaaacgcaaaccccaacguagacccaaaugcaaacccaaacguagacccaaacgcaaacccaaaugcaaacccaaacgcaaacccaaacgcaaacccaaacgcaaaccccaacgcaaacccaaacgcaaacccaaacgccaaccccaacgcaaacccaaacgcaaacccgaaugcaaacccaaacgcaaacccaaacgcaaacccaaacgcaaacccaaacgcaaacccaaacgcaaacccaaaugcaaacccaaacguggauccaaacgcaaauccaaacgcaaacccaaacgcaaacccaaacgcaaaccccaacgcaaauccaaacgcaaaccccaaugcaaauccaaacgcaaacccaaacgccaacccaaacgcaaacccgaacgccaauccaaacgcaaacccaaacgcaaacccaaacgcaaacccaaacgccaacccaaacgcaaacccaaacgcaaacccaaacgcaaaccccaacaaaaacaaccaaggaaacggacaaggacacaacaugccaaacgauccaaacagaaacgucgacgaaaacgccaacgcuaacagcgcaguaaaaaacaauaacaacgaagaaccaucagacaaacauauaaaagaauacuuaaacaaaauccaaaacucacuaucaacagaauggucccccuguuccguaacaugcggaaacggaauacaaguacgaaucaaaccaggaucagccaacaaaccgaaagacgaacuagacuaugccaacgauauagaaaaaaaaauaugcaaaauggaaaaaugcugaggacuaguuauaagacugacuagcccgaugggccucccaacgggcccuccuccccuccuugcaccgagauuaaucaaaggcucuuuucagagccaccaaaaaaaaaaaaaaaaaaaaaaaaaaaaaaaaaaaaaaaaaaaaaaaaaaaaaaaaaaaaaaaaaaaaaaaaaaaaaaaaaaaaaaaaaaaaaaaaaaaaagaauu

SEQ ID NO: 7955 - RNA, 1196 nt, Artificial Sequence
  mRNA Design i-3 (hSL-A100-N5) comprising derived and/or modified sequence from Pf(3D7)__XP_001351122.1__Pf-CSP(1-325) (opt6)
aggagaaagcuuaccaugaugcgaaaauuagcaauacuaagcguaagcucauucuuauucguagaagcacucuuccaagaauaccaaugcuacggaucaagcucaaacacaagaguccuaaacgaauuaaacuaugacaacgcaggaacaaaccuauacaacgaacuagaaaugaacuacuacggaaaacaagaaaacugguacucacucaaaaaaaacagcagaagucuaggagaaaacgacgacggaaacaacgaagacaacgaaaaacuacgaaaaccaaaacacaaaaaacuaaaacaaccagcagacgggaacccagacccaaacgcaaacccaaacguagauccaaacgcaaacccaaauguagacccuaacgcaaacccaaauguagacccaaacgcaaacccuaacgcaaacccaaaugcaaacccaaacgcaaauccaaacgcaaacccaaacgcaaacccaaacgcgaacccaaacgcaaacccaaacgcaaacccaaaugcaaaccccaacgcaaauccaaaugcaaacccaaaugcaaauccaaacgcaaacccaaacgcaaacccaaaugcaaauccaaacgcaaauccaaacguggauccaaacgcaaacccaaacgcaaacccaaacgcaaacccaaacgcaaacccaaacgcaaacccaaacgcaaauccaaacgccaauccaaacgcaaauccaaaugcaaacccaaacgcaaacccaaacgcaaacccaaacgcaaacccaaacgcaaacccaaacgcaaacccaaacgcaaacccaaacgcaaacccaaacgcaaacccaaacgcaaacccaaacaaaaacaaccaaggaaacggacaaggacacaacaugccaaacgacccaaacagaaacguagacgaaaacgccaacgcaaauagcgcagucaaaaacaacaauaacgaagaaccaucggacaaacacauaaaagaauacuuaaacaaaauacaaaacugaggacuaguuauaagacugacuagcccgaugggccucccaacgggcccuccuccccuccuugcaccgagauuaaucaaaggcucuuuucagagccaccaaaaaaaaaaaaaaaaaaaaaaaaaaaaaaaaaaaaaaaaaaaaaaaaaaaaaaaaaaaaaaaaaaaaaaaaaaaaaaaaaaaaaaaaaaaaaaaaaaaaagaauu

SEQ ID NO: 7956 - RNA, 1412 nt, Artificial Sequence
  mRNA Design i-3 (hSL-A100-N5) comprising derived and/or modified sequence from Pf(3D7)__XP_001351122.1__HsALB_Pf-CSP(19-397) (opt6)
aggagaaagcuuaccaugaaaugggucacauuuauuucacuacuauucuuauucucaagcgcauacucacuauuucaagaauaccaaugcuacggcucauccucaaauacacgaguacuaaaugaacucaacuacgacaacgcaggaaccaaucucuacaacgaauuagaaaugaacuacuacggcaaacaagaaaacugguauucacuaaaaaaaaacaguagaucacuaggagaaaaugacgacggaaacaaugaagacaacgaaaaacuaagaaaaccaaaacacaaaaaauuaaaacaaccagcagacggaaacccagacccaaacgcaaacccuaacguagaucccaaugccaacccaaauguagacccaaacgcaaaccccaacgucgauccaaacgcaaacccaaacgcaaacccaaacgcaaacccaaacgcaaacccaaacgcaaacccaaaugcaaaccccaacgcaaacccaaacgcuaacccaaacgcaaacccaaacgcaaacccaaacgcaaacccaaacgcaaacccaaacgccaacccaaacgccaacccaaacgcaaauccaaacgcaaacccaaaugccaauccaaacguugacccaaacgcaaacccaaacgcaaaccccaacgcaaacccaaacgcaaauccaaacgcgaaccccaacgcaaacccaaacgcaaacccaaaugcaaacccaaacgcuaacccaaaugcaaacccaaacgccaacccaaacgccaacccaaacgcaaaccccaacgcaaacccaaacgcaaacccaaacgccaauccaaacgcaaacccaaaugcaaacccaaacaaaaacaaccaaggaaacggacaaggacacaacaugccaaacgaccccaacagaaacguagaugaaaaugcaaaugcuaacucagccguaaaaaacaauaacaacgaagaaccaucagacaaacacauaaaagaauaccuaaauaaaauacaaaauuccuuaucaacagaaugguccccaugcucaguaacuugcgguaacggcauacaaguaagaauaaaaccaggaucagcaaacaaaccaaaagacgaauuagacuaugcaaacgacauagaaaaaaaaauauguaaaauggaaaaaugcagcucaguauucaacguaguaaauuccucaaucggacucaucaugguauuaucauuccuauuuuuaaauuaaggacuaguuauaagacugacuagcccgaugggccucccaacgggcccuccuccccuccuugcaccgagauuaaucaaaggcucuuuucagagccaccaaaaaaaaaaaaaaaaaaaaaaaaaaaaaaaaaaaaaaaaaaaaaaaaaaaaaaaaaaaaaaaaaaaaaaaaaaaaaaaaaaaaaaaaaaaaaaaaaaaaagaauu

SEQ ID NO: 7957 - RNA, 1430 nt, Artificial Sequence
  mRNA Design i-3 (hSL-A100-N5) comprising derived and/or modified sequence from Pf(3D7)__XP_001351122.1__HsIns-iso1_Pf-CSP(19-397) (opt6)
aggagaaagcuuaccauggcacuauggaugagacuacuaccacuacuagcacuccuagccuuauggggacccgauccagccgcagcacucuuccaagaauaccaaugcuauggaucauccuccaacacaagaguccuaaacgaauuaaauuacgacaacgcuggaacaaaccuauacaaugaacuagaaaugaauuauuacggaaaacaagaaaauugguacucacuaaaaaaaaacucuagaagccuaggagaaaacgacgacggaaacaacgaagauaacgaaaaacuaagaaaaccaaaacacaaaaaauuaaaacaacccgcagacggcaacccagacccaaaugcaaauccaaacguagacccaaacgcaaauccaaacguagacccaaacgcaaacccaaauguagacccaaacgcaaauccaaacgcaaacccaaaugcaaacccaaaugcaaacccaaacgcaaauccaaacgcaaaucccaacgccaacccaaacgcaaacccaaacgcaaauccaaacgcaaacccaaacgcaaacccaaacgcaaacccaaacgcaaacccaaaugcaaacccaaaugccaauccaaacgccaacccaaacgcaaacccaaacguagacccaaacgcaaacccaaacgccaacccaaacgcaaaccccaaugcaaacccaaacgcaaacccaaacgcaaaccccaacgcaaauccaaacgcaaacccaaacgcaaauccaaacgcaaauccaaacgccaacccaaacgcaaacccaaacgcaaauccaaacgcaaaccccaacgcaaacccaaacgccaacccaaaugcaaacccaaacgcaaaucccaauaaaaacaaccaaggaaacggacaaggacacaacaugccaaacgauccaaacagaaacguagacgaaaacgcaaacgcaaacucagcagucaaaaacaauaacaacgaagaaccaucagacaaacacauaaaagaauaccuaaacaaaauacaaaacucacuauccacagaauggucaccaugcucaguaaccugcggaaacggaauacaaguaagaauaaaaccaggaucagccaacaaaccaaaagacgaacuagacuaugcuaaugacauagaaaaaaaaauaugcaaaauggaaaaaugcuccucaguauucaacgucguaaacucuucaauaggacuaauaaugguacuauccuucuuauuucuaaacuaaggacuaguuauaagacugacuagcccgaugggccucccaacgggcccuccuccccuccuugcaccgagauuaaucaaaggcucuuuucagagccaccaaaaaaaaaaaaaaaaaaaaaaaaaaaaaaaaaaaaaaaaaaaaaaaaaaaaaaaaaaaaaaaaaaaaaaaaaaaaaaaaaaaaaaaaaaaaaaaaaaaaagaauu

SEQ ID NO: 7958 - RNA, 1409 nt, Artificial Sequence
  mRNA Design i-3 (hSL-A100-N5) comprising derived and/or modified sequence from Pf(3D7)__XP_001351122.1__HsSPARC_Pf-CSP(19-397) (opt6)
aggagaaagcuuaccaugcgcgcauggauauucuuccuccuaugucuagcaggucgagcacuugcacucuuccaagaauaccaauguuacggauccucaagcaacacacgaguacuaaacgaacuaaacuacgauaacgcaggaaccaacuuauacaacgaacuagaaaugaacuacuacggcaaacaagaaaacugguacucacucaaaaaaaacagcagaagccuaggagaaaaugacgacggaaacaacgaagauaacgaaaaauuacgaaaacccaaacacaaaaaauuaaaacaacccgcagauggaaauccagacccgaacgcaaacccaaacguagacccaaacgcaaacccaaacguugacccaaacgcaaacccaaacguagacccaaacgcaaacccuaacgccaacccaaacgcaaacccaaacgcaaacccaaaugcgaacccaaaugcaaacccaaacgccaacccaaaugcaaaccccaacgcaaauccaaacgcaaacccaaaugcaaacccaaacgcaaacccaaacgcaaacccaaacgcaaacccaaacgccaaccccaaugcaaacccaaacgcaaacccaaacgucgacccaaacgcaaacccaaacgcaaacccaaacgcaaauccaaacgcaaauccaaacgcaaacccuaacgcaaacccaaacgcaaacccaaaugcaaauccaaacgcaaacccaaacgcaaacccaaacgcaaauccaaacgcaaacccaaacgcaaacccaaacgcaaacccuaaugcaaacccaaaugcaaauccaaacgcaaacccaaaugcaaaccccaacaaaaacaaccaaggaaacggacaaggacacaauaugccaaacgacccaaacagaaacguagacgaaaacgcaaacgccaacagcgcaguaaaaaacaacaacaacgaagaaccaucagacaaacacauaaaagaauaccuaaacaaaauacaaaacucacuaucaacagaauggucucccugcuccguaacaugcggaaacggcauacaaguacgaauaaaaccuggaucagccaacaaaccaaaagacgaacuagacuaugcaaaugacauagaaaaaaaaauaugcaaaauggaaaaaugcaguucagucuucaacguagucaacagcucaauaggccuaauaaugguacucucauuccuauucuuaaacuaaggacuaguuauaagacugacuagcccgaugggccucccaacgggcccuccuccccuccuugcaccgagauuaaucaaaggcucuuuucagagccaccaaaaaaaaaaaaaaaaaaaaaaaaaaaaaaaaaaaaaaaaaaaaaaaaaaaaaaaaaaaaaaaaaaaaaaaaaaaaaaaaaaaaaaaaaaaaaaaaaaaaagaauu

SEQ ID NO: 7959 - RNA, 1412 nt, Artificial Sequence
  mRNA Design i-3 (hSL-A100-N5) comprising derived and/or modified sequence from Pf(3D7)__XP_001351122.1__IgE_Pf-CSP(19-397) (opt6)
aggagaaagcuuaccauggauuggacauggauucucuuccucguagcagcagccacaagaguacacucuuuauuucaagaauaccaaugcuacggaucaagcucaaacacacgcguacuaaacgaacuaaacuacgacaacgcaggaacaaacuuauacaacgaacuagaaaugaacuauuauggcaaacaagaaaacugguacucacuaaaaaaaaacuccagaagcuuaggagaaaacgacgacggaaacaacgaagacaacgaaaaacuacgcaaaccuaaacacaaaaaacuaaaacaaccugcagacggaaacccagacccaaacgcgaacccaaacguagauccaaacgcaaacccaaacguagaucccaacgcaaacccgaacguagacccuaacgcaaauccaaacgcaaaccccaacgcaaacccgaacgcaaacccaaacgcaaacccaaacgcaaacccaaacgcaaacccaaacgcaaacccaaacgccaacccaaacgcaaauccaaacgcuaacccaaaugcaaacccuaacgcaaacccaaacgccaacccaaacgcaaacccaaacgcaaacccaaacgcaaaucccaauguagacccaaacgcaaacccaaacgcaaacccaaacgcuaacccaaaugcaaacccaaacgcaaacccaaacgcaaacccaaacgcuaaccccaacgcaaacccgaacgcaaacccaaaugcaaacccaaacgcaaacccaaaugcaaacccaaacgcaaacccaaacgcaaaccccaaugccaacccaaacgcaaauccaaaugccaauccaaacgcaaacccaaacaaaaacaaccaaggaaauggacaaggacauaacaugccaaacgaccccaaccgaaauguagacgaaaacgccaacgcaaauagugcagucaaaaacaauaacaaugaagaacccucagauaaacauauaaaagaauacuuaaacaaaauacaaaacucacuaucaaccgaguggucuccuugcucaguaacauguggaaacggaauacaaguacgaauaaaaccaggaucagcaaacaaaccgaaagacgaacuagacuacgccaacgacauagaaaagaaaauauguaaaauggagaaauguaguucaguauucaacgugguaaacagcucaauaggccuaauaaugguacucucuuuccuauuccuaaacuaaggacuaguuauaagacugacuagcccgaugggccucccaacgggcccuccuccccuccuugcaccgagauuaaucaaaggcucuuuucagagccaccaaaaaaaaaaaaaaaaaaaaaaaaaaaaaaaaaaaaaaaaaaaaaaaaaaaaaaaaaaaaaaaaaaaaaaaaaaaaaaaaaaaaaaaaaaaaaaaaaaaaagaauu

SEQ ID NO: 7960 - RNA, 1577 nt, Artificial Sequence
  mRNA Design i-3 (hSL-A100-N5) comprising derived and/or modified sequence from Pf(3D7)__XP_001351122.1__Pf-CSP_L(G4SG4)_TM domain HA (opt6)
aggagaaagcuuaccaugaugcguaaacuagcaauacuaucugucaguucauucuuauucguagaagcacuauuccaagaauaccaauguuacggaucuucaucaaacacaagaguacucaacgaauuaaacuacgauaacgcuggaaccaauuuauacaacgaacuagaaaugaacuacuauggaaaacaagaaaacugguauucacuaaaaaaaaacagcagaaguuuaggagaaaaugacgacggaaacaaugaagacaaugaaaaauuacgaaaaccaaaacacaaaaaauuaaaacaacccgccgacggaaauccagacccaaacgcaaacccaaauguagacccaaacgcaaacccaaauguagaucccaacgcaaacccaaacguagaucccaaugcaaacccaaacgcaaacccaaaugcaaaccccaacgcaaacccaaaugcaaacccuaacgcaaacccgaacgcaaacccaaacgcaaaucccaaugcaaaccccaacgcaaauccaaaugcaaacccuaacgcaaauccgaacgcaaauccaaacgcaaacccaaacgcaaacccaaacgcaaacccaaacgcaaacccaaacgucgacccaaacgccaauccaaacgcaaaccccaaugcaaacccaaaugcaaacccaaacgcaaacccaaaugccaacccaaacgcaaacccaaacgcaaacccaaacgcaaacccaaacgcaaacccaaaugcaaacccaaaugcaaacccaaacgccaacccaaacgcaaacccaaacgcaaacccaaacgccaacccaaacgcaaacccuaacgcaaauccaaacaaaaacaaccaagggaacggacaaggacacaacaugccaaacgacccaaacagaaacguagacgaaaacgccaacgcaaacucagcugucaaaaacaauaacaacgaagaacccuccgauaaacacauaaaagaauaccuaaacaaaauccaaaacucccuuucuacagaauggucacccugcucaguaacaugcggcaacggcauacaaguuagaaucaaaccaggaucagcaaauaaaccaaaagacgaauuagacuaugccaacgacauagaaaaaaaaauauguaaaauggaaaaaugcucaucaguuuucaacguaguaaacagcucaaucggauuaauaaugguacuaucauucuuauuuuuaaacggaggaggaggcuccggcggagguggaaaacuagaaucaacuagaauauaccaaauauuagcaauauacucaacaguagcaucaucacucguauuaguaguaucgcuaggagcaauaaguuucuggaugugcucuaacggaagccuacaaugccgaauaugcauauaaggacuaguuauaagacugacuagcccgaugggccucccaacgggcccuccuccccuccuugcaccgagauuaaucaaaggcucuuuucagagccaccaaaaaaaaaaaaaaaaaaaaaaaaaaaaaaaaaaaaaaaaaaaaaaaaaaaaaaaaaaaaaaaaaaaaaaaaaaaaaaaaaaaaaaaaaaaaaaaaaaaaagaauu

SEQ ID NO: 7961 - RNA, 1451 nt, Artificial Sequence
  mRNA Design i-3 (hSL-A100-N5) comprising derived and/or modified sequence from Pf(3D7)__XP_001351122.1__Pf-CSP(199-377)_L(PVTN)_HBsAg (opt6)
aggagaaagcuuaccauggacccaaacgccaaccccaacgcaaacccaaaugcaaacccaaacgcuaaccccaacgcaaacccaaacgcuaacccuaacgcaaauccaaacgcaaaucccaacgcaaauccaaacgcaaacccaaacgcaaacccaaaugccaacccaaacgcaaacccuaacgcaaaucccaacgcaaauccaaaugcaaaccccaaugcaaacccaaacgcaaauccaaacaaaaauaaucaaggaaauggacaaggacauaacaugccaaacgacccuaaccgaaacgucgacgaaaaugcaaacgcaaacuccgcaguaaaaaacaacaacaacgaagaaccuuccgacaaacacauaaaagaauaccuaaacaaaauacaaaacucucuauccacugaauggucaccaugcucaguaaccugcggaaauggcauacaaguaagaauaaaaccaggaucugcaaauaaaccuaaagacgaacuagauuacgcaaaugacauagaaaaaaaaauaugcaaaauggaaaaaugcucaucagucccaguaacaaacauggaaaacaucacaucaggauucuuaggaccacuacucguauuacaagcaggauucuuucuuuuaacaagaauauuaacaauaccacaaucccuagacucaugguggacaucauuaaacuuccuagguggaucaccagucugccucggacaaaacucacaaucaccaacaucaaaccacucaccaacauccugcccaccaauuuguccaggauacagauggaugugccuacgaagauucauaauauucuuauuuauauuacuacuaugucucauauuuuuacucguacuauuagacuaucagggcauguuacccguauguccacuaauaccaggcucaaccaccacaaacacagguccaugcaaaaccugcaccacaccagcacaaggaaacuccauguuucccucauguugcugcaccaaacccaccgauggaaacugcaccugcauaccaaucccaucuucaugggcauucgcaaaauaucuaugggaaugggcauccguaagauuuucauggcuaucacuauuaguaccauucguacaaugguucguaggauuaucaccaacaguaugguuaucagcaauauggaugaugugguacuggggaccaucacuauacucaauaguauccccuuucauaccauuacucccaauauuuuucugccuuuggguauacauauaaggacuaguuauaagacugacuagcccgaugggccucccaacgggcccuccuccccuccuugcaccgagauuaaucaaaggcucuuuucagagccaccaaaaaaaaaaaaaaaaaaaaaaaaaaaaaaaaaaaaaaaaaaaaaaaaaaaaaaaaaaaaaaaaaaaaaaaaaaaaaaaaaaaaaaaaaaaaaaaaaaaaagaauu

SEQ ID NO: 7962 - RNA, 1493 nt, Artificial Sequence
  mRNA Design i-3 (hSL-A100-N5) comprising derived and/or modified sequence from Pf(3D7)__XP_001351122.1__Pf-CSP(199-387)_L(PVTN)_HBsAg (opt6)
aggagaaagcuuaccaugauggcaccagauccaaacgcaaacccaaacgcaaacccaaacgcaaauccaaaugcaaacccaaacgcaaaucccaaugcaaacccuaacgcaaacccaaacgccaacccaaaugccaacccaaacgcaaacccaaacgcaaauccaaacgcaaacccaaacgcuaacccaaaugcaaaccccaacgcaaauccaaacgcaaacccaaacgcaaauccaaacgcuaacccaaacaaaaauaaccaaggaaacggacaaggacacaauaugccaaaugacccaaauagaaacguagacgaaaacgcaaacgcaaauucagcagucaaaaacaauaacaacgaagaaccauccgauaaacacauaaaagaauacuuaaacaaaauccaaaacucacuaucaacugaauggucaccuuguucaguaacauguggcaacggaauacaaguaagaauaaaaccagguucagccaacaaaccuaaagacgaacuagacuacgcaaacgacauagaaaaaaaaaucugcaaaauggaaaaaugcucaucaguauuuaauguaguaaacucaucaauaggacuaggcccuguaacaaacauggaaaacauaaccucaggauucuuaggcccacuacuaguacuccaagcaggauucuuucuucuaacaagaauauuaaccauuccucaaucauuagacucaugguggacaucccuuaacuuucuaggaggaagccccguaugcuuaggacaaaacagccaauccccaacauccaaccacuccccaacaucaugccccccaauaugcccaggauacagauggaugugccuaagaagauucaucauauuccuauuuauucucuuacucugcuuaauauucuuacucguauuacucgacuaccaaggaauguuaccaguaugcccacuaauaccaggauccacaacaacaaacacgggaccaugcaaaacaugcacaacaccugcccaaggaaauuccauguucccaucaugcugcugcacaaaaccaaccgacggcaacugcacaugcauaccaauaccaucaagcugggccuucgcaaaauaccuaugggaaugggcaucagugagauucucauggcucucauuacuagucccauucguacaaugguuuguaggauuaucaccaacaguuuggcucagcgcaauauggaugaugugguacuggggccccucuuuauauucaauaguauccccauuuauaccacuacucccaauauucuucuguuuauggguauacauauaaggacuaguuauaagacugacuagcccgaugggccucccaacgggcccuccuccccuccuugcaccgagauuaaucaaaggcucuuuucagagccaccaaaaaaaaaaaaaaaaaaaaaaaaaaaaaaaaaaaaaaaaaaaaaaaaaaaaaaaaaaaaaaaaaaaaaaaaaaaaaaaaaaaaaaaaaaaaaaaaaaaaagaauu

SEQ ID NO: 7963 - RNA, 677 nt, Artificial Sequence
  mRNA Design i-3 (hSL-A100-N5) comprising derived and/or modified sequence from Pf(3D7)__XP_001351122.1__HsALB_Pf-CSP(19-152) (opt6)
aggagaaagcuuaccaugaaauggguaacauucauaucacuacuauuccuauucuccagcgcauacucacuauuccaagaauaccaaugcuacggaucaagcucaaacacacgaguacuaaacgaacuaaacuacgacaacgcaggaaccaaccuauacaacgaacuagaaaugaacuacuacggaaaacaagaaaacugguacucacuaaaaaaaaacagcagaucacuaggagaaaacgacgacggaaacaacgaagacaacgaaaaacuaagaaaaccaaaacacaaaaaacuaaaacaacccgcagacggaaacccagacccaaacgcaaacccaaacguagacccaaaugcaaacccaaacguagacccaaacgcaaacccaaacguagacccaaacgcaaacccaaacgcaaacccaaacgcaaacccaaacgcaaacccaaacgcaaacccaaacgcaaacccauaaggacuaguuauaagacugacuagcccgaugggccucccaacgggcccuccuccccuccuugcaccgagauuaaucaaaggcucuuuucagagccaccaaaaaaaaaaaaaaaaaaaaaaaaaaaaaaaaaaaaaaaaaaaaaaaaaaaaaaaaaaaaaaaaaaaaaaaaaaaaaaaaaaaaaaaaaaaaaaaaaaaaagaauu

SEQ ID NO: 7964 - RNA, 797 nt, Artificial Sequence
  mRNA Design i-3 (hSL-A100-N5) comprising derived and/or modified sequence from Pf(3D7)__XP_001351122.1__HsALB_Pf-CSP(19-192) (opt6)
aggagaaagcuuaccaugaaauggguaacauucaucucacuacuauucuuauucucaucagcauacucacuauuccaagaauaccaaugcuacggaucaucaucaaacacacgaguacucaacgaacuaaacuacgacaacgcaggaacaaaccuauacaacgaacuagaaaugaacuacuacggaaaacaagaaaacugguauucacuaaaaaaaaacucaagaucacuaggagaaaacgacgacggaaacaacgaagacaacgaaaaacuaagaaaaccaaaacacaaaaaacuaaaacaaccagcagacggaaacccagacccaaacgcaaacccaaacguagacccaaacgccaacccaaacguagacccaaacgcaaacccaaacguagacccaaacgcaaacccaaacgcaaacccaaacgcaaacccaaacgcaaacccaaacgcaaacccaaacgcaaacccaaacgcaaacccaaacgcaaacccaaacgcaaacccaaacgcaaacccaaacgcaaacccaaacgcaaauccaaacgcaaacccaaacgcaaacccaaacgcaaacccaaacgcaaaccccuaaggacuaguuauaagacugacuagcccgaugggccucccaacgggcccuccuccccuccuugcaccgagauuaaucaaaggcucuuuucagagccaccaaaaaaaaaaaaaaaaaaaaaaaaaaaaaaaaaaaaaaaaaaaaaaaaaaaaaaaaaaaaaaaaaaaaaaaaaaaaaaaaaaaaaaaaaaaaaaaaaaaaagaauu

SEQ ID NO: 7965 - RNA, 1037 nt, Artificial Sequence
  mRNA Design i-3 (hSL-A100-N5) comprising derived and/or modified sequence from Pf(3D7)__XP_001351122.1__HsALB_Pf-CSP(19-272) (opt6)
aggagaaagcuuaccaugaaauggguaacauucauaucacuacuauuccuauucucaagcgcauauucacuauuccaagaauaccaaugcuacggaucaagcucaaacacaagaguacuuaacgaacuaaacuacgacaacgcaggaacaaaccuauacaacgaacuugaaaugaacuacuacggaaaacaagaaaacugguacucacuaaaaaaaaauagcagaagcuuaggagaaaacgacgacggaaacaacgaagacaacgaaaaauuaagaaaaccuaaacacaaaaaacuaaaacaacccgcagacggaaacccagacccuaacgccaacccaaauguagacccaaacgcaaacccaaacguagacccaaacgcaaaccccaacguagacccaaacgcaaacccaaacgcaaacccaaacgcaaacccaaacgcaaaccccaacgcaaacccaaacgcaaacccaaacgcaaacccaaacgcaaacccaaacgcaaacccaaacgcaaacccaaacgcaaacccaaacgcaaacccaaacgcgaacccaaacgcaaacccaaacgcaaacccaaacgcaaacccaaacgcaaacccaaacguagacccaaaugcaaaccccaacgcaaacccaaacgcaaacccaaaugcaaaccccaacgcaaacccaaacgcaaacccaaacgcaaacccaaacgcaaacccaaaugcaaacccaaacgcaaacccaaacgccaacccaaacgcaaacccaaacgcaaacccaaacgcaaacccaaacgcaaacccgaacgcaaacccaaacgcaaacccaaacgcaaacccauaaggacuaguuauaagacugacuagcccgaugggccucccaacgggcccuccuccccuccuugcaccgagauuaaucaaaggcucuuuucagagccaccaaaaaaaaaaaaaaaaaaaaaaaaaaaaaaaaaaaaaaaaaaaaaaaaaaaaaaaaaaaaaaaaaaaaaaaaaaaaaaaaaaaaaaaaaaaaaaaaaaaaagaauu

SEQ ID NO: 7966 - RNA, 1199 nt, Artificial Sequence
  mRNA Design i-3 (hSL-A100-N5) comprising derived and/or modified sequence from Pf(3D7)__XP_001351122.1__HsALB_Pf-CSP(19-272)_L(AAY)_Pf-CSP(310-3 27)_L(AAY)_Pf-CSP(346-375) (opt6)
aggagaaagcuuaccaugaaauggguaacauuuauaucacuccuauuccuuuuuucgucagcauacucacuauuccaagaauaucaaugcuacggaucaagcuccaacacaagaguacuaaacgaacuaaacuacgacaacgcaggaacaaaccuauacaacgaacuagaaaugaacuacuacggaaaacaagaaaacugguacucacuaaaaaaaaacagccgaagcuuaggagaaaaugacgacggaaacaacgaagacaacgaaaaauuacgcaaacccaaacacaaaaaacugaaacaaccagcagacggaaacccagacccaaacgcaaacccaaacguagacccaaacgcaaacccaaacguagacccaaacgcaaacccaaacguagacccaaacgcaaacccaaacgcgaacccaaacgccaacccaaacgcaaacccaaacgcaaacccaaacgcaaacccaaacgcaaacccaaacgcaaacccaaacgccaacccgaacgcaaacccaaacgcaaacccaaacgcaaauccaaacgcaaacccaaacgcaaacccaaacgccaacccaaacgcaaacccaaacgcaaacccaaauguggacccaaacgcaaacccaaacgcaaacccaaacgcaaacccaaaugcaaacccaaacgcaaacccaaacgcaaacccaaacgcaaacccaaacgcaaacccaaaugcaaacccaaacgcaaauccaaacgcaaacccaaacgcaaacccaaacgcaaacccaaacgcaaacccuaacgcaaacccaaacgcaaacccaaacgccaaccccaaugcaaacccagcagcauacgaaccaucagacaaacacauaaaagaauaccuaaacaaaauacaaaacucacucgcagcauauauaaagccaggaagcgccaacaaaccaaaagacgaacuagauuacgcaaacgacauagaaaaaaaaaucuguaaaauggaaaaaugcucauaaggacuaguuauaagacugacuagcccgaugggccucccaacgggcccuccuccccuccuugcaccgagauuaaucaaaggcucuuuucagagccaccaaaaaaaaaaaaaaaaaaaaaaaaaaaaaaaaaaaaaaaaaaaaaaaaaaaaaaaaaaaaaaaaaaaaaaaaaaaaaaaaaaaaaaaaaaaaaaaaaaaaagaauu

SEQ ID NO: 7967 - RNA, 1160 nt, Artificial Sequence
  mRNA Design i-3 (hSL-A100-N5) comprising derived and/or modified sequence from Pf(3D7)__XP_001351122.1__HsALB_Pf-CSP(19-272)_L(AAY)_Pf-CSP(346-3 65)_L(AAY)_P2 (opt6)
aggagaaagcuuaccaugaaauggguaacauucauaucacuauuauuccuuuucucaucagcuuacucacuauuccaagaauaccaaugcuacggaucauccucaaacacaagaguacuaaacgaacuaaacuacgacaacgccggaaccaaccuauacaacgaacucgaaaugaacuacuacggaaaacaagaaaacugguacucacuaaaaaaaaacagccgaucccuaggagaaaacgacgacggaaauaacgaagacaaugaaaaauuaagaaaaccaaaacacaaaaaacuaaaacaaccagcagacggaaacccagacccaaacgcaaacccaaacguagauccaaacgcaaacccaaacguagacccaaacgcaaacccaaacguagacccaaacgcuaacccaaacgcaaacccaaacgcaaacccaaacgcaaacccaaacgcaaacccaaacgcaaacccgaacgcaaaccccaacgcaaacccaaacgcaaacccaaacgcaaaccccaacgcaaacccaaacgcaaacccgaacgcaaacccaaacgcaaacccaaacgcaaacccaaacgcaaacccaaacgcaaacccaaacguagacccaaacgccaacccaaacgcaaacccaaacgcaaacccaaacgcaaacccaaacgcaaacccaaacgcaaacccaaacgcaaacccaaacgcaaacccaaacgcaaacccaaacgcaaaccccaacgcaaacccaaaugcaaacccaaacgcaaacccaaaugcaaaccccaacgcaaacccaaaugccaauccaaacgcaaacccaaacgcaaacccagccgcauacauaaaaccaggauccgcaaacaaaccaaaagacgaacuagacuacgcaaacgacauagaagcagcauaccaauauauaaaagccaacuccaaauucauagguauaacagaacucuaaggacuaguuauaagacugacuagcccgaugggccucccaacgggcccuccuccccuccuugcaccgagauuaaucaaaggcucuuuucagagccaccaaaaaaaaaaaaaaaaaaaaaaaaaaaaaaaaaaaaaaaaaaaaaaaaaaaaaaaaaaaaaaaaaaaaaaaaaaaaaaaaaaaaaaaaaaaaaaaaaaaaagaauu

SEQ ID NO: 7968 - RNA, 1154 nt, Artificial Sequence
  mRNA Design i-3 (hSL-A100-N5) comprising derived and/or modified sequence from Pf(3D7)__XP_001351122.1__HsALB_Pf-CSP(19-272)_L(AAY)_Pf-CSP(346-3 65)_L(AAY)_PADRE (opt6)
aggagaaagcuuaccaugaaauggguaaccuucauaucacuacuauucuuauucucaucagcauacucacucuuccaagaauaccaaugcuacggcucaagcucaaacacaagaguacuaaacgaauuaaacuaugacaacgccggaacaaaccuauacaaugaauuagaaaugaacuacuacggcaaacaagaaaacugguacucacucaaaaaaaacuccagaaguuuaggagaaaaugacgacggaaacaaugaagacaaugaaaaauuacgaaaaccaaaacacaaaaaacuaaaacaacccgccgacggaaaccccgacccgaacgcaaacccaaacguagacccaaacgcaaacccaaacguagacccaaaugcaaacccaaacguagacccaaacgcaaacccaaacgcaaacccaaacgcaaauccaaacgcaaacccaaaugcaaacccaaaugcaaauccaaacgcaaaccccaacgcaaacccaaacgcaaacccaaaugcaaauccaaacgccaacccaaaugcaaacccaaacgcaaauccaaacgcaaacccaaacgcaaauccaaacgcaaacccaaaugcaaacccaaacguagauccaaacgcaaacccaaacgccaacccaaacgcaaacccgaacgcaaacccaaacgcaaacccaaacgccaacccaaacgccaacccaaacgccaacccaaacgcaaacccaaacgcaaacccaaacgcaaacccaaacgcaaacccaaaugcaaacccuaacgcaaacccaaacgcaaacccaaacgcaaacccaaacgccaacccaaacgcaaauccagcagcauacauaaaaccaggaucagcaaacaaaccaaaagaugaacuagacuacgcaaaugacaucgaagcagccuacgcuaaauucguagcagccuggacacuaaaagcagcagccuaaggacuaguuauaagacugacuagcccgaugggccucccaacgggcccuccuccccuccuugcaccgagauuaaucaaaggcucuuuucagagccaccaaaaaaaaaaaaaaaaaaaaaaaaaaaaaaaaaaaaaaaaaaaaaaaaaaaaaaaaaaaaaaaaaaaaaaaaaaaaaaaaaaaaaaaaaaaaaaaaaaaaagaauu

SEQ ID NO: 7969 - RNA, 1211 nt, Artificial Sequence
  mRNA Design i-3 (hSL-A100-N5) comprising derived and/or modified sequence from Pf(3D7)__XP_001351122.1__HsALB_Pf-CSP(19-272)_L(G4S)_Pf-CSP(310-3 27)_L(G4S)_Pf-CSP(346-375) (opt6)
aggagaaagcuuaccaugaaauggguaaccuucaucucacuacuauuccuauucucaagcgcauacucacucuuucaagaauaccaaugcuacggcucaagcucaaacacacgaguacuaaacgaacuaaacuacgacaacgcaggaacaaaccuauauaacgaacucgaaaugaacuacuacggcaaacaagaaaauugguacucacuaaaaaaaaacagcagaagcuuaggagaaaacgacgacggaaacaacgaagauaacgaaaaacuaagaaaaccaaaacacaaaaaacuaaaacaacccgcagacggaaacccagacccaaacgcaaauccaaauguagacccgaacgcaaacccaaacguagacccaaaugcgaacccaaacgucgacccaaacgcaaacccaaaugcaaacccaaaugcgaacccaaacgcaaacccaaacgcaaauccaaacgcaaauccaaaugcaaacccaaacgcgaauccaaacgcaaacccaaacgcaaacccaaacgcaaacccaaacgcaaacccaaacgcaaacccaaacgcaaacccgaacgcuaacccaaacgcaaacccaaacgcaaacccaaacguagauccaaacgcgaacccaaacgcaaacccaaaugcaaacccaaacgcaaacccaaacgcaaacccaaacgcaaacccaaacgcaaacccaaacgcaaacccaaacgcgaacccaaacgcaaauccaaaugcaaacccaaacgcaaacccaaacgcaaacccaaacgcaaacccaaaugcaaacccaaacgcaaacccaaaugcaaacccaaacgcaaacccaggaggaggaggaucagaacccucagacaaacacauaaaagaauaccuaaacaaaauacaaaacucacuaggaggaggaggaucgaucaaaccaggaagcgcaaacaaaccaaaagacgaacucgacuacgcaaacgauauagaaaaaaaaauaugcaaaauggaaaaaugcucguaaggacuaguuauaagacugacuagcccgaugggccucccaacgggcccuccuccccuccuugcaccgagauuaaucaaaggcucuuuucagagccaccaaaaaaaaaaaaaaaaaaaaaaaaaaaaaaaaaaaaaaaaaaaaaaaaaaaaaaaaaaaaaaaaaaaaaaaaaaaaaaaaaaaaaaaaaaaaaaaaaaaaagaauu

SEQ ID NO: 7970 - RNA, 1196 nt, Artificial Sequence
  mRNA Design i-3 (hSL-A100-N5) comprising derived and/or modified sequence from Pf(3D7)__XP_001351122.1__HsALB_Pf-CSP(19-272)_L(G4S)_Pf-CSP(310-3 27)_Pf-CSP(346-375) (opt6)
aggagaaagcuuaccaugaaauggguaacauucauaucacuccuauuccuauucuccucagcauacucccucuuccaagaauaccaaugcuacggcucaagcucaaacacacgaguacuaaacgaacuaaauuacgacaacgccggaacaaaccuauauaaugaacuagaaaugaauuacuacggaaaacaagaaaacugguacucacuuaaaaaaaacucaagaucauuaggagaaaacgacgacggcaacaacgaagacaacgaaaaacuaagaaaaccaaaacacaaaaaacuaaaacaacccgcagacggaaauccagauccaaacgcaaacccaaacguagacccaaacgcaaacccaaacguagacccaaacgcaaacccaaacgucgacccaaacgccaacccaaacgcaaacccaaacgcaaacccaaacgcaaacccaaacgccaacccaaacgcaaacccaaacgcaaacccaaacgcaaacccaaacgcaaacccaaacgcaaacccaaacgcaaacccgaacgcaaacccaaacgcaaauccuaacgcaaacccaaacgcaaacccaaacgcaaauccgaacgcaaacccaaacguagacccaaacgcaaacccaaacgcaaacccaaacgcaaacccaaacgcaaacccaaacgcaaacccuaacgcaaacccaaaugcaaacccaaacgcgaacccaaaugcaaacccaaaugcaaacccaaacgcaaacccaaacgcaaacccaaacgcaaauccaaacgcaaauccaaacgcaaacccaaacgcaaacccaaacgcaaacccaaacgccaacccaggaggagguggaagcgaaccauccgacaaacacauaaaagaauaccuaaacaaaauacaaaacucacuaauaaaacccggcucagcaaacaaaccaaaagacgaacuagacuacgccaacgacauagaaaaaaaaauauguaaaauggaaaaaugcucauaaggacuaguuauaagacugacuagcccgaugggccucccaacgggcccuccuccccuccuugcaccgagauuaaucaaaggcucuuuucagagccaccaaaaaaaaaaaaaaaaaaaaaaaaaaaaaaaaaaaaaaaaaaaaaaaaaaaaaaaaaaaaaaaaaaaaaaaaaaaaaaaaaaaaaaaaaaaaaaaaaaaaagaauu

SEQ ID NO: 7971 - RNA, 1196 nt, Artificial Sequence
  mRNA Design i-3 (hSL-A100-N5) comprising derived and/or modified sequence from Pf(3D7)__XP_001351122.1__HsALB_Pf-CSP(19-325) (opt6)
aggagaaagcuuaccaugaaauggguaacauucauaucacuccuauuccuauucucaagcgcauacucauuauuccaagaauaccaaugcuacggaucaucaucuaacacaagaguacucaacgaacuaaacuacgacaacgcaggaacuaaucucuacaacgaacuagaaaugaacuacuacggaaaacaagaaaacugguauucacuaaaaaaaaacagccgaucauuaggagaaaacgacgacggcaacaacgaagacaacgaaaaacuacgaaaaccaaaacacaaaaaauuaaaacagccagccgacggaaacccagacccaaacgcaaacccaaacguagacccaaacgcaaacccaaacguagacccaaacgcaaacccaaacguagacccaaacgcaaacccaaacgcaaacccaaacgcaaauccaaacgcaaacccaaacgccaacccaaacgcaaacccaaacgcaaaccccaacgcaaacccaaacgcaaacccaaacgcaaacccaaaugccaacccaaacgcaaacccaaacgcaaacccaaacgcaaacccaaacgcaaacccaaaugcaaacccaaacgcaaacccaaacguagacccaaacgcaaacccaaaugcaaacccaaacgcaaaccccaacgcaaacccaaacgcaaacccaaacgcaaacccaaacgcaaacccaaacgccaacccaaacgcaaacccaaacgcaaacccaaacgcaaacccaaacgcaaacccaaacgcaaauccaaacgcaaacccaaacgcaaacccaaacgcaaacccaaacgcaaacccaaacgcaaacccaaauaaaaacaaucaaggaaacggacaaggacacaacaugccaaacgauccaaaucgcaacguagacgaaaacgcaaacgcaaacagcgcagucaaaaacaacaacaacgaagaaccaucagacaaacacauaaaagaauaccuaaauaaaauacaaaacuagggacuaguuauaagacugacuagcccgaugggccucccaacgggcccuccuccccuccuugcaccgagauuaaucaaaggcucuuuucagagccaccaaaaaaaaaaaaaaaaaaaaaaaaaaaaaaaaaaaaaaaaaaaaaaaaaaaaaaaaaaaaaaaaaaaaaaaaaaaaaaaaaaaaaaaaaaaaaaaaaaaaagaauu

SEQ ID NO: 7972 - RNA, 1373 nt, Artificial Sequence
  mRNA Design i-3 (hSL-A100-N5) comprising derived and/or modified sequence from Pf(3D7)__XP_001351122.1__HsALB_Pf-CSP(19-384) (opt6)
aggagaaagcuuaccaugaaauggguaaccuuuauaucacucuuauuccuauuuucaucagcauacucacucuuccaagaauaucaaugcuacggaucaucaucaaacacaagaguccucaaugaauuaaacuaugacaaugcaggaaccaaccuauacaacgaauuagaaaugaacuacuacggcaaacaagaaaacugguacucacucaaaaaaaacucaagauccuuaggagaaaaugaugacggaaacaacgaagacaacgaaaaacuccgaaaaccaaaacacaaaaaacuaaaacaacccgccgacggaaacccagaccccaacgcaaacccaaauguagaccccaacgcaaacccaaacguagacccaaacgcaaacccaaacguagacccaaacgcaaauccaaacgccaacccaaacgcaaacccaaacgccaacccaaacgcaaacccaaacgcaaacccaaacgcaaacccaaacgcaaacccaaaugcaaacccaaaugcaaacccaaacgcaaacccaaacgcaaacccaaacgcaaacccaaacgcaaacccaaaugcaaacccaaacgcaaacccaaacgcaaacccaaacguagacccaaaugcaaacccaaacgcaaacccaaacgcaaauccaaaugcaaauccaaacgcaaauccaaacgcaaacccaaacgcaaacccaaacgcaaacccaaacgcaaauccaaaugcaaacccaaacgcaaacccaaacgcaaacccaaacgcuaacccaaacgccaauccaaacgcaaacccaaacgcaaacccuaaugcaaacccaaacgccaacccaaauaaaaauaaccaaggaaacggacaaggacacaacaugccaaacgacccaaacagaaacgucgaugaaaacgcaaacgcaaauuccgcagucaaaaacaacaacaacgaagaaccaucagacaaacacauaaaagaauaccucaacaaaauacaaaacucccuaucaacagaauggucacccugcuccguuacaugcgguaacggcauacaaguaagaauaaaaccaggaucagcuaacaaacccaaagacgaacuagacuacgccaacgacauagaaaaaaaaauaugcaaaauggaaaaaugcuccucaguauucaacguaguaaacucaucauaaggacuaguuauaagacugacuagcccgaugggccucccaacgggcccuccuccccuccuugcaccgagauuaaucaaaggcucuuuucagagccaccaaaaaaaaaaaaaaaaaaaaaaaaaaaaaaaaaaaaaaaaaaaaaaaaaaaaaaaaaaaaaaaaaaaaaaaaaaaaaaaaaaaaaaaaaaaaaaaaaaaaagaauu

SEQ ID NO: 7973 - RNA, 1511 nt, Artificial Sequence
  mRNA Design i-3 (hSL-A100-N5) comprising derived and/or modified sequence from Pf(3D7)__XP_001351122.1__HsALB_Pf-CSP(19-384)_TM domain HA (opt6)
aggagaaagcuuaccaugaaauggguaacauuuauaucacuacuuuuccuauucucaucagcauacucacucuuccaagaauaucaaugcuauggauccucaucaaacacaagaguacucaacgaauuaaacuacgauaaugccggaacaaaccuauauaacgaacuagaaaugaacuacuacggaaaacaagaaaauugguacucauuaaaaaaaaacuccagaucccuuggagaaaacgacgauggaaacaacgaagauaacgaaaaauuaagaaaaccaaaacacaaaaaauugaaacaaccagcagacgguaacccagacccaaacgccaacccaaacguagacccaaacgcgaauccaaacgucgacccaaacgcaaaucccaacguagacccaaaugcaaauccaaaugccaauccaaacgcaaacccaaacgcaaacccaaaugcaaacccaaacgccaacccaaacgcaaauccaaacgcaaacccaaacgcaaacccaaacgccaacccaaacgccaaccccaaugcaaacccaaaugcaaacccaaacgcaaacccaaacgcaaauccaaacgcaaacccaaacgccaacccaaacguagacccaaacgcaaauccaaacgcaaacccaaacgccaauccaaacgcaaacccaaacgccaacccaaaugcaaaucccaacgcaaacccaaacgcaaauccaaaugcaaaccccaacgcaaauccaaacgcaaacccaaacgcaaauccaaacgcaaauccaaaugcaaacccaaacgcaaacccuaaugcaaacccaaacgcaaacccaaacgccaacccaaacaaaaacaaccaaggaaacggacaaggucacaauaugccaaaugacccaaaccgaaacguagacgaaaacgcaaaugccaauagcgcaguaaaaaacaauaacaacgaagaaccuucagauaaacacauaaaagaauaccuaaacaaaauacaaaacucccuaucaacagaauggucaccuuguucagucacauguggaaacggaauacaaguaagaauaaaaccaggaucagcaaacaaaccaaaagacgaacuagauuacgcaaacgauauagaaaaaaaaauauguaaaauggaaaaaugcuccucagucuucaacguagucaacaguuccaaacuagaaucaaccagaaucuaccaaauacuagcaauauauuccacaguagcaagcucacucguauuaguagucucccuaggagcaauaucauucuggaugugcucaaacggaagcuuacaaugccgaauauguauauaaggacuaguuauaagacugacuagcccgaugggccucccaacgggcccuccuccccuccuugcaccgagauuaaucaaaggcucuuuucagagccaccaaaaaaaaaaaaaaaaaaaaaaaaaaaaaaaaaaaaaaaaaaaaaaaaaaaaaaaaaaaaaaaaaaaaaaaaaaaaaaaaaaaaaaaaaaaaaaaaaaaaagaauu

SEQ ID NO: 7974 - RNA, 1223 nt, Artificial Sequence
  mRNA Design i-3 (hSL-A100-N5) comprising derived and/or modified sequence from Pf(3D7)__XP_001351122.1__HsALB_Pf-CSP(82-397) (opt6)
aggagaaagcuuaccaugaaauggguaacauucauaucacuacuauuccucuucaguucagccuauagcgauaacgaaaaacuaagaaaaccaaaacacaaaaaacucaaacaaccagcagacggaaacccagacccaaacgcaaacccaaacguagacccaaacgcaaacccaaacguagacccaaacgcaaauccaaacguagacccaaaugcaaaccccaacgcaaacccaaacgcaaacccaaacgcaaacccaaacgcaaacccaaaugcgaacccaaaugcaaauccaaacgcaaacccaaacgcaaacccaaacgcaaacccaaacgcuaacccaaacgcaaacccaaacgcaaacccaaaugcaaacccaaacgcaaacccaaacgcaaaccccaacgcaaacccaaacguagacccaaacgcaaacccaaacgcaaacccaaacgcaaacccaaacgccaacccaaaugccaacccaaacgcaaacccaaaugcaaaccccaacgcaaacccaaacgccaacccaaacgcaaacccaaacgcaaacccaaacgcaaaccccaaugcaaacccaaacgcaaacccaaaugcaaauccaaacgcaaacccaaacgcaaacccaaacgcaaacccaaacaaaaacaaccaaggaaacggacaaggacacaacaugccaaacgacccaaaucgaaacgucgaugaaaacgccaacgcaaacucagcaguaaaaaacaacaacaacgaagaaccaucugacaaacacauaaaagaauaccuaaacaaaauacaaaacucauuauccaccgaauggucaccauguucaguaacaugcggcaacggaauacaagucagaauaaaaccaggcucagcaaauaaaccaaaagacgaacuagacuacgcaaacgacauagaaaaaaaaauaugcaaaauggaaaaauguucaucagucuucaacguaguaaacucaucaauaggacucauaaugguacuaucauuccuauucuuaaacuaaggacuaguuauaagacugacuagcccgaugggccucccaacgggcccuccuccccuccuugcaccgagauuaaucaaaggcucuuuucagagccaccaaaaaaaaaaaaaaaaaaaaaaaaaaaaaaaaaaaaaaaaaaaaaaaaaaaaaaaaaaaaaaaaaaaaaaaaaaaaaaaaaaaaaaaaaaaaaaaaaaaaagaauu

SEQ ID NO: 7975 - RNA, 575 nt, Artificial Sequence
  mRNA Design i-3 (hSL-A100-N5) comprising derived and/or modified sequence from Pf(3D7)__XP_001351122.1__HsALB_Pf-CSP(93-192) (opt6)
aggagaaagcuuaccaugaaauggguaacauucaucucacuacuauuccuauucucaagcgcauacucaaaacuaaaacaaccagcagacggaaacccagacccaaacgcaaacccaaacguagacccaaacgcaaacccaaacguagacccaaacgcaaacccaaacguagacccaaacgcaaacccaaacgcaaacccaaacgcaaacccaaacgcaaacccaaacgcaaacccaaacgcaaacccaaacgcaaacccaaacgcaaacccaaacgcaaacccaaacgcaaacccaaacgcaaacccaaacgcaaacccaaacgcaaacccaaacgcaaacccaaacgcaaacccaaacgcaaacccauaaggacuaguuauaagacugacuagcccgaugggccucccaacgggcccuccuccccuccuugcaccgagauuaaucaaaggcucuuuucagagccaccaaaaaaaaaaaaaaaaaaaaaaaaaaaaaaaaaaaaaaaaaaaaaaaaaaaaaaaaaaaaaaaaaaaaaaaaaaaaaaaaaaaaaaaaaaaaaaaaaaaaagaauu

SEQ ID NO: 7976 - RNA, 815 nt, Artificial Sequence
  mRNA Design i-3 (hSL-A100-N5) comprising derived and/or modified sequence from Pf(3D7)__XP_001351122.1__HsALB_Pf-CSP(93-272) (opt6)
aggagaaagcuuaccaugaaaugggucacauucauaucacuccuauuccuauucucaagcgcauacucaaaacuaaaacaaccagcagacggaaacccagacccaaacgcaaacccaaacguagacccaaacgcaaacccaaacguagacccaaacgcaaacccaaacguagacccaaacgcaaacccaaacgcaaacccaaacgccaacccaaacgcaaacccaaacgcaaacccaaacgcaaacccaaacgcaaacccaaacgcaaacccaaacgcaaacccaaacgcaaacccaaacgcaaacccaaacgcaaacccaaacgcaaauccaaacgcaaacccaaacgccaacccaaacgcaaacccaaacgcaaacccaaacguagacccaaacgcaaacccaaacgcaaacccaaacgcaaacccaaacgcaaacccaaacgcaaacccaaacgcaaacccaaacgcaaacccaaacgcaaacccaaacgcaaauccaaacgcaaacccaaacgcaaacccaaacgcaaacccaaacgcaaacccaaacgcaaacccaaacgcaaacccaaacgcaaacccaaacgcaaacccaaacgcaaacccauaaggacuaguuauaagacugacuagcccgaugggccucccaacgggcccuccuccccuccuugcaccgagauuaaucaaaggcucuuuucagagccaccaaaaaaaaaaaaaaaaaaaaaaaaaaaaaaaaaaaaaaaaaaaaaaaaaaaaaaaaaaaaaaaaaaaaaaaaaaaaaaaaaaaaaaaaaaaaaaaaaaaaagaauu

SEQ ID NO: 7977 - RNA, 1190 nt, Artificial Sequence
  mRNA Design i-3 (hSL-A100-N5) comprising derived and/or modified sequence from Pf(3D7)__XP_001351122.1__HsALB_Pf-CSP(93-397) (opt6)
aggagaaagcuuaccaugaaauggguaacauucauaucacuccuauuccuauucucaucagcauacucaaaacuaaaacaacccgcagacggaaacccagacccaaacgccaacccaaacguagacccaaacgcaaacccgaacguagacccaaacgcaaaccccaacguagacccaaacgcaaacccaaaugcaaacccaaacgcaaacccaaacgcaaacccaaacgcaaacccaaacgcaaacccaaacgcaaacccaaacgcaaacccaaacgcaaacccaaacgcgaaucccaacgcaaauccaaacgcaaacccaaacgcaaauccaaacgcaaacccgaacgcaaacccaaacgcaaacccaaacgcaaacccaaacguagauccaaacgcaaauccaaacgcaaacccaaacgcaaauccaaacgcaaacccaaacgcaaacccaaacgcaaaccccaacgcaaacccaaacgcaaacccaaacgcaaacccaaacgcaaauccaaacgccaacccaaacgcaaacccaaacgcaaacccaaacgcgaacccaaacgcgaacccaaacgcaaacccaaacgcaaacccaaacgcaaacccaaacaaaaacaaccaagggaacggacaaggacacaacaugccaaacgauccaaacagaaacguagacgaaaacgcaaacgcaaacucagcaguaaaaaacaacaacaacgaagaaccaucagacaaacacauaaaagaauaccuaaacaaaauacaaaacucacucucaacagaauggucaccaugcaguguaacaugcggaaauggaauacaaguacguauaaaaccaggaucagcaaacaaaccaaaagacgaauuagacuacgccaacgauauagaaaaaaaaauaugcaaaauggaaaaaugcagcucagucuucaacguagucaacagcucaauaggacuaauaaugguccucucauucuuauuucuaaacugaggacuaguuauaagacugacuagcccgaugggccucccaacgggcccuccuccccuccuugcaccgagauuaaucaaaggcucuuuucagagccaccaaaaaaaaaaaaaaaaaaaaaaaaaaaaaaaaaaaaaaaaaaaaaaaaaaaaaaaaaaaaaaaaaaaaaaaaaaaaaaaaaaaaaaaaaaaaaaaaaaaaagaauu

SEQ ID NO: 7978 - RNA, 560 nt, Artificial Sequence
  mRNA Design i-3 (hSL-A100-N5) comprising derived and/or modified sequence from Pf(3D7)__XP_001351122.1__HsALB_Pf-CSP(98-192) (opt6)
aggagaaagcuuaccaugaaauggguaacauucauaagccuacuauuccuauucagcucagcauacagcgcagacggaaacccagacccaaacgcaaacccaaacguagacccaaacgcaaacccaaacguagacccaaacgcaaacccaaacguagacccaaacgcaaacccaaacgcaaacccaaacgcaaacccaaacgcaaacccaaacgcaaacccaaacgcaaacccaaacgcaaacccaaacgcaaacccaaacgcaaacccaaacgcaaacccaaacgcaaacccaaacgcaaacccaaacgcaaacccaaacgcaaacccaaacgcaaacccaaacgcaaacccauaaggacuaguuauaagacugacuagcccgaugggccucccaacgggcccuccuccccuccuugcaccgagauuaaucaaaggcucuuuucagagccaccaaaaaaaaaaaaaaaaaaaaaaaaaaaaaaaaaaaaaaaaaaaaaaaaaaaaaaaaaaaaaaaaaaaaaaaaaaaaaaaaaaaaaaaaaaaaaaaaaaaaagaauu

SEQ ID NO: 7979 - RNA, 800 nt, Artificial Sequence
  mRNA Design i-3 (hSL-A100-N5) comprising derived and/or modified sequence from Pf(3D7)__XP_001351122.1__HsALB_Pf-CSP(98-272) (opt6)
aggagaaagcuuaccaugaaauggguaacauucauaucacuacuauuccuauucagcucagccuacagcgcagacggaaacccagacccaaacgcaaacccaaacguagacccaaacgcaaacccaaacgucgacccaaacgcaaacccaaacguagacccaaacgcaaacccaaacgcaaacccaaacgcaaacccaaacgcaaacccaaacgcaaacccaaacgcaaacccaaacgcaaacccaaacgcaaacccaaacgcaaacccaaacgcaaacccaaacgcaaacccaaacgcaaacccaaacgcaaacccaaacgcaaacccaaacgcaaacccaaacgcaaacccaaacgcaaacccaaacguagacccaaaugcaaacccaaacgcaaacccaaacgcaaacccaaacgcaaacccaaacgcaaacccaaacgcaaacccaaacgcaaacccaaacgcaaacccaaacgcaaacccaaacgcaaacccaaacgcaaacccaaacgcgaacccaaacgcaaacccaaacgcaaacccaaacgcaaacccaaacgcaaacccaaaugcaaacccaaacgcaaacccauaaggacuaguuauaagacugacuagcccgaugggccucccaacgggcccuccuccccuccuugcaccgagauuaaucaaaggcucuuuucagagccaccaaaaaaaaaaaaaaaaaaaaaaaaaaaaaaaaaaaaaaaaaaaaaaaaaaaaaaaaaaaaaaaaaaaaaaaaaaaaaaaaaaaaaaaaaaaaaaaaaaaaagaauu

SEQ ID NO: 7980 - RNA, 1106 nt, Artificial Sequence
  mRNA Design i-3 (hSL-A100-N5) comprising derived and/or modified sequence from Pf(3D7)__XP_001351122.1__HsALB_Pf-CSP(98-374) (opt6)
aggagaaagcuuaccaugaaaugggucacauucauaucccuacuauuccuauucucaucagcauauucagcagauggaaacccagacccaaacgccaacccaaacguagacccaaacgcaaacccaaacguagacccaaacgcaaacccaaacguagacccaaacgcaaacccaaacgcaaacccaaacgcaaacccaaacgcaaacccaaacgcaaacccaaacgcaaacccaaacgcaaacccaaacgcaaacccaaacgcaaacccaaacgcaaacccaaacgcaaacccaaaugcaaauccaaacgcaaauccaaacgcaaacccaaacgccaacccaaacgcaaauccaaacgcaaacccaaacguagacccgaacgcaaacccgaacgcaaacccaaacgcaaacccaaaugcaaacccaaacgcaaacccaaacgccaacccaaacgcaaacccaaacgcaaacccaaaugcaaacccaaacgcaaacccaaacgccaacccaaacgcaaacccaaacgcaaacccaaacgcaaacccaaacgcaaacccaaaugcaaacccaaacgcaaacccaaacgcaaacccaaacaaaaacaaccaaggaaauggacaaggccacaacaugccaaacgacccaaacagaaacguagacgaaaacgcaaacgcaaacuccgcagucaaaaacaacaacaacgaagaaccauccgacaaacacauaaaagaauaccucaauaaaauacaaaacucacuaucaacagaaugguccccaugcucaguaacaugcggaaacggaauacaaguaagaauaaaaccaggauccgcaaacaaaccaaaagacgaacuagacuacgcaaacgauauagaaaaaaaaauaugcaaaauggaaaaaugcuaaggacuaguuauaagacugacuagcccgaugggccucccaacgggcccuccuccccuccuugcaccgagauuaaucaaaggcucuuuucagagccaccaaaaaaaaaaaaaaaaaaaaaaaaaaaaaaaaaaaaaaaaaaaaaaaaaaaaaaaaaaaaaaaaaaaaaaaaaaaaaaaaaaaaaaaaaaaaaaaaaaaaagaauu

SEQ ID NO: 7981 - RNA, 1175 nt, Artificial Sequence
  mRNA Design i-3 (hSL-A100-N5) comprising derived and/or modified sequence from Pf(3D7)__XP_001351122.1__HsALB_Pf-CSP(98-397) (opt6)
aggagaaagcuuaccaugaaauggguaaccuucauaucauuacuauuccuuuucagcucggcauacucagcagacggcaacccagacccaaacgcaaacccaaacgucgacccaaaugcgaacccaaacguagacccaaacgcaaacccaaacguagauccaaacgcaaacccaaacgcaaacccaaacgcaaacccaaacgcaaacccaaacgccaacccaaaugcaaacccaaacgcaaaccccaacgcaaacccaaacgcaaacccaaacgcaaacccaaacgcaaaucccaacgcaaauccaaacgcaaacccaaaugcaaacccaaacgccaacccaaacgcaaacccaaacgcaaaccccaaugucgacccaaacgcaaacccaaacgcaaacccaaacgcaaacccaaacgcaaauccaaacgcaaaccccaacgcaaacccaaacgcaaacccaaacgcaaacccaaacgcaaacccaaacgcaaacccaaacgcaaacccaaacgcaaacccaaacgcaaacccaaacgcaaacccaaacgcaaauccaaacgcaaacccaaacgcaaacccaaacgcaaacccaaacaaaaacaaccaaggaaauggacaaggacacaacaugccaaaugaccccaacagaaacgucgacgaaaacgccaacgcaaacagcgcaguaaaaaacaacaacaaugaagaaccaucagacaaacacauaaaagaauaccuaaacaaaauucaaaacucacuaucaaccgaaugguccccaugcucaguaacaugcggaaacgguauacaaguacgaauaaaaccaggaucagcaaacaaaccaaaagacgaacuagacuacgcaaacgacauagaaaaaaaaauaugcaaaauggaaaaaugcucaucaguuuuuaacguagucaauagcucaaucggacucauaaugguacuaucauuucucuuccuaaauuaaggacuaguuauaagacugacuagcccgaugggccucccaacgggcccuccuccccuccuugcaccgagauuaaucaaaggcucuuuucagagccaccaaaaaaaaaaaaaaaaaaaaaaaaaaaaaaaaaaaaaaaaaaaaaaaaaaaaaaaaaaaaaaaaaaaaaaaaaaaaaaaaaaaaaaaaaaaaaaaaaaaaagaauu

SEQ ID NO: 7982 - RNA, 1502 nt, Artificial Sequence
  mRNA Design i-3 (hSL-A100-N5) comprising derived and/or modified sequence from Pf(3D7)__XP_001351122.1__HsALB_Pf-CSP(199-377)_L(PVTN)_HBsAg (opt6)
aggagaaagcuuaccaugaaauggguaacauuuauauccuuacuauuucucuucuccucagcuuacucugacccaaacgcaaaucccaacgcaaacccaaaugcaaacccaaacgcaaauccaaacgcaaacccaaaugcuaaucccaacgcaaacccaaacgcaaaccccaaugccaacccaaacgcuaacccaaacgcaaacccaaacgccaacccaaaugcaaacccaaacgcaaacccaaacgcaaauccaaaugcaaacccaaacgcaaauccaaacgcaaacccaaacaaaaacaaccaaggaaacggacaaggccauaauaugccuaaugaccccaacagaaacguagacgaaaaugcuaacgccaacucagcaguaaaaaacaacaauaacgaagaaccaucagauaaacacauaaaagaauacuuaaacaaaauacaaaauucauuaucaacagaauggucaccaugcucagucaccugcggaaacgguauacaaguacgcauaaaaccaggcucagcaaauaaaccaaaagacgaacuagauuacgcuaacgacauagaaaaaaaaauaugcaaaauggaaaaaugcucaucaguaccaguaacaaauauggaaaacauaacaucaggauuccuaggcccacucuuaguacuacaagcaggauuuuuucuucuaacaagaaucuuaacuauaccccaaucacucgacucaugguggaccucacuaaauuuccucggaggaucuccaguaugccucggacaaaauucacaaucaccaacauccaaucacucacccaccuccugcccaccaaucugcccaggauacagauggaugugcuuacgaagauucauaauauuccuauucauacuacuucuaugcuuaauauuccuucucguccuacucgacuaucaaggaaugcucccuguaugcccacucauaccaggauccacaacaacuaacacaggacccuguaaaacaugcacaacacccgcccaaggaaauucaauguuccccucuugcugcugcacaaaaccaacagacggaaauugcacaugcauuccaauuccaucaucuugggcauuugcaaaauacuuaugggaaugggcaucaguccgauucucgugguuaucuuuacuaguaccauucguucaaugguuuguaggacuuucaccuacaguaugguuaucugcaauauggaugaugugguacuggggaccaucauuauacucaaucguaucaccauuuauaccacuacuacccauauuuuucugccuauggguauacauauaaggacuaguuauaagacugacuagcccgaugggccucccaacgggcccuccuccccuccuugcaccgagauuaaucaaaggcucuuuucagagccaccaaaaaaaaaaaaaaaaaaaaaaaaaaaaaaaaaaaaaaaaaaaaaaaaaaaaaaaaaaaaaaaaaaaaaaaaaaaaaaaaaaaaaaaaaaaaaaaaaaaaagaauu

SEQ ID NO: 7983 - RNA, 1412 nt, Artificial Sequence
  mRNA Design i-3 (hSL-A100-N5) comprising derived and/or modified sequence from Pf(3D7)__XP_001351122.1__Pf-CSP (opt11)
aggagaaagcuuaccaugaugcgaaagcuugcgauccucagcgucuccucauuccuauucguagaagcacuauuccaagaauaccaaugcuacggcucauccucaaacacacgcguacucaacgaacucaacuacgacaacgcaggaacaaaccucuacaacgaacuagagaugaacuacuacggcaaacaagaaaacugguacucucucaaaaaaaacucacgaagccucggcgagaacgacgacggaaacaacgaagacaacgaaaaacuccgcaaaccaaaacacaaaaaacucaaacaacccgccgacggaaacccagacccaaacgcaaacccaaacguagacccaaacgccaaccccaacguagaccccaacgccaacccuaacgucgaccccaaugcaaaccccaacgcgaacccaaacgcaaaccccaacgcaaaccccaacgcaaacccaaacgccaaccccaacgcaaacccaaacgcaaacccuaacgccaacccaaacgccaacccaaacgccaacccaaacgcaaacccgaacgccaaccccaacgccaacccaaacgcaaacccaaacgcaaaccccaacgccaaccccaacguagaccccaacgcaaaccccaacgcaaacccaaacgccaaccccaacgccaaccccaacgccaaccccaacgccaaccccaaugccaacccaaacgcgaaccccaacgcaaacccgaacgcaaacccaaacgcgaacccaaacgcgaacccaaacgccaaccccaacgccaaccccaacgcaaacccaaacgcgaacccaaacgcaaaccccaacgccaacccaaacaaaaacaaccaaggaaacggacaaggccacaacaugccaaacgaccccaaccgcaacguagacgaaaacgccaacgccaacuccgcugucaagaacaacaacaacgaagaaccauccgacaaacacauaaaagaauaccuaaacaaaauccaaaacucccucucaaccgaauggucccccugcuccgucacaugcggaaacggcauccaaguccgaaucaaaccaggcuccgccaacaaacccaaagacgaacuggacuacgccaacgacaucgaaaaaaaaaucugcaaaauggaaaaaugcucauccgucuucaacguggucaacuccuccaucggacuaauaaugguccucuccuuccuauuccuaaacuaaggacuaguuauaagacugacuagcccgaugggccucccaacgggcccuccuccccuccuugcaccgagauuaaucaaaggcucuuuucagagccaccaaaaaaaaaaaaaaaaaaaaaaaaaaaaaaaaaaaaaaaaaaaaaaaaaaaaaaaaaaaaaaaaaaaaaaaaaaaaaaaaaaaaaaaaaaaaaaaaaaaaagaauu

SEQ ID NO: 7984 - RNA, 1343 nt, Artificial Sequence
  mRNA Design i-3 (hSL-A100-N5) comprising derived and/or modified sequence from Pf(3D7)__XP_001351122.1__Pf-CSP(1-374) (opt11)
aggagaaagcuuaccaugaugcgcaaacucgcaauccucuccgucucaucguuccuauucguagaagcacucuuccaagaauaccaaugcuacggcucaagcuccaacacaagaguacucaacgaacucaacuacgacaaugccggaacaaaccuauacaacgagcuagaaaugaacuacuacggcaaacaagaaaacugguacucgcuaaaaaaaaacagcagaagccuaggugaaaacgacgacggaaacaacgaagacaacgaaaaacugcgcaaaccaaaacacaaaaaacuaaaacaacccgcagacggcaacccagacccaaacgcaaacccaaacguagaccccaacgccaacccaaacguagacccaaacgccaacccaaacguagacccaaacgcaaacccgaacgcaaacccaaacgcaaacccaaacgcaaacccaaacgcaaacccaaacgccaaccccaacgcaaauccaaacgcaaaccccaacgcaaaccccaacgccaacccaaacgcaaaccccaacgcgaacccaaacgccaaccccaacgccaacccaaacgcaaacccaaacgcaaacccaaacgccaaccccaacgucgacccaaacgccaacccaaacgcaaaccccaacgccaaccccaacgcaaacccaaacgccaacccgaacgcaaacccgaacgcaaacccaaacgcaaaccccaacgcaaaccccaacgcaaacccaaacgcaaaccccaacgccaaccccaacgccaaccccaacgcaaacccaaacgcaaacccgaacgcaaaccccaacgcaaaccccaacgccaaucccaacaaaaacaaccaaggcaacggacaaggacacaacaugccaaacgaccccaaccgcaacgucgacgaaaacgccaacgccaacuccgcggucaaaaacaacaacaacgaagagcccucagacaaacacauaaaagaauaccuaaacaaaauccaaaacucccucucgacagaauggucccccugcagcgucaccugcggaaacggcauacaaguacgaauaaaacccggcucagccaacaaaccaaaagacgaacuagacuacgccaacgacauagaaaaaaaaauaugcaaaauggaaaaaugcugaggacuaguuauaagacugacuagcccgaugggccucccaacgggcccuccuccccuccuugcaccgagauuaaucaaaggcucuuuucagagccaccaaaaaaaaaaaaaaaaaaaaaaaaaaaaaaaaaaaaaaaaaaaaaaaaaaaaaaaaaaaaaaaaaaaaaaaaaaaaaaaaaaaaaaaaaaaaaaaaaaaaagaauu

SEQ ID NO: 7985 - RNA, 1196 nt, Artificial Sequence
  mRNA Design i-3 (hSL-A100-N5) comprising derived and/or modified sequence from Pf(3D7)__XP_001351122.1__Pf-CSP(1-325) (opt11)
aggagaaagcuuaccaugaugcgcaaacucgcaauccuaucaguaagcucauuccuguucguagaagcacuauuccaagaauaccaaugcuacggcucauccucaaacacaagaguacuaaacgaacuaaacuacgacaacgccggaaccaaccuauacaacgaacucgaaaugaacuacuacggcaaacaagaaaacugguacucacuaaagaaaaacagcagaagccucggcgaaaacgacgacggcaacaacgaagacaacgagaaacugagaaaaccaaaacacaagaaacuaaaacaacccgcggacgggaacccagacccaaaugcaaacccaaacgucgacccaaacgcaaacccaaacguagacccaaacgcaaaccccaacguagaccccaacgcaaacccaaacgcaaacccaaacgcaaacccaaacgcaaacccaaacgcaaaccccaacgcaaacccaaacgcaaacccaaacgcaaaccccaacgccaacccaaacgccaaccccaacgcaaacccaaacgcaaacccaaacgcaaaccccaacgccaacccgaacgcaaacccaaacgcaaacccaaacgcaaaccccaacguagacccaaacgcaaacccaaacgccaaccccaacgcaaacccaaacgcaaacccgaacgcaaaccccaacgcaaaccccaacgcaaacccaaacgcaaaccccaacgcaaauccaaacgcaaacccaaacgcaaacccaaacgccaacccaaacgcaaaucccaacgcaaacccaaacgcaaaccccaacgcaaacccaaacgcaaacccaaacgcaaacccaaacaaaaacaaccaaggaaacggccaaggacacaacaugccaaacgacccaaaccgaaacguagacgaaaacgccaacgccaacagcgcagucaaaaacaacaauaaugaagaacccuccgacaaacacauaaaagaauaccuaaacaaaauccaaaacugaggacuaguuauaagacugacuagcccgaugggccucccaacgggcccuccuccccuccuugcaccgagauuaaucaaaggcucuuuucagagccaccaaaaaaaaaaaaaaaaaaaaaaaaaaaaaaaaaaaaaaaaaaaaaaaaaaaaaaaaaaaaaaaaaaaaaaaaaaaaaaaaaaaaaaaaaaaaaaaaaaaaagaauu

SEQ ID NO: 7986 - RNA, 1412 nt, Artificial Sequence
  mRNA Design i-3 (hSL-A100-N5) comprising derived and/or modified sequence from Pf(3D7)__XP_001351122.1__HsALB_Pf-CSP(19-397) (opt11)
aggagaaagcuuaccaugaaaugggucaccuucauaucccuccuauuccucuucucaucagccuacucccucuuccaggaauaccaaugcuacggaucguccucaaacacuagaguacucaaugaauuaaacuacgacaacgccggcaccaaccucuacaacgaacucgaaaugaacuacuacggaaaacaagaaaacugguacucacucaaaaaaaacucucgaucccucggcgaaaacgacgacggcaacaacgaagacaacgagaaacuacgcaaaccaaaacacaaaaaauuaaaacaacccgccgacggcaaccccgaccccaacgccaaccccaacguagaccccaacgcgaaccccaacgucgacccaaacgccaaccccaacguggaccccaacgccaacccaaacgccaaccccaacgccaacccaaacgcaaaccccaacgccaacccaaacgccaaccccaacgcaaacccaaacgcgaacccaaacgcaaacccaaacgccaacccaaacgcaaacccaaacgcgaacccaaacgccaacccaaacgccaaccccaacgcaaacccaaacgccaacccaaacgccaacccaaacguagacccaaacgcgaaccccaacgcuaacccaaacgcaaacccaaacgccaacccaaacgccaacccuaacgcaaacccaaacgccaaccccaacgccaaccccaacgccaaccccaacgcaaacccaaacgccaacccaaacgccaaccccaacgccaacccaaacgcaaacccaaacgcaaacccaaacgcaaaccccaacgccaacccaaacgccaacccaaacaaaaauaaccaaggcaaugggcaaggccacaacaugccaaacgaccccaaccgcaaugucgacgaaaacgccaacgccaacucugcaguaaaaaacaauaacaacgaagaacccucagacaaacacaucaaagaauaccucaacaagauccaaaauucccucuccacagaauggucccccugcagcguaaccugcggcaacggcauccaaguccgcaucaaacccggcuccgccaacaaaccgaaagacgaacuagacuacgccaacgacauagaaaaaaaaaucugcaaaauggaaaaaugcagcuccgucuucaacgucgucaacagcuccaucggccucaucaugguccucuccuuccuguuccucaacuaaggacuaguuauaagacugacuagcccgaugggccucccaacgggcccuccuccccuccuugcaccgagauuaaucaaaggcucuuuucagagccaccaaaaaaaaaaaaaaaaaaaaaaaaaaaaaaaaaaaaaaaaaaaaaaaaaaaaaaaaaaaaaaaaaaaaaaaaaaaaaaaaaaaaaaaaaaaaaaaaaaaaagaauu

SEQ ID NO: 7987 - RNA, 1430 nt, Artificial Sequence
  mRNA Design i-3 (hSL-A100-N5) comprising derived and/or modified sequence from Pf(3D7)__XP_001351122.1__HsIns-iso1_Pf-CSP(19-397) (opt11)
aggagaaagcuuaccauggcacucuggaugagacuccucccccuccucgcacuccucgcccuauggggcccagacccagcggcagcccucuuccaagaauaccaaugcuacggcucauccuccaacacccgaguccucaaugaacuaaacuacgacaacgccggcaccaaccuauacaacgaacuagaaaugaacuacuacggcaaacaagaaaacugguacucccucaaaaaaaauucacgcucccuaggugagaacgacgacggaaacaacgaagacaacgaaaaacuccgaaaacccaaacacaaaaaacuaaaacaaccagcagacggcaaccccgaccccaacgcaaaccccaacguagacccaaacgcgaaccccaacgucgauccaaacgccaacccaaacguugaccccaacgcgaaccccaacgcaaacccaaacgcaaacccuaacgcgaaccccaacgcaaaccccaacgccaaccccaacgccaaccccaacgccaacccaaacgcaaaccccaacgccaaccccaacgcaaacccaaacgcaaacccgaacgcaaaccccaacgccaacccaaacgcaaacccaaacgccaacccaaacgcaaaccccaacguagacccaaacgccaaucccaacgcgaaccccaacgcaaacccaaacgcgaacccaaacgccaacccaaacgcaaacccgaacgccaacccaaacgccaaccccaacgcaaaccccaacgcaaacccaaacgccaacccaaacgcaaacccaaacgcaaaccccaacgccaaccccaacgcaaacccaaaugccaaccccaacgccaaccccaacgcaaacccaaacaaaaacaaccaaggaaacggccaaggccacaacaugccgaacgaccccaaccgaaacgucgacgaaaacgcaaacgccaacucagcggucaaaaacaacaacaacgaagaacccucagacaaacacaucaaagaauaccuaaacaagauccagaacucucucucaacagaauggucccccugcuccguaacaugcggcaacggcauccaaguacgaaucaaaccgggaucagccaauaaacccaaagacgaacucgacuacgccaacgacaucgaaaaaaaaauaugcaaaauggaaaaaugcagcucagucuucaacguagucaacagcuccauaggccucaucaugguacucuccuuccuguuccuaaacuaaggacuaguuauaagacugacuagcccgaugggccucccaacgggcccuccuccccuccuugcaccgagauuaaucaaaggcucuuuucagagccaccaaaaaaaaaaaaaaaaaaaaaaaaaaaaaaaaaaaaaaaaaaaaaaaaaaaaaaaaaaaaaaaaaaaaaaaaaaaaaaaaaaaaaaaaaaaaaaaaaaaaagaauu

SEQ ID NO: 7988 - RNA, 1409 nt, Artificial Sequence
  mRNA Design i-3 (hSL-A100-N5) comprising derived and/or modified sequence from Pf(3D7)__XP_001351122.1__HsSPARC_Pf-CSP(19-397) (opt11)
aggagaaagcuuaccaugcgcgccuggauauucuuccuccuaugccuagcaggacgcgcccucgcacucuuccaagaauaccaaugcuacggcucauccucaaacacccgcguacuuaacgaacuaaacuacgacaacgccggaaccaaccuauacaacgaacucgaaaugaacuacuacgguaaacaagaaaacugguacucccucaaaaaaaacagccgaagccuaggagaaaacgacgacggaaacaacgaagacaacgaaaaacugcgcaaacccaaacacaaaaaacucaaacaacccgcagacgggaacccagacccaaacgcaaacccaaacguggacccaaacgccaacccuaacguagaccccaacgcaaaccccaacgucgacccuaaugcaaacccaaacgccaaccccaacgcgaacccaaacgcaaaccccaacgcuaacccgaacgccaaccccaacgccaacccgaacgcaaacccaaacgcaaacccaaacgcgaacccaaacgcaaacccaaacgccaaccccaacgcgaacccaaacgccaauccaaacgccaacccaaacgcaaacccaaacgccaaccccaacguagacccaaacgccaacccaaacgcgaacccaaacgcaaaccccaacgcaaacccaaacgcaaacccaaacgccaacccuaacgcaaacccaaacgccaaccccaacgccaacccaaacgcaaacccaaacgccaacccaaacgccaaccccaacgcaaacccgaacgcaaaccccaacgcaaacccaaacgcaaacccaaacgcgaacccgaacgccaacccaaauaagaacaaccaaggaaacggacaaggccacaacaugccaaacgaccccaaccgcaacgucgacgaaaacgcaaaugccaacuccgcagucaaaaacaacaauaacgaagaacccucggacaaacacaucaaagaauaccucaacaagauccaaaacucacucuccaccgaauggucacccugcagcguaacuugcggcaacggcauccaaguccgcauaaaaccaggcuccgcaaacaaacccaaagacgaacucgacuaugccaacgacaucgaaaaaaaaauaugcaaaauggaaaaaugcagcucagucuucaacguagucaacagcucuaucggacuaauaaugguacucuccuuccuauucuuaaacuaaggacuaguuauaagacugacuagcccgaugggccucccaacgggcccuccuccccuccuugcaccgagauuaaucaaaggcucuuuucagagccaccaaaaaaaaaaaaaaaaaaaaaaaaaaaaaaaaaaaaaaaaaaaaaaaaaaaaaaaaaaaaaaaaaaaaaaaaaaaaaaaaaaaaaaaaaaaaaaaaaaaaagaauu

SEQ ID NO: 7989 - RNA, 1412 nt, Artificial Sequence
  mRNA Design i-3 (hSL-A100-N5) comprising derived and/or modified sequence from Pf(3D7)__XP_001351122.1__IgE_Pf-CSP(19-397) (opt11)
aggagaaagcuuaccauggacuggacauggauccucuuccucgucgccgcggccacacgcguacacucacucuuccaagaauaucaaugcuacggcucaagcucgaacacgcgcguacucaacgaacuaaacuacgacaacgccggcaccaaccuauacaacgaacucgaaaugaacuacuacggcaaacaagaaaacugguacucacuuaagaaaaauucacgaucccucggagaaaacgacgaugggaacaacgaagacaacgaaaaacuacgcaaacccaaacacaagaaacuuaaacaacccgcagacggcaacccagacccaaacgcaaaccccaacguagaccccaacgcaaacccaaacguagacccaaacgccaacccaaacguagacccaaacgcgaacccaaacgccaacccaaacgccaaccccaacgcaaacccaaacgcaaauccaaacgcaaacccaaaugcaaacccgaacgccaauccaaacgcaaaccccaacgcaaacccaaacgcaaaccccaaugccaacccaaacgcaaaccccaacgcaaaccccaacgcaaaccccaacgcaaacccaaacgcgaacccaaacguagaccccaacgccaaccccaacgccaacccaaacgcaaacccaaacgccaacccaaacgccaaccccaacgcaaaccccaacgcaaacccgaacgcaaacccaaacgcaaacccaaacgcaaacccgaacgcaaacccuaacgcgaaccccaacgccaaccccaacgcaaacccaaacgcaaacccaaacgccaacccaaacgcaaacccaaacgcaaacccaaacaaaaacaaccaaggaaacgggcaaggacauaacaugccgaacgaccccaaccgcaacguagacgaaaacgccaacgccaacagcgcagucaaaaacaacaacaacgaagaacccuccgacaaacacaucaaagaauaccuaaacaaaauccagaacucacuauccaccgaauggucccccugcagcgugaccugcggcaacggcauacaaguccgcauaaaaccaggcuccgccaacaaacccaaagacgaacuagacuacgccaacgacauagaaaagaaaauaugcaaaauggaaaaaugcagcucagucuucaauguagucaacuccuccaucggacucauaaugguccuaucauuccucuuccuaaacuaaggacuaguuauaagacugacuagcccgaugggccucccaacgggcccuccuccccuccuugcaccgagauuaaucaaaggcucuuuucagagccaccaaaaaaaaaaaaaaaaaaaaaaaaaaaaaaaaaaaaaaaaaaaaaaaaaaaaaaaaaaaaaaaaaaaaaaaaaaaaaaaaaaaaaaaaaaaaaaaaaaaaagaauu

SEQ ID NO: 7990 - RNA, 1577 nt, Artificial Sequence
  mRNA Design i-3 (hSL-A100-N5) comprising derived and/or modified sequence from Pf(3D7)__XP_001351122.1__Pf-CSP_L(G4SG4)_TM domain HA (opt11)
aggagaaagcuuaccaugaugcgcaaacucgccauccucagcgucagcucguuccucuucgucgaagcacuauuccaagaauaccaguguuacggcucauccucaaacacacgcgugcucaacgaacuaaacuacgacaacgccggcaccaaccucuacaacgaacuagaaaugaacuauuacggcaagcaagaaaacugguacucacucaaaaaaaacagccgaagccuaggcgagaacgacgacgggaacaacgaagacaacgaaaaacuacgcaaacccaagcacaaaaaacugaaacaaccagccgacggaaauccagaccccaacgcaaacccgaacguagaccccaacgcgaaccccaacguggacccgaacgcaaacccgaacguagacccaaacgcaaacccaaacgcgaacccaaacgcaaacccaaacgcuaacccaaacgcaaaccccaacgccaaccccaacgcgaacccaaacgcaaacccaaacgcaaacccaaacgcaaacccgaacgcaaacccaaacgccaacccaaacgcgaacccaaacgccaacccaaacgcaaacccaaacgcaaacccaaacgcaaacccaaacguagacccgaacgccaacccgaaugcaaacccaaacgcaaacccgaacgcaaacccaaacgcgaacccgaacgccaacccaaacgcaaacccgaacgcaaaccccaacgccaacccaaacgcaaaccccaacgcaaaccccaacgcaaacccgaacgcaaacccaaacgcaaacccaaacgccaaccccaacgccaaccccaacgcaaacccgaacgccaacccaaacaaaaacaaccaaggcaacgggcaaggacacaacaugccaaacgaccccaaccgaaacgucgacgaaaacgccaacgccaacuccgcagucaaaaacaacaacaacgaagaacccucagacaaacacauaaaagaauaccucaacaaaauccaaaacucacucucaaccgaguggucacccugcagugugaccuguggcaacggaauacaaguacgcauaaaacccggaucagccaacaaaccgaaagacgaacuagacuacgccaacgacauagaaaaaaaaauaugcaaaauggagaaaugcagcucugucuucaacgucgucaacagcucaaucggacucauaaugguccucuccuuccuauuccucaacggcggagggggcucaggcggcggaggaaaauuagaauccaccagaaucuaucagauucucgccauauacagcacagucgcaagcucgcuuguccuugucguaucacuaggcgcaaucucauucuggaugugcuccaacggaagccugcaaugccgcauuugcauauaaggacuaguuauaagacugacuagcccgaugggccucccaacgggcccuccuccccuccuugcaccgagauuaaucaaaggcucuuuucagagccaccaaaaaaaaaaaaaaaaaaaaaaaaaaaaaaaaaaaaaaaaaaaaaaaaaaaaaaaaaaaaaaaaaaaaaaaaaaaaaaaaaaaaaaaaaaaaaaaaaaaaagaauu

SEQ ID NO: 7991 - RNA, 1451 nt, Artificial Sequence
  mRNA Design i-3 (hSL-A100-N5) comprising derived and/or modified sequence from Pf(3D7)__XP_001351122.1__Pf-CSP(199-377)_L(PVTN)_HBsAg (opt11)
aggagaaagcuuaccauggaccccaacgccaaccccaacgccaaccccaacgccaaucccaacgcuaaccccaacgccaaccccaacgcaaaccccaacgccaacccaaacgccaaccccaacgcaaaccccaacgccaaucccaaugccaaccccaacgccaaccccaacgcgaaccccaacgccaaccccaacgcaaacccaaacgccaaccccaacgccaaccccaacgccaaccccaacaaaaacaaccaaggcaacggccaaggccacaacaugcccaacgaccccaaccgcaacguagacgagaacgccaacgccaacagcgcugucaaaaacaacaacaacgaggaacccuccgacaaacacaucaaagaauaccuuaacaaaauccaaaacucucucuccaccgaguggucccccugcucagucacaugcggcaacggcauacaaguucguaucaaacccggcucagcaaacaaacccaaagacgaacucgacuacgcaaacgacauagaaaagaaaaucugcaaaauggaaaaauguucauccguccccgucaccaacauggaaaacaucacuuccggauuccucgguccccuacucguacuccaagccggcuucuuccuccucacccgcauccucaccaucccccaaucacuugacuccugguggaccucccucaacuuccucggcggcucccccgucugccuaggccaaaacagccaaucccccacuagcaaccacucccccacauccugcccacccaucugccccggauaucgauggaugugccuucgccgauucauaaucuuccucuucauccuccuacucugccucaucuuccuccucguccuucuagauuaccaaggcaugcuccccgucugcccccuuauccccggcuccaccaccacaaacaccggccccugcaaaaccugcacaacccccgcccaaggcaauagcauguuccccuccugcugcugcacuaaaccaacagacggcaacuguaccugcaucccaaucccaucaucaugggccuucgccaaauaccucugggaaugggcaucuguacgauucuccuggcucucccuucucguacccuucguccagugguucgucggccucucccccaccguauggcuauccgccaucuggaugaugugguacuggggccccucccuauacuccaucgucuccccauucauaccacuccuacccaucuucuucugccucugggucuacaucugaggacuaguuauaagacugacuagcccgaugggccucccaacgggcccuccuccccuccuugcaccgagauuaaucaaaggcucuuuucagagccaccaaaaaaaaaaaaaaaaaaaaaaaaaaaaaaaaaaaaaaaaaaaaaaaaaaaaaaaaaaaaaaaaaaaaaaaaaaaaaaaaaaaaaaaaaaaaaaaaaaaaagaauu

SEQ ID NO: 7992 - RNA, 1493 nt, Artificial Sequence
  mRNA Design i-3 (hSL-A100-N5) comprising derived and/or modified sequence from Pf(3D7)__XP_001351122.1__Pf-CSP(199-387)_L(PVTN)_HBsAg (opt11)
aggagaaagcuuaccaugauggcccccgaccccaacgcaaauccaaacgcaaaccccaacgccaacccuaacgcaaaccccaacgccaacccaaacgccaaucccaacgccaacccuaacgccaaccccaacgcaaaccccaacgccaaccccaacgccaacccuaacgcaaaccccaacgccaacccaaacgcaaaccccaacgccaaccccaacgccaaccccaacgcaaacccaaacgcaaaccccaacaaaaacaaccaaggaaacggacaaggccacaacaugccuaacgaccccaaucgcaacgucgacgaaaacgcaaacgccaacuccgccgucaaaaacaacaacaacgaagaacccucugacaaacacaucaaagaauaccucaacaagauccaaaacucccuauccaccgaauggucccccugcuccgucacuugcgguaauggcauccaaguccgcauaaaaccaggauccgcaaacaaacccaaagacgaacuagacuacgccaacgacauagaaaagaaaaucugcaaaauggaaaaaugcuccucagucuucaaugucguaaacuccuccauuggccuaggccccgucaccaacauggaaaacauuaccuccggauuccucgguccucuccucguccuccaagccggauucuuucuccucacacgaauccucacuaucccucaaucccuggacucaugguggaccucccucaacuuccugggcggcucccccgucugccucggccaaaacagccaauccccaaccuccaaucacucccccacaagcugcccucccauaugccccggcuaccgcuggaugugccuccgucgcuucaucauauuccucuucauacuucuccucugccucaucuuccuccuuguccugcuagacuaccaaggcaugcuccccgucugcccacucauccccgguuccaccacaacaaacaccggccccugcaaaacaugcaccacacccgcccaagguaacuccauguuccccuccugcugcugcaccaaaccaaccgacggcaacugcacuugcauucccauccccucauccugggccuucgccaaauaccucugggaaugggcauccguccguuucucauggcuaucucuccuaguaccauucguacaaugguucguuggccucucccccaccguauggcucuccgccauauggaugaugugguacuggggcccuucacuuuacuccaucgucucacccuucaucccacuccuacccaucuucuucugccuuuggguauacaucuaaggacuaguuauaagacugacuagcccgaugggccucccaacgggcccuccuccccuccuugcaccgagauuaaucaaaggcucuuuucagagccaccaaaaaaaaaaaaaaaaaaaaaaaaaaaaaaaaaaaaaaaaaaaaaaaaaaaaaaaaaaaaaaaaaaaaaaaaaaaaaaaaaaaaaaaaaaaaaaaaaaaaagaauu

SEQ ID NO: 7993 - RNA, 677 nt, Artificial Sequence
  mRNA Design i-3 (hSL-A100-N5) comprising derived and/or modified sequence from Pf(3D7)__XP_001351122.1__HsALB_Pf-CSP(19-152) (opt11)
aggagaaagcuuaccaugaaaugggucaccuucaucucccuccucuuccucuucuccagcgcauacucccucuuccaagaauaccaaugcuacggcuccuccuccaacacccgcguccucaacgaacucaacuacgacaacgccggcaccaaccucuacaacgaacucgaaaugaacuacuacggcaaacaagaaaacugguacucccucaaaaaaaacucccgcucccuaggcgaaaacgacgacggaaacaacgaagacaacgaaaaacuccgcaaacccaaacacaaaaaacucaaacaacccgccgacggaaaccccgaccccaacgccaacccaaacgucgaccccaacgccaaccccaacgucgaccccaacgccaaccccaacgucgaccccaacgccaaccccaacgcaaacccaaacgcaaacccaaacgccaaccccaacgccaaccccaacgccaaccccuaaggacuaguuauaagacugacuagcccgaugggccucccaacgggcccuccuccccuccuugcaccgagauuaaucaaaggcucuuuucagagccaccaaaaaaaaaaaaaaaaaaaaaaaaaaaaaaaaaaaaaaaaaaaaaaaaaaaaaaaaaaaaaaaaaaaaaaaaaaaaaaaaaaaaaaaaaaaaaaaaaaaaagaauu

SEQ ID NO: 7994 - RNA, 797 nt, Artificial Sequence
  mRNA Design i-3 (hSL-A100-N5) comprising derived and/or modified sequence from Pf(3D7)__XP_001351122.1__HsALB_Pf-CSP(19-192) (opt11)
aggagaaagcuuaccaugaaauggguaaccuucauaucccuccucuuccuauucucgagcgccuacucccucuuccaagaauaccaaugcuacggcucauccuccaacacccgcguccucaacgaacucaacuacgacaacgccggcaccaaccucuacaacgaacuagagaugaacuacuacggcaaacaagaaaacugguacucacucaaaaaaaacucccgaucccuaggagaaaacgacgacggcaacaacgaagacaacgaaaaacuacgaaaacccaaacacaaaaaacucaaacaacccgccgacggcaaccccgaccccaacgccaaccccaacgucgaccccaacgccaacccaaacguagaccccaacgccaaccccaacgucgacccaaacgccaaccccaacgccaaccccaacgccaacccaaacgcaaacccaaacgcaaacccaaacgccaacccaaacgccaaccccaacgccaaccccaacgcaaaccccaacgcaaaccccaacgccaacccaaacgcaaaccccaacgccaacccaaacgccaacccaaacgccaaccccaacgcaaaccccuaaggacuaguuauaagacugacuagcccgaugggccucccaacgggcccuccuccccuccuugcaccgagauuaaucaaaggcucuuuucagagccaccaaaaaaaaaaaaaaaaaaaaaaaaaaaaaaaaaaaaaaaaaaaaaaaaaaaaaaaaaaaaaaaaaaaaaaaaaaaaaaaaaaaaaaaaaaaaaaaaaaaaagaauu

SEQ ID NO: 7995 - RNA, 1037 nt, Artificial Sequence
  mRNA Design i-3 (hSL-A100-N5) comprising derived and/or modified sequence from Pf(3D7)__XP_001351122.1__HsALB_Pf-CSP(19-272) (opt11)
aggagaaagcuuaccaugaaauggguaaccuucaucucccuccucuuccuauucucaucagcauacucacucuuccaagaauaccaaugcuacggcucgagcucaaacacacgcguacucaacgaacugaacuacgacaacgccggaaccaaccucuacaaugaacucgaaaugaacuacuacggcaaacaagagaacugguacucacucaaaaaaaacagcagaagccucggagaaaacgacgacggaaacaacgaagacaacgaaaaacuccgcaaacccaagcacaaaaaacuaaaacaacccgcagacggaaaccccgaccccaacgcaaacccgaacgucgacccaaacgccaacccaaacguagaccccaacgcgaacccaaacguagacccaaacgccaacccaaacgcaaaccccaacgccaaccccaacgcaaacccaaacgccaacccaaacgcaaaccccaaugcaaaccccaacgcaaacccaaacgccaaccccaacgcaaacccaaacgcaaacccaaacgcaaacccaaacgcaaacccaaacgcgaacccaaacgcaaacccaaacgcaaacccgaacgcaaacccaaacguagacccaaacgcaaaccccaacgccaacccaaacgcaaacccaaacgcaaacccaaacgcaaacccaaacgcgaacccaaacgccaacccaaacgcaaacccaaacgcaaacccaaacgcaaacccaaacgcaaacccaaacgcaaacccaaacgcaaacccgaacgcgaacccaaacgcaaacccaaacgcgaacccgaacgcaaaccccaacgcaaacccauaaggacuaguuauaagacugacuagcccgaugggccucccaacgggcccuccuccccuccuugcaccgagauuaaucaaaggcucuuuucagagccaccaaaaaaaaaaaaaaaaaaaaaaaaaaaaaaaaaaaaaaaaaaaaaaaaaaaaaaaaaaaaaaaaaaaaaaaaaaaaaaaaaaaaaaaaaaaaaaaaaaaaagaauu

SEQ ID NO: 7996 - RNA, 1199 nt, Artificial Sequence
  mRNA Design i-3 (hSL-A100-N5) comprising derived and/or modified sequence from Pf(3D7)__XP_001351122.1__HsALB_Pf-CSP(19-272)_L(AAY)_Pf-CSP(310-3 27)_L(AAY)_Pf-CSP(346-375) (opt11)
aggagaaagcuuaccaugaaaugggucaccuucaucucacuccuauuccuauucuccuccgcauacucacucuuccaagaauaccagugcuacggaucaagcuccaacacacgcguacuaaacgaacugaacuacgacaacgccggaaccaaccucuacaacgaacucgaaaugaauuacuacggcaaacaagagaacugguacucacucaaaaaaaacagcagaucccuaggcgaaaacgacgacggaaacaacgaagacaacgaaaaacuacgcaaacccaaacacaaaaaacuaaaacaacccgcagacggaaacccagauccaaacgcaaacccaaacguagacccaaacgccaacccaaacguagacccaaacgcaaacccaaacguagaccccaacgcaaacccaaacgcaaacccgaacgccaacccaaacgcaaaccccaacgccaacccaaacgcaaacccaaacgcaaacccaaacgcaaacccaaacgccaaccccaacgcgaacccaaacgcaaacccuaacgccaacccaaacgcaaacccaaacgcaaacccgaacgcaaacccaaacgcaaacccaaacgcaaacccgaacguagacccaaacgcaaacccaaacgcaaacccaaacgcaaacccaaacgccaacccaaacgccaacccaaacgcaaaccccaacgcaaaccccaacgcgaacccaaacgccaaccccaacgcaaacccaaacgccaacccaaacgccaacccgaacgcaaacccaaacgccaacccaaacgccaacccgaacgcaaacccaaacgccaacccaaacgccaacccagccgcguacgaacccucagauaaacacauaaaagaauaccucaacaaaauccaaaacucacuagcagccuacaucaaaccaggauccgccaacaaacccaaggacgaacucgacuacgcaaacgacaucgaaaaaaaaaucugcaaaauggaaaaaugcucaugaggacuaguuauaagacugacuagcccgaugggccucccaacgggcccuccuccccuccuugcaccgagauuaaucaaaggcucuuuucagagccaccaaaaaaaaaaaaaaaaaaaaaaaaaaaaaaaaaaaaaaaaaaaaaaaaaaaaaaaaaaaaaaaaaaaaaaaaaaaaaaaaaaaaaaaaaaaaaaaaaaaaagaauu

SEQ ID NO: 7997 - RNA, 1160 nt, Artificial Sequence
  mRNA Design i-3 (hSL-A100-N5) comprising derived and/or modified sequence from Pf(3D7)__XP_001351122.1__HsALB_Pf-CSP(19-272)_L(AAY)_Pf-CSP(346-3 65)_L(AAY)_P2 (opt11)
aggagaaagcuuaccaugaaaugggucaccuucaucucacuccuauuccuauucucgagcgcauacucacucuuccaagaauaccaaugcuauggcuccagcucaaacacacgcguccuaaacgaacucaacuacgacaacgccggaacaaaccucuacaacgaacucgaaaugaacuacuacggcaaacaagaaaacugguacucgcucaaaaaaaacucccgaagucuaggcgaaaacgacgacggaaacaacgaagacaacgaaaaacuacgcaaacccaaacacaaaaaacuaaaacaacccgcagacggaaaccccgacccaaacgcaaaccccaacguagacccaaacgcaaaccccaacguagacccaaacgcaaacccgaacguagacccaaacgccaacccaaacgccaaccccaacgcaaacccaaacgccaaccccaacgcaaacccaaacgcaaacccaaacgcaaacccaaacgcaaacccaaacgccaaccccaacgccaacccaaacgccaaccccaacgcgaaccccaacgcgaacccaaacgccaacccaaacgcaaaccccaacgcaaacccaaacgcaaacccaaacgucgacccaaacgcaaacccaaacgcaaacccgaacgcaaacccaaacgcaaaccccaacgccaacccaaacgcgaacccaaacgccaacccaaacgccaacccaaacgcaaacccaaacgccaacccaaacgcaaacccaaacgcaaaccccaacgcaaaccccaacgcaaacccaaacgccaaccccaacgcaaaccccaacgcaaacccaaacgccaacccagccgcauacauaaaacccggcuccgccaacaaaccaaaagacgaacuagacuacgccaacgacauagaagcagccuaccaauacaucaaagccaacagcaaauucauaggaauaaccgagcuauaaggacuaguuauaagacugacuagcccgaugggccucccaacgggcccuccuccccuccuugcaccgagauuaaucaaaggcucuuuucagagccaccaaaaaaaaaaaaaaaaaaaaaaaaaaaaaaaaaaaaaaaaaaaaaaaaaaaaaaaaaaaaaaaaaaaaaaaaaaaaaaaaaaaaaaaaaaaaaaaaaaaaagaauu

SEQ ID NO: 7998 - RNA, 1154 nt, Artificial Sequence
  mRNA Design i-3 (hSL-A100-N5) comprising derived and/or modified sequence from Pf(3D7)__XP_001351122.1__HsALB_Pf-CSP(19-272)_L(AAY)_Pf-CSP(346-3 65)_L(AAY)_PADRE (opt11)
aggagaaagcuuaccaugaaauggguaaccuucaucucgcuacuguuccucuucucauccgcauacucccucuuccaagaauaccaaugcuacggcucauccucaaacacacgaguacuaaacgaacucaacuacgacaacgccggaaccaaccuauacaacgaacucgaaaugaacuacuacggcaaacaagaaaacugguacucacucaaaaaaaacucccgaucccucggcgaaaacgacgacggaaacaacgaagacaacgaaaaacugagaaaacccaaacacaaaaaacuaaaacaaccagccgacggcaacccagaccccaacgcaaaccccaacguagacccaaacgccaaccccaacguagacccaaacgcaaacccaaacguagaccccaacgccaacccaaacgccaacccaaacgccaaccccaacgcaaacccaaacgcaaacccaaacgcaaacccaaacgccaacccaaacgcaaacccaaacgccaacccgaacgcaaaccccaacgcaaacccaaacgcaaaccccaacgccaacccaaacgcaaacccaaacgcaaaccccaacgcaaacccaaaugcgaacccaaacguggacccgaacgcaaaccccaacgccaacccaaacgcaaaccccaacgccaaccccaacgccaaccccaacgcaaaccccaacgccaaccccaacgccaacccaaacgccaacccaaacgcgaacccaaacgcaaaccccaacgcaaacccaaacgcaaacccaaacgcaaacccaaacgcaaaccccaacgcaaacccaaacgcaaacccaaacgcaaaccccgcagccuacauuaaaccaggcuccgccaacaaacccaaagacgaacucgacuacgccaacgacauagaagcagccuacgccaaauucguagccgcauggacacucaaagccgcagccuaaggacuaguuauaagacugacuagcccgaugggccucccaacgggcccuccuccccuccuugcaccgagauuaaucaaaggcucuuuucagagccaccaaaaaaaaaaaaaaaaaaaaaaaaaaaaaaaaaaaaaaaaaaaaaaaaaaaaaaaaaaaaaaaaaaaaaaaaaaaaaaaaaaaaaaaaaaaaaaaaaaaaagaauu

SEQ ID NO: 7999 - RNA, 1211 nt, Artificial Sequence
  mRNA Design i-3 (hSL-A100-N5) comprising derived and/or modified sequence from Pf(3D7)__XP_001351122.1__HsALB_Pf-CSP(19-272)_L(G4S)_Pf-CSP(310-3 27)_L(G4S)_Pf-CSP(346-375) (opt11)
aggagaaagcuuaccaugaaaugggucaccuucaucucccuacuauuccucuucucaucagccuacucacucuuccaagaguaccaaugcuacggcucaagcucaaacacacgcguacucaacgaacuaaacuacgacaacgcaggcaccaaccucuacaacgaacucgagaugaacuacuacggcaaacaagaaaacugguacucacucaaaaaaaacucccgcagccucggcgaaaacgacgacggcaacaacgaagauaacgagaaacuacgcaaacccaaacacaaaaaacuaaaacaacccgccgacggaaacccagacccaaacgccaacccaaacguagacccaaacgcaaacccaaacguagacccaaacgccaaccccaacguagacccaaacgccaacccaaacgccaacccaaacgcaaacccaaacgcaaacccaaacgcgaacccaaacgcaaaccccaacgccaacccaaacgcaaacccaaacgccaaccccaacgcaaacccaaacgcaaaccccaacgcaaacccaaacgccaaccccaacgcaaaccccaacgcaaacccaaacgcaaacccaaacgcaaacccaaacgucgacccaaacgcaaaccccaacgcaaacccaaacgcaaacccaaacgccaacccaaacgcaaacccaaacgccaacccaaacgcaaaccccaacgcaaaccccaacgccaacccaaacgcaaaccccaacgcgaacccaaacgcaaacccaaacgcaaacccaaacgcaaaccccaacgcaaaccccaacgcaaacccaaacgcaaacccaaacgcaaacccaggcggcggcggaagcgaacccucggacaaacacauaaaagaauaccucaacaaaauccaaaacucccucggaggcggaggcuccaucaaacccggaagcgcaaacaaacccaaagacgaacucgacuacgcaaacgacaucgagaaaaaaauaugcaaaauggaaaaaugcucauaaggacuaguuauaagacugacuagcccgaugggccucccaacgggcccuccuccccuccuugcaccgagauuaaucaaaggcucuuuucagagccaccaaaaaaaaaaaaaaaaaaaaaaaaaaaaaaaaaaaaaaaaaaaaaaaaaaaaaaaaaaaaaaaaaaaaaaaaaaaaaaaaaaaaaaaaaaaaaaaaaaaaagaauu

SEQ ID NO: 8000 - RNA, 1196 nt, Artificial Sequence
  mRNA Design i-3 (hSL-A100-N5) comprising derived and/or modified sequence from Pf(3D7)__XP_001351122.1__HsALB_Pf-CSP(19-272)_L(G4S)_Pf-CSP(310-3 27)_Pf-CSP(346-375) (opt11)
aggagaaagcuuaccaugaaauggguaaccuucaucucacuccuauuccucuucuccuccgcauacucgcucuuccaagaauaccaaugcuacggcucaagcucaaacacccgcguccucaacgaacucaacuacgacaacgccgguaccaaccuauacaacgaacucgaaaugaacuacuacggcaaacaagaaaacugguacucacucaaaaaaaacuccaggucccuaggagaaaacgacgauggcaacaacgaagacaacgaaaaacuccgaaagccaaaacacaaaaaacuaaaacagcccgcagacggcaacccagacccaaacgcaaacccaaacguagacccaaacgcgaaccccaacguagacccaaacgcaaacccaaacguagacccaaacgcaaaccccaacgcaaacccaaacgcaaaccccaacgcaaaccccaacgcaaacccaaacgcaaacccaaacgcaaacccaaacgcaaacccaaacgcaaaccccaacgccaaccccaacgcaaacccaaacgcaaacccaaacgcaaacccaaacgcaaacccaaacgcaaaccccaacgccaacccaaacgcaaacccaaacguagacccaaacgcaaacccaaacgcaaacccaaacgcaaaccccaacgccaacccaaacgcaaacccaaacgcaaacccaaacgcaaacccaaacgcaaauccaaacgcuaacccaaacgcaaacccgaacgcaaaccccaaugcaaaccccaacgcaaacccaaacgccaacccaaacgcaaacccaaacgcgaacccaaacgcaaacccaaacgcaaacccaggcggaggcggauccgaacccuccgacaaacacauaaaagaauaccuaaacaaaauccaaaacucucucauaaaacccggaucagccaacaaaccaaaagacgaacuagacuacgccaaugacauagaaaaaaaaauaugcaagauggaaaaaugcagcuaaggacuaguuauaagacugacuagcccgaugggccucccaacgggcccuccuccccuccuugcaccgagauuaaucaaaggcucuuuucagagccaccaaaaaaaaaaaaaaaaaaaaaaaaaaaaaaaaaaaaaaaaaaaaaaaaaaaaaaaaaaaaaaaaaaaaaaaaaaaaaaaaaaaaaaaaaaaaaaaaaaaaagaauu

SEQ ID NO: 8001 - RNA, 1196 nt, Artificial Sequence
  mRNA Design i-3 (hSL-A100-N5) comprising derived and/or modified sequence from Pf(3D7)__XP_001351122.1__HsALB_Pf-CSP(19-325) (opt11)
aggagaaagcuuaccaugaaauggguaaccuucaucucacuccuguuccuauucucauccgcauacucacucuuccaagaauaccaaugcuacggcucgucuucaaacacccgcguacucaacgaacucaacuacgacaacgccggaaccaaccucuacaacgaacucgaaaugaacuacuacggcaaacaagaaaacugguacucacucaaaaaaaacagccgaagccuaggcgaaaacgacgacggaaacaaugaagacaacgaaaaacuccgcaaacccaaacacaaaaaacucaaacaaccagcagacggaaaccccgacccgaacgcaaacccaaacguagacccaaacgcaaacccaaacguagacccaaacgcgaacccaaacguagaccccaacgcaaacccaaacgcaaacccaaacgcaaacccaaacgccaaccccaacgccaacccaaacgccaacccaaacgcaaacccgaacgcgaacccaaacgcaaaccccaacgcaaacccaaacgcaaacccaaacgcgaacccaaacgccaacccaaacgccaacccaaacgcaaacccaaacgccaacccaaacgcaaaccccaacguggaccccaacgcaaacccaaacgcaaacccaaacgccaaccccaacgcaaacccaaacgcaaacccuaacgcaaacccaaacgcaaaccccaacgcgaacccaaacgcaaacccaaacgcaaacccaaacgcaaaccccaacgcaaacccaaacgccaacccaaacgccaacccaaacgcgaauccaaacgcaaaccccaacgcaaacccaaacgcaaacccgaacaaaaacaaccaagggaacggacaaggacacaacaugccaaacgaccccaaccgcaacgucgacgaaaacgccaacgccaacuccgcaguaaaaaacaacaacaacgaagaacccuccgacaaacacauaaaagaauaccucaacaagauacaaaacuagggacuaguuauaagacugacuagcccgaugggccucccaacgggcccuccuccccuccuugcaccgagauuaaucaaaggcucuuuucagagccaccaaaaaaaaaaaaaaaaaaaaaaaaaaaaaaaaaaaaaaaaaaaaaaaaaaaaaaaaaaaaaaaaaaaaaaaaaaaaaaaaaaaaaaaaaaaaaaaaaaaaagaauu

SEQ ID NO: 8002 - RNA, 1373 nt, Artificial Sequence
  mRNA Design i-3 (hSL-A100-N5) comprising derived and/or modified sequence from Pf(3D7)__XP_001351122.1__HsALB_Pf-CSP(19-384) (opt11)
aggagaaagcuuaccaugaaauggguaaccuucaucucacuacucuuccuauucucaagcgcguacucacucuuccaagaauaccaaugcuacggcucgagcucaaacacccgcguucucaacgaacuaaacuacgacaacgccggaaccaaccuauacaacgaacuugaaaugaacuacuacggcaaacaagaaaacugguacucgcucaaaaaaaacuccaggagccuaggcgaaaacgacgacggaaacaacgaagacaacgagaaacuaagaaaacccaaacacaaaaaacucaaacagcccgcggacggaaaccccgacccaaacgcaaaccccaacguagacccgaacgccaacccaaacguagacccaaacgcaaacccaaacguagaccccaacgcaaacccgaacgccaacccaaacgcaaacccaaaugcgaaccccaacgcgaacccaaacgcaaacccgaacgcaaaccccaacgccaacccaaacgcaaacccaaacgcaaaccccaacgcaaacccaaacgcgaacccaaacgcaaacccaaacgcgaacccgaacgcaaacccaaacgcaaacccgaacgcaaacccaaacguagacccaaacgccaacccaaacgcaaacccaaacgcaaaccccaacgcaaacccaaacgcaaacccgaacgcaaacccaaacgcaaacccaaacgcgaacccaaacgcaaaccccaacgcaaacccaaacgcaaacccuaacgcaaacccgaacgcaaacccaaacgccaacccaaacgcgaaccccaacgcaaacccaaacgccaacccaaacgccaacccgaacaaaaacaaccaaggaaacggacaaggacacaacaugccaaacgaccccaaccgaaacgucgacgaaaacgcaaacgccaacagugccgucaaaaacaacaacaaugaagaacccucagacaaacacauaaaagaauaccuaaacaaaauccagaacucgcucucaaccgaauggucacccugcagcgucaccugcggcaacggaauacaaguacgcaucaaaccaggcucggccaacaaaccaaaagacgaauuagacuacgcaaacgacaucgaaaaaaaaauaugcaaaauggaaaaaugcagcucagucuucaacguagucaauagcucauaaggacuaguuauaagacugacuagcccgaugggccucccaacgggcccuccuccccuccuugcaccgagauuaaucaaaggcucuuuucagagccaccaaaaaaaaaaaaaaaaaaaaaaaaaaaaaaaaaaaaaaaaaaaaaaaaaaaaaaaaaaaaaaaaaaaaaaaaaaaaaaaaaaaaaaaaaaaaaaaaaaaaagaauu

SEQ ID NO: 8003 - RNA, 1511 nt, Artificial Sequence
  mRNA Design i-3 (hSL-A100-N5) comprising derived and/or modified sequence from Pf(3D7)__XP_001351122.1__HsALB_Pf-CSP(19-384)_TM domain HA (opt11)
aggagaaagcuuaccaugaagugggucaccuucaucucccuccuauuccucuucucuagcgcguacucacucuuccaagaauaccaaugcuacggauccagcucaaacacacgcguccucaaugaacugaacuacgauaacgccggaaccaaccucuacaacgaacucgaaaugaacuacuacggcaaacaagaaaacugguacucacuaaagaaaaauagcaggucccucggcgaaaacgacgacgggaacaacgaagauaacgaaaaacuacgcaaacccaagcacaagaaacuaaaacagccagcagacggaaacccagaccccaacgccaacccaaacgucgaccccaacgcaaacccaaacguagauccgaacgcaaacccaaacgucgauccaaacgcaaacccaaacgcaaacccaaacgcuaaccccaacgccaacccaaacgcaaacccgaacgcaaaccccaacgcgaacccgaacgcaaacccaaacgcaaacccaaacgccaacccaaacgcaaacccaaacgcaaacccaaacgccaacccaaacgcaaaccccaacgcgaaccccaacgcaaaccccaacgcaaacccaaacgucgacccaaacgcaaaccccaacgcaaaccccaacgcaaaccccaaugcaaacccaaacgcgaaccccaacgcaaacccaaacgcgaacccaaaugcaaaccccaacgccaaccccaacgccaacccgaacgcaaacccaaacgccaacccaaacgccaacccaaacgcaaaucccaacgccaacccaaacgcgaacccgaacgcaaacccaaacgcaaacccgaacaaaaacaaccaaggaaacggucaaggacacaacaugccaaacgaccccaaccgcaacgucgacgaaaacgccaaugccaacagcgccgucaaaaacaacaacaacgaagaacccucagacaaacacaucaaagaguaccuaaacaagauccaaaacucccucuccaccgaauggucccccugcagcguaaccugcggaaacggcauccaaguccgcauaaaaccaggcucagccaacaaaccaaaagaugaacucgacuacgcaaacgacauagaaaagaaaaucugcaaaauggaaaaaugcagcuccguauucaacgugguuaacuccucaaaacuagaauccacccgcaucuaccaaauacucgcaauauacagcacaguagccagcucacucguccuagucgucucccucggagccaucagcuucuggaugugcuccaacggaaguuuacaaugucgcauaugcauauaaggacuaguuauaagacugacuagcccgaugggccucccaacgggcccuccuccccuccuugcaccgagauuaaucaaaggcucuuuucagagccaccaaaaaaaaaaaaaaaaaaaaaaaaaaaaaaaaaaaaaaaaaaaaaaaaaaaaaaaaaaaaaaaaaaaaaaaaaaaaaaaaaaaaaaaaaaaaaaaaaaaaagaauu

SEQ ID NO: 8004 - RNA, 1223 nt, Artificial Sequence
  mRNA Design i-3 (hSL-A100-N5) comprising derived and/or modified sequence from Pf(3D7)__XP_001351122.1__HsALB_Pf-CSP(82-397) (opt11)
aggagaaagcuuaccaugaaaugggucaccuucaucucacuccuguuccucuucucauccgccuacagcgacaacgaaaaacugcgcaaacccaaacacaagaaacucaaacaaccagccgacggcaaccccgaccccaacgccaacccaaacguagaccccaacgccaaccccaacguagacccaaacgccaacccaaacguggaccccaacgcaaacccaaacgccaacccaaacgccaauccaaacgccaacccaaacgcaaacccaaacgcaaaccccaacgccaacccuaacgccaaccccaacgcaaacccaaacgccaaccccaacgccaaccccaacgcaaaccccaacgcaaacccuaacgccaaccccaacgccaaccccaacgcaaacccaaacgccaaccccaacguagacccaaacgccaaccccaacgcaaaccccaacgccaacccaaacgcaaacccaaacgccaaccccaacgccaaccccaacgcaaacccaaacgcaaacccaaaugcaaaccccaacgccaaccccaacgccaaccccaacgcaaaccccaacgcaaaccccaacgcaaacccgaacgccaacccaaacgccaacccaaacgccaaccccaacgcaaaccccaacaaaaacaaccaaggcaacggacaaggacacaacaugcccaacgaccccaaccgcaacgucgacgaaaacgccaacgccaacuccgccgucaaaaacaacaacaacgaagaacccuccgacaaacacaucaaagaauaccucaacaaaauccaaaacucccucucaaccgaauggucacccugcuccguaaccugcggcaacggcauccaaguccgcaucaaacccggcucagccaacaaacccaaagacgaacucgacuacgccaaugacaucgaaaagaaaauaugcaaaauggaaaaaugcuccuccgucuucaacgucgucaacuccuccaucggccucaucaugguccucucguuccuauuccuaaacuaaggacuaguuauaagacugacuagcccgaugggccucccaacgggcccuccuccccuccuugcaccgagauuaaucaaaggcucuuuucagagccaccaaaaaaaaaaaaaaaaaaaaaaaaaaaaaaaaaaaaaaaaaaaaaaaaaaaaaaaaaaaaaaaaaaaaaaaaaaaaaaaaaaaaaaaaaaaaaaaaaaaaagaauu

SEQ ID NO: 8005 - RNA, 575 nt, Artificial Sequence
  mRNA Design i-3 (hSL-A100-N5) comprising derived and/or modified sequence from Pf(3D7)__XP_001351122.1__HsALB_Pf-CSP(93-192) (opt11)
aggagaaagcuuaccaugaaauggguaaccuucaucucacuccuauuccuauucucaagcgcauacucaaaacuaaaacaacccgcagacggaaacccagacccaaacgcaaacccaaacguagacccaaacgcaaacccaaacguagacccaaacgcaaacccaaacguagacccaaacgcaaacccaaacgcaaacccaaacgcaaacccaaacgcaaacccaaacgcaaaccccaacgcaaacccaaacgcaaacccaaacgcaaacccaaacgcaaacccaaacgcaaacccaaacgcaaacccaaacgcaaacccaaacgcaaacccaaacgcaaacccaaacgccaacccaaacgcaaacccauaaggacuaguuauaagacugacuagcccgaugggccucccaacgggcccuccuccccuccuugcaccgagauuaaucaaaggcucuuuucagagccaccaaaaaaaaaaaaaaaaaaaaaaaaaaaaaaaaaaaaaaaaaaaaaaaaaaaaaaaaaaaaaaaaaaaaaaaaaaaaaaaaaaaaaaaaaaaaaaaaaaaaagaauu

SEQ ID NO: 8006 - RNA, 815 nt, Artificial Sequence
  mRNA Design i-3 (hSL-A100-N5) comprising derived and/or modified sequence from Pf(3D7)__XP_001351122.1__HsALB_Pf-CSP(93-272) (opt11)
aggagaaagcuuaccaugaaaugggucaccuucaucucacuccuauuccuauucucauccgcauacucaaaacuaaaacaacccgccgacggaaacccagacccaaacgcaaacccaaacguagacccaaacgcaaacccaaacguagacccaaacgcaaacccaaacguagacccaaacgcaaacccaaacgccaacccaaacgcaaauccaaacgcaaacccaaacgcaaacccaaacgcaaacccaaacgcaaacccaaacgccaacccaaacgccaacccaaacgcaaacccaaacgcaaacccaaacgcaaacccaaacgcaaacccaaacgcaaacccaaacgccaaccccaacgcaaacccaaacgcaaaccccaacguagacccaaacgcaaacccaaacgccaaccccaacgcaaaccccaacgccaaccccaacgccaacccaaacgccaacccaaacgcaaacccaaacgcaaacccaaacgcaaacccaaacgcaaacccaaacgcaaacccaaacgcaaacccaaacgcaaacccaaacgcaaacccaaacgccaacccaaacgcaaacccaaacgcaaacccgaacgcaaacccauaaggacuaguuauaagacugacuagcccgaugggccucccaacgggcccuccuccccuccuugcaccgagauuaaucaaaggcucuuuucagagccaccaaaaaaaaaaaaaaaaaaaaaaaaaaaaaaaaaaaaaaaaaaaaaaaaaaaaaaaaaaaaaaaaaaaaaaaaaaaaaaaaaaaaaaaaaaaaaaaaaaaaagaauu

SEQ ID NO: 8007 - RNA, 1190 nt, Artificial Sequence
  mRNA Design i-3 (hSL-A100-N5) comprising derived and/or modified sequence from Pf(3D7)__XP_001351122.1__HsALB_Pf-CSP(93-397) (opt11)
aggagaaagcuuaccaugaaaugggucacauucaucucacuccuauuccuauucucaagcgccuacuccaaacucaaacaacccgccgacggcaacccagacccaaacgccaaccccaacgucgacccaaacgccaacccaaacgucgacccaaacgcaaacccaaacgucgaccccaacgccaaccccaacgccaaccccaacgccaacccaaacgccaaucccaacgccaaccccaacgccaacccaaacgcaaaccccaacgccaauccaaacgccaaccccaacgcaaaccccaacgccaaccccaacgcaaacccaaacgcaaacccaaacgcaaaccccaacgccaaccccaacgcaaaccccaacgccaaccccaacgucgaccccaacgccaacccaaacgccaacccaaacgccaaccccaacgccaaccccaacgcaaacccaaacgcgaaccccaacgcaaaccccaacgccaacccgaacgccaacccgaacgcaaacccaaacgccaaccccaacgcaaaccccaacgcaaacccaaacgcgaaccccaacgccaacccaaacgccaacccaaacgcgaacccaaacgccaaccccaacaaaaacaaccaagggaacggacaaggccacaacaugcccaacgaccccaaccgcaacgucgacgaaaacgccaacgccaacuccgccgucaaaaacaacaacaacgaagaacccuccgacaaacacauaaaagaauaccuaaacaaaauccaaaacucacucucuacugaauggucccccugcucagucaccugcggcaacggcauacaaguccgcauaaaacccggcucggccaacaaaccaaaagacgaacuagacuacgcaaacgacaucgaaaaaaaaauaugcaaaauggaaaaaugcuccucagucuucaacguaguaaacuccuccaucggccucauaaugguccucuccuuccuauuccucaacuaaggacuaguuauaagacugacuagcccgaugggccucccaacgggcccuccuccccuccuugcaccgagauuaaucaaaggcucuuuucagagccaccaaaaaaaaaaaaaaaaaaaaaaaaaaaaaaaaaaaaaaaaaaaaaaaaaaaaaaaaaaaaaaaaaaaaaaaaaaaaaaaaaaaaaaaaaaaaaaaaaaaaagaauu

SEQ ID NO: 8008 - RNA, 560 nt, Artificial Sequence
  mRNA Design i-3 (hSL-A100-N5) comprising derived and/or modified sequence from Pf(3D7)__XP_001351122.1__HsALB_Pf-CSP(98-192) (opt11)
aggagaaagcuuaccaugaaaugggucacauucauaagccuacucuuccucuucagcucagccuacuccgcagacggaaacccagacccaaacgcaaacccaaacguagacccaaacgcaaacccaaacguagacccaaacgcaaacccaaacguagacccaaacgcaaacccaaacgcaaacccaaacgcaaacccaaacgcaaacccaaacgcaaacccaaacgcaaacccaaacgcaaacccaaacgcaaacccaaacgcaaacccaaacgcaaaccccaacgcaaacccaaacgcaaacccaaacgcaaacccaaacgcaaacccaaacgcaaacccaaacgcaaacccauaaggacuaguuauaagacugacuagcccgaugggccucccaacgggcccuccuccccuccuugcaccgagauuaaucaaaggcucuuuucagagccaccaaaaaaaaaaaaaaaaaaaaaaaaaaaaaaaaaaaaaaaaaaaaaaaaaaaaaaaaaaaaaaaaaaaaaaaaaaaaaaaaaaaaaaaaaaaaaaaaaaaaagaauu

SEQ ID NO: 8009 - RNA, 800 nt, Artificial Sequence
  mRNA Design i-3 (hSL-A100-N5) comprising derived and/or modified sequence from Pf(3D7)__XP_001351122.1__HsALB_Pf-CSP(98-272) (opt11)
aggagaaagcuuaccaugaaauggguaaccuucauaagccuacucuuccuauucucaucagccuacagcgcagacggaaacccagaccccaacgcaaacccaaacguagacccaaacgcaaacccaaacguagaccccaacgcaaacccaaacguagacccaaacgccaacccaaacgcaaacccaaacgcaaacccaaacgccaacccaaacgcaaacccaaacgccaacccaaacgcaaacccaaacgcaaacccaaacgcaaacccaaacgcaaacccaaacgcaaacccaaacgcaaacccaaacgccaacccaaacgcaaacccaaacgcaaacccaaacgcaaacccaaacgccaaccccaacguagacccaaacgccaaccccaacgcaaacccaaacgcaaacccaaacgcaaacccaaacgcaaacccaaacgcaaacccaaacgcaaacccaaacgcaaacccaaacgcaaacccgaacgccaacccaaacgcaaacccaaacgcaaacccaaacgcaaacccaaacgcaaacccaaacgcaaaccccaacgcaaacccaaacgcaaacccaaacgcaaacccauaaggacuaguuauaagacugacuagcccgaugggccucccaacgggcccuccuccccuccuugcaccgagauuaaucaaaggcucuuuucagagccaccaaaaaaaaaaaaaaaaaaaaaaaaaaaaaaaaaaaaaaaaaaaaaaaaaaaaaaaaaaaaaaaaaaaaaaaaaaaaaaaaaaaaaaaaaaaaaaaaaaaaagaauu

SEQ ID NO: 8010 - RNA, 1106 nt, Artificial Sequence
  mRNA Design i-3 (hSL-A100-N5) comprising derived and/or modified sequence from Pf(3D7)__XP_001351122.1__HsALB_Pf-CSP(98-374) (opt11)
aggagaaagcuuaccaugaaauggguaaccuucauaucccuacucuuccuuuucuccucggccuacuccgcagacggaaacccagacccaaacgcaaaccccaacguagacccaaacgcaaacccaaauguagacccaaacgcaaacccaaacguggacccaaacgcgaaccccaacgcaaaccccaacgcaaacccaaacgccaacccaaacgcaaacccaaacgccaacccaaacgcaaaccccaacgccaaccccaacgccaacccaaacgcaaacccaaacgcaaaccccaacgcaaacccaaacgccaacccaaacgccaacccaaacgccaaccccaacgcaaacccaaacgccaacccaaacguagacccaaacgcaaacccaaacgcaaacccaaacgcaaaccccaacgcaaaccccaacgcaaacccaaacgcaaacccaaacgcaaacccaaacgcaaacccaaacgccaacccaaacgcgaaccccaacgccaacccaaacgcaaacccaaacgccaacccaaacgccaacccaaacgcaaaccccaacgcaaacccaaacgcaaacccaaacgccaacccgaacaaaaacaaccaaggcaacggccaaggacacaacaugccaaacgaccccaaccgcaacguagacgaaaacgccaacgcaaacuccgcagucaaaaacaacaacaacgaagaacccuccgacaaacacauaaaagaauaccuaaacaaaauccaaaacucgcucucaaccgaauggucccccugcuccgucaccugcggcaacggcauccaaguacgcaucaaaccaggcucagcaaacaaaccaaaagacgaacucgacuacgccaacgacauagaaaaaaaaauaugcaaaauggagaaaugcuaaggacuaguuauaagacugacuagcccgaugggccucccaacgggcccuccuccccuccuugcaccgagauuaaucaaaggcucuuuucagagccaccaaaaaaaaaaaaaaaaaaaaaaaaaaaaaaaaaaaaaaaaaaaaaaaaaaaaaaaaaaaaaaaaaaaaaaaaaaaaaaaaaaaaaaaaaaaaaaaaaaaaagaauu

SEQ ID NO: 8011 - RNA, 1175 nt, Artificial Sequence
  mRNA Design i-3 (hSL-A100-N5) comprising derived and/or modified sequence from Pf(3D7)__XP_001351122.1__HsALB_Pf-CSP(98-397) (opt11)
aggagaaagcuuaccaugaaauggguaaccuucaucagccuacuauuccuauucagcuccgccuacagcgccgacggaaacccagacccaaacgccaaccccaacgucgacccaaacgccaaccccaacguagacccaaacgccaaccccaacgucgaccccaacgccaaccccaacgccaacccaaacgccaacccuaacgccaacccaaacgccaacccgaacgccaaccccaacgcgaacccaaacgccaacccaaacgcaaaccccaacgccaaccccaacgccaaccccaacgcaaaccccaacgcaaacccaaacgccaacccaaacgccaaccccaacgccaaccccaaugcaaacccaaacgucgaccccaacgccaacccaaacgccaaccccaacgccaaccccaacgccaaccccaacgcaaaccccaacgccaaccccaacgcgaaccccaacgccaaccccaacgccaacccaaacgccaaccccaacgccaaccccaacgccaaccccaacgcuaaccccaacgcaaacccaaacgccaacccaaacgccaacccaaacgccaaccccaacgccaacccaaacaaaaacaaccaaggcaacggacaaggacacaacaugccaaacgaccccaaccgcaacgucgacgaaaaugccaacgccaacuccgccgucaaaaacaacaacaacgaagaacccuccgacaaacacaucaaagaauaccuaaacaaaauacaaaacucucucucaaccgaauggucccccugcuccgucacaugcggcaacggcauccaaguccgcaucaaaccaggaucagccaauaaacccaaagacgaacucgacuacgccaacgacauagaaaaaaaaaucugcaaaauggaaaaaugcagcucagucuucaacgucgucaacuccucaaucggacuuauaaugguccuauccuuccucuuccuuaacuaaggacuaguuauaagacugacuagcccgaugggccucccaacgggcccuccuccccuccuugcaccgagauuaaucaaaggcucuuuucagagccaccaaaaaaaaaaaaaaaaaaaaaaaaaaaaaaaaaaaaaaaaaaaaaaaaaaaaaaaaaaaaaaaaaaaaaaaaaaaaaaaaaaaaaaaaaaaaaaaaaaaaagaauu

SEQ ID NO: 8012 - RNA, 1502 nt, Artificial Sequence
  mRNA Design i-3 (hSL-A100-N5) comprising derived and/or modified sequence from Pf(3D7)__XP_001351122.1__HsALB_Pf-CSP(199-377)_L(PVTN)_HBsAg (opt11)
aggagaaagcuuaccaugaaaugggucacauucaucucgcuccucuuccuauucuccuccgccuacuccgacccuaacgccaaucccaacgccaaccccaacgccaaccccaacgccaaccccaacgccaaccccaaugcaaacccaaacgcaaaccccaacgccaaccccaacgcaaacccaaaugcaaaccccaacgcaaaccccaacgccaaccccaaugccaaccccaacgcuaaccccaacgccaauccaaacgccaaccccaacgcaaaccccaacgccaacccuaacaaaaauaaccaaggcaacggccaaggacacaacaugcccaacgaccccaaccgaaaugucgacgaaaacgcuaacgcuaacagcgccgucaaaaacaacaacaacgaagaacccuccgacaaacacauuaaagaauaccucaacaaaauccaaaacucccucuccaccgaauggucccccugcucuguaacuugcggcaacggcauccaaguccgcauaaaacccggaucagcaaacaaacccaaagacgaacucgacuacgcaaacgacauugagaagaaaaucugcaaaauggaaaaaugcucaucaguacccgucacuaacauggaaaacaucaccuccggcuuccucggcccccuccuaguccuacaagccgguuucuuccuucuuacacgcauccuaaccaucccacaaucccuagacuccugguggacaucuuuaaacuuccuuggaggauccccugucugccucggccaaaacucccaauccccaaccucuaaccacucucccacauccugcccucccauaugccccgguuaccgcuggaugugccuccgccgcuucaucaucuuccucuucauacuccucuuaugccucaucuuccuccucguacuacucgacuaccaagguaugcuacccguaugcccucucauccccggcuccaccacaaccaacaccggccccugcaaaacaugcaccacccccgcacagggcaauuccauguuccccuccugcuguugcaccaaacccacagacggcaacuguaccugcauccccauccccuccucuugggcauuugccaaauaccucugggaaugggccuccguccgauucucuuggcuuucacuccucguucccuucguacaaugguucgucggccuaucacccaccgucuggcucuccgccaucuggaugaugugguacuggggcccuucacuuuacuccauagucagccccuucauaccacuccuccccaucuucuucugccuauggguauacaucuaaggacuaguuauaagacugacuagcccgaugggccucccaacgggcccuccuccccuccuugcaccgagauuaaucaaaggcucuuuucagagccaccaaaaaaaaaaaaaaaaaaaaaaaaaaaaaaaaaaaaaaaaaaaaaaaaaaaaaaaaaaaaaaaaaaaaaaaaaaaaaaaaaaaaaaaaaaaaaaaaaaaaagaauu

SEQ ID NO: 8013 - RNA, 1466 nt, Artificial Sequence
  mRNA Design a-1 (hSL-A100) comprising derived and/or modified sequence from Pf(3D7)__XP_001351122.1__Pf-CSP (wt)
aggagagucccgcagucggcguccagcggcucugcuuguucgugugugugucguugcaggccuuauucaagcuuaccaugaugagaaaauuagcuauuuuaucuguuucuuccuuuuuauuuguugaggccuuauuccaggaauaccagugcuauggaaguucgucaaacacaaggguucuaaaugaauuaaauuaugauaaugcaggcacuaauuuauauaaugaauuagaaaugaauuauuaugggaaacaggaaaauugguauagucuuaaaaaaaauaguagaucacuuggagaaaaugaugauggaaauaacgaagacaacgagaaauuaaggaaaccaaaacauaaaaaauuaaagcaaccagcggaugguaauccugauccaaaugcaaacccaaauguagaucccaaugccaacccaaauguagauccaaaugcaaacccaaauguagauccaaaugcaaacccaaaugcaaacccaaaugcaaacccaaaugcaaacccaaaugcaaacccaaaugcaaacccaaaugcaaacccaaaugcaaacccaaaugcaaacccaaaugcaaacccaaaugcaaacccaaaugcaaacccaaaugcaaacccaaaugcaaaccccaaugcaaauccuaaugcaaacccaaaugcaaacccaaacguagauccuaaugcaaauccaaaugcaaacccaaacgcaaaccccaaugcaaauccuaaugcaaaccccaaugcaaauccuaaugcaaauccuaaugccaauccaaaugcaaauccaaaugcaaacccaaacgcaaaccccaaugcaaauccuaaugccaauccaaaugcaaauccaaaugcaaacccaaaugcaaacccaaaugcaaaccccaaugcaaauccuaauaaaaacaaucaagguaauggacaaggucacaauaugccaaaugacccaaaccgaaauguagaugaaaaugcuaaugccaacagugcuguaaaaaauaauaauaacgaagaaccaagugauaagcacauaaaagaauauuuaaacaaaauacaaaauucucuuucaacugaaugguccccauguaguguaacuuguggaaaugguauucaaguuagaauaaagccuggcucugcuaauaaaccuaaagacgaauuagauuaugcaaaugauauugaaaaaaaaauuuguaaaauggaaaaauguuccaguguguuuaaugucguaaauaguucaauaggauuaauaaugguauuauccuucuuguuccuuaauuagggacuagucccuguucccagagcccacuuuuuuuucuuuuuuugaaauaaaauagccugucuuucagaucucaaaggcucuuuucagagccaccaaaaaaaaaaaaaaaaaaaaaaaaaaaaaaaaaaaaaaaaaaaaaaaaaaaaaaaaaaaaaaaaaaaaaaaaaaaaaaaaaaaaaaaaaaaaaaaaaaaaa

SEQ ID NO: 8014 - RNA, 1397 nt, Artificial Sequence
  mRNA Design a-1 (hSL-A100) comprising derived and/or modified sequence from Pf(3D7)__XP_001351122.1__Pf-CSP(1-374) (wt)
aggagagucccgcagucggcguccagcggcucugcuuguucgugugugugucguugcaggccuuauucaagcuuaccaugaugagaaaauuagcuauuuuaucuguuucuuccuuuuuauuuguugaggccuuauuccaggaauaccagugcuauggaaguucgucaaacacaaggguucuaaaugaauuaaauuaugauaaugcaggcacuaauuuauauaaugaauuagaaaugaauuauuaugggaaacaggaaaauugguauagucuuaaaaaaaauaguagaucacuuggagaaaaugaugauggaaauaacgaagacaacgagaaauuaaggaaaccaaaacauaaaaaauuaaagcaaccagcggaugguaauccugauccaaaugcaaacccaaauguagaucccaaugccaacccaaauguagauccaaaugcaaacccaaauguagauccaaaugcaaacccaaaugcaaacccaaaugcaaacccaaaugcaaacccaaaugcaaacccaaaugcaaacccaaaugcaaacccaaaugcaaacccaaaugcaaacccaaaugcaaacccaaaugcaaacccaaaugcaaacccaaaugcaaacccaaaugcaaaccccaaugcaaauccuaaugcaaacccaaaugcaaacccaaacguagauccuaaugcaaauccaaaugcaaacccaaacgcaaaccccaaugcaaauccuaaugcaaaccccaaugcaaauccuaaugcaaauccuaaugccaauccaaaugcaaauccaaaugcaaacccaaacgcaaaccccaaugcaaauccuaaugccaauccaaaugcaaauccaaaugcaaacccaaaugcaaacccaaaugcaaaccccaaugcaaauccuaauaaaaacaaucaagguaauggacaaggucacaauaugccaaaugacccaaaccgaaauguagaugaaaaugcuaaugccaacagugcuguaaaaaauaauaauaacgaagaaccaagugauaagcacauaaaagaauauuuaaacaaaauacaaaauucucuuucaacugaaugguccccauguaguguaacuuguggaaaugguauucaaguuagaauaaagccuggcucugcuaauaaaccuaaagacgaauuagauuaugcaaaugauauugaaaaaaaaauuuguaaaauggaaaaauguugaggacuagucccuguucccagagcccacuuuuuuuucuuuuuuugaaauaaaauagccugucuuucagaucucaaaggcucuuuucagagccaccaaaaaaaaaaaaaaaaaaaaaaaaaaaaaaaaaaaaaaaaaaaaaaaaaaaaaaaaaaaaaaaaaaaaaaaaaaaaaaaaaaaaaaaaaaaaaaaaaaaaa

SEQ ID NO: 8015 - RNA, 1250 nt, Artificial Sequence
  mRNA Design a-1 (hSL-A100) comprising derived and/or modified sequence from Pf(3D7)__XP_001351122.1__Pf-CSP(1-325) (wt)
aggagagucccgcagucggcguccagcggcucugcuuguucgugugugugucguugcaggccuuauucaagcuuaccaugaugagaaaauuagcuauuuuaucuguuucuuccuuuuuauuuguugaggccuuauuccaggaauaccagugcuauggaaguucgucaaacacaaggguucuaaaugaauuaaauuaugauaaugcaggcacuaauuuauauaaugaauuagaaaugaauuauuaugggaaacaggaaaauugguauagucuuaaaaaaaauaguagaucacuuggagaaaaugaugauggaaauaacgaagacaacgagaaauuaaggaaaccaaaacauaaaaaauuaaagcaaccagcggaugguaauccugauccaaaugcaaacccaaauguagaucccaaugccaacccaaauguagauccaaaugcaaacccaaauguagauccaaaugcaaacccaaaugcaaacccaaaugcaaacccaaaugcaaacccaaaugcaaacccaaaugcaaacccaaaugcaaacccaaaugcaaacccaaaugcaaacccaaaugcaaacccaaaugcaaacccaaaugcaaacccaaaugcaaacccaaaugcaaaccccaaugcaaauccuaaugcaaacccaaaugcaaacccaaacguagauccuaaugcaaauccaaaugcaaacccaaacgcaaaccccaaugcaaauccuaaugcaaaccccaaugcaaauccuaaugcaaauccuaaugccaauccaaaugcaaauccaaaugcaaacccaaacgcaaaccccaaugcaaauccuaaugccaauccaaaugcaaauccaaaugcaaacccaaaugcaaacccaaaugcaaaccccaaugcaaauccuaauaaaaacaaucaagguaauggacaaggucacaauaugccaaaugacccaaaccgaaauguagaugaaaaugcuaaugccaacagugcuguaaaaaauaauaauaacgaagaaccaagugauaagcacauaaaagaauauuuaaacaaaauacaaaauugaggacuagucccuguucccagagcccacuuuuuuuucuuuuuuugaaauaaaauagccugucuuucagaucucaaaggcucuuuucagagccaccaaaaaaaaaaaaaaaaaaaaaaaaaaaaaaaaaaaaaaaaaaaaaaaaaaaaaaaaaaaaaaaaaaaaaaaaaaaaaaaaaaaaaaaaaaaaaaaaaaaaa

SEQ ID NO: 8016 - RNA, 1466 nt, Artificial Sequence
  mRNA Design a-1 (hSL-A100) comprising derived and/or modified sequence from Pf(3D7)__XP_001351122.1__Pf-CSP (opt1)
aggagagucccgcagucggcguccagcggcucugcuuguucgugugugugucguugcaggccuuauucaagcuuaccaugaugcgcaagcuggccauccucagcguguccagcuuccuguucgucgaggcccuguuccaggaguaccagugcuacggcuccagcuccaacacccgggugcucaacgagcugaacuacgacaacgcggggaccaaccuguacaacgagcucgagaugaacuacuacggcaagcaggagaacugguacagccugaagaagaacucccgcagccugggggagaacgacgacggcaacaacgaggacaacgagaagcuccggaagcccaagcacaagaagcugaagcagccggccgacgggaaccccgaccccaacgccaaccccaacguggacccgaacgccaaccccaacgucgaccccaacgccaaccccaacguggacccgaacgcgaaccccaacgccaaccccaacgccaaccccaacgccaacccgaacgcgaaccccaacgccaaccccaacgccaaccccaacgccaacccgaacgccaaccccaacgcgaaccccaacgccaaccccaacgccaacccgaacgccaaccccaacgccaaccccaacgcgaaccccaacgccaacccgaacgccaaccccaacguggaccccaacgccaaccccaacgccaacccgaacgcgaaccccaacgccaaccccaacgccaacccgaacgccaaccccaacgccaaccccaacgcgaaccccaacgccaacccgaacgccaaccccaacgccaaccccaacgcgaaccccaacgccaacccgaacgccaaccccaacgccaaccccaacgccaaccccaacgcgaacccgaacgccaaccccaacaagaacaaccagggcaacggccaggggcacaacaugcccaacgaccccaaccgcaacgucgacgagaacgccaacgccaacuccgccgugaagaacaacaacaacgaggagccgagcgacaagcacaucaaggaguaccugaacaagauccagaacucccucagcacggaguggucccccugcagcgugaccugcggcaacgggauccagguccggaucaagcccggcuccgcgaacaagcccaaggacgagcuggacuacgccaacgacaucgagaagaagaucugcaagauggagaagugcagcuccguguucaacguggucaacagcuccaucgggcugaucauggugcucagcuuccuguuccugaacugaggacuagucccuguucccagagcccacuuuuuuuucuuuuuuugaaauaaaauagccugucuuucagaucucaaaggcucuuuucagagccaccaaaaaaaaaaaaaaaaaaaaaaaaaaaaaaaaaaaaaaaaaaaaaaaaaaaaaaaaaaaaaaaaaaaaaaaaaaaaaaaaaaaaaaaaaaaaaaaaaaaaa

SEQ ID NO: 8017 - RNA, 1397 nt, Artificial Sequence
  mRNA Design a-1 (hSL-A100) comprising derived and/or modified sequence from Pf(3D7)__XP_001351122.1__Pf-CSP(1-374) (opt1)
aggagagucccgcagucggcguccagcggcucugcuuguucgugugugugucguugcaggccuuauucaagcuuaccaugaugcgcaagcuggccauccucagcguguccagcuuccuguucgucgaggcccuguuccaggaguaccagugcuacggcuccagcuccaacacccgggugcucaacgagcugaacuacgacaacgcggggaccaaccuguacaacgagcucgagaugaacuacuacggcaagcaggagaacugguacagccugaagaagaacucccgcagccugggggagaacgacgacggcaacaacgaggacaacgagaagcuccggaagcccaagcacaagaagcugaagcagccggccgacgggaaccccgaccccaacgccaaccccaacguggacccgaacgccaaccccaacgucgaccccaacgccaaccccaacguggacccgaacgcgaaccccaacgccaaccccaacgccaaccccaacgccaacccgaacgcgaaccccaacgccaaccccaacgccaaccccaacgccaacccgaacgccaaccccaacgcgaaccccaacgccaaccccaacgccaacccgaacgccaaccccaacgccaaccccaacgcgaaccccaacgccaacccgaacgccaaccccaacguggaccccaacgccaaccccaacgccaacccgaacgcgaaccccaacgccaaccccaacgccaacccgaacgccaaccccaacgccaaccccaacgcgaaccccaacgccaacccgaacgccaaccccaacgccaaccccaacgcgaaccccaacgccaacccgaacgccaaccccaacgccaaccccaacgccaaccccaacgcgaacccgaacgccaaccccaacaagaacaaccagggcaacggccaggggcacaacaugcccaacgaccccaaccgcaacgucgacgagaacgccaacgccaacuccgccgugaagaacaacaacaacgaggagccgagcgacaagcacaucaaggaguaccugaacaagauccagaacucccucagcacggaguggucccccugcagcgugaccugcggcaacgggauccagguccggaucaagcccggcuccgcgaacaagcccaaggacgagcuggacuacgccaacgacaucgagaagaagaucugcaagauggagaagugcugaggacuagucccuguucccagagcccacuuuuuuuucuuuuuuugaaauaaaauagccugucuuucagaucucaaaggcucuuuucagagccaccaaaaaaaaaaaaaaaaaaaaaaaaaaaaaaaaaaaaaaaaaaaaaaaaaaaaaaaaaaaaaaaaaaaaaaaaaaaaaaaaaaaaaaaaaaaaaaaaaaaaa

SEQ ID NO: 8018 - RNA, 1250 nt, Artificial Sequence
  mRNA Design a-1 (hSL-A100) comprising derived and/or modified sequence from Pf(3D7)__XP_001351122.1__Pf-CSP(1-325) (opt1)
aggagagucccgcagucggcguccagcggcucugcuuguucgugugugugucguugcaggccuuauucaagcuuaccaugaugcgcaagcuggccauccucagcguguccagcuuccuguucgucgaggcccuguuccaggaguaccagugcuacggcuccagcuccaacacccgggugcucaacgagcugaacuacgacaacgcggggaccaaccuguacaacgagcucgagaugaacuacuacggcaagcaggagaacugguacagccugaagaagaacucccgcagccugggggagaacgacgacggcaacaacgaggacaacgagaagcuccggaagcccaagcacaagaagcugaagcagccggccgacgggaaccccgaccccaacgccaaccccaacguggacccgaacgccaaccccaacgucgaccccaacgccaaccccaacguggacccgaacgcgaaccccaacgccaaccccaacgccaaccccaacgccaacccgaacgcgaaccccaacgccaaccccaacgccaaccccaacgccaacccgaacgccaaccccaacgcgaaccccaacgccaaccccaacgccaacccgaacgccaaccccaacgccaaccccaacgcgaaccccaacgccaacccgaacgccaaccccaacguggaccccaacgccaaccccaacgccaacccgaacgcgaaccccaacgccaaccccaacgccaacccgaacgccaaccccaacgccaaccccaacgcgaaccccaacgccaacccgaacgccaaccccaacgccaaccccaacgcgaaccccaacgccaacccgaacgccaaccccaacgccaaccccaacgccaaccccaacgcgaacccgaacgccaaccccaacaagaacaaccagggcaacggccaggggcacaacaugcccaacgaccccaaccgcaacgucgacgagaacgccaacgccaacuccgccgugaagaacaacaacaacgaggagccgagcgacaagcacaucaaggaguaccugaacaagauccagaacugaggacuagucccuguucccagagcccacuuuuuuuucuuuuuuugaaauaaaauagccugucuuucagaucucaaaggcucuuuucagagccaccaaaaaaaaaaaaaaaaaaaaaaaaaaaaaaaaaaaaaaaaaaaaaaaaaaaaaaaaaaaaaaaaaaaaaaaaaaaaaaaaaaaaaaaaaaaaaaaaaaaaa

SEQ ID NO: 8019 - RNA, 1466 nt, Artificial Sequence
  mRNA Design a-1 (hSL-A100) comprising derived and/or modified sequence from Pf(3D7)__XP_001351122.1__HsALB_Pf-CSP(19-397) (opt1)
aggagagucccgcagucggcguccagcggcucugcuuguucgugugugugucguugcaggccuuauucaagcuuaccaugaagugggugaccuucaucagccuccuguuccuguucuccagcgccuacucccuguuccaggaguaccagugcuacggcuccagcuccaacacccgggugcucaacgagcugaacuacgacaacgcggggaccaaccuguacaacgagcucgagaugaacuacuacggcaagcaggagaacugguacagccugaagaagaacucccgcagccugggggagaacgacgacggcaacaacgaggacaacgagaagcuccggaagcccaagcacaagaagcugaagcagccggccgacgggaaccccgaccccaacgccaaccccaacguggacccgaacgccaaccccaacgucgaccccaacgccaaccccaacguggacccgaacgcgaaccccaacgccaaccccaacgccaaccccaacgccaacccgaacgcgaaccccaacgccaaccccaacgccaaccccaacgccaacccgaacgccaaccccaacgcgaaccccaacgccaaccccaacgccaacccgaacgccaaccccaacgccaaccccaacgcgaaccccaacgccaacccgaacgccaaccccaacguggaccccaacgccaaccccaacgccaacccgaacgcgaaccccaacgccaaccccaacgccaacccgaacgccaaccccaacgccaaccccaacgcgaaccccaacgccaacccgaacgccaaccccaacgccaaccccaacgcgaaccccaacgccaacccgaacgccaaccccaacgccaaccccaacgccaaccccaacgcgaacccgaacgccaaccccaacaagaacaaccagggcaacggccaggggcacaacaugcccaacgaccccaaccgcaacgucgacgagaacgccaacgccaacuccgccgugaagaacaacaacaacgaggagccgagcgacaagcacaucaaggaguaccugaacaagauccagaacucccucagcacggaguggucccccugcagcgugaccugcggcaacgggauccagguccggaucaagcccggcuccgcgaacaagcccaaggacgagcuggacuacgccaacgacaucgagaagaagaucugcaagauggagaagugcagcuccguguucaacguggucaacagcuccaucgggcugaucauggugcucagcuuccuguuccugaacugaggacuagucccuguucccagagcccacuuuuuuuucuuuuuuugaaauaaaauagccugucuuucagaucucaaaggcucuuuucagagccaccaaaaaaaaaaaaaaaaaaaaaaaaaaaaaaaaaaaaaaaaaaaaaaaaaaaaaaaaaaaaaaaaaaaaaaaaaaaaaaaaaaaaaaaaaaaaaaaaaaaaa

SEQ ID NO: 8020 - RNA, 1484 nt, Artificial Sequence
  mRNA Design a-1 (hSL-A100) comprising derived and/or modified sequence from Pf(3D7)__XP_001351122.1__HsIns-iso1_Pf-CSP(19-397) (opt1)
aggagagucccgcagucggcguccagcggcucugcuuguucgugugugugucguugcaggccuuauucaagcuuaccauggcccuguggaugcgccuccugccccugcucgcccugcuggcgcucuggggcccggaccccgccgccgcccuguuccaggaguaccagugcuacggcuccagcuccaacacccgggugcucaacgagcugaacuacgacaacgcggggaccaaccuguacaacgagcucgagaugaacuacuacggcaagcaggagaacugguacagccugaagaagaacucccgcagccugggggagaacgacgacggcaacaacgaggacaacgagaagcuccggaagcccaagcacaagaagcugaagcagccggccgacgggaaccccgaccccaacgccaaccccaacguggacccgaacgccaaccccaacgucgaccccaacgccaaccccaacguggacccgaacgcgaaccccaacgccaaccccaacgccaaccccaacgccaacccgaacgcgaaccccaacgccaaccccaacgccaaccccaacgccaacccgaacgccaaccccaacgcgaaccccaacgccaaccccaacgccaacccgaacgccaaccccaacgccaaccccaacgcgaaccccaacgccaacccgaacgccaaccccaacguggaccccaacgccaaccccaacgccaacccgaacgcgaaccccaacgccaaccccaacgccaacccgaacgccaaccccaacgccaaccccaacgcgaaccccaacgccaacccgaacgccaaccccaacgccaaccccaacgcgaaccccaacgccaacccgaacgccaaccccaacgccaaccccaacgccaaccccaacgcgaacccgaacgccaaccccaacaagaacaaccagggcaacggccaggggcacaacaugcccaacgaccccaaccgcaacgucgacgagaacgccaacgccaacuccgccgugaagaacaacaacaacgaggagccgagcgacaagcacaucaaggaguaccugaacaagauccagaacucccucagcacggaguggucccccugcagcgugaccugcggcaacgggauccagguccggaucaagcccggcuccgcgaacaagcccaaggacgagcuggacuacgccaacgacaucgagaagaagaucugcaagauggagaagugcagcuccguguucaacguggucaacagcuccaucgggcugaucauggugcucagcuuccuguuccugaacugaggacuagucccuguucccagagcccacuuuuuuuucuuuuuuugaaauaaaauagccugucuuucagaucucaaaggcucuuuucagagccaccaaaaaaaaaaaaaaaaaaaaaaaaaaaaaaaaaaaaaaaaaaaaaaaaaaaaaaaaaaaaaaaaaaaaaaaaaaaaaaaaaaaaaaaaaaaaaaaaaaaaa

SEQ ID NO: 8021 - RNA, 1463 nt, Artificial Sequence
  mRNA Design a-1 (hSL-A100) comprising derived and/or modified sequence from Pf(3D7)__XP_001351122.1__HsSPARC_Pf-CSP(19-397) (opt1)
aggagagucccgcagucggcguccagcggcucugcuuguucgugugugugucguugcaggccuuauucaagcuuaccaugcgcgccuggaucuucuuccugcucugccuggccggccgggcccuggcccuguuccaggaguaccagugcuacggcuccagcuccaacacccgggugcucaacgagcugaacuacgacaacgcggggaccaaccuguacaacgagcucgagaugaacuacuacggcaagcaggagaacugguacagccugaagaagaacucccgcagccugggggagaacgacgacggcaacaacgaggacaacgagaagcuccggaagcccaagcacaagaagcugaagcagccggccgacgggaaccccgaccccaacgccaaccccaacguggacccgaacgccaaccccaacgucgaccccaacgccaaccccaacguggacccgaacgcgaaccccaacgccaaccccaacgccaaccccaacgccaacccgaacgcgaaccccaacgccaaccccaacgccaaccccaacgccaacccgaacgccaaccccaacgcgaaccccaacgccaaccccaacgccaacccgaacgccaaccccaacgccaaccccaacgcgaaccccaacgccaacccgaacgccaaccccaacguggaccccaacgccaaccccaacgccaacccgaacgcgaaccccaacgccaaccccaacgccaacccgaacgccaaccccaacgccaaccccaacgcgaaccccaacgccaacccgaacgccaaccccaacgccaaccccaacgcgaaccccaacgccaacccgaacgccaaccccaacgccaaccccaacgccaaccccaacgcgaacccgaacgccaaccccaacaagaacaaccagggcaacggccaggggcacaacaugcccaacgaccccaaccgcaacgucgacgagaacgccaacgccaacuccgccgugaagaacaacaacaacgaggagccgagcgacaagcacaucaaggaguaccugaacaagauccagaacucccucagcacggaguggucccccugcagcgugaccugcggcaacgggauccagguccggaucaagcccggcuccgcgaacaagcccaaggacgagcuggacuacgccaacgacaucgagaagaagaucugcaagauggagaagugcagcuccguguucaacguggucaacagcuccaucgggcugaucauggugcucagcuuccuguuccugaacugaggacuagucccuguucccagagcccacuuuuuuuucuuuuuuugaaauaaaauagccugucuuucagaucucaaaggcucuuuucagagccaccaaaaaaaaaaaaaaaaaaaaaaaaaaaaaaaaaaaaaaaaaaaaaaaaaaaaaaaaaaaaaaaaaaaaaaaaaaaaaaaaaaaaaaaaaaaaaaaaaaaaa

SEQ ID NO: 8022 - RNA, 1466 nt, Artificial Sequence
  mRNA Design a-1 (hSL-A100) comprising derived and/or modified sequence from Pf(3D7)__XP_001351122.1__IgE_Pf-CSP(19-397) (opt1)
aggagagucccgcagucggcguccagcggcucugcuuguucgugugugugucguugcaggccuuauucaagcuuaccauggacuggaccuggauccuguuccucguggccgccgcgacccgcguccacagccuguuccaggaguaccagugcuacggcuccagcuccaacacccgggugcucaacgagcugaacuacgacaacgcggggaccaaccuguacaacgagcucgagaugaacuacuacggcaagcaggagaacugguacagccugaagaagaacucccgcagccugggggagaacgacgacggcaacaacgaggacaacgagaagcuccggaagcccaagcacaagaagcugaagcagccggccgacgggaaccccgaccccaacgccaaccccaacguggacccgaacgccaaccccaacgucgaccccaacgccaaccccaacguggacccgaacgcgaaccccaacgccaaccccaacgccaaccccaacgccaacccgaacgcgaaccccaacgccaaccccaacgccaaccccaacgccaacccgaacgccaaccccaacgcgaaccccaacgccaaccccaacgccaacccgaacgccaaccccaacgccaaccccaacgcgaaccccaacgccaacccgaacgccaaccccaacguggaccccaacgccaaccccaacgccaacccgaacgcgaaccccaacgccaaccccaacgccaacccgaacgccaaccccaacgccaaccccaacgcgaaccccaacgccaacccgaacgccaaccccaacgccaaccccaacgcgaaccccaacgccaacccgaacgccaaccccaacgccaaccccaacgccaaccccaacgcgaacccgaacgccaaccccaacaagaacaaccagggcaacggccaggggcacaacaugcccaacgaccccaaccgcaacgucgacgagaacgccaacgccaacuccgccgugaagaacaacaacaacgaggagccgagcgacaagcacaucaaggaguaccugaacaagauccagaacucccucagcacggaguggucccccugcagcgugaccugcggcaacgggauccagguccggaucaagcccggcuccgcgaacaagcccaaggacgagcuggacuacgccaacgacaucgagaagaagaucugcaagauggagaagugcagcuccguguucaacguggucaacagcuccaucgggcugaucauggugcucagcuuccuguuccugaacugaggacuagucccuguucccagagcccacuuuuuuuucuuuuuuugaaauaaaauagccugucuuucagaucucaaaggcucuuuucagagccaccaaaaaaaaaaaaaaaaaaaaaaaaaaaaaaaaaaaaaaaaaaaaaaaaaaaaaaaaaaaaaaaaaaaaaaaaaaaaaaaaaaaaaaaaaaaaaaaaaaaaa

SEQ ID NO: 8023 - RNA, 1631 nt, Artificial Sequence
  mRNA Design a-1 (hSL-A100) comprising derived and/or modified sequence from Pf(3D7)__XP_001351122.1__Pf-CSP_L(G4SG4)_TM domain HA (opt1)
aggagagucccgcagucggcguccagcggcucugcuuguucgugugugugucguugcaggccuuauucaagcuuaccaugaugcgcaagcuggccauccucagcguguccagcuuccuguucgucgaggcccuguuccaggaguaccagugcuacggcuccagcuccaacacccgggugcucaacgagcugaacuacgacaacgcggggaccaaccuguacaacgagcucgagaugaacuacuacggcaagcaggagaacugguacagccugaagaagaacucccgcagccugggggagaacgacgacggcaacaacgaggacaacgagaagcuccggaagcccaagcacaagaagcugaagcagccggccgacgggaaccccgaccccaacgccaaccccaacguggacccgaacgccaaccccaacgucgaccccaacgccaaccccaacguggacccgaacgcgaaccccaacgccaaccccaacgccaaccccaacgccaacccgaacgcgaaccccaacgccaaccccaacgccaaccccaacgccaacccgaacgccaaccccaacgcgaaccccaacgccaaccccaacgccaacccgaacgccaaccccaacgccaaccccaacgcgaaccccaacgccaacccgaacgccaaccccaacguggaccccaacgccaaccccaacgccaacccgaacgcgaaccccaacgccaaccccaacgccaacccgaacgccaaccccaacgccaaccccaacgcgaaccccaacgccaacccgaacgccaaccccaacgccaaccccaacgcgaaccccaacgccaacccgaacgccaaccccaacgccaaccccaacgccaaccccaacgcgaacccgaacgccaaccccaacaagaacaaccagggcaacggccaggggcacaacaugcccaacgaccccaaccgcaacgucgacgagaacgccaacgccaacuccgccgugaagaacaacaacaacgaggagccgagcgacaagcacaucaaggaguaccugaacaagauccagaacucccucagcacggaguggucccccugcagcgugaccugcggcaacgggauccagguccggaucaagcccggcuccgcgaacaagcccaaggacgagcuggacuacgccaacgacaucgagaagaagaucugcaagauggagaagugcagcuccguguucaacguggucaacagcuccaucgggcugaucauggugcucagcuuccuguuccugaacggcgggggcgggagcggcgggggcggcaagcucgaguccacgcggaucuaccagauccuggcgaucuacagcaccgucgccagcucccuggugcucguggucagccugggggccaucuccuucuggaugugcagcaacggcucccugcagugccgcaucugcaucugaggacuagucccuguucccagagcccacuuuuuuuucuuuuuuugaaauaaaauagccugucuuucagaucucaaaggcucuuuucagagccaccaaaaaaaaaaaaaaaaaaaaaaaaaaaaaaaaaaaaaaaaaaaaaaaaaaaaaaaaaaaaaaaaaaaaaaaaaaaaaaaaaaaaaaaaaaaaaaaaaaaaa

SEQ ID NO: 8024 - RNA, 1505 nt, Artificial Sequence
  mRNA Design a-1 (hSL-A100) comprising derived and/or modified sequence from Pf(3D7)__XP_001351122.1__Pf-CSP(199-377)_L(PVTN)_HBsAg (opt1)
aggagagucccgcagucggcguccagcggcucugcuuguucgugugugugucguugcaggccuuauucaagcuuaccauggaccccaacgccaaccccaacgccaacccgaacgcgaaccccaacgccaaccccaacgccaacccgaacgccaaccccaacgccaaccccaacgcgaaccccaacgccaacccgaacgccaaccccaacgccaaccccaacgcgaaccccaacgccaacccgaacgccaaccccaacgccaaccccaacgccaaccccaacgcgaacccgaacgccaaccccaacaagaacaaccagggcaacggccaggggcacaacaugcccaacgaccccaaccgcaacgucgacgagaacgccaacgccaacuccgccgugaagaacaacaacaacgaggagccgagcgacaagcacaucaaggaguaccugaacaagauccagaacucccucagcacggaguggucccccugcagcgugaccugcggcaacgggauccagguccggaucaagcccggcuccgcgaacaagcccaaggacgagcuggacuacgccaacgacaucgagaagaagaucugcaagauggagaagugcagcuccgugccggugacgaacauggagaacaucaccagcggcuuccuggggccccuccuggugcugcaggccggcuucuuccuccugacccgcauccugaccaucccgcagucccucgacagcugguggaccucccugaacuuccucgggggcagccccgucugccuggggcagaacucccagagccccaccuccaaccacagccccaccuccugcccgcccaucugccccggcuaccgguggaugugccugcgccgguucaucaucuuccuguucauccuccugcugugccucaucuuccugcuggugcuccuggacuaccagggcaugcugcccgugugcccgcucauccccgggagcacgaccaccaacaccggccccugcaagacgugcaccacccccgcccaggggaacuccauguucccgagcugcugcugcaccaagcccacggacggcaacugcacgugcauccccauccccuccagcugggcguucgccaaguaccugugggagugggccuccguccgcuucagcuggcugucccuccuggugccguucgugcagugguucgucgggcugagccccaccguguggcucuccgccaucuggaugaugugguacuggggccccagccuguacagcaucgugucccccuucaucccgcugcuccccaucuucuucugccugugggucuacaucugaggacuagucccuguucccagagcccacuuuuuuuucuuuuuuugaaauaaaauagccugucuuucagaucucaaaggcucuuuucagagccaccaaaaaaaaaaaaaaaaaaaaaaaaaaaaaaaaaaaaaaaaaaaaaaaaaaaaaaaaaaaaaaaaaaaaaaaaaaaaaaaaaaaaaaaaaaaaaaaaaaaaa

SEQ ID NO: 8025 - RNA, 1547 nt, Artificial Sequence
  mRNA Design a-1 (hSL-A100) comprising derived and/or modified sequence from Pf(3D7)__XP_001351122.1__Pf-CSP(199-387)_L(PVTN)_HBsAg (opt1)
aggagagucccgcagucggcguccagcggcucugcuuguucgugugugugucguugcaggccuuauucaagcuuaccaugauggccccggaccccaacgccaaccccaacgccaacccgaacgcgaaccccaacgccaaccccaacgccaacccgaacgccaaccccaacgccaaccccaacgcgaaccccaacgccaacccgaacgccaaccccaacgccaaccccaacgcgaaccccaacgccaacccgaacgccaaccccaacgccaaccccaacgccaaccccaacgcgaacccgaacgccaaccccaacaagaacaaccagggcaacggccaggggcacaacaugcccaacgaccccaaccgcaacgucgacgagaacgccaacgccaacuccgccgugaagaacaacaacaacgaggagccgagcgacaagcacaucaaggaguaccugaacaagauccagaacucccucagcacggaguggucccccugcagcgugaccugcggcaacgggauccagguccggaucaagcccggcuccgcgaacaagcccaaggacgagcuggacuacgccaacgacaucgagaagaagaucugcaagauggagaagugcagcuccguguucaacguggucaacagcuccaucgggcuggggccggugacgaacauggagaacaucaccagcggcuuccuggggccccuccuggugcugcaggccggcuucuuccuccugacccgcauccugaccaucccgcagucccucgacagcugguggaccucccugaacuuccucgggggcagccccgucugccuggggcagaacucccagagccccaccuccaaccacagccccaccuccugcccgcccaucugccccggcuaccgguggaugugccugcgccgguucaucaucuuccuguucauccuccugcugugccucaucuuccugcuggugcuccuggacuaccagggcaugcugcccgugugcccgcucauccccgggagcacgaccaccaacaccggccccugcaagacgugcaccacccccgcccaggggaacuccauguucccgagcugcugcugcaccaagcccacggacggcaacugcacgugcauccccauccccuccagcugggcguucgccaaguaccugugggagugggccuccguccgcuucagcuggcugucccuccuggugccguucgugcagugguucgucgggcugagccccaccguguggcucuccgccaucuggaugaugugguacuggggccccagccuguacagcaucgugucccccuucaucccgcugcuccccaucuucuucugccugugggucuacaucugaggacuagucccuguucccagagcccacuuuuuuuucuuuuuuugaaauaaaauagccugucuuucagaucucaaaggcucuuuucagagccaccaaaaaaaaaaaaaaaaaaaaaaaaaaaaaaaaaaaaaaaaaaaaaaaaaaaaaaaaaaaaaaaaaaaaaaaaaaaaaaaaaaaaaaaaaaaaaaaaaaaaa

SEQ ID NO: 8026 - RNA, 731 nt, Artificial Sequence
  mRNA Design a-1 (hSL-A100) comprising derived and/or modified sequence from Pf(3D7)__XP_001351122.1__HsALB_Pf-CSP(19-152) (opt1)
aggagagucccgcagucggcguccagcggcucugcuuguucgugugugugucguugcaggccuuauucaagcuuaccaugaagugggugaccuucaucagccuccuguuccuguucuccagcgccuacucccuguuccaggaguaccagugcuacggcuccagcuccaacacccgggugcucaacgagcugaacuacgacaacgcggggaccaaccuguacaacgagcucgagaugaacuacuacggcaagcaggagaacugguacagccugaagaagaacucccgcagccugggggagaacgacgacggcaacaacgaggacaacgagaagcuccggaagcccaagcacaagaagcugaagcagccggccgacgggaaccccgaccccaacgccaaccccaacguggacccgaacgccaaccccaacgucgaccccaacgccaaccccaacguggacccgaacgcgaaccccaacgccaaccccaacgccaaccccaacgccaacccgaacgcgaaccccaacgccaaccccugaggacuagucccuguucccagagcccacuuuuuuuucuuuuuuugaaauaaaauagccugucuuucagaucucaaaggcucuuuucagagccaccaaaaaaaaaaaaaaaaaaaaaaaaaaaaaaaaaaaaaaaaaaaaaaaaaaaaaaaaaaaaaaaaaaaaaaaaaaaaaaaaaaaaaaaaaaaaaaaaaaaaa

SEQ ID NO: 8027 - RNA, 851 nt, Artificial Sequence
  mRNA Design a-1 (hSL-A100) comprising derived and/or modified sequence from Pf(3D7)__XP_001351122.1__HsALB_Pf-CSP(19-192) (opt1)
aggagagucccgcagucggcguccagcggcucugcuuguucgugugugugucguugcaggccuuauucaagcuuaccaugaagugggugaccuucaucagccuccuguuccuguucuccagcgccuacucccuguuccaggaguaccagugcuacggcuccagcuccaacacccgggugcucaacgagcugaacuacgacaacgcggggaccaaccuguacaacgagcucgagaugaacuacuacggcaagcaggagaacugguacagccugaagaagaacucccgcagccugggggagaacgacgacggcaacaacgaggacaacgagaagcuccggaagcccaagcacaagaagcugaagcagccggccgacgggaaccccgaccccaacgccaaccccaacguggacccgaacgccaaccccaacgucgaccccaacgccaaccccaacguggacccgaacgcgaaccccaacgccaaccccaacgccaaccccaacgccaacccgaacgcgaaccccaacgccaaccccaacgccaaccccaacgccaacccgaacgccaaccccaacgcgaaccccaacgccaaccccaacgccaacccgaacgccaaccccaacgccaaccccaacgcgaaccccaacgccaacccgugaggacuagucccuguucccagagcccacuuuuuuuucuuuuuuugaaauaaaauagccugucuuucagaucucaaaggcucuuuucagagccaccaaaaaaaaaaaaaaaaaaaaaaaaaaaaaaaaaaaaaaaaaaaaaaaaaaaaaaaaaaaaaaaaaaaaaaaaaaaaaaaaaaaaaaaaaaaaaaaaaaaaa

SEQ ID NO: 8028 - RNA, 1091 nt, Artificial Sequence
  mRNA Design a-1 (hSL-A100) comprising derived and/or modified sequence from Pf(3D7)__XP_001351122.1__HsALB_Pf-CSP(19-272) (opt1)
aggagagucccgcagucggcguccagcggcucugcuuguucgugugugugucguugcaggccuuauucaagcuuaccaugaagugggugaccuucaucagccuccuguuccuguucuccagcgccuacucccuguuccaggaguaccagugcuacggcuccagcuccaacacccgggugcucaacgagcugaacuacgacaacgcggggaccaaccuguacaacgagcucgagaugaacuacuacggcaagcaggagaacugguacagccugaagaagaacucccgcagccugggggagaacgacgacggcaacaacgaggacaacgagaagcuccggaagcccaagcacaagaagcugaagcagccggccgacgggaaccccgaccccaacgccaaccccaacguggacccgaacgccaaccccaacgucgaccccaacgccaaccccaacguggacccgaacgcgaaccccaacgccaaccccaacgccaaccccaacgccaacccgaacgcgaaccccaacgccaaccccaacgccaaccccaacgccaacccgaacgccaaccccaacgcgaaccccaacgccaaccccaacgccaacccgaacgccaaccccaacgccaaccccaacgcgaaccccaacgccaacccgaacgccaaccccaacguggaccccaacgccaaccccaacgccaacccgaacgcgaaccccaacgccaaccccaacgccaacccgaacgccaaccccaacgccaaccccaacgcgaaccccaacgccaacccgaacgccaaccccaacgccaaccccaacgcgaaccccaacgccaacccgaacgccaaccccaacgccaaccccaacgccaaccccaacgcgaacccgaacgccaaccccugaggacuagucccuguucccagagcccacuuuuuuuucuuuuuuugaaauaaaauagccugucuuucagaucucaaaggcucuuuucagagccaccaaaaaaaaaaaaaaaaaaaaaaaaaaaaaaaaaaaaaaaaaaaaaaaaaaaaaaaaaaaaaaaaaaaaaaaaaaaaaaaaaaaaaaaaaaaaaaaaaaaaa

SEQ ID NO: 8029 - RNA, 1253 nt, Artificial Sequence
  mRNA Design a-1 (hSL-A100) comprising derived and/or modified sequence from Pf(3D7)__XP_001351122.1__HsALB_Pf-CSP(19-272)_L(AAY)_Pf-CSP(310-3 27)_L(AAY)_Pf-CSP(346-375) (opt1)
aggagagucccgcagucggcguccagcggcucugcuuguucgugugugugucguugcaggccuuauucaagcuuaccaugaagugggugaccuucaucagccuccuguuccuguucuccagcgccuacucccuguuccaggaguaccagugcuacggcuccagcuccaacacccgggugcucaacgagcugaacuacgacaacgcggggaccaaccuguacaacgagcucgagaugaacuacuacggcaagcaggagaacugguacagccugaagaagaacucccgcagccugggggagaacgacgacggcaacaacgaggacaacgagaagcuccggaagcccaagcacaagaagcugaagcagccggccgacgggaaccccgaccccaacgccaaccccaacguggacccgaacgccaaccccaacgucgaccccaacgccaaccccaacguggacccgaacgcgaaccccaacgccaaccccaacgccaaccccaacgccaacccgaacgcgaaccccaacgccaaccccaacgccaaccccaacgccaacccgaacgccaaccccaacgcgaaccccaacgccaaccccaacgccaacccgaacgccaaccccaacgccaaccccaacgcgaaccccaacgccaacccgaacgccaaccccaacguggaccccaacgccaaccccaacgccaacccgaacgcgaaccccaacgccaaccccaacgccaacccgaacgccaaccccaacgccaaccccaacgcgaaccccaacgccaacccgaacgccaaccccaacgccaaccccaacgcgaaccccaacgccaacccgaacgccaaccccaacgccaaccccaacgccaaccccaacgcgaacccgaacgccaaccccgccgcguaugagccgagcgacaagcacaucaaggaguaccugaacaagauccagaacucccucgcggccuacaucaagcccggcuccgcgaacaagcccaaggacgagcuggacuacgccaacgacaucgagaagaagaucugcaagauggagaagugcagcugaggacuagucccuguucccagagcccacuuuuuuuucuuuuuuugaaauaaaauagccugucuuucagaucucaaaggcucuuuucagagccaccaaaaaaaaaaaaaaaaaaaaaaaaaaaaaaaaaaaaaaaaaaaaaaaaaaaaaaaaaaaaaaaaaaaaaaaaaaaaaaaaaaaaaaaaaaaaaaaaaaaaa

SEQ ID NO: 8030 - RNA, 1214 nt, Artificial Sequence
  mRNA Design a-1 (hSL-A100) comprising derived and/or modified sequence from Pf(3D7)__XP_001351122.1__HsALB_Pf-CSP(19-272)_L(AAY)_Pf-CSP(346-3 65)_L(AAY)_P2 (opt1)
aggagagucccgcagucggcguccagcggcucugcuuguucgugugugugucguugcaggccuuauucaagcuuaccaugaagugggugaccuucaucagccuccuguuccuguucuccagcgccuacucccuguuccaggaguaccagugcuacggcuccagcuccaacacccgggugcucaacgagcugaacuacgacaacgcggggaccaaccuguacaacgagcucgagaugaacuacuacggcaagcaggagaacugguacagccugaagaagaacucccgcagccugggggagaacgacgacggcaacaacgaggacaacgagaagcuccggaagcccaagcacaagaagcugaagcagccggccgacgggaaccccgaccccaacgccaaccccaacguggacccgaacgccaaccccaacgucgaccccaacgccaaccccaacguggacccgaacgcgaaccccaacgccaaccccaacgccaaccccaacgccaacccgaacgcgaaccccaacgccaaccccaacgccaaccccaacgccaacccgaacgccaaccccaacgcgaaccccaacgccaaccccaacgccaacccgaacgccaaccccaacgccaaccccaacgcgaaccccaacgccaacccgaacgccaaccccaacguggaccccaacgccaaccccaacgccaacccgaacgcgaaccccaacgccaaccccaacgccaacccgaacgccaaccccaacgccaaccccaacgcgaaccccaacgccaacccgaacgccaaccccaacgccaaccccaacgcgaaccccaacgccaacccgaacgccaaccccaacgccaaccccaacgccaaccccaacgcgaacccgaacgccaaccccgccgcguauaucaagcccggcuccgcgaacaagcccaaggacgagcuggacuacgccaacgacaucgaggcggccuaccaguacaucaaggccaacagcaaguucaucggcaucaccgagcugugaggacuagucccuguucccagagcccacuuuuuuuucuuuuuuugaaauaaaauagccugucuuucagaucucaaaggcucuuuucagagccaccaaaaaaaaaaaaaaaaaaaaaaaaaaaaaaaaaaaaaaaaaaaaaaaaaaaaaaaaaaaaaaaaaaaaaaaaaaaaaaaaaaaaaaaaaaaaaaaaaaaaa

SEQ ID NO: 8031 - RNA, 1208 nt, Artificial Sequence
  mRNA Design a-1 (hSL-A100) comprising derived and/or modified sequence from Pf(3D7)__XP_001351122.1__HsALB_Pf-CSP(19-272)_L(AAY)_Pf-CSP(346-3 65)_L(AAY)_PADRE (opt1)
aggagagucccgcagucggcguccagcggcucugcuuguucgugugugugucguugcaggccuuauucaagcuuaccaugaagugggugaccuucaucagccuccuguuccuguucuccagcgccuacucccuguuccaggaguaccagugcuacggcuccagcuccaacacccgggugcucaacgagcugaacuacgacaacgcggggaccaaccuguacaacgagcucgagaugaacuacuacggcaagcaggagaacugguacagccugaagaagaacucccgcagccugggggagaacgacgacggcaacaacgaggacaacgagaagcuccggaagcccaagcacaagaagcugaagcagccggccgacgggaaccccgaccccaacgccaaccccaacguggacccgaacgccaaccccaacgucgaccccaacgccaaccccaacguggacccgaacgcgaaccccaacgccaaccccaacgccaaccccaacgccaacccgaacgcgaaccccaacgccaaccccaacgccaaccccaacgccaacccgaacgccaaccccaacgcgaaccccaacgccaaccccaacgccaacccgaacgccaaccccaacgccaaccccaacgcgaaccccaacgccaacccgaacgccaaccccaacguggaccccaacgccaaccccaacgccaacccgaacgcgaaccccaacgccaaccccaacgccaacccgaacgccaaccccaacgccaaccccaacgcgaaccccaacgccaacccgaacgccaaccccaacgccaaccccaacgcgaaccccaacgccaacccgaacgccaaccccaacgccaaccccaacgccaaccccaacgcgaacccgaacgccaaccccgccgcguauaucaagcccggcuccgcgaacaagcccaaggacgagcuggacuacgccaacgacaucgaggcggccuacgccaaguucguggccgccuggacccugaaggcggccgccugaggacuagucccuguucccagagcccacuuuuuuuucuuuuuuugaaauaaaauagccugucuuucagaucucaaaggcucuuuucagagccaccaaaaaaaaaaaaaaaaaaaaaaaaaaaaaaaaaaaaaaaaaaaaaaaaaaaaaaaaaaaaaaaaaaaaaaaaaaaaaaaaaaaaaaaaaaaaaaaaaaaaa

SEQ ID NO: 8032 - RNA, 1265 nt, Artificial Sequence
  mRNA Design a-1 (hSL-A100) comprising derived and/or modified sequence from Pf(3D7)__XP_001351122.1__HsALB_Pf-CSP(19-272)_L(G4S)_Pf-CSP(310-3 27)_L(G4S)_Pf-CSP(346-375) (opt1)
aggagagucccgcagucggcguccagcggcucugcuuguucgugugugugucguugcaggccuuauucaagcuuaccaugaagugggugaccuucaucagccuccuguuccuguucuccagcgccuacucccuguuccaggaguaccagugcuacggcuccagcuccaacacccgggugcucaacgagcugaacuacgacaacgcggggaccaaccuguacaacgagcucgagaugaacuacuacggcaagcaggagaacugguacagccugaagaagaacucccgcagccugggggagaacgacgacggcaacaacgaggacaacgagaagcuccggaagcccaagcacaagaagcugaagcagccggccgacgggaaccccgaccccaacgccaaccccaacguggacccgaacgccaaccccaacgucgaccccaacgccaaccccaacguggacccgaacgcgaaccccaacgccaaccccaacgccaaccccaacgccaacccgaacgcgaaccccaacgccaaccccaacgccaaccccaacgccaacccgaacgccaaccccaacgcgaaccccaacgccaaccccaacgccaacccgaacgccaaccccaacgccaaccccaacgcgaaccccaacgccaacccgaacgccaaccccaacguggaccccaacgccaaccccaacgccaacccgaacgcgaaccccaacgccaaccccaacgccaacccgaacgccaaccccaacgccaaccccaacgcgaaccccaacgccaacccgaacgccaaccccaacgccaaccccaacgcgaaccccaacgccaacccgaacgccaaccccaacgccaaccccaacgccaaccccaacgcgaacccgaacgccaaccccggaggcggaggaucugagccgagcgacaagcacaucaaggaguaccugaacaagauccagaacucccucggcggagguggaaguaucaagcccggcuccgcgaacaagcccaaggacgagcuggacuacgccaacgacaucgagaagaagaucugcaagauggagaagugcagcugaggacuagucccuguucccagagcccacuuuuuuuucuuuuuuugaaauaaaauagccugucuuucagaucucaaaggcucuuuucagagccaccaaaaaaaaaaaaaaaaaaaaaaaaaaaaaaaaaaaaaaaaaaaaaaaaaaaaaaaaaaaaaaaaaaaaaaaaaaaaaaaaaaaaaaaaaaaaaaaaaaaaa

SEQ ID NO: 8033 - RNA, 1250 nt, Artificial Sequence
  mRNA Design a-1 (hSL-A100) comprising derived and/or modified sequence from Pf(3D7)__XP_001351122.1__HsALB_Pf-CSP(19-272)_L(G4S)_Pf-CSP(310-3 27)_Pf-CSP(346-375) (opt1)
aggagagucccgcagucggcguccagcggcucugcuuguucgugugugugucguugcaggccuuauucaagcuuaccaugaagugggugaccuucaucagccuccuguuccuguucuccagcgccuacucccuguuccaggaguaccagugcuacggcuccagcuccaacacccgggugcucaacgagcugaacuacgacaacgcggggaccaaccuguacaacgagcucgagaugaacuacuacggcaagcaggagaacugguacagccugaagaagaacucccgcagccugggggagaacgacgacggcaacaacgaggacaacgagaagcuccggaagcccaagcacaagaagcugaagcagccggccgacgggaaccccgaccccaacgccaaccccaacguggacccgaacgccaaccccaacgucgaccccaacgccaaccccaacguggacccgaacgcgaaccccaacgccaaccccaacgccaaccccaacgccaacccgaacgcgaaccccaacgccaaccccaacgccaaccccaacgccaacccgaacgccaaccccaacgcgaaccccaacgccaaccccaacgccaacccgaacgccaaccccaacgccaaccccaacgcgaaccccaacgccaacccgaacgccaaccccaacguggaccccaacgccaaccccaacgccaacccgaacgcgaaccccaacgccaaccccaacgccaacccgaacgccaaccccaacgccaaccccaacgcgaaccccaacgccaacccgaacgccaaccccaacgccaaccccaacgcgaaccccaacgccaacccgaacgccaaccccaacgccaaccccaacgccaaccccaacgcgaacccgaacgccaaccccggaggcggaggaucugagccgagcgacaagcacaucaaggaguaccugaacaagauccagaacucccucaucaagcccggcuccgcgaacaagcccaaggacgagcuggacuacgccaacgacaucgagaagaagaucugcaagauggagaagugcagcugaggacuagucccuguucccagagcccacuuuuuuuucuuuuuuugaaauaaaauagccugucuuucagaucucaaaggcucuuuucagagccaccaaaaaaaaaaaaaaaaaaaaaaaaaaaaaaaaaaaaaaaaaaaaaaaaaaaaaaaaaaaaaaaaaaaaaaaaaaaaaaaaaaaaaaaaaaaaaaaaaaaaa

SEQ ID NO: 8034 - RNA, 1250 nt, Artificial Sequence
  mRNA Design a-1 (hSL-A100) comprising derived and/or modified sequence from Pf(3D7)__XP_001351122.1__HsALB_Pf-CSP(19-325) (opt1)
aggagagucccgcagucggcguccagcggcucugcuuguucgugugugugucguugcaggccuuauucaagcuuaccaugaagugggugaccuucaucagccuccuguuccuguucuccagcgccuacucccuguuccaggaguaccagugcuacggcuccagcuccaacacccgggugcucaacgagcugaacuacgacaacgcggggaccaaccuguacaacgagcucgagaugaacuacuacggcaagcaggagaacugguacagccugaagaagaacucccgcagccugggggagaacgacgacggcaacaacgaggacaacgagaagcuccggaagcccaagcacaagaagcugaagcagccggccgacgggaaccccgaccccaacgccaaccccaacguggacccgaacgccaaccccaacgucgaccccaacgccaaccccaacguggacccgaacgcgaaccccaacgccaaccccaacgccaaccccaacgccaacccgaacgcgaaccccaacgccaaccccaacgccaaccccaacgccaacccgaacgccaaccccaacgcgaaccccaacgccaaccccaacgccaacccgaacgccaaccccaacgccaaccccaacgcgaaccccaacgccaacccgaacgccaaccccaacguggaccccaacgccaaccccaacgccaacccgaacgcgaaccccaacgccaaccccaacgccaacccgaacgccaaccccaacgccaaccccaacgcgaaccccaacgccaacccgaacgccaaccccaacgccaaccccaacgcgaaccccaacgccaacccgaacgccaaccccaacgccaaccccaacgccaaccccaacgcgaacccgaacgccaaccccaacaagaacaaccagggcaacggccaggggcacaacaugcccaacgaccccaaccgcaacgucgacgagaacgccaacgccaacuccgccgugaagaacaacaacaacgaggagccgagcgacaagcacaucaaggaguaccugaacaagauccagaacugaggacuagucccuguucccagagcccacuuuuuuuucuuuuuuugaaauaaaauagccugucuuucagaucucaaaggcucuuuucagagccaccaaaaaaaaaaaaaaaaaaaaaaaaaaaaaaaaaaaaaaaaaaaaaaaaaaaaaaaaaaaaaaaaaaaaaaaaaaaaaaaaaaaaaaaaaaaaaaaaaaaaa

SEQ ID NO: 8035 - RNA, 1427 nt, Artificial Sequence
  mRNA Design a-1 (hSL-A100) comprising derived and/or modified sequence from Pf(3D7)__XP_001351122.1__HsALB_Pf-CSP(19-384) (opt1)
aggagagucccgcagucggcguccagcggcucugcuuguucgugugugugucguugcaggccuuauucaagcuuaccaugaagugggugaccuucaucagccuccuguuccuguucuccagcgccuacucccuguuccaggaguaccagugcuacggcuccagcuccaacacccgggugcucaacgagcugaacuacgacaacgcggggaccaaccuguacaacgagcucgagaugaacuacuacggcaagcaggagaacugguacagccugaagaagaacucccgcagccugggggagaacgacgacggcaacaacgaggacaacgagaagcuccggaagcccaagcacaagaagcugaagcagccggccgacgggaaccccgaccccaacgccaaccccaacguggacccgaacgccaaccccaacgucgaccccaacgccaaccccaacguggacccgaacgcgaaccccaacgccaaccccaacgccaaccccaacgccaacccgaacgcgaaccccaacgccaaccccaacgccaaccccaacgccaacccgaacgccaaccccaacgcgaaccccaacgccaaccccaacgccaacccgaacgccaaccccaacgccaaccccaacgcgaaccccaacgccaacccgaacgccaaccccaacguggaccccaacgccaaccccaacgccaacccgaacgcgaaccccaacgccaaccccaacgccaacccgaacgccaaccccaacgccaaccccaacgcgaaccccaacgccaacccgaacgccaaccccaacgccaaccccaacgcgaaccccaacgccaacccgaacgccaaccccaacgccaaccccaacgccaaccccaacgcgaacccgaacgccaaccccaacaagaacaaccagggcaacggccaggggcacaacaugcccaacgaccccaaccgcaacgucgacgagaacgccaacgccaacuccgccgugaagaacaacaacaacgaggagccgagcgacaagcacaucaaggaguaccugaacaagauccagaacucccucagcacggaguggucccccugcagcgugaccugcggcaacgggauccagguccggaucaagcccggcuccgcgaacaagcccaaggacgagcuggacuacgccaacgacaucgagaagaagaucugcaagauggagaagugcagcuccguguucaacguggucaacagcuccugaggacuagucccuguucccagagcccacuuuuuuuucuuuuuuugaaauaaaauagccugucuuucagaucucaaaggcucuuuucagagccaccaaaaaaaaaaaaaaaaaaaaaaaaaaaaaaaaaaaaaaaaaaaaaaaaaaaaaaaaaaaaaaaaaaaaaaaaaaaaaaaaaaaaaaaaaaaaaaaaaaaaa

SEQ ID NO: 8036 - RNA, 1565 nt, Artificial Sequence
  mRNA Design a-1 (hSL-A100) comprising derived and/or modified sequence from Pf(3D7)__XP_001351122.1__HsALB_Pf-CSP(19-384)_TM domain HA (opt1)
aggagagucccgcagucggcguccagcggcucugcuuguucgugugugugucguugcaggccuuauucaagcuuaccaugaagugggugaccuucaucagccuccuguuccuguucuccagcgccuacucccuguuccaggaguaccagugcuacggcuccagcuccaacacccgggugcucaacgagcugaacuacgacaacgcggggaccaaccuguacaacgagcucgagaugaacuacuacggcaagcaggagaacugguacagccugaagaagaacucccgcagccugggggagaacgacgacggcaacaacgaggacaacgagaagcuccggaagcccaagcacaagaagcugaagcagccggccgacgggaaccccgaccccaacgccaaccccaacguggacccgaacgccaaccccaacgucgaccccaacgccaaccccaacguggacccgaacgcgaaccccaacgccaaccccaacgccaaccccaacgccaacccgaacgcgaaccccaacgccaaccccaacgccaaccccaacgccaacccgaacgccaaccccaacgcgaaccccaacgccaaccccaacgccaacccgaacgccaaccccaacgccaaccccaacgcgaaccccaacgccaacccgaacgccaaccccaacguggaccccaacgccaaccccaacgccaacccgaacgcgaaccccaacgccaaccccaacgccaacccgaacgccaaccccaacgccaaccccaacgcgaaccccaacgccaacccgaacgccaaccccaacgccaaccccaacgcgaaccccaacgccaacccgaacgccaaccccaacgccaaccccaacgccaaccccaacgcgaacccgaacgccaaccccaacaagaacaaccagggcaacggccaggggcacaacaugcccaacgaccccaaccgcaacgucgacgagaacgccaacgccaacuccgccgugaagaacaacaacaacgaggagccgagcgacaagcacaucaaggaguaccugaacaagauccagaacucccucagcacggaguggucccccugcagcgugaccugcggcaacgggauccagguccggaucaagcccggcuccgcgaacaagcccaaggacgagcuggacuacgccaacgacaucgagaagaagaucugcaagauggagaagugcagcuccguguucaacguggucaacagcuccaagcucgaguccacgcggaucuaccagauccuggcgaucuacagcaccgucgccagcucccuggugcucguggucagccugggggccaucuccuucuggaugugcagcaacggcucccugcagugccgcaucugcaucugaggacuagucccuguucccagagcccacuuuuuuuucuuuuuuugaaauaaaauagccugucuuucagaucucaaaggcucuuuucagagccaccaaaaaaaaaaaaaaaaaaaaaaaaaaaaaaaaaaaaaaaaaaaaaaaaaaaaaaaaaaaaaaaaaaaaaaaaaaaaaaaaaaaaaaaaaaaaaaaaaaaaa

SEQ ID NO: 8037 - RNA, 1277 nt, Artificial Sequence
  mRNA Design a-1 (hSL-A100) comprising derived and/or modified sequence from Pf(3D7)__XP_001351122.1__HsALB_Pf-CSP(82-397) (opt1)
aggagagucccgcagucggcguccagcggcucugcuuguucgugugugugucguugcaggccuuauucaagcuuaccaugaagugggugaccuucaucagccuccuguuccuguucuccagcgccuacuccgacaacgagaagcuccggaagcccaagcacaagaagcugaagcagccggccgacgggaaccccgaccccaacgccaaccccaacguggacccgaacgccaaccccaacgucgaccccaacgccaaccccaacguggacccgaacgcgaaccccaacgccaaccccaacgccaaccccaacgccaacccgaacgcgaaccccaacgccaaccccaacgccaaccccaacgccaacccgaacgccaaccccaacgcgaaccccaacgccaaccccaacgccaacccgaacgccaaccccaacgccaaccccaacgcgaaccccaacgccaacccgaacgccaaccccaacguggaccccaacgccaaccccaacgccaacccgaacgcgaaccccaacgccaaccccaacgccaacccgaacgccaaccccaacgccaaccccaacgcgaaccccaacgccaacccgaacgccaaccccaacgccaaccccaacgcgaaccccaacgccaacccgaacgccaaccccaacgccaaccccaacgccaaccccaacgcgaacccgaacgccaaccccaacaagaacaaccagggcaacggccaggggcacaacaugcccaacgaccccaaccgcaacgucgacgagaacgccaacgccaacuccgccgugaagaacaacaacaacgaggagccgagcgacaagcacaucaaggaguaccugaacaagauccagaacucccucagcacggaguggucccccugcagcgugaccugcggcaacgggauccagguccggaucaagcccggcuccgcgaacaagcccaaggacgagcuggacuacgccaacgacaucgagaagaagaucugcaagauggagaagugcagcuccguguucaacguggucaacagcuccaucgggcugaucauggugcucagcuuccuguuccugaacugaggacuagucccuguucccagagcccacuuuuuuuucuuuuuuugaaauaaaauagccugucuuucagaucucaaaggcucuuuucagagccaccaaaaaaaaaaaaaaaaaaaaaaaaaaaaaaaaaaaaaaaaaaaaaaaaaaaaaaaaaaaaaaaaaaaaaaaaaaaaaaaaaaaaaaaaaaaaaaaaaaaaa

SEQ ID NO: 8038 - RNA, 629 nt, Artificial Sequence
  mRNA Design a-1 (hSL-A100) comprising derived and/or modified sequence from Pf(3D7)__XP_001351122.1__HsALB_Pf-CSP(93-192) (opt1)
aggagagucccgcagucggcguccagcggcucugcuuguucgugugugugucguugcaggccuuauucaagcuuaccaugaagugggugaccuucaucagccuccuguuccuguucuccagcgccuacuccaagcugaagcagccggccgacgggaaccccgaccccaacgccaaccccaacguggacccgaacgccaaccccaacgucgaccccaacgccaaccccaacguggacccgaacgcgaaccccaacgccaaccccaacgccaaccccaacgccaacccgaacgcgaaccccaacgccaaccccaacgccaaccccaacgccaacccgaacgccaaccccaacgcgaaccccaacgccaaccccaacgccaacccgaacgccaaccccaacgccaaccccaacgcgaaccccaacgccaacccgugaggacuagucccuguucccagagcccacuuuuuuuucuuuuuuugaaauaaaauagccugucuuucagaucucaaaggcucuuuucagagccaccaaaaaaaaaaaaaaaaaaaaaaaaaaaaaaaaaaaaaaaaaaaaaaaaaaaaaaaaaaaaaaaaaaaaaaaaaaaaaaaaaaaaaaaaaaaaaaaaaaaaa

SEQ ID NO: 8039 - RNA, 869 nt, Artificial Sequence
  mRNA Design a-1 (hSL-A100) comprising derived and/or modified sequence from Pf(3D7)__XP_001351122.1__HsALB_Pf-CSP(93-272) (opt1)
aggagagucccgcagucggcguccagcggcucugcuuguucgugugugugucguugcaggccuuauucaagcuuaccaugaagugggugaccuucaucagccuccuguuccuguucuccagcgccuacuccaagcugaagcagccggccgacgggaaccccgaccccaacgccaaccccaacguggacccgaacgccaaccccaacgucgaccccaacgccaaccccaacguggacccgaacgcgaaccccaacgccaaccccaacgccaaccccaacgccaacccgaacgcgaaccccaacgccaaccccaacgccaaccccaacgccaacccgaacgccaaccccaacgcgaaccccaacgccaaccccaacgccaacccgaacgccaaccccaacgccaaccccaacgcgaaccccaacgccaacccgaacgccaaccccaacguggaccccaacgccaaccccaacgccaacccgaacgcgaaccccaacgccaaccccaacgccaacccgaacgccaaccccaacgccaaccccaacgcgaaccccaacgccaacccgaacgccaaccccaacgccaaccccaacgcgaaccccaacgccaacccgaacgccaaccccaacgccaaccccaacgccaaccccaacgcgaacccgaacgccaaccccugaggacuagucccuguucccagagcccacuuuuuuuucuuuuuuugaaauaaaauagccugucuuucagaucucaaaggcucuuuucagagccaccaaaaaaaaaaaaaaaaaaaaaaaaaaaaaaaaaaaaaaaaaaaaaaaaaaaaaaaaaaaaaaaaaaaaaaaaaaaaaaaaaaaaaaaaaaaaaaaaaaaaa

SEQ ID NO: 8040 - RNA, 1244 nt, Artificial Sequence
  mRNA Design a-1 (hSL-A100) comprising derived and/or modified sequence from Pf(3D7)__XP_001351122.1__HsALB_Pf-CSP(93-397) (opt1)
aggagagucccgcagucggcguccagcggcucugcuuguucgugugugugucguugcaggccuuauucaagcuuaccaugaagugggugaccuucaucagccuccuguuccuguucuccagcgccuacuccaagcugaagcagccggccgacgggaaccccgaccccaacgccaaccccaacguggacccgaacgccaaccccaacgucgaccccaacgccaaccccaacguggacccgaacgcgaaccccaacgccaaccccaacgccaaccccaacgccaacccgaacgcgaaccccaacgccaaccccaacgccaaccccaacgccaacccgaacgccaaccccaacgcgaaccccaacgccaaccccaacgccaacccgaacgccaaccccaacgccaaccccaacgcgaaccccaacgccaacccgaacgccaaccccaacguggaccccaacgccaaccccaacgccaacccgaacgcgaaccccaacgccaaccccaacgccaacccgaacgccaaccccaacgccaaccccaacgcgaaccccaacgccaacccgaacgccaaccccaacgccaaccccaacgcgaaccccaacgccaacccgaacgccaaccccaacgccaaccccaacgccaaccccaacgcgaacccgaacgccaaccccaacaagaacaaccagggcaacggccaggggcacaacaugcccaacgaccccaaccgcaacgucgacgagaacgccaacgccaacuccgccgugaagaacaacaacaacgaggagccgagcgacaagcacaucaaggaguaccugaacaagauccagaacucccucagcacggaguggucccccugcagcgugaccugcggcaacgggauccagguccggaucaagcccggcuccgcgaacaagcccaaggacgagcuggacuacgccaacgacaucgagaagaagaucugcaagauggagaagugcagcuccguguucaacguggucaacagcuccaucgggcugaucauggugcucagcuuccuguuccugaacugaggacuagucccuguucccagagcccacuuuuuuuucuuuuuuugaaauaaaauagccugucuuucagaucucaaaggcucuuuucagagccaccaaaaaaaaaaaaaaaaaaaaaaaaaaaaaaaaaaaaaaaaaaaaaaaaaaaaaaaaaaaaaaaaaaaaaaaaaaaaaaaaaaaaaaaaaaaaaaaaaaaaa

SEQ ID NO: 8041 - RNA, 614 nt, Artificial Sequence
  mRNA Design a-1 (hSL-A100) comprising derived and/or modified sequence from Pf(3D7)__XP_001351122.1__HsALB_Pf-CSP(98-192) (opt1)
aggagagucccgcagucggcguccagcggcucugcuuguucgugugugugucguugcaggccuuauucaagcuuaccaugaagugggugaccuucaucagccuccuguuccuguucuccagcgccuacuccgccgacgggaaccccgaccccaacgccaaccccaacguggacccgaacgccaaccccaacgucgaccccaacgccaaccccaacguggacccgaacgcgaaccccaacgccaaccccaacgccaaccccaacgccaacccgaacgcgaaccccaacgccaaccccaacgccaaccccaacgccaacccgaacgccaaccccaacgcgaaccccaacgccaaccccaacgccaacccgaacgccaaccccaacgccaaccccaacgcgaaccccaacgccaacccgugaggacuagucccuguucccagagcccacuuuuuuuucuuuuuuugaaauaaaauagccugucuuucagaucucaaaggcucuuuucagagccaccaaaaaaaaaaaaaaaaaaaaaaaaaaaaaaaaaaaaaaaaaaaaaaaaaaaaaaaaaaaaaaaaaaaaaaaaaaaaaaaaaaaaaaaaaaaaaaaaaaaaa

SEQ ID NO: 8042 - RNA, 854 nt, Artificial Sequence
  mRNA Design a-1 (hSL-A100) comprising derived and/or modified sequence from Pf(3D7)__XP_001351122.1__HsALB_Pf-CSP(98-272) (opt1)
aggagagucccgcagucggcguccagcggcucugcuuguucgugugugugucguugcaggccuuauucaagcuuaccaugaagugggugaccuucaucagccuccuguuccuguucuccagcgccuacuccgccgacgggaaccccgaccccaacgccaaccccaacguggacccgaacgccaaccccaacgucgaccccaacgccaaccccaacguggacccgaacgcgaaccccaacgccaaccccaacgccaaccccaacgccaacccgaacgcgaaccccaacgccaaccccaacgccaaccccaacgccaacccgaacgccaaccccaacgcgaaccccaacgccaaccccaacgccaacccgaacgccaaccccaacgccaaccccaacgcgaaccccaacgccaacccgaacgccaaccccaacguggaccccaacgccaaccccaacgccaacccgaacgcgaaccccaacgccaaccccaacgccaacccgaacgccaaccccaacgccaaccccaacgcgaaccccaacgccaacccgaacgccaaccccaacgccaaccccaacgcgaaccccaacgccaacccgaacgccaaccccaacgccaaccccaacgccaaccccaacgcgaacccgaacgccaaccccugaggacuagucccuguucccagagcccacuuuuuuuucuuuuuuugaaauaaaauagccugucuuucagaucucaaaggcucuuuucagagccaccaaaaaaaaaaaaaaaaaaaaaaaaaaaaaaaaaaaaaaaaaaaaaaaaaaaaaaaaaaaaaaaaaaaaaaaaaaaaaaaaaaaaaaaaaaaaaaaaaaaaa

SEQ ID NO: 8043 - RNA, 1160 nt, Artificial Sequence
  mRNA Design a-1 (hSL-A100) comprising derived and/or modified sequence from Pf(3D7)__XP_001351122.1__HsALB_Pf-CSP(98-374) (opt1)
aggagagucccgcagucggcguccagcggcucugcuuguucgugugugugucguugcaggccuuauucaagcuuaccaugaagugggugaccuucaucagccuccuguuccuguucuccagcgccuacuccgccgacgggaaccccgaccccaacgccaaccccaacguggacccgaacgccaaccccaacgucgaccccaacgccaaccccaacguggacccgaacgcgaaccccaacgccaaccccaacgccaaccccaacgccaacccgaacgcgaaccccaacgccaaccccaacgccaaccccaacgccaacccgaacgccaaccccaacgcgaaccccaacgccaaccccaacgccaacccgaacgccaaccccaacgccaaccccaacgcgaaccccaacgccaacccgaacgccaaccccaacguggaccccaacgccaaccccaacgccaacccgaacgcgaaccccaacgccaaccccaacgccaacccgaacgccaaccccaacgccaaccccaacgcgaaccccaacgccaacccgaacgccaaccccaacgccaaccccaacgcgaaccccaacgccaacccgaacgccaaccccaacgccaaccccaacgccaaccccaacgcgaacccgaacgccaaccccaacaagaacaaccagggcaacggccaggggcacaacaugcccaacgaccccaaccgcaacgucgacgagaacgccaacgccaacuccgccgugaagaacaacaacaacgaggagccgagcgacaagcacaucaaggaguaccugaacaagauccagaacucccucagcacggaguggucccccugcagcgugaccugcggcaacgggauccagguccggaucaagcccggcuccgcgaacaagcccaaggacgagcuggacuacgccaacgacaucgagaagaagaucugcaagauggagaagugcugaggacuagucccuguucccagagcccacuuuuuuuucuuuuuuugaaauaaaauagccugucuuucagaucucaaaggcucuuuucagagccaccaaaaaaaaaaaaaaaaaaaaaaaaaaaaaaaaaaaaaaaaaaaaaaaaaaaaaaaaaaaaaaaaaaaaaaaaaaaaaaaaaaaaaaaaaaaaaaaaaaaaa

SEQ ID NO: 8044 - RNA, 1229 nt, Artificial Sequence
  mRNA Design a-1 (hSL-A100) comprising derived and/or modified sequence from Pf(3D7)__XP_001351122.1__HsALB_Pf-CSP(98-397) (opt1)
aggagagucccgcagucggcguccagcggcucugcuuguucgugugugugucguugcaggccuuauucaagcuuaccaugaagugggugaccuucaucagccuccuguuccuguucuccagcgccuacuccgccgacgggaaccccgaccccaacgccaaccccaacguggacccgaacgccaaccccaacgucgaccccaacgccaaccccaacguggacccgaacgcgaaccccaacgccaaccccaacgccaaccccaacgccaacccgaacgcgaaccccaacgccaaccccaacgccaaccccaacgccaacccgaacgccaaccccaacgcgaaccccaacgccaaccccaacgccaacccgaacgccaaccccaacgccaaccccaacgcgaaccccaacgccaacccgaacgccaaccccaacguggaccccaacgccaaccccaacgccaacccgaacgcgaaccccaacgccaaccccaacgccaacccgaacgccaaccccaacgccaaccccaacgcgaaccccaacgccaacccgaacgccaaccccaacgccaaccccaacgcgaaccccaacgccaacccgaacgccaaccccaacgccaaccccaacgccaaccccaacgcgaacccgaacgccaaccccaacaagaacaaccagggcaacggccaggggcacaacaugcccaacgaccccaaccgcaacgucgacgagaacgccaacgccaacuccgccgugaagaacaacaacaacgaggagccgagcgacaagcacaucaaggaguaccugaacaagauccagaacucccucagcacggaguggucccccugcagcgugaccugcggcaacgggauccagguccggaucaagcccggcuccgcgaacaagcccaaggacgagcuggacuacgccaacgacaucgagaagaagaucugcaagauggagaagugcagcuccguguucaacguggucaacagcuccaucgggcugaucauggugcucagcuuccuguuccugaacugaggacuagucccuguucccagagcccacuuuuuuuucuuuuuuugaaauaaaauagccugucuuucagaucucaaaggcucuuuucagagccaccaaaaaaaaaaaaaaaaaaaaaaaaaaaaaaaaaaaaaaaaaaaaaaaaaaaaaaaaaaaaaaaaaaaaaaaaaaaaaaaaaaaaaaaaaaaaaaaaaaaaa

SEQ ID NO: 8045 - RNA, 1556 nt, Artificial Sequence
  mRNA Design a-1 (hSL-A100) comprising derived and/or modified sequence from Pf(3D7)__XP_001351122.1__HsALB_Pf-CSP(199-377)_L(PVTN)_HBsAg (opt1)
aggagagucccgcagucggcguccagcggcucugcuuguucgugugugugucguugcaggccuuauucaagcuuaccaugaaguggguaaccuuuauuucccuucuuuuucucuuuagcucggcuuauuccgaccccaacgccaaccccaacgccaacccgaacgcgaaccccaacgccaaccccaacgccaacccgaacgccaaccccaacgccaaccccaacgcgaaccccaacgccaacccgaacgccaaccccaacgccaaccccaacgcgaaccccaacgccaacccgaacgccaaccccaacgccaaccccaacgccaaccccaacgcgaacccgaacgccaaccccaacaagaacaaccagggcaacggccaggggcacaacaugcccaacgaccccaaccgcaacgucgacgagaacgccaacgccaacuccgccgugaagaacaacaacaacgaggagccgagcgacaagcacaucaaggaguaccugaacaagauccagaacucccucagcacggaguggucccccugcagcgugaccugcggcaacgggauccagguccggaucaagcccggcuccgcgaacaagcccaaggacgagcuggacuacgccaacgacaucgagaagaagaucugcaagauggagaagugcagcuccgugccggugacgaacauggagaacaucaccagcggcuuccuggggccccuccuggugcugcaggccggcuucuuccuccugacccgcauccugaccaucccgcagucccucgacagcugguggaccucccugaacuuccucgggggcagccccgucugccuggggcagaacucccagagccccaccuccaaccacagccccaccuccugcccgcccaucugccccggcuaccgguggaugugccugcgccgguucaucaucuuccuguucauccuccugcugugccucaucuuccugcuggugcuccuggacuaccagggcaugcugcccgugugcccgcucauccccgggagcacgaccaccaacaccggccccugcaagacgugcaccacccccgcccaggggaacuccauguucccgagcugcugcugcaccaagcccacggacggcaacugcacgugcauccccauccccuccagcugggcguucgccaaguaccugugggagugggccuccguccgcuucagcuggcugucccuccuggugccguucgugcagugguucgucgggcugagccccaccguguggcucuccgccaucuggaugaugugguacuggggccccagccuguacagcaucgugucccccuucaucccgcugcuccccaucuucuucugccugugggucuacaucugaggacuagucccuguucccagagcccacuuuuuuuucuuuuuuugaaauaaaauagccugucuuucagaucucaaaggcucuuuucagagccaccaaaaaaaaaaaaaaaaaaaaaaaaaaaaaaaaaaaaaaaaaaaaaaaaaaaaaaaaaaaaaaaaaaaaaaaaaaaaaaaaaaaaaaaaaaaaaaaaaaaaa

SEQ ID NO: 8046 - RNA, 1466 nt, Artificial Sequence; identical to SEQ ID NO: 8016
  mRNA Design a-1 (hSL-A100) comprising derived and/or modified sequence from Pf(3D7)__XP_001351122.1__Pf-CSP (opt1)

SEQ ID NO: 8047 - RNA, 1397 nt, Artificial Sequence; identical to SEQ ID NO: 8017
  mRNA Design a-1 (hSL-A100) comprising derived and/or modified sequence from Pf(3D7)__XP_001351122.1__Pf-CSP(1-374) (opt1)

SEQ ID NO: 8048 - RNA, 1250 nt, Artificial Sequence; identical to SEQ ID NO: 8018
  mRNA Design a-1 (hSL-A100) comprising derived and/or modified sequence from Pf(3D7)__XP_001351122.1__Pf-CSP(1-325) (opt1)

SEQ ID NO: 8049 - RNA, 1466 nt, Artificial Sequence
  mRNA Design a-1 (hSL-A100) comprising derived and/or modified sequence from Pf(3D7)__XP_001351122.1__HsALB_Pf-CSP(19-397) (opt1)
aggagagucccgcagucggcguccagcggcucugcuuguucgugugugugucguugcaggccuuauucaagcuuaccaugaagugggugaccuucaucagccuccuguuccuguucuccagcgccuacucccuguuccaggaguaccagugcuacggcagcuccagcaacacccgcguccucaacgagcugaacuacgacaacgccgggacgaaccuguacaacgagcucgagaugaacuacuacggcaagcaggagaacugguacucccugaagaagaacagccggucccugggggagaacgacgacggcaacaacgaggacaacgagaagcuccgcaagcccaagcacaagaagcugaagcagccggcggacgggaaccccgaccccaacgccaaccccaacguggacccgaacgccaaccccaacguggaccccaacgccaaccccaacgucgacccgaacgccaaccccaacgcgaaccccaacgccaaccccaacgccaacccgaacgccaaccccaacgcgaaccccaacgccaaccccaacgccaacccgaacgccaaccccaacgccaaccccaacgcgaaccccaacgccaacccgaacgccaaccccaacgccaaccccaacgccaaccccaacgcgaacccgaacgccaaccccaacguggaccccaacgccaaccccaacgccaacccgaacgccaaccccaacgcgaaccccaacgccaacccgaacgccaaccccaacgccaaccccaacgccaaccccaacgcgaacccgaacgccaaccccaacgccaaccccaacgccaaccccaacgcgaacccgaacgccaaccccaacgccaaccccaacgccaaccccaacgccaacccgaacgcgaaccccaacaagaacaaccagggcaacggccaggggcacaacaugcccaacgaccccaaccggaacguggacgagaacgccaacgccaacagcgccgucaagaacaacaacaacgaggagccguccgacaagcacaucaaggaguaccugaacaagauccagaacagccucuccaccgaguggagccccugcuccgugaccugcggcaacgggauccaggugcgcaucaagcccggcagcgccaacaagcccaaggacgagcuggacuacgcgaacgacaucgagaagaagaucugcaagauggagaagugcuccagcgucuucaacguggugaacuccagcaucgggcugaucaugguccucagcuuccuguuccugaacugaggacuagucccuguucccagagcccacuuuuuuuucuuuuuuugaaauaaaauagccugucuuucagaucucaaaggcucuuuucagagccaccaaaaaaaaaaaaaaaaaaaaaaaaaaaaaaaaaaaaaaaaaaaaaaaaaaaaaaaaaaaaaaaaaaaaaaaaaaaaaaaaaaaaaaaaaaaaaaaaaaaaa

SEQ ID NO: 8050 - RNA, 1484 nt, Artificial Sequence
  mRNA Design a-1 (hSL-A100) comprising derived and/or modified sequence from Pf(3D7)__XP_001351122.1__HsIns-iso1_Pf-CSP(19-397) (opt1)
aggagagucccgcagucggcguccagcggcucugcuuguucgugugugugucguugcaggccuuauucaagcuuaccauggcccuguggaugcgccuccugccccugcucgcccugcuggcgcucuggggcccggaccccgccgccgcccuguuccaggaguaccagugcuacgggagcuccagcaacacccgggugcugaacgagcucaacuacgacaacgccggcaccaaccuguacaacgagcuggagaugaacuacuacgggaagcaggagaacugguacucccucaagaagaacagccgcucccugggcgagaacgacgacgggaacaacgaggacaacgagaagcugcggaagcccaagcacaagaagcucaagcagcccgcggacggcaacccggaccccaacgccaaccccaacgucgaccccaacgccaacccgaacguggaccccaacgccaaccccaacguggaccccaacgcgaacccgaacgccaaccccaacgccaaccccaacgccaaccccaacgccaacccgaacgcgaaccccaacgccaaccccaacgccaaccccaacgccaacccgaacgccaaccccaacgcgaaccccaacgccaaccccaacgccaacccgaacgccaaccccaacgccaaccccaacgcgaaccccaacgccaacccgaacgucgaccccaacgccaaccccaacgccaacccgaacgccaaccccaacgcgaaccccaacgccaaccccaacgccaacccgaacgccaaccccaacgcgaaccccaacgccaaccccaacgccaacccgaacgccaaccccaacgccaaccccaacgcgaaccccaacgccaacccgaacgccaaccccaacgccaaccccaacgccaaccccaacgcgaacccgaacaagaacaaccagggcaacgggcagggccacaacaugcccaacgaccccaaccgcaacguggacgagaacgccaacgccaacagcgccgugaagaacaacaacaacgaggagcccuccgacaagcacaucaaggaguaccugaacaagauccagaacagccuguccacggaguggagcccgugcuccgugaccugcgggaacggcauccagguccggaucaagcccgggagcgccaacaagcccaaggacgagcucgacuacgcgaacgacaucgagaagaagaucugcaagauggagaagugcuccagcguguucaacgucgugaacuccagcaucggccugaucauggugcuguccuuccucuuccugaacugaggacuagucccuguucccagagcccacuuuuuuuucuuuuuuugaaauaaaauagccugucuuucagaucucaaaggcucuuuucagagccaccaaaaaaaaaaaaaaaaaaaaaaaaaaaaaaaaaaaaaaaaaaaaaaaaaaaaaaaaaaaaaaaaaaaaaaaaaaaaaaaaaaaaaaaaaaaaaaaaaaaaa

SEQ ID NO: 8051 - RNA, 1463 nt, Artificial Sequence
  mRNA Design a-1 (hSL-A100) comprising derived and/or modified sequence from Pf(3D7)__XP_001351122.1__HsSPARC_Pf-CSP(19-397) (opt1)
aggagagucccgcagucggcguccagcggcucugcuuguucgugugugugucguugcaggccuuauucaagcuuaccaugcgcgccuggaucuucuuccugcucugccuggccggccgggcgcuggcccucuuccaggaguaccagugcuacgggagcuccagcaacacccgcgugcugaacgagcugaacuacgacaacgccggcaccaaccucuacaacgagcuggagaugaacuacuacgggaagcaggagaacugguacucccugaagaagaacagccggucccucggcgagaacgacgacgggaacaacgaggacaacgagaagcugcgcaagcccaagcacaagaagcugaagcagccggccgacggcaaccccgaccccaacgccaaccccaacgucgacccgaacgcgaaccccaacguggaccccaacgccaaccccaacguggacccgaacgccaaccccaacgccaaccccaacgcgaaccccaacgccaacccgaacgccaaccccaacgccaaccccaacgccaaccccaacgcgaacccgaacgccaaccccaacgccaaccccaacgccaaccccaacgccaacccgaacgcgaaccccaacgccaaccccaacgccaaccccaacgccaacccgaacgccaaccccaacgucgaccccaacgcgaaccccaacgccaacccgaacgccaaccccaacgccaaccccaacgccaacccgaacgcgaaccccaacgccaaccccaacgccaaccccaacgccaacccgaacgcgaaccccaacgccaaccccaacgccaaccccaacgccaacccgaacgccaaccccaacgcgaaccccaacgccaaccccaacgccaacccgaacgccaaccccaacaagaacaaccagggcaacgggcagggccacaacaugcccaacgaccccaaccggaacguggacgagaacgccaacgcgaacagcgccgugaagaacaacaacaacgaggagccguccgacaagcacaucaaggaguaccucaacaagauccagaacagccuguccacggaguggagccccugcuccgugaccugcgggaacggcauccagguccgcaucaagcccgggagcgccaacaagcccaaggacgagcuggacuacgccaacgacaucgagaagaagaucugcaagauggagaagugcuccagcguguucaacgucgugaacuccagcaucggccucaucauggugcuguccuuccuguuccucaacugaggacuagucccuguucccagagcccacuuuuuuuucuuuuuuugaaauaaaauagccugucuuucagaucucaaaggcucuuuucagagccaccaaaaaaaaaaaaaaaaaaaaaaaaaaaaaaaaaaaaaaaaaaaaaaaaaaaaaaaaaaaaaaaaaaaaaaaaaaaaaaaaaaaaaaaaaaaaaaaaaaaaa

SEQ ID NO: 8052 - RNA, 1466 nt, Artificial Sequence
  mRNA Design a-1 (hSL-A100) comprising derived and/or modified sequence from Pf(3D7)__XP_001351122.1__IgE_Pf-CSP(19-397) (opt1)
aggagagucccgcagucggcguccagcggcucugcuuguucgugugugugucguugcaggccuuauucaagcuuaccauggacuggaccuggauccuguuccucguggccgccgcgacccgcguccacagccuguuccaggaguaccagugcuacggcuccagcuccaacacgcgggugcugaacgagcucaacuacgacaacgccgggaccaaccuguacaacgagcuggagaugaacuacuacggcaagcaggagaacugguacagccucaagaagaacucccgcagccugggggagaacgacgacggcaacaacgaggacaacgagaagcugcggaagcccaagcacaagaagcucaagcagccggccgacgggaaccccgaccccaacgccaaccccaacguggacccgaacgccaaccccaacgucgaccccaacgcgaaccccaacguggacccgaacgccaaccccaacgccaaccccaacgccaaccccaacgcgaacccgaacgccaaccccaacgccaaccccaacgccaaccccaacgccaacccgaacgcgaaccccaacgccaaccccaacgccaaccccaacgccaacccgaacgccaaccccaacgcgaaccccaacgccaaccccaacgccaacccgaacgccaaccccaacguggaccccaacgccaaccccaacgcgaacccgaacgccaaccccaacgccaaccccaacgccaacccgaacgccaaccccaacgcgaaccccaacgccaaccccaacgccaacccgaacgccaaccccaacgcgaaccccaacgccaaccccaacgccaacccgaacgccaaccccaacgccaaccccaacgcgaaccccaacgccaacccgaacgccaaccccaacaagaacaaccagggcaacggccaggggcacaacaugcccaacgaccccaaccgcaacgucgacgagaacgccaacgccaacuccgcggugaagaacaacaacaacgaggagccgagcgacaagcacaucaaggaguaccugaacaagauccagaacucccugagcaccgaguggucccccugcagcgugaccugcggcaacgggauccagguccggaucaagcccggcuccgccaacaagcccaaggacgagcucgacuacgccaacgacaucgagaagaagaucugcaagauggagaagugcagcuccguguucaacguggucaacagcuccaucgggcugaucauggugcugagcuuccucuuccugaacugaggacuagucccuguucccagagcccacuuuuuuuucuuuuuuugaaauaaaauagccugucuuucagaucucaaaggcucuuuucagagccaccaaaaaaaaaaaaaaaaaaaaaaaaaaaaaaaaaaaaaaaaaaaaaaaaaaaaaaaaaaaaaaaaaaaaaaaaaaaaaaaaaaaaaaaaaaaaaaaaaaaaa

SEQ ID NO: 8053 - RNA, 1631 nt, Artificial Sequence
  mRNA Design a-1 (hSL-A100) comprising derived and/or modified sequence from Pf(3D7)__XP_001351122.1__Pf-CSP_L(G4SG4)_TM domain HA (opt1)
aggagagucccgcagucggcguccagcggcucugcuuguucgugugugugucguugcaggccuuauucaagcuuaccaugaugcgcaagcuggccauccucagcguguccagcuuccuguucgucgaggcccuguuccaggaguaccagugcuacggcuccagcuccaacacccgggugcucaacgagcugaacuacgacaacgcggggaccaaccuguacaacgagcucgagaugaacuacuacggcaagcaggagaacugguacagccugaagaagaacucccgcagccugggggagaacgacgacggcaacaacgaggacaacgagaagcuccggaagcccaagcacaagaagcugaagcagccggccgacgggaaccccgaccccaacgccaaccccaacguggacccgaacgccaaccccaacgucgaccccaacgccaaccccaacguggacccgaacgcgaaccccaacgccaaccccaacgccaaccccaacgccaacccgaacgcgaaccccaacgccaaccccaacgccaaccccaacgccaacccgaacgccaaccccaacgcgaaccccaacgccaaccccaacgccaacccgaacgccaaccccaacgccaaccccaacgcgaaccccaacgccaacccgaacgccaaccccaacguggaccccaacgccaaccccaacgccaacccgaacgcgaaccccaacgccaaccccaacgccaacccgaacgccaaccccaacgccaaccccaacgcgaaccccaacgccaacccgaacgccaaccccaacgccaaccccaacgcgaaccccaacgccaacccgaacgccaaccccaacgccaaccccaacgccaaccccaacgcgaacccgaacgccaaccccaacaagaacaaccagggcaacggccaggggcacaacaugcccaacgaccccaaccgcaacgucgacgagaacgccaacgccaacuccgccgugaagaacaacaacaacgaggagccgagcgacaagcacaucaaggaguaccugaacaagauccagaacucccucagcacggaguggucccccugcagcgugaccugcggcaacgggauccagguccggaucaagcccggcuccgcgaacaagcccaaggacgagcuggacuacgccaacgacaucgagaagaagaucugcaagauggagaagugcagcuccguguucaacguggucaacagcuccaucgggcugaucauggugcucagcuuccuguuccugaacggcggcgggggcagcgggggcggcgggaagcucgaguccacccgcaucuaccagauccuggccaucuacagcaccguggccuccagccugguccucguggugucccugggcgccaucagcuucuggaugugcuccaacgggagccugcagugccggaucugcaucugaggacuagucccuguucccagagcccacuuuuuuuucuuuuuuugaaauaaaauagccugucuuucagaucucaaaggcucuuuucagagccaccaaaaaaaaaaaaaaaaaaaaaaaaaaaaaaaaaaaaaaaaaaaaaaaaaaaaaaaaaaaaaaaaaaaaaaaaaaaaaaaaaaaaaaaaaaaaaaaaaaaaa

SEQ ID NO: 8054 - RNA, 1505 nt, Artificial Sequence
  mRNA Design a-1 (hSL-A100) comprising derived and/or modified sequence from Pf(3D7)__XP_001351122.1__Pf-CSP(199-377)_L(PVTN)_HBsAg (opt1)
aggagagucccgcagucggcguccagcggcucugcuuguucgugugugugucguugcaggccuuauucaagcuuaccauggaccccaacgccaacccgaacgccaaccccaacgcgaaccccaacgccaaccccaacgccaacccgaacgccaaccccaacgccaaccccaacgcgaaccccaacgccaacccgaacgccaaccccaacgccaaccccaacgcgaaccccaacgccaacccgaacgccaaccccaacgccaaccccaacgccaaccccaacgcgaacccgaacgccaaccccaacaagaacaaccagggcaacgggcagggccacaacaugcccaacgaccccaaccgcaacguggacgagaacgccaacgccaacagcgccgucaagaacaacaacaacgaggagccguccgacaagcacaucaaggaguaccugaacaagauccagaacagccucuccaccgaguggagccccugcuccgugaccugcgggaacggcauccaggugcggaucaagcccgggagcgcgaacaagcccaaggacgagcuggacuacgccaacgacaucgagaagaagaucugcaagauggagaagugcuccagcgucccggugacgaacauggagaacaucaccuccggcuuccugggcccccuccuggugcugcaggccggguucuuccuccugacccgcauccugaccaucccccagagccucgacuccugguggacgagccugaacuuccugggcgggucccccgucugccucggccagaacagccaguccccgaccagcaaccacucccccaccagcugcccgcccaucugccccggguaccgguggaugugccugcgccgguucaucaucuuccuguucauccuccugcugugccucaucuuccugcuggugcuccuggacuaccagggcaugcugcccgugugcccccucaucccgggcuccaccacgaccaacaccgggcccugcaagaccugcacgacccccgcccagggcaacagcauguuccccagcugcugcugcaccaagccgaccgacgggaacugcacgugcauccccauccccuccagcugggccuucgcgaaguaccugugggagugggccuccguccgcuucagcuggcugucccuccuggugcccuucgugcagugguucgucggccugagcccgaccguguggcucuccgccaucuggaugaugugguacuggggccccagccuguacuccaucgugagccccuucaucccccugcucccgaucuucuucugccugugggucuacaucugaggacuagucccuguucccagagcccacuuuuuuuucuuuuuuugaaauaaaauagccugucuuucagaucucaaaggcucuuuucagagccaccaaaaaaaaaaaaaaaaaaaaaaaaaaaaaaaaaaaaaaaaaaaaaaaaaaaaaaaaaaaaaaaaaaaaaaaaaaaaaaaaaaaaaaaaaaaaaaaaaaaaa

SEQ ID NO: 8055 - RNA, 1547 nt, Artificial Sequence
  mRNA Design a-1 (hSL-A100) comprising derived and/or modified sequence from Pf(3D7)__XP_001351122.1__Pf-CSP(199-387)_L(PVTN)_HBsAg (opt1)
aggagagucccgcagucggcguccagcggcucugcuuguucgugugugugucguugcaggccuuauucaagcuuaccaugauggcccccgacccgaacgccaaccccaacgcgaaccccaacgccaaccccaacgccaacccgaacgccaaccccaacgccaaccccaacgcgaaccccaacgccaacccgaacgccaaccccaacgccaaccccaacgcgaaccccaacgccaacccgaacgccaaccccaacgccaaccccaacgccaaccccaacgcgaacccgaacgccaaccccaacgccaaccccaacaagaacaaccagggcaacgggcagggccacaacaugcccaacgacccgaaccgcaacguggacgagaacgccaacgccaacagcgcggucaagaacaacaacaacgaggagcccuccgacaagcacaucaaggaguaccugaacaagauccagaacagccucuccaccgaguggagccccugcuccgugaccugcgggaacggcauccaggugcggaucaagcccgggagcgccaacaagccgaaggacgagcuggacuacgccaacgacaucgagaagaagaucugcaagauggagaagugcuccagcgucuucaacguggugaacuccagcaucggccugggccccgucacgaacauggagaacaucaccuccggguuccucggcccccugcuggugcuccaggccggguucuuccugcugacccgcauccucaccaucccccagagccuggacuccugguggacgagccugaacuuccucggcggguccccggugugccugggccagaacagccagucccccaccagcaaccacucccccaccagcugcccgcccaucugccccggcuaccgguggaugugccugcgccgguucaucaucuuccucuucauccugcugcucugccugaucuuccugcucguccugcuggacuaccaggggaugcuccccgugugcccgcugauccccggcagcaccacgaccaacaccgggcccugcaagaccugcacgacccccgcccagggcaacuccauguucccgagcugcugcugcaccaagcccaccgacggcaacugcacgugcauccccauccccuccagcugggcguucgccaaguaccugugggagugggccuccgugcgcuucagcuggcucucccugcuggucccguucgugcagugguucguggggcucagccccaccgucuggcuguccgccaucuggaugaugugguacuggggccccagccuguacuccaucgugagccccuucaucccgcuccugcccaucuucuucugccuguggguguacaucugaggacuagucccuguucccagagcccacuuuuuuuucuuuuuuugaaauaaaauagccugucuuucagaucucaaaggcucuuuucagagccaccaaaaaaaaaaaaaaaaaaaaaaaaaaaaaaaaaaaaaaaaaaaaaaaaaaaaaaaaaaaaaaaaaaaaaaaaaaaaaaaaaaaaaaaaaaaaaaaaaaaaa

SEQ ID NO: 8056 - RNA, 731 nt, Artificial Sequence
  mRNA Design a-1 (hSL-A100) comprising derived and/or modified sequence from Pf(3D7)__XP_001351122.1__HsALB_Pf-CSP(19-152) (opt1)
aggagagucccgcagucggcguccagcggcucugcuuguucgugugugugucguugcaggccuuauucaagcuuaccaugaagugggugaccuucaucagccuccuguuccuguucuccagcgccuacucccuguuccaggaguaccagugcuacggcagcuccagcaacacccgcguccucaacgagcugaacuacgacaacgccgggacgaaccuguacaacgagcucgagaugaacuacuacggcaagcaggagaacugguacucccugaagaagaacagccggucccugggggagaacgacgacggcaacaacgaggacaacgagaagcuccgcaagcccaagcacaagaagcugaagcagccggcggacgggaaccccgaccccaacgccaaccccaacguggacccgaacgccaaccccaacguggaccccaacgccaaccccaacgucgacccgaacgccaaccccaacgcgaaccccaacgccaaccccaacgccaacccgaacgccaaccccaacgcgaaccccugaggacuagucccuguucccagagcccacuuuuuuuucuuuuuuugaaauaaaauagccugucuuucagaucucaaaggcucuuuucagagccaccaaaaaaaaaaaaaaaaaaaaaaaaaaaaaaaaaaaaaaaaaaaaaaaaaaaaaaaaaaaaaaaaaaaaaaaaaaaaaaaaaaaaaaaaaaaaaaaaaaaaa

SEQ ID NO: 8057 - RNA, 851 nt, Artificial Sequence
  mRNA Design a-1 (hSL-A100) comprising derived and/or modified sequence from Pf(3D7)__XP_001351122.1__HsALB_Pf-CSP(19-192) (opt1)
aggagagucccgcagucggcguccagcggcucugcuuguucgugugugugucguugcaggccuuauucaagcuuaccaugaagugggugaccuucaucagccuccuguuccuguucuccagcgccuacucccuguuccaggaguaccagugcuacggcagcuccagcaacacccgcguccucaacgagcugaacuacgacaacgccgggacgaaccuguacaacgagcucgagaugaacuacuacggcaagcaggagaacugguacucccugaagaagaacagccggucccugggggagaacgacgacggcaacaacgaggacaacgagaagcuccgcaagcccaagcacaagaagcugaagcagccggcggacgggaaccccgaccccaacgccaaccccaacguggacccgaacgccaaccccaacguggaccccaacgccaaccccaacgucgacccgaacgccaaccccaacgcgaaccccaacgccaaccccaacgccaacccgaacgccaaccccaacgcgaaccccaacgccaaccccaacgccaacccgaacgccaaccccaacgccaaccccaacgcgaaccccaacgccaacccgaacgccaaccccaacgccaaccccaacgccaaccccaacgcgaacccgugaggacuagucccuguucccagagcccacuuuuuuuucuuuuuuugaaauaaaauagccugucuuucagaucucaaaggcucuuuucagagccaccaaaaaaaaaaaaaaaaaaaaaaaaaaaaaaaaaaaaaaaaaaaaaaaaaaaaaaaaaaaaaaaaaaaaaaaaaaaaaaaaaaaaaaaaaaaaaaaaaaaaa

SEQ ID NO: 8058 - RNA, 1091 nt, Artificial Sequence
  mRNA Design a-1 (hSL-A100) comprising derived and/or modified sequence from Pf(3D7)__XP_001351122.1__HsALB_Pf-CSP(19-272) (opt1)
aggagagucccgcagucggcguccagcggcucugcuuguucgugugugugucguugcaggccuuauucaagcuuaccaugaagugggugaccuucaucagccuccuguuccuguucuccagcgccuacucccuguuccaggaguaccagugcuacggcagcuccagcaacacccgcguccucaacgagcugaacuacgacaacgccgggacgaaccuguacaacgagcucgagaugaacuacuacggcaagcaggagaacugguacucccugaagaagaacagccggucccugggggagaacgacgacggcaacaacgaggacaacgagaagcuccgcaagcccaagcacaagaagcugaagcagccggcggacgggaaccccgaccccaacgccaaccccaacguggacccgaacgccaaccccaacguggaccccaacgccaaccccaacgucgacccgaacgccaaccccaacgcgaaccccaacgccaaccccaacgccaacccgaacgccaaccccaacgcgaaccccaacgccaaccccaacgccaacccgaacgccaaccccaacgccaaccccaacgcgaaccccaacgccaacccgaacgccaaccccaacgccaaccccaacgccaaccccaacgcgaacccgaacgccaaccccaacguggaccccaacgccaaccccaacgccaacccgaacgccaaccccaacgcgaaccccaacgccaacccgaacgccaaccccaacgccaaccccaacgccaaccccaacgcgaacccgaacgccaaccccaacgccaaccccaacgccaaccccaacgcgaacccgaacgccaaccccaacgccaaccccaacgccaaccccaacgccaacccgaacgcgaaccccugaggacuagucccuguucccagagcccacuuuuuuuucuuuuuuugaaauaaaauagccugucuuucagaucucaaaggcucuuuucagagccaccaaaaaaaaaaaaaaaaaaaaaaaaaaaaaaaaaaaaaaaaaaaaaaaaaaaaaaaaaaaaaaaaaaaaaaaaaaaaaaaaaaaaaaaaaaaaaaaaaaaaa

SEQ ID NO: 8059 - RNA, 1253 nt, Artificial Sequence
  mRNA Design a-1 (hSL-A100) comprising derived and/or modified sequence from Pf(3D7)__XP_001351122.1__HsALB_Pf-CSP(19-272)_L(AAY)_Pf-CSP(310-3 27)_L(AAY)_Pf-CSP(346-375) (opt1)
aggagagucccgcagucggcguccagcggcucugcuuguucgugugugugucguugcaggccuuauucaagcuuaccaugaagugggugaccuucaucagccuccuguuccuguucuccagcgccuacucccuguuccaggaguaccagugcuacggcagcuccagcaacacccgcguccucaacgagcugaacuacgacaacgccgggacgaaccuguacaacgagcucgagaugaacuacuacggcaagcaggagaacugguacucccugaagaagaacagccggucccugggggagaacgacgacggcaacaacgaggacaacgagaagcuccgcaagcccaagcacaagaagcugaagcagccggcggacgggaaccccgaccccaacgccaaccccaacguggacccgaacgccaaccccaacguggaccccaacgccaaccccaacgucgacccgaacgccaaccccaacgcgaaccccaacgccaaccccaacgccaacccgaacgccaaccccaacgcgaaccccaacgccaaccccaacgccaacccgaacgccaaccccaacgccaaccccaacgcgaaccccaacgccaacccgaacgccaaccccaacgccaaccccaacgccaaccccaacgcgaacccgaacgccaaccccaacguggaccccaacgccaaccccaacgccaacccgaacgccaaccccaacgcgaaccccaacgccaacccgaacgccaaccccaacgccaaccccaacgccaaccccaacgcgaacccgaacgccaaccccaacgccaaccccaacgccaaccccaacgcgaacccgaacgccaaccccaacgccaaccccaacgccaaccccaacgccaacccgaacgcgaaccccgccgccuacgagcccagcgacaagcacaucaaggaguaccugaacaagauccagaacucccucgccgccuacaucaagcccggcagcgcgaacaagccgaaggacgagcuggacuacgccaacgacaucgagaagaagaucugcaagauggagaagugcuccugaggacuagucccuguucccagagcccacuuuuuuuucuuuuuuugaaauaaaauagccugucuuucagaucucaaaggcucuuuucagagccaccaaaaaaaaaaaaaaaaaaaaaaaaaaaaaaaaaaaaaaaaaaaaaaaaaaaaaaaaaaaaaaaaaaaaaaaaaaaaaaaaaaaaaaaaaaaaaaaaaaaaa

SEQ ID NO: 8060 - RNA, 1214 nt, Artificial Sequence
  mRNA Design a-1 (hSL-A100) comprising derived and/or modified sequence from Pf(3D7)__XP_001351122.1__HsALB_Pf-CSP(19-272)_L(AAY)_Pf-CSP(346-3 65)_L(AAY)_P2 (opt1)
aggagagucccgcagucggcguccagcggcucugcuuguucgugugugugucguugcaggccuuauucaagcuuaccaugaagugggugaccuucaucagccuccuguuccuguucuccagcgccuacucccuguuccaggaguaccagugcuacggcagcuccagcaacacccgcguccucaacgagcugaacuacgacaacgccgggacgaaccuguacaacgagcucgagaugaacuacuacggcaagcaggagaacugguacucccugaagaagaacagccggucccugggggagaacgacgacggcaacaacgaggacaacgagaagcuccgcaagcccaagcacaagaagcugaagcagccggcggacgggaaccccgaccccaacgccaaccccaacguggacccgaacgccaaccccaacguggaccccaacgccaaccccaacgucgacccgaacgccaaccccaacgcgaaccccaacgccaaccccaacgccaacccgaacgccaaccccaacgcgaaccccaacgccaaccccaacgccaacccgaacgccaaccccaacgccaaccccaacgcgaaccccaacgccaacccgaacgccaaccccaacgccaaccccaacgccaaccccaacgcgaacccgaacgccaaccccaacguggaccccaacgccaaccccaacgccaacccgaacgccaaccccaacgcgaaccccaacgccaacccgaacgccaaccccaacgccaaccccaacgccaaccccaacgcgaacccgaacgccaaccccaacgccaaccccaacgccaaccccaacgcgaacccgaacgccaaccccaacgccaaccccaacgccaaccccaacgccaacccgaacgcgaaccccgccgccuacaucaagcccggcagcgccaacaagcccaaggacgagcuggacuacgccaacgacaucgaggcggccuaccaguacaucaaggccaacuccaaguucaucggcaucaccgagcucugaggacuagucccuguucccagagcccacuuuuuuuucuuuuuuugaaauaaaauagccugucuuucagaucucaaaggcucuuuucagagccaccaaaaaaaaaaaaaaaaaaaaaaaaaaaaaaaaaaaaaaaaaaaaaaaaaaaaaaaaaaaaaaaaaaaaaaaaaaaaaaaaaaaaaaaaaaaaaaaaaaaaa

SEQ ID NO: 8061 - RNA, 1208 nt, Artificial Sequence
  mRNA Design a-1 (hSL-A100) comprising derived and/or modified sequence from Pf(3D7)__XP_001351122.1__HsALB_Pf-CSP(19-272)_L(AAY)_Pf-CSP(346-3 65)_L(AAY)_PADRE (opt1)
aggagagucccgcagucggcguccagcggcucugcuuguucgugugugugucguugcaggccuuauucaagcuuaccaugaagugggugaccuucaucagccuccuguuccuguucuccagcgccuacucccuguuccaggaguaccagugcuacggcagcuccagcaacacccgcguccucaacgagcugaacuacgacaacgccgggacgaaccuguacaacgagcucgagaugaacuacuacggcaagcaggagaacugguacucccugaagaagaacagccggucccugggggagaacgacgacggcaacaacgaggacaacgagaagcuccgcaagcccaagcacaagaagcugaagcagccggcggacgggaaccccgaccccaacgccaaccccaacguggacccgaacgccaaccccaacguggaccccaacgccaaccccaacgucgacccgaacgccaaccccaacgcgaaccccaacgccaaccccaacgccaacccgaacgccaaccccaacgcgaaccccaacgccaaccccaacgccaacccgaacgccaaccccaacgccaaccccaacgcgaaccccaacgccaacccgaacgccaaccccaacgccaaccccaacgccaaccccaacgcgaacccgaacgccaaccccaacguggaccccaacgccaaccccaacgccaacccgaacgccaaccccaacgcgaaccccaacgccaacccgaacgccaaccccaacgccaaccccaacgccaaccccaacgcgaacccgaacgccaaccccaacgccaaccccaacgccaaccccaacgcgaacccgaacgccaaccccaacgccaaccccaacgccaaccccaacgccaacccgaacgcgaaccccgccgccuacaucaagcccggcagcgccaacaagcccaaggacgagcuggacuacgccaacgacaucgaggcggccuacgccaaguucguggccgccuggacccucaaggcggccgccugaggacuagucccuguucccagagcccacuuuuuuuucuuuuuuugaaauaaaauagccugucuuucagaucucaaaggcucuuuucagagccaccaaaaaaaaaaaaaaaaaaaaaaaaaaaaaaaaaaaaaaaaaaaaaaaaaaaaaaaaaaaaaaaaaaaaaaaaaaaaaaaaaaaaaaaaaaaaaaaaaaaaa

SEQ ID NO: 8062 - RNA, 1265 nt, Artificial Sequence
  mRNA Design a-1 (hSL-A100) comprising derived and/or modified sequence from Pf(3D7)__XP_001351122.1__HsALB_Pf-CSP(19-272)_L(G4S)_Pf-CSP(310-3 27)_L(G4S)_Pf-CSP(346-375) (opt1)
aggagagucccgcagucggcguccagcggcucugcuuguucgugugugugucguugcaggccuuauucaagcuuaccaugaagugggugaccuucaucagccuccuguuccuguucuccagcgccuacucccuguuccaggaguaccagugcuacggcagcuccagcaacacccgcguccucaacgagcugaacuacgacaacgccgggacgaaccuguacaacgagcucgagaugaacuacuacggcaagcaggagaacugguacucccugaagaagaacagccggucccugggggagaacgacgacggcaacaacgaggacaacgagaagcuccgcaagcccaagcacaagaagcugaagcagccggcggacgggaaccccgaccccaacgccaaccccaacguggacccgaacgccaaccccaacguggaccccaacgccaaccccaacgucgacccgaacgccaaccccaacgcgaaccccaacgccaaccccaacgccaacccgaacgccaaccccaacgcgaaccccaacgccaaccccaacgccaacccgaacgccaaccccaacgccaaccccaacgcgaaccccaacgccaacccgaacgccaaccccaacgccaaccccaacgccaaccccaacgcgaacccgaacgccaaccccaacguggaccccaacgccaaccccaacgccaacccgaacgccaaccccaacgcgaaccccaacgccaacccgaacgccaaccccaacgccaaccccaacgccaaccccaacgcgaacccgaacgccaaccccaacgccaaccccaacgccaaccccaacgcgaacccgaacgccaaccccaacgccaaccccaacgccaaccccaacgccaacccgaacgcgaaccccggcggcgggggcagcgagcccuccgacaagcacaucaaggaguaccugaacaagauccagaacagccucgggggcgggggcuccaucaagcccggcagcgccaacaagccgaaggacgagcuggacuacgccaacgacaucgagaagaagaucugcaagauggagaagugcuccugaggacuagucccuguucccagagcccacuuuuuuuucuuuuuuugaaauaaaauagccugucuuucagaucucaaaggcucuuuucagagccaccaaaaaaaaaaaaaaaaaaaaaaaaaaaaaaaaaaaaaaaaaaaaaaaaaaaaaaaaaaaaaaaaaaaaaaaaaaaaaaaaaaaaaaaaaaaaaaaaaaaaa

SEQ ID NO: 8063 - RNA, 1250 nt, Artificial Sequence
  mRNA Design a-1 (hSL-A100) comprising derived and/or modified sequence from Pf(3D7)__XP_001351122.1__HsALB_Pf-CSP(19-272)_L(G4S)_Pf-CSP(310-3 27)_Pf-CSP(346-375) (opt1)
aggagagucccgcagucggcguccagcggcucugcuuguucgugugugugucguugcaggccuuauucaagcuuaccaugaagugggugaccuucaucagccuccuguuccuguucuccagcgccuacucccuguuccaggaguaccagugcuacggcagcuccagcaacacccgcguccucaacgagcugaacuacgacaacgccgggacgaaccuguacaacgagcucgagaugaacuacuacggcaagcaggagaacugguacucccugaagaagaacagccggucccugggggagaacgacgacggcaacaacgaggacaacgagaagcuccgcaagcccaagcacaagaagcugaagcagccggcggacgggaaccccgaccccaacgccaaccccaacguggacccgaacgccaaccccaacguggaccccaacgccaaccccaacgucgacccgaacgccaaccccaacgcgaaccccaacgccaaccccaacgccaacccgaacgccaaccccaacgcgaaccccaacgccaaccccaacgccaacccgaacgccaaccccaacgccaaccccaacgcgaaccccaacgccaacccgaacgccaaccccaacgccaaccccaacgccaaccccaacgcgaacccgaacgccaaccccaacguggaccccaacgccaaccccaacgccaacccgaacgccaaccccaacgcgaaccccaacgccaacccgaacgccaaccccaacgccaaccccaacgccaaccccaacgcgaacccgaacgccaaccccaacgccaaccccaacgccaaccccaacgcgaacccgaacgccaaccccaacgccaaccccaacgccaaccccaacgccaacccgaacgcgaaccccggcggcgggggcagcgagcccuccgacaagcacaucaaggaguaccugaacaagauccagaacagccucaucaagcccggguccgccaacaagccgaaggacgagcuggacuacgccaacgacaucgagaagaagaucugcaagauggagaagugcagcugaggacuagucccuguucccagagcccacuuuuuuuucuuuuuuugaaauaaaauagccugucuuucagaucucaaaggcucuuuucagagccaccaaaaaaaaaaaaaaaaaaaaaaaaaaaaaaaaaaaaaaaaaaaaaaaaaaaaaaaaaaaaaaaaaaaaaaaaaaaaaaaaaaaaaaaaaaaaaaaaaaaaa

SEQ ID NO: 8064 - RNA, 1250 nt, Artificial Sequence
  mRNA Design a-1 (hSL-A100) comprising derived and/or modified sequence from Pf(3D7)__XP_001351122.1__HsALB_Pf-CSP(19-325) (opt1)
aggagagucccgcagucggcguccagcggcucugcuuguucgugugugugucguugcaggccuuauucaagcuuaccaugaagugggugaccuucaucagccuccuguuccuguucuccagcgccuacucccuguuccaggaguaccagugcuacggcagcuccagcaacacccgcguccucaacgagcugaacuacgacaacgccgggacgaaccuguacaacgagcucgagaugaacuacuacggcaagcaggagaacugguacucccugaagaagaacagccggucccugggggagaacgacgacggcaacaacgaggacaacgagaagcuccgcaagcccaagcacaagaagcugaagcagccggcggacgggaaccccgaccccaacgccaaccccaacguggacccgaacgccaaccccaacguggaccccaacgccaaccccaacgucgacccgaacgccaaccccaacgcgaaccccaacgccaaccccaacgccaacccgaacgccaaccccaacgcgaaccccaacgccaaccccaacgccaacccgaacgccaaccccaacgccaaccccaacgcgaaccccaacgccaacccgaacgccaaccccaacgccaaccccaacgccaaccccaacgcgaacccgaacgccaaccccaacguggaccccaacgccaaccccaacgccaacccgaacgccaaccccaacgcgaaccccaacgccaacccgaacgccaaccccaacgccaaccccaacgccaaccccaacgcgaacccgaacgccaaccccaacgccaaccccaacgccaaccccaacgcgaacccgaacgccaaccccaacgccaaccccaacgccaaccccaacgccaacccgaacgcgaaccccaacaagaacaaccagggcaacggccaggggcacaacaugcccaacgaccccaaccggaacguggacgagaacgccaacgccaacagcgccgucaagaacaacaacaacgaggagccguccgacaagcacaucaaggaguaccugaacaagauccagaacugaggacuagucccuguucccagagcccacuuuuuuuucuuuuuuugaaauaaaauagccugucuuucagaucucaaaggcucuuuucagagccaccaaaaaaaaaaaaaaaaaaaaaaaaaaaaaaaaaaaaaaaaaaaaaaaaaaaaaaaaaaaaaaaaaaaaaaaaaaaaaaaaaaaaaaaaaaaaaaaaaaaaa

SEQ ID NO: 8065 - RNA, 1427 nt, Artificial Sequence
  mRNA Design a-1 (hSL-A100) comprising derived and/or modified sequence from Pf(3D7)__XP_001351122.1__HsALB_Pf-CSP(19-384) (opt1)
aggagagucccgcagucggcguccagcggcucugcuuguucgugugugugucguugcaggccuuauucaagcuuaccaugaagugggugaccuucaucagccuccuguuccuguucuccagcgccuacucccuguuccaggaguaccagugcuacggcagcuccagcaacacccgcguccucaacgagcugaacuacgacaacgccgggacgaaccuguacaacgagcucgagaugaacuacuacggcaagcaggagaacugguacucccugaagaagaacagccggucccugggggagaacgacgacggcaacaacgaggacaacgagaagcuccgcaagcccaagcacaagaagcugaagcagccggcggacgggaaccccgaccccaacgccaaccccaacguggacccgaacgccaaccccaacguggaccccaacgccaaccccaacgucgacccgaacgccaaccccaacgcgaaccccaacgccaaccccaacgccaacccgaacgccaaccccaacgcgaaccccaacgccaaccccaacgccaacccgaacgccaaccccaacgccaaccccaacgcgaaccccaacgccaacccgaacgccaaccccaacgccaaccccaacgccaaccccaacgcgaacccgaacgccaaccccaacguggaccccaacgccaaccccaacgccaacccgaacgccaaccccaacgcgaaccccaacgccaacccgaacgccaaccccaacgccaaccccaacgccaaccccaacgcgaacccgaacgccaaccccaacgccaaccccaacgccaaccccaacgcgaacccgaacgccaaccccaacgccaaccccaacgccaaccccaacgccaacccgaacgcgaaccccaacaagaacaaccagggcaacggccaggggcacaacaugcccaacgaccccaaccggaacguggacgagaacgccaacgccaacagcgccgucaagaacaacaacaacgaggagccguccgacaagcacaucaaggaguaccugaacaagauccagaacagccucuccaccgaguggagccccugcuccgugaccugcggcaacgggauccaggugcgcaucaagcccggcagcgccaacaagcccaaggacgagcuggacuacgcgaacgacaucgagaagaagaucugcaagauggagaagugcuccagcgucuucaacguggugaacuccagcugaggacuagucccuguucccagagcccacuuuuuuuucuuuuuuugaaauaaaauagccugucuuucagaucucaaaggcucuuuucagagccaccaaaaaaaaaaaaaaaaaaaaaaaaaaaaaaaaaaaaaaaaaaaaaaaaaaaaaaaaaaaaaaaaaaaaaaaaaaaaaaaaaaaaaaaaaaaaaaaaaaaaa

SEQ ID NO: 8066 - RNA, 1565 nt, Artificial Sequence
  mRNA Design a-1 (hSL-A100) comprising derived and/or modified sequence from Pf(3D7)__XP_001351122.1__HsALB_Pf-CSP(19-384)_TM domain HA (opt1)
aggagagucccgcagucggcguccagcggcucugcuuguucgugugugugucguugcaggccuuauucaagcuuaccaugaagugggugaccuucaucagccuccuguuccuguucuccagcgccuacucccuguuccaggaguaccagugcuacggcagcuccagcaacacccgcguccucaacgagcugaacuacgacaacgccgggacgaaccuguacaacgagcucgagaugaacuacuacggcaagcaggagaacugguacucccugaagaagaacagccggucccugggggagaacgacgacggcaacaacgaggacaacgagaagcuccgcaagcccaagcacaagaagcugaagcagccggcggacgggaaccccgaccccaacgccaaccccaacguggacccgaacgccaaccccaacguggaccccaacgccaaccccaacgucgacccgaacgccaaccccaacgcgaaccccaacgccaaccccaacgccaacccgaacgccaaccccaacgcgaaccccaacgccaaccccaacgccaacccgaacgccaaccccaacgccaaccccaacgcgaaccccaacgccaacccgaacgccaaccccaacgccaaccccaacgccaaccccaacgcgaacccgaacgccaaccccaacguggaccccaacgccaaccccaacgccaacccgaacgccaaccccaacgcgaaccccaacgccaacccgaacgccaaccccaacgccaaccccaacgccaaccccaacgcgaacccgaacgccaaccccaacgccaaccccaacgccaaccccaacgcgaacccgaacgccaaccccaacgccaaccccaacgccaaccccaacgccaacccgaacgcgaaccccaacaagaacaaccagggcaacggccaggggcacaacaugcccaacgaccccaaccggaacguggacgagaacgccaacgccaacagcgccgucaagaacaacaacaacgaggagccguccgacaagcacaucaaggaguaccugaacaagauccagaacagccucuccaccgaguggagccccugcuccgugaccugcggcaacgggauccaggugcgcaucaagcccggcagcgccaacaagcccaaggacgagcuggacuacgcgaacgacaucgagaagaagaucugcaagauggagaagugcuccagcgucuucaacguggugaacuccagcaagcuggagagcacccggaucuaccagauccucgccaucuacuccacggucgccagcucccuggugcugguggucagccucggggccaucuccuucuggaugugcagcaacggcucccugcagugccgcaucugcaucugaggacuagucccuguucccagagcccacuuuuuuuucuuuuuuugaaauaaaauagccugucuuucagaucucaaaggcucuuuucagagccaccaaaaaaaaaaaaaaaaaaaaaaaaaaaaaaaaaaaaaaaaaaaaaaaaaaaaaaaaaaaaaaaaaaaaaaaaaaaaaaaaaaaaaaaaaaaaaaaaaaaaa

SEQ ID NO: 8067 - RNA, 1277 nt, Artificial Sequence
  mRNA Design a-1 (hSL-A100) comprising derived and/or modified sequence from Pf(3D7)__XP_001351122.1__HsALB_Pf-CSP(82-397) (opt1)
aggagagucccgcagucggcguccagcggcucugcuuguucgugugugugucguugcaggccuuauucaagcuuaccaugaagugggugaccuucaucagccuccuguuccuguucuccagcgccuacuccgacaacgagaagcugcgcaagcccaagcacaagaagcucaagcagccggccgacggcaaccccgaccccaacgcgaaccccaacgucgacccgaacgccaaccccaacguggaccccaacgccaaccccaacguggacccgaacgccaaccccaacgccaaccccaacgcgaaccccaacgccaacccgaacgccaaccccaacgccaaccccaacgcgaaccccaacgccaacccgaacgccaaccccaacgccaaccccaacgccaaccccaacgcgaacccgaacgccaaccccaacgccaaccccaacgccaaccccaacgccaacccgaacgcgaaccccaacgucgaccccaacgccaaccccaacgccaacccgaacgccaaccccaacgccaaccccaacgcgaacccgaacgccaaccccaacgccaaccccaacgccaaccccaacgccaacccgaacgcgaaccccaacgccaaccccaacgccaaccccaacgccaacccgaacgcgaaccccaacgccaaccccaacgccaaccccaacgccaacccgaacgccaaccccaacaagaacaaccaggggaacggccaggggcacaacaugcccaacgaccccaaccggaacguggacgagaacgcgaacgccaacagcgccgugaagaacaacaacaacgaggagccguccgacaagcacaucaaggaguaccugaacaagauccagaacagccuguccaccgaguggagccccugcuccgucacgugcggcaacgggauccaggugcgcaucaagcccggcagcgccaacaagcccaaggacgagcucgacuacgccaacgacaucgagaagaagaucugcaagauggagaagugcuccagcguguucaacgucgugaacuccagcaucggccugaucauggugcuguccuuccucuuccugaacugaggacuagucccuguucccagagcccacuuuuuuuucuuuuuuugaaauaaaauagccugucuuucagaucucaaaggcucuuuucagagccaccaaaaaaaaaaaaaaaaaaaaaaaaaaaaaaaaaaaaaaaaaaaaaaaaaaaaaaaaaaaaaaaaaaaaaaaaaaaaaaaaaaaaaaaaaaaaaaaaaaaaa

SEQ ID NO: 8068 - RNA, 629 nt, Artificial Sequence
  mRNA Design a-1 (hSL-A100) comprising derived and/or modified sequence from Pf(3D7)__XP_001351122.1__HsALB_Pf-CSP(93-192) (opt1)
aggagagucccgcagucggcguccagcggcucugcuuguucgugugugugucguugcaggccuuauucaagcuuaccaugaagugggugaccuucaucagccuccuguuccuguucuccagcgccuacuccaagcugaagcagcccgccgacggcaacccggaccccaacgcgaaccccaacgucgaccccaacgccaacccgaacguggaccccaacgccaaccccaacguggaccccaacgccaacccgaacgccaaccccaacgcgaaccccaacgccaaccccaacgccaacccgaacgccaaccccaacgcgaaccccaacgccaaccccaacgccaacccgaacgccaaccccaacgccaaccccaacgcgaaccccaacgccaacccgaacgccaaccccaacgccaaccccaacgccaaccccugaggacuagucccuguucccagagcccacuuuuuuuucuuuuuuugaaauaaaauagccugucuuucagaucucaaaggcucuuuucagagccaccaaaaaaaaaaaaaaaaaaaaaaaaaaaaaaaaaaaaaaaaaaaaaaaaaaaaaaaaaaaaaaaaaaaaaaaaaaaaaaaaaaaaaaaaaaaaaaaaaaaaa

SEQ ID NO: 8069 - RNA, 869 nt, Artificial Sequence
  mRNA Design a-1 (hSL-A100) comprising derived and/or modified sequence from Pf(3D7)__XP_001351122.1__HsALB_Pf-CSP(93-272) (opt1)
aggagagucccgcagucggcguccagcggcucugcuuguucgugugugugucguugcaggccuuauucaagcuuaccaugaagugggugaccuucaucagccuccuguuccuguucuccagcgccuacuccaagcugaagcagcccgccgacggcaacccggaccccaacgcgaaccccaacgucgaccccaacgccaacccgaacguggaccccaacgccaaccccaacguggaccccaacgccaacccgaacgccaaccccaacgcgaaccccaacgccaaccccaacgccaacccgaacgccaaccccaacgcgaaccccaacgccaaccccaacgccaacccgaacgccaaccccaacgccaaccccaacgcgaaccccaacgccaacccgaacgccaaccccaacgccaaccccaacgccaaccccaacgcgaacccgaacgucgaccccaacgccaaccccaacgccaaccccaacgccaacccgaacgccaaccccaacgcgaaccccaacgccaacccgaacgccaaccccaacgccaaccccaacgccaaccccaacgcgaacccgaacgccaaccccaacgccaaccccaacgccaaccccaacgcgaacccgaacgccaaccccaacgccaaccccaacgccaaccccaacgccaacccgugaggacuagucccuguucccagagcccacuuuuuuuucuuuuuuugaaauaaaauagccugucuuucagaucucaaaggcucuuuucagagccaccaaaaaaaaaaaaaaaaaaaaaaaaaaaaaaaaaaaaaaaaaaaaaaaaaaaaaaaaaaaaaaaaaaaaaaaaaaaaaaaaaaaaaaaaaaaaaaaaaaaaa

SEQ ID NO: 8070 - RNA, 1244 nt, Artificial Sequence
  mRNA Design a-1 (hSL-A100) comprising derived and/or modified sequence from Pf(3D7)__XP_001351122.1__HsALB_Pf-CSP(93-397) (opt1)
aggagagucccgcagucggcguccagcggcucugcuuguucgugugugugucguugcaggccuuauucaagcuuaccaugaagugggugaccuucaucagccuccuguuccuguucuccagcgccuacuccaagcugaagcagcccgccgacggcaacccggaccccaacgcgaaccccaacgucgaccccaacgccaacccgaacguggaccccaacgccaaccccaacguggaccccaacgccaacccgaacgccaaccccaacgcgaaccccaacgccaaccccaacgccaacccgaacgccaaccccaacgcgaaccccaacgccaaccccaacgccaacccgaacgccaaccccaacgccaaccccaacgcgaaccccaacgccaacccgaacgccaaccccaacgccaaccccaacgccaaccccaacgcgaacccgaacgucgaccccaacgccaaccccaacgccaaccccaacgccaacccgaacgccaaccccaacgcgaaccccaacgccaacccgaacgccaaccccaacgccaaccccaacgccaaccccaacgcgaacccgaacgccaaccccaacgccaaccccaacgccaaccccaacgcgaacccgaacgccaaccccaacgccaaccccaacgccaaccccaacgccaacccgaacaagaacaaccaggggaacggccaggggcacaacaugcccaacgaccccaaccgcaacguggacgagaacgcgaacgccaacagcgccgugaagaacaacaacaacgaggagcccuccgacaagcacaucaaggaguaccucaacaagauccagaacagccuguccaccgaguggagcccgugcuccgucacgugcggcaacgggauccaggugcggaucaagcccggcagcgccaacaagcccaaggacgagcuggacuacgccaacgacaucgagaagaagaucugcaagauggagaagugcuccagcguguucaacgucgugaacuccagcaucggccucaucauggugcuguccuuccuguuccucaacugaggacuagucccuguucccagagcccacuuuuuuuucuuuuuuugaaauaaaauagccugucuuucagaucucaaaggcucuuuucagagccaccaaaaaaaaaaaaaaaaaaaaaaaaaaaaaaaaaaaaaaaaaaaaaaaaaaaaaaaaaaaaaaaaaaaaaaaaaaaaaaaaaaaaaaaaaaaaaaaaaaaaa

SEQ ID NO: 8071 - RNA, 614 nt, Artificial Sequence
  mRNA Design a-1 (hSL-A100) comprising derived and/or modified sequence from Pf(3D7)__XP_001351122.1__HsALB_Pf-CSP(98-192) (opt1)
aggagagucccgcagucggcguccagcggcucugcuuguucgugugugugucguugcaggccuuauucaagcuuaccaugaagugggugaccuucaucagccuccuguuccuguucuccagcgccuacuccgccgacggcaaccccgacccgaacgcgaaccccaacgucgaccccaacgccaaccccaacguggacccgaacgccaaccccaacguggaccccaacgccaaccccaacgccaacccgaacgcgaaccccaacgccaaccccaacgccaaccccaacgccaacccgaacgcgaaccccaacgccaaccccaacgccaaccccaacgccaacccgaacgccaaccccaacgcgaaccccaacgccaaccccaacgccaacccgaacgccaaccccaacgccaaccccugaggacuagucccuguucccagagcccacuuuuuuuucuuuuuuugaaauaaaauagccugucuuucagaucucaaaggcucuuuucagagccaccaaaaaaaaaaaaaaaaaaaaaaaaaaaaaaaaaaaaaaaaaaaaaaaaaaaaaaaaaaaaaaaaaaaaaaaaaaaaaaaaaaaaaaaaaaaaaaaaaaaaa

SEQ ID NO: 8072 - RNA, 854 nt, Artificial Sequence
  mRNA Design a-1 (hSL-A100) comprising derived and/or modified sequence from Pf(3D7)__XP_001351122.1__HsALB_Pf-CSP(98-272) (opt1)
aggagagucccgcagucggcguccagcggcucugcuuguucgugugugugucguugcaggccuuauucaagcuuaccaugaagugggugaccuucaucagccuccuguuccuguucuccagcgccuacuccgccgacggcaaccccgacccgaacgcgaaccccaacgucgaccccaacgccaaccccaacguggacccgaacgccaaccccaacguggaccccaacgccaaccccaacgccaacccgaacgcgaaccccaacgccaaccccaacgccaaccccaacgccaacccgaacgcgaaccccaacgccaaccccaacgccaaccccaacgccaacccgaacgccaaccccaacgcgaaccccaacgccaaccccaacgccaacccgaacgccaaccccaacgccaaccccaacgcgaaccccaacgucgacccgaacgccaaccccaacgccaaccccaacgccaaccccaacgccaacccgaacgcgaaccccaacgccaaccccaacgccaacccgaacgccaaccccaacgccaaccccaacgcgaaccccaacgccaacccgaacgccaaccccaacgccaaccccaacgcgaaccccaacgccaacccgaacgccaaccccaacgccaaccccaacgccaaccccugaggacuagucccuguucccagagcccacuuuuuuuucuuuuuuugaaauaaaauagccugucuuucagaucucaaaggcucuuuucagagccaccaaaaaaaaaaaaaaaaaaaaaaaaaaaaaaaaaaaaaaaaaaaaaaaaaaaaaaaaaaaaaaaaaaaaaaaaaaaaaaaaaaaaaaaaaaaaaaaaaaaaa

SEQ ID NO: 8073 - RNA, 1160 nt, Artificial Sequence
  mRNA Design a-1 (hSL-A100) comprising derived and/or modified sequence from Pf(3D7)__XP_001351122.1__HsALB_Pf-CSP(98-374) (opt1)
aggagagucccgcagucggcguccagcggcucugcuuguucgugugugugucguugcaggccuuauucaagcuuaccaugaagugggugaccuucaucagccuccuguuccuguucuccagcgccuacuccgccgacggcaaccccgacccgaacgcgaaccccaacgucgaccccaacgccaaccccaacguggacccgaacgccaaccccaacguggaccccaacgccaaccccaacgccaacccgaacgcgaaccccaacgccaaccccaacgccaaccccaacgccaacccgaacgcgaaccccaacgccaaccccaacgccaaccccaacgccaacccgaacgccaaccccaacgcgaaccccaacgccaaccccaacgccaacccgaacgccaaccccaacgccaaccccaacgcgaaccccaacgucgacccgaacgccaaccccaacgccaaccccaacgccaaccccaacgccaacccgaacgcgaaccccaacgccaaccccaacgccaacccgaacgccaaccccaacgccaaccccaacgcgaaccccaacgccaacccgaacgccaaccccaacgccaaccccaacgcgaaccccaacgccaacccgaacgccaaccccaacgccaaccccaacgccaaccccaacaagaacaaccaggggaacggccaggggcacaacaugccgaacgaccccaaccgcaacguggacgagaacgcgaacgccaacagcgccgugaagaacaacaacaacgaggagcccuccgacaagcacaucaaggaguaccugaacaagauccagaacagccucuccaccgaguggagccccugcuccgucacgugcggcaacgggauccaggugcggaucaagccgggcagcgccaacaagcccaaggacgagcuggacuacgccaacgacaucgagaagaagaucugcaagauggagaagugcugaggacuagucccuguucccagagcccacuuuuuuuucuuuuuuugaaauaaaauagccugucuuucagaucucaaaggcucuuuucagagccaccaaaaaaaaaaaaaaaaaaaaaaaaaaaaaaaaaaaaaaaaaaaaaaaaaaaaaaaaaaaaaaaaaaaaaaaaaaaaaaaaaaaaaaaaaaaaaaaaaaaaa

SEQ ID NO: 8074 - RNA, 1229 nt, Artificial Sequence
  mRNA Design a-1 (hSL-A100) comprising derived and/or modified sequence from Pf(3D7)__XP_001351122.1__HsALB_Pf-CSP(98-397) (opt1)
aggagagucccgcagucggcguccagcggcucugcuuguucgugugugugucguugcaggccuuauucaagcuuaccaugaagugggugaccuucaucagccuccuguuccuguucuccagcgccuacuccgccgacggcaaccccgacccgaacgcgaaccccaacgucgaccccaacgccaaccccaacguggacccgaacgccaaccccaacguggaccccaacgccaaccccaacgccaacccgaacgcgaaccccaacgccaaccccaacgccaaccccaacgccaacccgaacgcgaaccccaacgccaaccccaacgccaaccccaacgccaacccgaacgccaaccccaacgcgaaccccaacgccaaccccaacgccaacccgaacgccaaccccaacgccaaccccaacgcgaaccccaacgucgacccgaacgccaaccccaacgccaaccccaacgccaaccccaacgccaacccgaacgcgaaccccaacgccaaccccaacgccaacccgaacgccaaccccaacgccaaccccaacgcgaaccccaacgccaacccgaacgccaaccccaacgccaaccccaacgcgaaccccaacgccaacccgaacgccaaccccaacgccaaccccaacgccaaccccaacaagaacaaccaggggaacggccaggggcacaacaugccgaacgaccccaaccgcaacguggacgagaacgcgaacgccaacagcgccgugaagaacaacaacaacgaggagcccuccgacaagcacaucaaggaguaccugaacaagauccagaacagccucuccaccgaguggagccccugcuccgucacgugcggcaacgggauccaggugcggaucaagccgggcagcgccaacaagcccaaggacgagcuggacuacgccaacgacaucgagaagaagaucugcaagauggagaagugcuccagcguguucaacgucgugaacuccagcaucggccugaucauggugcucuccuuccuguuccugaacugaggacuagucccuguucccagagcccacuuuuuuuucuuuuuuugaaauaaaauagccugucuuucagaucucaaaggcucuuuucagagccaccaaaaaaaaaaaaaaaaaaaaaaaaaaaaaaaaaaaaaaaaaaaaaaaaaaaaaaaaaaaaaaaaaaaaaaaaaaaaaaaaaaaaaaaaaaaaaaaaaaaaa

SEQ ID NO: 8075 - RNA, 1556 nt, Artificial Sequence
  mRNA Design a-1 (hSL-A100) comprising derived and/or modified sequence from Pf(3D7)__XP_001351122.1__HsALB_Pf-CSP(199-377)_L(PVTN)_HBsAg (opt1)
aggagagucccgcagucggcguccagcggcucugcuuguucgugugugugucguugcaggccuuauucaagcuuaccaugaagugggugaccuucaucagccuccuguuccuguucuccagcgccuacuccgaccccaacgccaacccgaacgcgaaccccaacgccaaccccaacgccaaccccaacgccaacccgaacgccaaccccaacgcgaaccccaacgccaaccccaacgccaacccgaacgccaaccccaacgcgaaccccaacgccaaccccaacgccaacccgaacgccaaccccaacgccaaccccaacgcgaaccccaacgccaacccgaacgccaaccccaacaagaacaaccagggcaacgggcagggccacaacaugcccaacgaccccaaccgcaacgucgacgagaacgccaacgccaacagcgcggugaagaacaacaacaacgaggagccguccgacaagcacaucaaggaguaccugaacaagauccagaacagccucuccaccgaguggagccccugcuccgugaccugcgggaacggcauccagguccggaucaagcccgggagcgccaacaagcccaaggacgagcuggacuacgccaacgacaucgagaagaagaucugcaagauggagaagugcuccagcgugccggugaccaacauggagaacaucaccuccggcuuccugggcccccuccugguccugcaggccggguucuuccuccugacccgcauccugacgaucccccagagccucgacuccugguggaccagccugaacuuccugggcgggucccccgugugccucggccagaacagccaguccccgaccagcaaccacagccccaccuccugcccgcccaucugccccggguaccgguggaugugccugcgccgguucaucaucuuccuguucauccuccugcugugccucaucuuccugcuggugcuccuggacuaccagggcaugcugcccgucugcccccucaucccgggcagcacgaccaccaacaccgggcccugcaagacgugcaccacccccgcccagggcaacuccauguuccccagcugcugcugcaccaagccgacggacgggaacugcacgugcauccccauccccuccagcugggcguucgccaaguaccugugggagugggccuccgugcgcuucagcuggcugucccuccuggugcccuucguccagugguucgugggccugagcccgaccguguggcucuccgccaucuggaugaugugguacuggggccccagccuguacuccaucgucagccccuucaucccccugcucccgaucuucuucugccuguggguguacaucugaggacuagucccuguucccagagcccacuuuuuuuucuuuuuuugaaauaaaauagccugucuuucagaucucaaaggcucuuuucagagccaccaaaaaaaaaaaaaaaaaaaaaaaaaaaaaaaaaaaaaaaaaaaaaaaaaaaaaaaaaaaaaaaaaaaaaaaaaaaaaaaaaaaaaaaaaaaaaaaaaaaaa

SEQ ID NO: 8076 - RNA, 1466 nt, Artificial Sequence
  mRNA Design a-1 (hSL-A100) comprising derived and/or modified sequence from Pf(3D7)__XP_001351122.1__Pf-CSP (opt2)
aggagagucccgcagucggcguccagcggcucugcuuguucgugugugugucguugcaggccuuauucaagcuuaccaugaugcgcaagcucgccauccucuccgucuccuccuuccucuucgucgaggcccucuuccaggaguaccagugcuacggcuccuccuccaacacccgcguccucaacgagcucaacuacgacaacgccggcaccaaccucuacaacgagcucgagaugaacuacuacggcaagcaggagaacugguacucccucaagaagaacucccgcucccucggcgagaacgacgacggcaacaacgaggacaacgagaagcuccgcaagcccaagcacaagaagcucaagcagcccgccgacggcaaccccgaccccaacgccaaccccaacgucgaccccaacgccaaccccaacgucgaccccaacgccaaccccaacgucgaccccaacgccaaccccaacgccaaccccaacgccaaccccaacgccaaccccaacgccaaccccaacgccaaccccaacgccaaccccaacgccaaccccaacgccaaccccaacgccaaccccaacgccaaccccaacgccaaccccaacgccaaccccaacgccaaccccaacgccaaccccaacgccaaccccaacgccaaccccaacgucgaccccaacgccaaccccaacgccaaccccaacgccaaccccaacgccaaccccaacgccaaccccaacgccaaccccaacgccaaccccaacgccaaccccaacgccaaccccaacgccaaccccaacgccaaccccaacgccaaccccaacgccaaccccaacgccaaccccaacgccaaccccaacgccaaccccaacgccaaccccaacgccaaccccaacaagaacaaccagggcaacggccagggccacaacaugcccaacgaccccaaccgcaacgucgacgagaacgccaacgccaacuccgccgucaagaacaacaacaacgaggagcccuccgacaagcacaucaaggaguaccucaacaagauccagaacucccucuccaccgaguggucccccugcuccgucaccugcggcaacggcauccagguccgcaucaagcccggcuccgccaacaagcccaaggacgagcucgacuacgccaacgacaucgagaagaagaucugcaagauggagaagugcuccuccgucuucaacgucgucaacuccuccaucggccucaucaugguccucuccuuccucuuccucaacugaggacuagucccuguucccagagcccacuuuuuuuucuuuuuuugaaauaaaauagccugucuuucagaucucaaaggcucuuuucagagccaccaaaaaaaaaaaaaaaaaaaaaaaaaaaaaaaaaaaaaaaaaaaaaaaaaaaaaaaaaaaaaaaaaaaaaaaaaaaaaaaaaaaaaaaaaaaaaaaaaaaaa

SEQ ID NO: 8077 - RNA, 1397 nt, Artificial Sequence
  mRNA Design a-1 (hSL-A100) comprising derived and/or modified sequence from Pf(3D7)__XP_001351122.1__Pf-CSP(1-374) (opt2)
aggagagucccgcagucggcguccagcggcucugcuuguucgugugugugucguugcaggccuuauucaagcuuaccaugaugcgcaagcucgccauccucuccgucuccuccuuccucuucgucgaggcccucuuccaggaguaccagugcuacggcuccuccuccaacacccgcguccucaacgagcucaacuacgacaacgccggcaccaaccucuacaacgagcucgagaugaacuacuacggcaagcaggagaacugguacucccucaagaagaacucccgcucccucggcgagaacgacgacggcaacaacgaggacaacgagaagcuccgcaagcccaagcacaagaagcucaagcagcccgccgacggcaaccccgaccccaacgccaaccccaacgucgaccccaacgccaaccccaacgucgaccccaacgccaaccccaacgucgaccccaacgccaaccccaacgccaaccccaacgccaaccccaacgccaaccccaacgccaaccccaacgccaaccccaacgccaaccccaacgccaaccccaacgccaaccccaacgccaaccccaacgccaaccccaacgccaaccccaacgccaaccccaacgccaaccccaacgccaaccccaacgccaaccccaacgccaaccccaacgucgaccccaacgccaaccccaacgccaaccccaacgccaaccccaacgccaaccccaacgccaaccccaacgccaaccccaacgccaaccccaacgccaaccccaacgccaaccccaacgccaaccccaacgccaaccccaacgccaaccccaacgccaaccccaacgccaaccccaacgccaaccccaacgccaaccccaacgccaaccccaacgccaaccccaacaagaacaaccagggcaacggccagggccacaacaugcccaacgaccccaaccgcaacgucgacgagaacgccaacgccaacuccgccgucaagaacaacaacaacgaggagcccuccgacaagcacaucaaggaguaccucaacaagauccagaacucccucuccaccgaguggucccccugcuccgucaccugcggcaacggcauccagguccgcaucaagcccggcuccgccaacaagcccaaggacgagcucgacuacgccaacgacaucgagaagaagaucugcaagauggagaagugcugaggacuagucccuguucccagagcccacuuuuuuuucuuuuuuugaaauaaaauagccugucuuucagaucucaaaggcucuuuucagagccaccaaaaaaaaaaaaaaaaaaaaaaaaaaaaaaaaaaaaaaaaaaaaaaaaaaaaaaaaaaaaaaaaaaaaaaaaaaaaaaaaaaaaaaaaaaaaaaaaaaaaa

SEQ ID NO: 8078 - RNA, 1250 nt, Artificial Sequence
  mRNA Design a-1 (hSL-A100) comprising derived and/or modified sequence from Pf(3D7)__XP_001351122.1__Pf-CSP(1-325) (opt2)
aggagagucccgcagucggcguccagcggcucugcuuguucgugugugugucguugcaggccuuauucaagcuuaccaugaugcgcaagcucgccauccucuccgucuccuccuuccucuucgucgaggcccucuuccaggaguaccagugcuacggcuccuccuccaacacccgcguccucaacgagcucaacuacgacaacgccggcaccaaccucuacaacgagcucgagaugaacuacuacggcaagcaggagaacugguacucccucaagaagaacucccgcucccucggcgagaacgacgacggcaacaacgaggacaacgagaagcuccgcaagcccaagcacaagaagcucaagcagcccgccgacggcaaccccgaccccaacgccaaccccaacgucgaccccaacgccaaccccaacgucgaccccaacgccaaccccaacgucgaccccaacgccaaccccaacgccaaccccaacgccaaccccaacgccaaccccaacgccaaccccaacgccaaccccaacgccaaccccaacgccaaccccaacgccaaccccaacgccaaccccaacgccaaccccaacgccaaccccaacgccaaccccaacgccaaccccaacgccaaccccaacgccaaccccaacgccaaccccaacgucgaccccaacgccaaccccaacgccaaccccaacgccaaccccaacgccaaccccaacgccaaccccaacgccaaccccaacgccaaccccaacgccaaccccaacgccaaccccaacgccaaccccaacgccaaccccaacgccaaccccaacgccaaccccaacgccaaccccaacgccaaccccaacgccaaccccaacgccaaccccaacgccaaccccaacaagaacaaccagggcaacggccagggccacaacaugcccaacgaccccaaccgcaacgucgacgagaacgccaacgccaacuccgccgucaagaacaacaacaacgaggagcccuccgacaagcacaucaaggaguaccucaacaagauccagaacugaggacuagucccuguucccagagcccacuuuuuuuucuuuuuuugaaauaaaauagccugucuuucagaucucaaaggcucuuuucagagccaccaaaaaaaaaaaaaaaaaaaaaaaaaaaaaaaaaaaaaaaaaaaaaaaaaaaaaaaaaaaaaaaaaaaaaaaaaaaaaaaaaaaaaaaaaaaaaaaaaaaaa

SEQ ID NO: 8079 - RNA, 1466 nt, Artificial Sequence
  mRNA Design a-1 (hSL-A100) comprising derived and/or modified sequence from Pf(3D7)__XP_001351122.1__HsALB_Pf-CSP(19-397) (opt2)
aggagagucccgcagucggcguccagcggcucugcuuguucgugugugugucguugcaggccuuauucaagcuuaccaugaagugggucaccuucaucucccuccucuuccucuucuccuccgccuacucccucuuccaggaguaccagugcuacggcuccuccuccaacacccgcguccucaacgagcucaacuacgacaacgccggcaccaaccucuacaacgagcucgagaugaacuacuacggcaagcaggagaacugguacucccucaagaagaacucccgcucccucggcgagaacgacgacggcaacaacgaggacaacgagaagcuccgcaagcccaagcacaagaagcucaagcagcccgccgacggcaaccccgaccccaacgccaaccccaacgucgaccccaacgccaaccccaacgucgaccccaacgccaaccccaacgucgaccccaacgccaaccccaacgccaaccccaacgccaaccccaacgccaaccccaacgccaaccccaacgccaaccccaacgccaaccccaacgccaaccccaacgccaaccccaacgccaaccccaacgccaaccccaacgccaaccccaacgccaaccccaacgccaaccccaacgccaaccccaacgccaaccccaacgccaaccccaacgucgaccccaacgccaaccccaacgccaaccccaacgccaaccccaacgccaaccccaacgccaaccccaacgccaaccccaacgccaaccccaacgccaaccccaacgccaaccccaacgccaaccccaacgccaaccccaacgccaaccccaacgccaaccccaacgccaaccccaacgccaaccccaacgccaaccccaacgccaaccccaacgccaaccccaacaagaacaaccagggcaacggccagggccacaacaugcccaacgaccccaaccgcaacgucgacgagaacgccaacgccaacuccgccgucaagaacaacaacaacgaggagcccuccgacaagcacaucaaggaguaccucaacaagauccagaacucccucuccaccgaguggucccccugcuccgucaccugcggcaacggcauccagguccgcaucaagcccggcuccgccaacaagcccaaggacgagcucgacuacgccaacgacaucgagaagaagaucugcaagauggagaagugcuccuccgucuucaacgucgucaacuccuccaucggccucaucaugguccucuccuuccucuuccucaacugaggacuagucccuguucccagagcccacuuuuuuuucuuuuuuugaaauaaaauagccugucuuucagaucucaaaggcucuuuucagagccaccaaaaaaaaaaaaaaaaaaaaaaaaaaaaaaaaaaaaaaaaaaaaaaaaaaaaaaaaaaaaaaaaaaaaaaaaaaaaaaaaaaaaaaaaaaaaaaaaaaaaa

SEQ ID NO: 8080 - RNA, 1484 nt, Artificial Sequence
  mRNA Design a-1 (hSL-A100) comprising derived and/or modified sequence from Pf(3D7)__XP_001351122.1__HsIns-iso1_Pf-CSP(19-397) (opt2)
aggagagucccgcagucggcguccagcggcucugcuuguucgugugugugucguugcaggccuuauucaagcuuaccauggcccucuggaugcgccuccucccccuccucgcccuccucgcccucuggggccccgaccccgccgccgcccucuuccaggaguaccagugcuacggcuccuccuccaacacccgcguccucaacgagcucaacuacgacaacgccggcaccaaccucuacaacgagcucgagaugaacuacuacggcaagcaggagaacugguacucccucaagaagaacucccgcucccucggcgagaacgacgacggcaacaacgaggacaacgagaagcuccgcaagcccaagcacaagaagcucaagcagcccgccgacggcaaccccgaccccaacgccaaccccaacgucgaccccaacgccaaccccaacgucgaccccaacgccaaccccaacgucgaccccaacgccaaccccaacgccaaccccaacgccaaccccaacgccaaccccaacgccaaccccaacgccaaccccaacgccaaccccaacgccaaccccaacgccaaccccaacgccaaccccaacgccaaccccaacgccaaccccaacgccaaccccaacgccaaccccaacgccaaccccaacgccaaccccaacgccaaccccaacgucgaccccaacgccaaccccaacgccaaccccaacgccaaccccaacgccaaccccaacgccaaccccaacgccaaccccaacgccaaccccaacgccaaccccaacgccaaccccaacgccaaccccaacgccaaccccaacgccaaccccaacgccaaccccaacgccaaccccaacgccaaccccaacgccaaccccaacgccaaccccaacgccaaccccaacaagaacaaccagggcaacggccagggccacaacaugcccaacgaccccaaccgcaacgucgacgagaacgccaacgccaacuccgccgucaagaacaacaacaacgaggagcccuccgacaagcacaucaaggaguaccucaacaagauccagaacucccucuccaccgaguggucccccugcuccgucaccugcggcaacggcauccagguccgcaucaagcccggcuccgccaacaagcccaaggacgagcucgacuacgccaacgacaucgagaagaagaucugcaagauggagaagugcuccuccgucuucaacgucgucaacuccuccaucggccucaucaugguccucuccuuccucuuccucaacugaggacuagucccuguucccagagcccacuuuuuuuucuuuuuuugaaauaaaauagccugucuuucagaucucaaaggcucuuuucagagccaccaaaaaaaaaaaaaaaaaaaaaaaaaaaaaaaaaaaaaaaaaaaaaaaaaaaaaaaaaaaaaaaaaaaaaaaaaaaaaaaaaaaaaaaaaaaaaaaaaaaaa

SEQ ID NO: 8081 - RNA, 1463 nt, Artificial Sequence
  mRNA Design a-1 (hSL-A100) comprising derived and/or modified sequence from Pf(3D7)__XP_001351122.1__HsSPARC_Pf-CSP(19-397) (opt2)
aggagagucccgcagucggcguccagcggcucugcuuguucgugugugugucguugcaggccuuauucaagcuuaccaugcgcgccuggaucuucuuccuccucugccucgccggccgcgcccucgcccucuuccaggaguaccagugcuacggcuccuccuccaacacccgcguccucaacgagcucaacuacgacaacgccggcaccaaccucuacaacgagcucgagaugaacuacuacggcaagcaggagaacugguacucccucaagaagaacucccgcucccucggcgagaacgacgacggcaacaacgaggacaacgagaagcuccgcaagcccaagcacaagaagcucaagcagcccgccgacggcaaccccgaccccaacgccaaccccaacgucgaccccaacgccaaccccaacgucgaccccaacgccaaccccaacgucgaccccaacgccaaccccaacgccaaccccaacgccaaccccaacgccaaccccaacgccaaccccaacgccaaccccaacgccaaccccaacgccaaccccaacgccaaccccaacgccaaccccaacgccaaccccaacgccaaccccaacgccaaccccaacgccaaccccaacgccaaccccaacgccaaccccaacgccaaccccaacgucgaccccaacgccaaccccaacgccaaccccaacgccaaccccaacgccaaccccaacgccaaccccaacgccaaccccaacgccaaccccaacgccaaccccaacgccaaccccaacgccaaccccaacgccaaccccaacgccaaccccaacgccaaccccaacgccaaccccaacgccaaccccaacgccaaccccaacgccaaccccaacgccaaccccaacaagaacaaccagggcaacggccagggccacaacaugcccaacgaccccaaccgcaacgucgacgagaacgccaacgccaacuccgccgucaagaacaacaacaacgaggagcccuccgacaagcacaucaaggaguaccucaacaagauccagaacucccucuccaccgaguggucccccugcuccgucaccugcggcaacggcauccagguccgcaucaagcccggcuccgccaacaagcccaaggacgagcucgacuacgccaacgacaucgagaagaagaucugcaagauggagaagugcuccuccgucuucaacgucgucaacuccuccaucggccucaucaugguccucuccuuccucuuccucaacugaggacuagucccuguucccagagcccacuuuuuuuucuuuuuuugaaauaaaauagccugucuuucagaucucaaaggcucuuuucagagccaccaaaaaaaaaaaaaaaaaaaaaaaaaaaaaaaaaaaaaaaaaaaaaaaaaaaaaaaaaaaaaaaaaaaaaaaaaaaaaaaaaaaaaaaaaaaaaaaaaaaaa

SEQ ID NO: 8082 - RNA, 1466 nt, Artificial Sequence
  mRNA Design a-1 (hSL-A100) comprising derived and/or modified sequence from Pf(3D7)__XP_001351122.1__IgE_Pf-CSP(19-397) (opt2)
aggagagucccgcagucggcguccagcggcucugcuuguucgugugugugucguugcaggccuuauucaagcuuaccauggacuggaccuggauccucuuccucgucgccgccgccacccgcguccacucccucuuccaggaguaccagugcuacggcuccuccuccaacacccgcguccucaacgagcucaacuacgacaacgccggcaccaaccucuacaacgagcucgagaugaacuacuacggcaagcaggagaacugguacucccucaagaagaacucccgcucccucggcgagaacgacgacggcaacaacgaggacaacgagaagcuccgcaagcccaagcacaagaagcucaagcagcccgccgacggcaaccccgaccccaacgccaaccccaacgucgaccccaacgccaaccccaacgucgaccccaacgccaaccccaacgucgaccccaacgccaaccccaacgccaaccccaacgccaaccccaacgccaaccccaacgccaaccccaacgccaaccccaacgccaaccccaacgccaaccccaacgccaaccccaacgccaaccccaacgccaaccccaacgccaaccccaacgccaaccccaacgccaaccccaacgccaaccccaacgccaaccccaacgccaaccccaacgucgaccccaacgccaaccccaacgccaaccccaacgccaaccccaacgccaaccccaacgccaaccccaacgccaaccccaacgccaaccccaacgccaaccccaacgccaaccccaacgccaaccccaacgccaaccccaacgccaaccccaacgccaaccccaacgccaaccccaacgccaaccccaacgccaaccccaacgccaaccccaacgccaaccccaacaagaacaaccagggcaacggccagggccacaacaugcccaacgaccccaaccgcaacgucgacgagaacgccaacgccaacuccgccgucaagaacaacaacaacgaggagcccuccgacaagcacaucaaggaguaccucaacaagauccagaacucccucuccaccgaguggucccccugcuccgucaccugcggcaacggcauccagguccgcaucaagcccggcuccgccaacaagcccaaggacgagcucgacuacgccaacgacaucgagaagaagaucugcaagauggagaagugcuccuccgucuucaacgucgucaacuccuccaucggccucaucaugguccucuccuuccucuuccucaacugaggacuagucccuguucccagagcccacuuuuuuuucuuuuuuugaaauaaaauagccugucuuucagaucucaaaggcucuuuucagagccaccaaaaaaaaaaaaaaaaaaaaaaaaaaaaaaaaaaaaaaaaaaaaaaaaaaaaaaaaaaaaaaaaaaaaaaaaaaaaaaaaaaaaaaaaaaaaaaaaaaaaa

SEQ ID NO: 8083 - RNA, 1631 nt, Artificial Sequence
  mRNA Design a-1 (hSL-A100) comprising derived and/or modified sequence from Pf(3D7)__XP_001351122.1__Pf-CSP_L(G4SG4)_TM domain HA (opt2)
aggagagucccgcagucggcguccagcggcucugcuuguucgugugugugucguugcaggccuuauucaagcuuaccaugaugcgcaagcucgccauccucuccgucuccuccuuccucuucgucgaggcccucuuccaggaguaccagugcuacggcuccuccuccaacacccgcguccucaacgagcucaacuacgacaacgccggcaccaaccucuacaacgagcucgagaugaacuacuacggcaagcaggagaacugguacucccucaagaagaacucccgcucccucggcgagaacgacgacggcaacaacgaggacaacgagaagcuccgcaagcccaagcacaagaagcucaagcagcccgccgacggcaaccccgaccccaacgccaaccccaacgucgaccccaacgccaaccccaacgucgaccccaacgccaaccccaacgucgaccccaacgccaaccccaacgccaaccccaacgccaaccccaacgccaaccccaacgccaaccccaacgccaaccccaacgccaaccccaacgccaaccccaacgccaaccccaacgccaaccccaacgccaaccccaacgccaaccccaacgccaaccccaacgccaaccccaacgccaaccccaacgccaaccccaacgccaaccccaacgucgaccccaacgccaaccccaacgccaaccccaacgccaaccccaacgccaaccccaacgccaaccccaacgccaaccccaacgccaaccccaacgccaaccccaacgccaaccccaacgccaaccccaacgccaaccccaacgccaaccccaacgccaaccccaacgccaaccccaacgccaaccccaacgccaaccccaacgccaaccccaacgccaaccccaacaagaacaaccagggcaacggccagggccacaacaugcccaacgaccccaaccgcaacgucgacgagaacgccaacgccaacuccgccgucaagaacaacaacaacgaggagcccuccgacaagcacaucaaggaguaccucaacaagauccagaacucccucuccaccgaguggucccccugcuccgucaccugcggcaacggcauccagguccgcaucaagcccggcuccgccaacaagcccaaggacgagcucgacuacgccaacgacaucgagaagaagaucugcaagauggagaagugcuccuccgucuucaacgucgucaacuccuccaucggccucaucaugguccucuccuuccucuuccucaacggcggcggcggcuccggcggcggcggcaagcucgaguccacccgcaucuaccagauccucgccaucuacuccaccgucgccuccucccucguccucgucgucucccucggcgccaucuccuucuggaugugcuccaacggcucccuccagugccgcaucugcaucugaggacuagucccuguucccagagcccacuuuuuuuucuuuuuuugaaauaaaauagccugucuuucagaucucaaaggcucuuuucagagccaccaaaaaaaaaaaaaaaaaaaaaaaaaaaaaaaaaaaaaaaaaaaaaaaaaaaaaaaaaaaaaaaaaaaaaaaaaaaaaaaaaaaaaaaaaaaaaaaaaaaaa

SEQ ID NO: 8084 - RNA, 1505 nt, Artificial Sequence
  mRNA Design a-1 (hSL-A100) comprising derived and/or modified sequence from Pf(3D7)__XP_001351122.1__Pf-CSP(199-377)_L(PVTN)_HBsAg (opt2)
aggagagucccgcagucggcguccagcggcucugcuuguucgugugugugucguugcaggccuuauucaagcuuaccauggaccccaacgccaaccccaacgccaaccccaacgccaaccccaacgccaaccccaacgccaaccccaacgccaaccccaacgccaaccccaacgccaaccccaacgccaaccccaacgccaaccccaacgccaaccccaacgccaaccccaacgccaaccccaacgccaaccccaacgccaaccccaacgccaaccccaacgccaaccccaacgccaaccccaacaagaacaaccagggcaacggccagggccacaacaugcccaacgaccccaaccgcaacgucgacgagaacgccaacgccaacuccgccgucaagaacaacaacaacgaggagcccuccgacaagcacaucaaggaguaccucaacaagauccagaacucccucuccaccgaguggucccccugcuccgucaccugcggcaacggcauccagguccgcaucaagcccggcuccgccaacaagcccaaggacgagcucgacuacgccaacgacaucgagaagaagaucugcaagauggagaagugcuccuccguccccgucaccaacauggagaacaucaccuccggcuuccucggcccccuccucguccuccaggccggcuucuuccuccucacccgcauccucaccaucccccagucccucgacuccugguggaccucccucaacuuccucggcggcucccccgucugccucggccagaacucccagucccccaccuccaaccacucccccaccuccugcccccccaucugccccggcuaccgcuggaugugccuccgccgcuucaucaucuuccucuucauccuccuccucugccucaucuuccuccucguccuccucgacuaccagggcaugcuccccgucugcccccucauccccggcuccaccaccaccaacaccggccccugcaagaccugcaccacccccgcccagggcaacuccauguuccccuccugcugcugcaccaagcccaccgacggcaacugcaccugcauccccauccccuccuccugggccuucgccaaguaccucugggagugggccuccguccgcuucuccuggcucucccuccucguccccuucguccagugguucgucggccucucccccaccgucuggcucuccgccaucuggaugaugugguacuggggccccucccucuacuccaucgucucccccuucaucccccuccuccccaucuucuucugccucugggucuacaucugaggacuagucccuguucccagagcccacuuuuuuuucuuuuuuugaaauaaaauagccugucuuucagaucucaaaggcucuuuucagagccaccaaaaaaaaaaaaaaaaaaaaaaaaaaaaaaaaaaaaaaaaaaaaaaaaaaaaaaaaaaaaaaaaaaaaaaaaaaaaaaaaaaaaaaaaaaaaaaaaaaaaa

SEQ ID NO: 8085 - RNA, 1547 nt, Artificial Sequence
  mRNA Design a-1 (hSL-A100) comprising derived and/or modified sequence from Pf(3D7)__XP_001351122.1__Pf-CSP(199-387)_L(PVTN)_HBsAg (opt2)
aggagagucccgcagucggcguccagcggcucugcuuguucgugugugugucguugcaggccuuauucaagcuuaccaugauggcccccgaccccaacgccaaccccaacgccaaccccaacgccaaccccaacgccaaccccaacgccaaccccaacgccaaccccaacgccaaccccaacgccaaccccaacgccaaccccaacgccaaccccaacgccaaccccaacgccaaccccaacgccaaccccaacgccaaccccaacgccaaccccaacgccaaccccaacgccaaccccaacgccaaccccaacaagaacaaccagggcaacggccagggccacaacaugcccaacgaccccaaccgcaacgucgacgagaacgccaacgccaacuccgccgucaagaacaacaacaacgaggagcccuccgacaagcacaucaaggaguaccucaacaagauccagaacucccucuccaccgaguggucccccugcuccgucaccugcggcaacggcauccagguccgcaucaagcccggcuccgccaacaagcccaaggacgagcucgacuacgccaacgacaucgagaagaagaucugcaagauggagaagugcuccuccgucuucaacgucgucaacuccuccaucggccucggccccgucaccaacauggagaacaucaccuccggcuuccucggcccccuccucguccuccaggccggcuucuuccuccucacccgcauccucaccaucccccagucccucgacuccugguggaccucccucaacuuccucggcggcucccccgucugccucggccagaacucccagucccccaccuccaaccacucccccaccuccugcccccccaucugccccggcuaccgcuggaugugccuccgccgcuucaucaucuuccucuucauccuccuccucugccucaucuuccuccucguccuccucgacuaccagggcaugcuccccgucugcccccucauccccggcuccaccaccaccaacaccggccccugcaagaccugcaccacccccgcccagggcaacuccauguuccccuccugcugcugcaccaagcccaccgacggcaacugcaccugcauccccauccccuccuccugggccuucgccaaguaccucugggagugggccuccguccgcuucuccuggcucucccuccucguccccuucguccagugguucgucggccucucccccaccgucuggcucuccgccaucuggaugaugugguacuggggccccucccucuacuccaucgucucccccuucaucccccuccuccccaucuucuucugccucugggucuacaucugaggacuagucccuguucccagagcccacuuuuuuuucuuuuuuugaaauaaaauagccugucuuucagaucucaaaggcucuuuucagagccaccaaaaaaaaaaaaaaaaaaaaaaaaaaaaaaaaaaaaaaaaaaaaaaaaaaaaaaaaaaaaaaaaaaaaaaaaaaaaaaaaaaaaaaaaaaaaaaaaaaaaa

SEQ ID NO: 8086 - RNA, 731 nt, Artificial Sequence
  mRNA Design a-1 (hSL-A100) comprising derived and/or modified sequence from Pf(3D7)__XP_001351122.1__HsALB_Pf-CSP(19-152) (opt2)
aggagagucccgcagucggcguccagcggcucugcuuguucgugugugugucguugcaggccuuauucaagcuuaccaugaagugggucaccuucaucucccuccucuuccucuucuccuccgccuacucccucuuccaggaguaccagugcuacggcuccuccuccaacacccgcguccucaacgagcucaacuacgacaacgccggcaccaaccucuacaacgagcucgagaugaacuacuacggcaagcaggagaacugguacucccucaagaagaacucccgcucccucggcgagaacgacgacggcaacaacgaggacaacgagaagcuccgcaagcccaagcacaagaagcucaagcagcccgccgacggcaaccccgaccccaacgccaaccccaacgucgaccccaacgccaaccccaacgucgaccccaacgccaaccccaacgucgaccccaacgccaaccccaacgccaaccccaacgccaaccccaacgccaaccccaacgccaaccccaacgccaaccccugaggacuagucccuguucccagagcccacuuuuuuuucuuuuuuugaaauaaaauagccugucuuucagaucucaaaggcucuuuucagagccaccaaaaaaaaaaaaaaaaaaaaaaaaaaaaaaaaaaaaaaaaaaaaaaaaaaaaaaaaaaaaaaaaaaaaaaaaaaaaaaaaaaaaaaaaaaaaaaaaaaaaa

SEQ ID NO: 8087 - RNA, 851 nt, Artificial Sequence
  mRNA Design a-1 (hSL-A100) comprising derived and/or modified sequence from Pf(3D7)__XP_001351122.1__HsALB_Pf-CSP(19-192) (opt2)
aggagagucccgcagucggcguccagcggcucugcuuguucgugugugugucguugcaggccuuauucaagcuuaccaugaagugggucaccuucaucucccuccucuuccucuucuccuccgccuacucccucuuccaggaguaccagugcuacggcuccuccuccaacacccgcguccucaacgagcucaacuacgacaacgccggcaccaaccucuacaacgagcucgagaugaacuacuacggcaagcaggagaacugguacucccucaagaagaacucccgcucccucggcgagaacgacgacggcaacaacgaggacaacgagaagcuccgcaagcccaagcacaagaagcucaagcagcccgccgacggcaaccccgaccccaacgccaaccccaacgucgaccccaacgccaaccccaacgucgaccccaacgccaaccccaacgucgaccccaacgccaaccccaacgccaaccccaacgccaaccccaacgccaaccccaacgccaaccccaacgccaaccccaacgccaaccccaacgccaaccccaacgccaaccccaacgccaaccccaacgccaaccccaacgccaaccccaacgccaaccccaacgccaaccccaacgccaaccccaacgccaaccccugaggacuagucccuguucccagagcccacuuuuuuuucuuuuuuugaaauaaaauagccugucuuucagaucucaaaggcucuuuucagagccaccaaaaaaaaaaaaaaaaaaaaaaaaaaaaaaaaaaaaaaaaaaaaaaaaaaaaaaaaaaaaaaaaaaaaaaaaaaaaaaaaaaaaaaaaaaaaaaaaaaaaa

SEQ ID NO: 8088 - RNA, 1091 nt, Artificial Sequence
  mRNA Design a-1 (hSL-A100) comprising derived and/or modified sequence from Pf(3D7)__XP_001351122.1__HsALB_Pf-CSP(19-272) (opt2)
aggagagucccgcagucggcguccagcggcucugcuuguucgugugugugucguugcaggccuuauucaagcuuaccaugaagugggucaccuucaucucccuccucuuccucuucuccuccgccuacucccucuuccaggaguaccagugcuacggcuccuccuccaacacccgcguccucaacgagcucaacuacgacaacgccggcaccaaccucuacaacgagcucgagaugaacuacuacggcaagcaggagaacugguacucccucaagaagaacucccgcucccucggcgagaacgacgacggcaacaacgaggacaacgagaagcuccgcaagcccaagcacaagaagcucaagcagcccgccgacggcaaccccgaccccaacgccaaccccaacgucgaccccaacgccaaccccaacgucgaccccaacgccaaccccaacgucgaccccaacgccaaccccaacgccaaccccaacgccaaccccaacgccaaccccaacgccaaccccaacgccaaccccaacgccaaccccaacgccaaccccaacgccaaccccaacgccaaccccaacgccaaccccaacgccaaccccaacgccaaccccaacgccaaccccaacgccaaccccaacgccaaccccaacgccaaccccaacgucgaccccaacgccaaccccaacgccaaccccaacgccaaccccaacgccaaccccaacgccaaccccaacgccaaccccaacgccaaccccaacgccaaccccaacgccaaccccaacgccaaccccaacgccaaccccaacgccaaccccaacgccaaccccaacgccaaccccaacgccaaccccaacgccaaccccaacgccaaccccaacgccaaccccugaggacuagucccuguucccagagcccacuuuuuuuucuuuuuuugaaauaaaauagccugucuuucagaucucaaaggcucuuuucagagccaccaaaaaaaaaaaaaaaaaaaaaaaaaaaaaaaaaaaaaaaaaaaaaaaaaaaaaaaaaaaaaaaaaaaaaaaaaaaaaaaaaaaaaaaaaaaaaaaaaaaaa

SEQ ID NO: 8089 - RNA, 1253 nt, Artificial Sequence
  mRNA Design a-1 (hSL-A100) comprising derived and/or modified sequence from Pf(3D7)__XP_001351122.1__HsALB_Pf-CSP(19-272)_L(AAY)_Pf-CSP(310-3 27)_L(AAY)_Pf-CSP(346-375) (opt2)
aggagagucccgcagucggcguccagcggcucugcuuguucgugugugugucguugcaggccuuauucaagcuuaccaugaagugggucaccuucaucucccuccucuuccucuucuccuccgccuacucccucuuccaggaguaccagugcuacggcuccuccuccaacacccgcguccucaacgagcucaacuacgacaacgccggcaccaaccucuacaacgagcucgagaugaacuacuacggcaagcaggagaacugguacucccucaagaagaacucccgcucccucggcgagaacgacgacggcaacaacgaggacaacgagaagcuccgcaagcccaagcacaagaagcucaagcagcccgccgacggcaaccccgaccccaacgccaaccccaacgucgaccccaacgccaaccccaacgucgaccccaacgccaaccccaacgucgaccccaacgccaaccccaacgccaaccccaacgccaaccccaacgccaaccccaacgccaaccccaacgccaaccccaacgccaaccccaacgccaaccccaacgccaaccccaacgccaaccccaacgccaaccccaacgccaaccccaacgccaaccccaacgccaaccccaacgccaaccccaacgccaaccccaacgccaaccccaacgucgaccccaacgccaaccccaacgccaaccccaacgccaaccccaacgccaaccccaacgccaaccccaacgccaaccccaacgccaaccccaacgccaaccccaacgccaaccccaacgccaaccccaacgccaaccccaacgccaaccccaacgccaaccccaacgccaaccccaacgccaaccccaacgccaaccccaacgccaaccccaacgccaaccccgccgccuacgagcccuccgacaagcacaucaaggaguaccucaacaagauccagaacucccucgccgccuacaucaagcccggcuccgccaacaagcccaaggacgagcucgacuacgccaacgacaucgagaagaagaucugcaagauggagaagugcuccugaggacuagucccuguucccagagcccacuuuuuuuucuuuuuuugaaauaaaauagccugucuuucagaucucaaaggcucuuuucagagccaccaaaaaaaaaaaaaaaaaaaaaaaaaaaaaaaaaaaaaaaaaaaaaaaaaaaaaaaaaaaaaaaaaaaaaaaaaaaaaaaaaaaaaaaaaaaaaaaaaaaaa

SEQ ID NO: 8090 - RNA, 1214 nt, Artificial Sequence
  mRNA Design a-1 (hSL-A100) comprising derived and/or modified sequence from Pf(3D7)__XP_001351122.1__HsALB_Pf-CSP(19-272)_L(AAY)_Pf-CSP(346-3 65)_L(AAY)_P2 (opt2)
aggagagucccgcagucggcguccagcggcucugcuuguucgugugugugucguugcaggccuuauucaagcuuaccaugaagugggucaccuucaucucccuccucuuccucuucuccuccgccuacucccucuuccaggaguaccagugcuacggcuccuccuccaacacccgcguccucaacgagcucaacuacgacaacgccggcaccaaccucuacaacgagcucgagaugaacuacuacggcaagcaggagaacugguacucccucaagaagaacucccgcucccucggcgagaacgacgacggcaacaacgaggacaacgagaagcuccgcaagcccaagcacaagaagcucaagcagcccgccgacggcaaccccgaccccaacgccaaccccaacgucgaccccaacgccaaccccaacgucgaccccaacgccaaccccaacgucgaccccaacgccaaccccaacgccaaccccaacgccaaccccaacgccaaccccaacgccaaccccaacgccaaccccaacgccaaccccaacgccaaccccaacgccaaccccaacgccaaccccaacgccaaccccaacgccaaccccaacgccaaccccaacgccaaccccaacgccaaccccaacgccaaccccaacgccaaccccaacgucgaccccaacgccaaccccaacgccaaccccaacgccaaccccaacgccaaccccaacgccaaccccaacgccaaccccaacgccaaccccaacgccaaccccaacgccaaccccaacgccaaccccaacgccaaccccaacgccaaccccaacgccaaccccaacgccaaccccaacgccaaccccaacgccaaccccaacgccaaccccaacgccaaccccgccgccuacaucaagcccggcuccgccaacaagcccaaggacgagcucgacuacgccaacgacaucgaggccgccuaccaguacaucaaggccaacuccaaguucaucggcaucaccgagcucugaggacuagucccuguucccagagcccacuuuuuuuucuuuuuuugaaauaaaauagccugucuuucagaucucaaaggcucuuuucagagccaccaaaaaaaaaaaaaaaaaaaaaaaaaaaaaaaaaaaaaaaaaaaaaaaaaaaaaaaaaaaaaaaaaaaaaaaaaaaaaaaaaaaaaaaaaaaaaaaaaaaaa

SEQ ID NO: 8091 - RNA, 1208 nt, Artificial Sequence
  mRNA Design a-1 (hSL-A100) comprising derived and/or modified sequence from Pf(3D7)__XP_001351122.1__HsALB_Pf-CSP(19-272)_L(AAY)_Pf-CSP(346-3 65)_L(AAY)_PADRE (opt2)
aggagagucccgcagucggcguccagcggcucugcuuguucgugugugugucguugcaggccuuauucaagcuuaccaugaagugggucaccuucaucucccuccucuuccucuucuccuccgccuacucccucuuccaggaguaccagugcuacggcuccuccuccaacacccgcguccucaacgagcucaacuacgacaacgccggcaccaaccucuacaacgagcucgagaugaacuacuacggcaagcaggagaacugguacucccucaagaagaacucccgcucccucggcgagaacgacgacggcaacaacgaggacaacgagaagcuccgcaagcccaagcacaagaagcucaagcagcccgccgacggcaaccccgaccccaacgccaaccccaacgucgaccccaacgccaaccccaacgucgaccccaacgccaaccccaacgucgaccccaacgccaaccccaacgccaaccccaacgccaaccccaacgccaaccccaacgccaaccccaacgccaaccccaacgccaaccccaacgccaaccccaacgccaaccccaacgccaaccccaacgccaaccccaacgccaaccccaacgccaaccccaacgccaaccccaacgccaaccccaacgccaaccccaacgccaaccccaacgucgaccccaacgccaaccccaacgccaaccccaacgccaaccccaacgccaaccccaacgccaaccccaacgccaaccccaacgccaaccccaacgccaaccccaacgccaaccccaacgccaaccccaacgccaaccccaacgccaaccccaacgccaaccccaacgccaaccccaacgccaaccccaacgccaaccccaacgccaaccccaacgccaaccccgccgccuacaucaagcccggcuccgccaacaagcccaaggacgagcucgacuacgccaacgacaucgaggccgccuacgccaaguucgucgccgccuggacccucaaggccgccgccugaggacuagucccuguucccagagcccacuuuuuuuucuuuuuuugaaauaaaauagccugucuuucagaucucaaaggcucuuuucagagccaccaaaaaaaaaaaaaaaaaaaaaaaaaaaaaaaaaaaaaaaaaaaaaaaaaaaaaaaaaaaaaaaaaaaaaaaaaaaaaaaaaaaaaaaaaaaaaaaaaaaaa

SEQ ID NO: 8092 - RNA, 1265 nt, Artificial Sequence
  mRNA Design a-1 (hSL-A100) comprising derived and/or modified sequence from Pf(3D7)__XP_001351122.1__HsALB_Pf-CSP(19-272)_L(G4S)_Pf-CSP(310-3 27)_L(G4S)_Pf-CSP(346-375) (opt2)
aggagagucccgcagucggcguccagcggcucugcuuguucgugugugugucguugcaggccuuauucaagcuuaccaugaagugggucaccuucaucucccuccucuuccucuucuccuccgccuacucccucuuccaggaguaccagugcuacggcuccuccuccaacacccgcguccucaacgagcucaacuacgacaacgccggcaccaaccucuacaacgagcucgagaugaacuacuacggcaagcaggagaacugguacucccucaagaagaacucccgcucccucggcgagaacgacgacggcaacaacgaggacaacgagaagcuccgcaagcccaagcacaagaagcucaagcagcccgccgacggcaaccccgaccccaacgccaaccccaacgucgaccccaacgccaaccccaacgucgaccccaacgccaaccccaacgucgaccccaacgccaaccccaacgccaaccccaacgccaaccccaacgccaaccccaacgccaaccccaacgccaaccccaacgccaaccccaacgccaaccccaacgccaaccccaacgccaaccccaacgccaaccccaacgccaaccccaacgccaaccccaacgccaaccccaacgccaaccccaacgccaaccccaacgccaaccccaacgucgaccccaacgccaaccccaacgccaaccccaacgccaaccccaacgccaaccccaacgccaaccccaacgccaaccccaacgccaaccccaacgccaaccccaacgccaaccccaacgccaaccccaacgccaaccccaacgccaaccccaacgccaaccccaacgccaaccccaacgccaaccccaacgccaaccccaacgccaaccccaacgccaaccccggcggcggcggcuccgagcccuccgacaagcacaucaaggaguaccucaacaagauccagaacucccucggcggcggcggcuccaucaagcccggcuccgccaacaagcccaaggacgagcucgacuacgccaacgacaucgagaagaagaucugcaagauggagaagugcuccugaggacuagucccuguucccagagcccacuuuuuuuucuuuuuuugaaauaaaauagccugucuuucagaucucaaaggcucuuuucagagccaccaaaaaaaaaaaaaaaaaaaaaaaaaaaaaaaaaaaaaaaaaaaaaaaaaaaaaaaaaaaaaaaaaaaaaaaaaaaaaaaaaaaaaaaaaaaaaaaaaaaaa

SEQ ID NO: 8093 - RNA, 1250 nt, Artificial Sequence
  mRNA Design a-1 (hSL-A100) comprising derived and/or modified sequence from Pf(3D7)__XP_001351122.1__HsALB_Pf-CSP(19-272)_L(G4S)_Pf-CSP(310-3 27)_Pf-CSP(346-375) (opt2)
aggagagucccgcagucggcguccagcggcucugcuuguucgugugugugucguugcaggccuuauucaagcuuaccaugaagugggucaccuucaucucccuccucuuccucuucuccuccgccuacucccucuuccaggaguaccagugcuacggcuccuccuccaacacccgcguccucaacgagcucaacuacgacaacgccggcaccaaccucuacaacgagcucgagaugaacuacuacggcaagcaggagaacugguacucccucaagaagaacucccgcucccucggcgagaacgacgacggcaacaacgaggacaacgagaagcuccgcaagcccaagcacaagaagcucaagcagcccgccgacggcaaccccgaccccaacgccaaccccaacgucgaccccaacgccaaccccaacgucgaccccaacgccaaccccaacgucgaccccaacgccaaccccaacgccaaccccaacgccaaccccaacgccaaccccaacgccaaccccaacgccaaccccaacgccaaccccaacgccaaccccaacgccaaccccaacgccaaccccaacgccaaccccaacgccaaccccaacgccaaccccaacgccaaccccaacgccaaccccaacgccaaccccaacgccaaccccaacgucgaccccaacgccaaccccaacgccaaccccaacgccaaccccaacgccaaccccaacgccaaccccaacgccaaccccaacgccaaccccaacgccaaccccaacgccaaccccaacgccaaccccaacgccaaccccaacgccaaccccaacgccaaccccaacgccaaccccaacgccaaccccaacgccaaccccaacgccaaccccaacgccaaccccggcggcggcggcuccgagcccuccgacaagcacaucaaggaguaccucaacaagauccagaacucccucaucaagcccggcuccgccaacaagcccaaggacgagcucgacuacgccaacgacaucgagaagaagaucugcaagauggagaagugcuccugaggacuagucccuguucccagagcccacuuuuuuuucuuuuuuugaaauaaaauagccugucuuucagaucucaaaggcucuuuucagagccaccaaaaaaaaaaaaaaaaaaaaaaaaaaaaaaaaaaaaaaaaaaaaaaaaaaaaaaaaaaaaaaaaaaaaaaaaaaaaaaaaaaaaaaaaaaaaaaaaaaaaa

SEQ ID NO: 8094 - RNA, 1250 nt, Artificial Sequence
  mRNA Design a-1 (hSL-A100) comprising derived and/or modified sequence from Pf(3D7)__XP_001351122.1__HsALB_Pf-CSP(19-325) (opt2)
aggagagucccgcagucggcguccagcggcucugcuuguucgugugugugucguugcaggccuuauucaagcuuaccaugaagugggucaccuucaucucccuccucuuccucuucuccuccgccuacucccucuuccaggaguaccagugcuacggcuccuccuccaacacccgcguccucaacgagcucaacuacgacaacgccggcaccaaccucuacaacgagcucgagaugaacuacuacggcaagcaggagaacugguacucccucaagaagaacucccgcucccucggcgagaacgacgacggcaacaacgaggacaacgagaagcuccgcaagcccaagcacaagaagcucaagcagcccgccgacggcaaccccgaccccaacgccaaccccaacgucgaccccaacgccaaccccaacgucgaccccaacgccaaccccaacgucgaccccaacgccaaccccaacgccaaccccaacgccaaccccaacgccaaccccaacgccaaccccaacgccaaccccaacgccaaccccaacgccaaccccaacgccaaccccaacgccaaccccaacgccaaccccaacgccaaccccaacgccaaccccaacgccaaccccaacgccaaccccaacgccaaccccaacgccaaccccaacgucgaccccaacgccaaccccaacgccaaccccaacgccaaccccaacgccaaccccaacgccaaccccaacgccaaccccaacgccaaccccaacgccaaccccaacgccaaccccaacgccaaccccaacgccaaccccaacgccaaccccaacgccaaccccaacgccaaccccaacgccaaccccaacgccaaccccaacgccaaccccaacgccaaccccaacaagaacaaccagggcaacggccagggccacaacaugcccaacgaccccaaccgcaacgucgacgagaacgccaacgccaacuccgccgucaagaacaacaacaacgaggagcccuccgacaagcacaucaaggaguaccucaacaagauccagaacugaggacuagucccuguucccagagcccacuuuuuuuucuuuuuuugaaauaaaauagccugucuuucagaucucaaaggcucuuuucagagccaccaaaaaaaaaaaaaaaaaaaaaaaaaaaaaaaaaaaaaaaaaaaaaaaaaaaaaaaaaaaaaaaaaaaaaaaaaaaaaaaaaaaaaaaaaaaaaaaaaaaaa

SEQ ID NO: 8095 - RNA, 1427 nt, Artificial Sequence
  mRNA Design a-1 (hSL-A100) comprising derived and/or modified sequence from Pf(3D7)__XP_001351122.1__HsALB_Pf-CSP(19-384) (opt2)
aggagagucccgcagucggcguccagcggcucugcuuguucgugugugugucguugcaggccuuauucaagcuuaccaugaagugggucaccuucaucucccuccucuuccucuucuccuccgccuacucccucuuccaggaguaccagugcuacggcuccuccuccaacacccgcguccucaacgagcucaacuacgacaacgccggcaccaaccucuacaacgagcucgagaugaacuacuacggcaagcaggagaacugguacucccucaagaagaacucccgcucccucggcgagaacgacgacggcaacaacgaggacaacgagaagcuccgcaagcccaagcacaagaagcucaagcagcccgccgacggcaaccccgaccccaacgccaaccccaacgucgaccccaacgccaaccccaacgucgaccccaacgccaaccccaacgucgaccccaacgccaaccccaacgccaaccccaacgccaaccccaacgccaaccccaacgccaaccccaacgccaaccccaacgccaaccccaacgccaaccccaacgccaaccccaacgccaaccccaacgccaaccccaacgccaaccccaacgccaaccccaacgccaaccccaacgccaaccccaacgccaaccccaacgccaaccccaacgucgaccccaacgccaaccccaacgccaaccccaacgccaaccccaacgccaaccccaacgccaaccccaacgccaaccccaacgccaaccccaacgccaaccccaacgccaaccccaacgccaaccccaacgccaaccccaacgccaaccccaacgccaaccccaacgccaaccccaacgccaaccccaacgccaaccccaacgccaaccccaacgccaaccccaacaagaacaaccagggcaacggccagggccacaacaugcccaacgaccccaaccgcaacgucgacgagaacgccaacgccaacuccgccgucaagaacaacaacaacgaggagcccuccgacaagcacaucaaggaguaccucaacaagauccagaacucccucuccaccgaguggucccccugcuccgucaccugcggcaacggcauccagguccgcaucaagcccggcuccgccaacaagcccaaggacgagcucgacuacgccaacgacaucgagaagaagaucugcaagauggagaagugcuccuccgucuucaacgucgucaacuccuccugaggacuagucccuguucccagagcccacuuuuuuuucuuuuuuugaaauaaaauagccugucuuucagaucucaaaggcucuuuucagagccaccaaaaaaaaaaaaaaaaaaaaaaaaaaaaaaaaaaaaaaaaaaaaaaaaaaaaaaaaaaaaaaaaaaaaaaaaaaaaaaaaaaaaaaaaaaaaaaaaaaaaa

SEQ ID NO: 8096 - RNA, 1565 nt, Artificial Sequence
  mRNA Design a-1 (hSL-A100) comprising derived and/or modified sequence from Pf(3D7)__XP_001351122.1__HsALB_Pf-CSP(19-384)_TM domain HA (opt2)
aggagagucccgcagucggcguccagcggcucugcuuguucgugugugugucguugcaggccuuauucaagcuuaccaugaagugggucaccuucaucucccuccucuuccucuucuccuccgccuacucccucuuccaggaguaccagugcuacggcuccuccuccaacacccgcguccucaacgagcucaacuacgacaacgccggcaccaaccucuacaacgagcucgagaugaacuacuacggcaagcaggagaacugguacucccucaagaagaacucccgcucccucggcgagaacgacgacggcaacaacgaggacaacgagaagcuccgcaagcccaagcacaagaagcucaagcagcccgccgacggcaaccccgaccccaacgccaaccccaacgucgaccccaacgccaaccccaacgucgaccccaacgccaaccccaacgucgaccccaacgccaaccccaacgccaaccccaacgccaaccccaacgccaaccccaacgccaaccccaacgccaaccccaacgccaaccccaacgccaaccccaacgccaaccccaacgccaaccccaacgccaaccccaacgccaaccccaacgccaaccccaacgccaaccccaacgccaaccccaacgccaaccccaacgccaaccccaacgucgaccccaacgccaaccccaacgccaaccccaacgccaaccccaacgccaaccccaacgccaaccccaacgccaaccccaacgccaaccccaacgccaaccccaacgccaaccccaacgccaaccccaacgccaaccccaacgccaaccccaacgccaaccccaacgccaaccccaacgccaaccccaacgccaaccccaacgccaaccccaacgccaaccccaacaagaacaaccagggcaacggccagggccacaacaugcccaacgaccccaaccgcaacgucgacgagaacgccaacgccaacuccgccgucaagaacaacaacaacgaggagcccuccgacaagcacaucaaggaguaccucaacaagauccagaacucccucuccaccgaguggucccccugcuccgucaccugcggcaacggcauccagguccgcaucaagcccggcuccgccaacaagcccaaggacgagcucgacuacgccaacgacaucgagaagaagaucugcaagauggagaagugcuccuccgucuucaacgucgucaacuccuccaagcucgaguccacccgcaucuaccagauccucgccaucuacuccaccgucgccuccucccucguccucgucgucucccucggcgccaucuccuucuggaugugcuccaacggcucccuccagugccgcaucugcaucugaggacuagucccuguucccagagcccacuuuuuuuucuuuuuuugaaauaaaauagccugucuuucagaucucaaaggcucuuuucagagccaccaaaaaaaaaaaaaaaaaaaaaaaaaaaaaaaaaaaaaaaaaaaaaaaaaaaaaaaaaaaaaaaaaaaaaaaaaaaaaaaaaaaaaaaaaaaaaaaaaaaaa

SEQ ID NO: 8097 - RNA, 1277 nt, Artificial Sequence
  mRNA Design a-1 (hSL-A100) comprising derived and/or modified sequence from Pf(3D7)__XP_001351122.1__HsALB_Pf-CSP(82-397) (opt2)
aggagagucccgcagucggcguccagcggcucugcuuguucgugugugugucguugcaggccuuauucaagcuuaccaugaagugggucaccuucaucucccuccucuuccucuucuccuccgccuacuccgacaacgagaagcuccgcaagcccaagcacaagaagcucaagcagcccgccgacggcaaccccgaccccaacgccaaccccaacgucgaccccaacgccaaccccaacgucgaccccaacgccaaccccaacgucgaccccaacgccaaccccaacgccaaccccaacgccaaccccaacgccaaccccaacgccaaccccaacgccaaccccaacgccaaccccaacgccaaccccaacgccaaccccaacgccaaccccaacgccaaccccaacgccaaccccaacgccaaccccaacgccaaccccaacgccaaccccaacgccaaccccaacgccaaccccaacgucgaccccaacgccaaccccaacgccaaccccaacgccaaccccaacgccaaccccaacgccaaccccaacgccaaccccaacgccaaccccaacgccaaccccaacgccaaccccaacgccaaccccaacgccaaccccaacgccaaccccaacgccaaccccaacgccaaccccaacgccaaccccaacgccaaccccaacgccaaccccaacgccaaccccaacaagaacaaccagggcaacggccagggccacaacaugcccaacgaccccaaccgcaacgucgacgagaacgccaacgccaacuccgccgucaagaacaacaacaacgaggagcccuccgacaagcacaucaaggaguaccucaacaagauccagaacucccucuccaccgaguggucccccugcuccgucaccugcggcaacggcauccagguccgcaucaagcccggcuccgccaacaagcccaaggacgagcucgacuacgccaacgacaucgagaagaagaucugcaagauggagaagugcuccuccgucuucaacgucgucaacuccuccaucggccucaucaugguccucuccuuccucuuccucaacugaggacuagucccuguucccagagcccacuuuuuuuucuuuuuuugaaauaaaauagccugucuuucagaucucaaaggcucuuuucagagccaccaaaaaaaaaaaaaaaaaaaaaaaaaaaaaaaaaaaaaaaaaaaaaaaaaaaaaaaaaaaaaaaaaaaaaaaaaaaaaaaaaaaaaaaaaaaaaaaaaaaaa

SEQ ID NO: 8098 - RNA, 629 nt, Artificial Sequence
  mRNA Design a-1 (hSL-A100) comprising derived and/or modified sequence from Pf(3D7)__XP_001351122.1__HsALB_Pf-CSP(93-192) (opt2)
aggagagucccgcagucggcguccagcggcucugcuuguucgugugugugucguugcaggccuuauucaagcuuaccaugaagugggucaccuucaucucccuccucuuccucuucuccuccgccuacuccaagcucaagcagcccgccgacggcaaccccgaccccaacgccaaccccaacgucgaccccaacgccaaccccaacgucgaccccaacgccaaccccaacgucgaccccaacgccaaccccaacgccaaccccaacgccaaccccaacgccaaccccaacgccaaccccaacgccaaccccaacgccaaccccaacgccaaccccaacgccaaccccaacgccaaccccaacgccaaccccaacgccaaccccaacgccaaccccaacgccaaccccaacgccaaccccaacgccaaccccugaggacuagucccuguucccagagcccacuuuuuuuucuuuuuuugaaauaaaauagccugucuuucagaucucaaaggcucuuuucagagccaccaaaaaaaaaaaaaaaaaaaaaaaaaaaaaaaaaaaaaaaaaaaaaaaaaaaaaaaaaaaaaaaaaaaaaaaaaaaaaaaaaaaaaaaaaaaaaaaaaaaaa

SEQ ID NO: 8099 - RNA, 869 nt, Artificial Sequence
  mRNA Design a-1 (hSL-A100) comprising derived and/or modified sequence from Pf(3D7)__XP_001351122.1__HsALB_Pf-CSP(93-272) (opt2)
aggagagucccgcagucggcguccagcggcucugcuuguucgugugugugucguugcaggccuuauucaagcuuaccaugaagugggucaccuucaucucccuccucuuccucuucuccuccgccuacuccaagcucaagcagcccgccgacggcaaccccgaccccaacgccaaccccaacgucgaccccaacgccaaccccaacgucgaccccaacgccaaccccaacgucgaccccaacgccaaccccaacgccaaccccaacgccaaccccaacgccaaccccaacgccaaccccaacgccaaccccaacgccaaccccaacgccaaccccaacgccaaccccaacgccaaccccaacgccaaccccaacgccaaccccaacgccaaccccaacgccaaccccaacgccaaccccaacgccaaccccaacgccaaccccaacgucgaccccaacgccaaccccaacgccaaccccaacgccaaccccaacgccaaccccaacgccaaccccaacgccaaccccaacgccaaccccaacgccaaccccaacgccaaccccaacgccaaccccaacgccaaccccaacgccaaccccaacgccaaccccaacgccaaccccaacgccaaccccaacgccaaccccaacgccaaccccaacgccaaccccugaggacuagucccuguucccagagcccacuuuuuuuucuuuuuuugaaauaaaauagccugucuuucagaucucaaaggcucuuuucagagccaccaaaaaaaaaaaaaaaaaaaaaaaaaaaaaaaaaaaaaaaaaaaaaaaaaaaaaaaaaaaaaaaaaaaaaaaaaaaaaaaaaaaaaaaaaaaaaaaaaaaaa

SEQ ID NO: 8100 - RNA, 1244 nt, Artificial Sequence
  mRNA Design a-1 (hSL-A100) comprising derived and/or modified sequence from Pf(3D7)__XP_001351122.1__HsALB_Pf-CSP(93-397) (opt2)
aggagagucccgcagucggcguccagcggcucugcuuguucgugugugugucguugcaggccuuauucaagcuuaccaugaagugggucaccuucaucucccuccucuuccucuucuccuccgccuacuccaagcucaagcagcccgccgacggcaaccccgaccccaacgccaaccccaacgucgaccccaacgccaaccccaacgucgaccccaacgccaaccccaacgucgaccccaacgccaaccccaacgccaaccccaacgccaaccccaacgccaaccccaacgccaaccccaacgccaaccccaacgccaaccccaacgccaaccccaacgccaaccccaacgccaaccccaacgccaaccccaacgccaaccccaacgccaaccccaacgccaaccccaacgccaaccccaacgccaaccccaacgccaaccccaacgucgaccccaacgccaaccccaacgccaaccccaacgccaaccccaacgccaaccccaacgccaaccccaacgccaaccccaacgccaaccccaacgccaaccccaacgccaaccccaacgccaaccccaacgccaaccccaacgccaaccccaacgccaaccccaacgccaaccccaacgccaaccccaacgccaaccccaacgccaaccccaacgccaaccccaacaagaacaaccagggcaacggccagggccacaacaugcccaacgaccccaaccgcaacgucgacgagaacgccaacgccaacuccgccgucaagaacaacaacaacgaggagcccuccgacaagcacaucaaggaguaccucaacaagauccagaacucccucuccaccgaguggucccccugcuccgucaccugcggcaacggcauccagguccgcaucaagcccggcuccgccaacaagcccaaggacgagcucgacuacgccaacgacaucgagaagaagaucugcaagauggagaagugcuccuccgucuucaacgucgucaacuccuccaucggccucaucaugguccucuccuuccucuuccucaacugaggacuagucccuguucccagagcccacuuuuuuuucuuuuuuugaaauaaaauagccugucuuucagaucucaaaggcucuuuucagagccaccaaaaaaaaaaaaaaaaaaaaaaaaaaaaaaaaaaaaaaaaaaaaaaaaaaaaaaaaaaaaaaaaaaaaaaaaaaaaaaaaaaaaaaaaaaaaaaaaaaaaa

SEQ ID NO: 8101 - RNA, 614 nt, Artificial Sequence
  mRNA Design a-1 (hSL-A100) comprising derived and/or modified sequence from Pf(3D7)__XP_001351122.1__HsALB_Pf-CSP(98-192) (opt2)
aggagagucccgcagucggcguccagcggcucugcuuguucgugugugugucguugcaggccuuauucaagcuuaccaugaagugggucaccuucaucucccuccucuuccucuucuccuccgccuacuccgccgacggcaaccccgaccccaacgccaaccccaacgucgaccccaacgccaaccccaacgucgaccccaacgccaaccccaacgucgaccccaacgccaaccccaacgccaaccccaacgccaaccccaacgccaaccccaacgccaaccccaacgccaaccccaacgccaaccccaacgccaaccccaacgccaaccccaacgccaaccccaacgccaaccccaacgccaaccccaacgccaaccccaacgccaaccccaacgccaaccccaacgccaaccccugaggacuagucccuguucccagagcccacuuuuuuuucuuuuuuugaaauaaaauagccugucuuucagaucucaaaggcucuuuucagagccaccaaaaaaaaaaaaaaaaaaaaaaaaaaaaaaaaaaaaaaaaaaaaaaaaaaaaaaaaaaaaaaaaaaaaaaaaaaaaaaaaaaaaaaaaaaaaaaaaaaaaa

SEQ ID NO: 8102 - RNA, 854 nt, Artificial Sequence
  mRNA Design a-1 (hSL-A100) comprising derived and/or modified sequence from Pf(3D7)__XP_001351122.1__HsALB_Pf-CSP(98-272) (opt2)
aggagagucccgcagucggcguccagcggcucugcuuguucgugugugugucguugcaggccuuauucaagcuuaccaugaagugggucaccuucaucucccuccucuuccucuucuccuccgccuacuccgccgacggcaaccccgaccccaacgccaaccccaacgucgaccccaacgccaaccccaacgucgaccccaacgccaaccccaacgucgaccccaacgccaaccccaacgccaaccccaacgccaaccccaacgccaaccccaacgccaaccccaacgccaaccccaacgccaaccccaacgccaaccccaacgccaaccccaacgccaaccccaacgccaaccccaacgccaaccccaacgccaaccccaacgccaaccccaacgccaaccccaacgccaaccccaacgccaaccccaacgucgaccccaacgccaaccccaacgccaaccccaacgccaaccccaacgccaaccccaacgccaaccccaacgccaaccccaacgccaaccccaacgccaaccccaacgccaaccccaacgccaaccccaacgccaaccccaacgccaaccccaacgccaaccccaacgccaaccccaacgccaaccccaacgccaaccccaacgccaaccccaacgccaaccccugaggacuagucccuguucccagagcccacuuuuuuuucuuuuuuugaaauaaaauagccugucuuucagaucucaaaggcucuuuucagagccaccaaaaaaaaaaaaaaaaaaaaaaaaaaaaaaaaaaaaaaaaaaaaaaaaaaaaaaaaaaaaaaaaaaaaaaaaaaaaaaaaaaaaaaaaaaaaaaaaaaaaa

SEQ ID NO: 8103 - RNA, 1160 nt, Artificial Sequence
  mRNA Design a-1 (hSL-A100) comprising derived and/or modified sequence from Pf(3D7)__XP_001351122.1__HsALB_Pf-CSP(98-374) (opt2)
aggagagucccgcagucggcguccagcggcucugcuuguucgugugugugucguugcaggccuuauucaagcuuaccaugaagugggucaccuucaucucccuccucuuccucuucuccuccgccuacuccgccgacggcaaccccgaccccaacgccaaccccaacgucgaccccaacgccaaccccaacgucgaccccaacgccaaccccaacgucgaccccaacgccaaccccaacgccaaccccaacgccaaccccaacgccaaccccaacgccaaccccaacgccaaccccaacgccaaccccaacgccaaccccaacgccaaccccaacgccaaccccaacgccaaccccaacgccaaccccaacgccaaccccaacgccaaccccaacgccaaccccaacgccaaccccaacgccaaccccaacgucgaccccaacgccaaccccaacgccaaccccaacgccaaccccaacgccaaccccaacgccaaccccaacgccaaccccaacgccaaccccaacgccaaccccaacgccaaccccaacgccaaccccaacgccaaccccaacgccaaccccaacgccaaccccaacgccaaccccaacgccaaccccaacgccaaccccaacgccaaccccaacgccaaccccaacaagaacaaccagggcaacggccagggccacaacaugcccaacgaccccaaccgcaacgucgacgagaacgccaacgccaacuccgccgucaagaacaacaacaacgaggagcccuccgacaagcacaucaaggaguaccucaacaagauccagaacucccucuccaccgaguggucccccugcuccgucaccugcggcaacggcauccagguccgcaucaagcccggcuccgccaacaagcccaaggacgagcucgacuacgccaacgacaucgagaagaagaucugcaagauggagaagugcugaggacuagucccuguucccagagcccacuuuuuuuucuuuuuuugaaauaaaauagccugucuuucagaucucaaaggcucuuuucagagccaccaaaaaaaaaaaaaaaaaaaaaaaaaaaaaaaaaaaaaaaaaaaaaaaaaaaaaaaaaaaaaaaaaaaaaaaaaaaaaaaaaaaaaaaaaaaaaaaaaaaaa

SEQ ID NO: 8104 - RNA, 1229 nt, Artificial Sequence
  mRNA Design a-1 (hSL-A100) comprising derived and/or modified sequence from Pf(3D7)__XP_001351122.1__HsALB_Pf-CSP(98-397) (opt2)
aggagagucccgcagucggcguccagcggcucugcuuguucgugugugugucguugcaggccuuauucaagcuuaccaugaagugggucaccuucaucucccuccucuuccucuucuccuccgccuacuccgccgacggcaaccccgaccccaacgccaaccccaacgucgaccccaacgccaaccccaacgucgaccccaacgccaaccccaacgucgaccccaacgccaaccccaacgccaaccccaacgccaaccccaacgccaaccccaacgccaaccccaacgccaaccccaacgccaaccccaacgccaaccccaacgccaaccccaacgccaaccccaacgccaaccccaacgccaaccccaacgccaaccccaacgccaaccccaacgccaaccccaacgccaaccccaacgccaaccccaacgucgaccccaacgccaaccccaacgccaaccccaacgccaaccccaacgccaaccccaacgccaaccccaacgccaaccccaacgccaaccccaacgccaaccccaacgccaaccccaacgccaaccccaacgccaaccccaacgccaaccccaacgccaaccccaacgccaaccccaacgccaaccccaacgccaaccccaacgccaaccccaacgccaaccccaacaagaacaaccagggcaacggccagggccacaacaugcccaacgaccccaaccgcaacgucgacgagaacgccaacgccaacuccgccgucaagaacaacaacaacgaggagcccuccgacaagcacaucaaggaguaccucaacaagauccagaacucccucuccaccgaguggucccccugcuccgucaccugcggcaacggcauccagguccgcaucaagcccggcuccgccaacaagcccaaggacgagcucgacuacgccaacgacaucgagaagaagaucugcaagauggagaagugcuccuccgucuucaacgucgucaacuccuccaucggccucaucaugguccucuccuuccucuuccucaacugaggacuagucccuguucccagagcccacuuuuuuuucuuuuuuugaaauaaaauagccugucuuucagaucucaaaggcucuuuucagagccaccaaaaaaaaaaaaaaaaaaaaaaaaaaaaaaaaaaaaaaaaaaaaaaaaaaaaaaaaaaaaaaaaaaaaaaaaaaaaaaaaaaaaaaaaaaaaaaaaaaaaa

SEQ ID NO: 8105 - RNA, 1556 nt, Artificial Sequence
  mRNA Design a-1 (hSL-A100) comprising derived and/or modified sequence from Pf(3D7)__XP_001351122.1__HsALB_Pf-CSP(199-377)_L(PVTN)_HBsAg (opt2)
aggagagucccgcagucggcguccagcggcucugcuuguucgugugugugucguugcaggccuuauucaagcuuaccaugaagugggucaccuucaucucccuccucuuccucuucuccuccgccuacuccgaccccaacgccaaccccaacgccaaccccaacgccaaccccaacgccaaccccaacgccaaccccaacgccaaccccaacgccaaccccaacgccaaccccaacgccaaccccaacgccaaccccaacgccaaccccaacgccaaccccaacgccaaccccaacgccaaccccaacgccaaccccaacgccaaccccaacgccaaccccaacgccaaccccaacaagaacaaccagggcaacggccagggccacaacaugcccaacgaccccaaccgcaacgucgacgagaacgccaacgccaacuccgccgucaagaacaacaacaacgaggagcccuccgacaagcacaucaaggaguaccucaacaagauccagaacucccucuccaccgaguggucccccugcuccgucaccugcggcaacggcauccagguccgcaucaagcccggcuccgccaacaagcccaaggacgagcucgacuacgccaacgacaucgagaagaagaucugcaagauggagaagugcuccuccguccccgucaccaacauggagaacaucaccuccggcuuccucggcccccuccucguccuccaggccggcuucuuccuccucacccgcauccucaccaucccccagucccucgacuccugguggaccucccucaacuuccucggcggcucccccgucugccucggccagaacucccagucccccaccuccaaccacucccccaccuccugcccccccaucugccccggcuaccgcuggaugugccuccgccgcuucaucaucuuccucuucauccuccuccucugccucaucuuccuccucguccuccucgacuaccagggcaugcuccccgucugcccccucauccccggcuccaccaccaccaacaccggccccugcaagaccugcaccacccccgcccagggcaacuccauguuccccuccugcugcugcaccaagcccaccgacggcaacugcaccugcauccccauccccuccuccugggccuucgccaaguaccucugggagugggccuccguccgcuucuccuggcucucccuccucguccccuucguccagugguucgucggccucucccccaccgucuggcucuccgccaucuggaugaugugguacuggggccccucccucuacuccaucgucucccccuucaucccccuccuccccaucuucuucugccucugggucuacaucugaggacuagucccuguucccagagcccacuuuuuuuucuuuuuuugaaauaaaauagccugucuuucagaucucaaaggcucuuuucagagccaccaaaaaaaaaaaaaaaaaaaaaaaaaaaaaaaaaaaaaaaaaaaaaaaaaaaaaaaaaaaaaaaaaaaaaaaaaaaaaaaaaaaaaaaaaaaaaaaaaaaaa

SEQ ID NO: 8106 - RNA, 1466 nt, Artificial Sequence
  mRNA Design a-1 (hSL-A100) comprising derived and/or modified sequence from Pf(3D7)__XP_001351122.1__Pf-CSP (opt3)
aggagagucccgcagucggcguccagcggcucugcuuguucgugugugugucguugcaggccuuauucaagcuuaccaugaugagaaagcuggccauccucagcguguccucuuuccuuuuugucgaggcucuguuccaggaauaccaaugcuauggcucaaguagcaacaccaggguuuugaaugaguuaaacuacgacaaugcagggacaaaccuguauaaugaacuagagaugaacuacuauggaaaacaggaaaauugguacucccucaagaaaaacucucggucgcugggugagaaugaugacggcaacaaugaggauaacgaaaaacuucgcaagcccaagcacaagaaacugaagcagccugccgacgggaauccagauccgaacgcgaaucccaacguggacccuaacgcuaauccaaacguagaucccaaugccaacccuaauguggacccaaacgcaaaucccaacgccaauccuaacgcuaauccaaacgcaaauccgaacgccaaucccaacgcuaacccuaaugccaacccaaaugcgaaccccaaugcaaacccuaaugccaacccaaaugcuaaccccaaugccaacccgaaugcaaacccuaaugcuaaccccaacgccaauccaaacgcgaauccuaacgccaaucccaacgucgauccaaaugcaaaccccaaugcuaacccuaaugccaacccaaaugcuaacccgaaugccaaccccaacgcaaauccuaacgccaauccaaacgcuaaucccaacgcgaauccuaacgcaaauccaaacgccaaucccaacgcuaauccgaacgccaauccuaacgcaaauccaaacgccaaccccaaugcuaacccuaaugccaaccccaaugcaaacccaaauaaaaacaaucagggaaacggccaaggucauaauaugccuaacgaccccaaucgaaacguggaugagaaugcgaacgcuaacucagccguuaagaauaacaauaacgaggaaccaagcgacaaacacauuaaggaguauuugaauaagauacagaacagucucuccacugaauggucuccguguagcgugacgugcgggaauggaauccagguccguauuaaaccuggcuccgcaaacaagcccaaagaugagcuggacuacgccaaugacaucgaaaagaaaauuuguaagauggagaaaugcucaaguguguuuaacguaguuaauagcucuaucggccugauaauggugcucuccuucuuauuucugaacugaggacuagucccuguucccagagcccacuuuuuuuucuuuuuuugaaauaaaauagccugucuuucagaucucaaaggcucuuuucagagccaccaaaaaaaaaaaaaaaaaaaaaaaaaaaaaaaaaaaaaaaaaaaaaaaaaaaaaaaaaaaaaaaaaaaaaaaaaaaaaaaaaaaaaaaaaaaaaaaaaaaaa

SEQ ID NO: 8107 - RNA, 1397 nt, Artificial Sequence
  mRNA Design a-1 (hSL-A100) comprising derived and/or modified sequence from Pf(3D7)__XP_001351122.1__Pf-CSP(1-374) (opt3)
aggagagucccgcagucggcguccagcggcucugcuuguucgugugugugucguugcaggccuuauucaagcuuaccaugaugagaaagcuggccauccucagcguguccucuuuccuuuuugucgaggcucuguuccaggaauaccaaugcuauggcucaaguagcaacaccaggguuuugaaugaguuaaacuacgacaaugcagggacaaaccuguauaaugaacuagagaugaacuacuauggaaaacaggaaaauugguacucccucaagaaaaacucucggucgcugggugagaaugaugacggcaacaaugaggauaacgaaaaacuucgcaagcccaagcacaagaaacugaagcagccugccgacgggaauccagauccgaacgcgaaucccaacguggacccuaacgcuaauccaaacguagaucccaaugccaacccuaauguggacccaaacgcaaaucccaacgccaauccuaacgcuaauccaaacgcaaauccgaacgccaaucccaacgcuaacccuaaugccaacccaaaugcgaaccccaaugcaaacccuaaugccaacccaaaugcuaaccccaaugccaacccgaaugcaaacccuaaugcuaaccccaacgccaauccaaacgcgaauccuaacgccaaucccaacgucgauccaaaugcaaaccccaaugcuaacccuaaugccaacccaaaugcuaacccgaaugccaaccccaacgcaaauccuaacgccaauccaaacgcuaaucccaacgcgaauccuaacgcaaauccaaacgccaaucccaacgcuaauccgaacgccaauccuaacgcaaauccaaacgccaaccccaaugcuaacccuaaugccaaccccaaugcaaacccaaauaaaaacaaucagggaaacggccaaggucauaauaugccuaacgaccccaaucgaaacguggaugagaaugcgaacgcuaacucagccguuaagaauaacaauaacgaggaaccaagcgacaaacacauuaaggaguauuugaauaagauacagaacagucucuccacugaauggucuccguguagcgugacgugcgggaauggaauccagguccguauuaaaccuggcuccgcaaacaagcccaaagaugagcuggacuacgccaaugacaucgaaaagaaaauuuguaagauggagaaaugcugaggacuagucccuguucccagagcccacuuuuuuuucuuuuuuugaaauaaaauagccugucuuucagaucucaaaggcucuuuucagagccaccaaaaaaaaaaaaaaaaaaaaaaaaaaaaaaaaaaaaaaaaaaaaaaaaaaaaaaaaaaaaaaaaaaaaaaaaaaaaaaaaaaaaaaaaaaaaaaaaaaaaa

SEQ ID NO: 8108 - RNA, 1250 nt, Artificial Sequence
  mRNA Design a-1 (hSL-A100) comprising derived and/or modified sequence from Pf(3D7)__XP_001351122.1__Pf-CSP(1-325) (opt3)
aggagagucccgcagucggcguccagcggcucugcuuguucgugugugugucguugcaggccuuauucaagcuuaccaugaugagaaagcuggccauccucagcguguccucuuuccuuuuugucgaggcucuguuccaggaauaccaaugcuauggcucaaguagcaacaccaggguuuugaaugaguuaaacuacgacaaugcagggacaaaccuguauaaugaacuagagaugaacuacuauggaaaacaggaaaauugguacucccucaagaaaaacucucggucgcugggugagaaugaugacggcaacaaugaggauaacgaaaaacuucgcaagcccaagcacaagaaacugaagcagccugccgacgggaauccagauccgaacgcgaaucccaacguggacccuaacgcuaauccaaacguagaucccaaugccaacccuaauguggacccaaacgcaaaucccaacgccaauccuaacgcuaauccaaacgcaaauccgaacgccaaucccaacgcuaacccuaaugccaacccaaaugcgaaccccaaugcaaacccuaaugccaacccaaaugcuaaccccaaugccaacccgaaugcaaacccuaaugcuaaccccaacgccaauccaaacgcgaauccuaacgccaaucccaacgucgauccaaaugcaaaccccaaugcuaacccuaaugccaacccaaaugcuaacccgaaugccaaccccaacgcaaauccuaacgccaauccaaacgcuaaucccaacgcgaauccuaacgcaaauccaaacgccaaucccaacgcuaauccgaacgccaauccuaacgcaaauccaaacgccaaccccaaugcuaacccuaaugccaaccccaaugcaaacccaaauaaaaacaaucagggaaacggccaaggucauaauaugccuaacgaccccaaucgaaacguggaugagaaugcgaacgcuaacucagccguuaagaauaacaauaacgaggaaccaagcgacaaacacauuaaggaguauuugaauaagauacagaacugaggacuagucccuguucccagagcccacuuuuuuuucuuuuuuugaaauaaaauagccugucuuucagaucucaaaggcucuuuucagagccaccaaaaaaaaaaaaaaaaaaaaaaaaaaaaaaaaaaaaaaaaaaaaaaaaaaaaaaaaaaaaaaaaaaaaaaaaaaaaaaaaaaaaaaaaaaaaaaaaaaaaa

SEQ ID NO: 8109 - RNA, 1466 nt, Artificial Sequence
  mRNA Design a-1 (hSL-A100) comprising derived and/or modified sequence from Pf(3D7)__XP_001351122.1__HsALB_Pf-CSP(19-397) (opt3)
aggagagucccgcagucggcguccagcggcucugcuuguucgugugugugucguugcaggccuuauucaagcuuaccaugaagugggugaccuucaucagccugcucuuucuuuucuccucugccuacucacuguuucaggaguaucaaugcuacggcaguagcuccaacacaagagucuugaaugaauuaaacuaugacaaugcugggacuaaccuguacaaugagcuagaaaugaacuauuacggaaaacaggagaauugguauucucucaagaaaaacucgaggucacugggugaaaaugaugacggcaacaaugaggauaacgagaaacuucggaagcccaagcacaagaaacugaagcagccugcagacgggaauccagauccgaacgccaaucccaacguugacccuaacgcgaauccaaacguggaucccaaugcuaacccuaauguagacccaaacgccaaucccaacgcaaauccuaacgccaauccaaacgcuaauccgaacgcaaaucccaacgccaacccuaaugcuaacccaaaugccaaccccaaugcgaacccuaaugcaaacccaaaugccaaccccaaugcuaacccgaaugccaacccuaaugcaaaccccaacgcuaauccaaacgccaauccuaacgcgaaucccaacguggauccaaaugccaaccccaaugcaaacccuaaugcuaacccaaaugccaacccgaaugcuaaccccaacgccaauccuaacgcaaauccaaacgccaaucccaacgcuaauccuaacgcgaauccaaacgcaaaucccaacgccaauccgaacgcuaauccuaacgccaauccaaacgcaaaccccaaugccaacccuaaugcuaaccccaaugccaacccaaauaaaaacaaucagggaaacggccaaggucauaauaugccuaacgaccccaaucgcaacgucgaugaaaaugcaaacgcgaacagcgcugugaagaauaacaauaacgaggaaccaagugacaaacacauuaaggaguacuugaauaagauacagaacucccucucuacggaguggagcccguguuccguuaccugcgggaauggaauccaggugcgaauuaaaccuggcucagccaacaagcccaaagaugaacuggacuacgcaaaugacaucgagaagaaaauuuguaagauggaaaaaugcaguagcgucuucaacgugguaaauucuuccaucggccugauaaugguucucucauuuuuauuccugaacugaggacuagucccuguucccagagcccacuuuuuuuucuuuuuuugaaauaaaauagccugucuuucagaucucaaaggcucuuuucagagccaccaaaaaaaaaaaaaaaaaaaaaaaaaaaaaaaaaaaaaaaaaaaaaaaaaaaaaaaaaaaaaaaaaaaaaaaaaaaaaaaaaaaaaaaaaaaaaaaaaaaaa

SEQ ID NO: 8110 - RNA, 1484 nt, Artificial Sequence
  mRNA Design a-1 (hSL-A100) comprising derived and/or modified sequence from Pf(3D7)__XP_001351122.1__HsIns-iso1_Pf-CSP(19-397) (opt3)
aggagagucccgcagucggcguccagcggcucugcuuguucgugugugugucguugcaggccuuauucaagcuuaccauggcccuguggaugagacuccuuccccuguuggcuuuacuggcacuauggggcccugacccagccgcggcucucuuccaggaguaccaaugcuaugggagcuccucuaacaccagggugcugaaugaacuuaacuacgauaaugccggaacaaaccuguauaaugaguuggaaaugaacuacuaugguaagcaggagaauugguacucacucaaaaagaacagucggagccugggcgaaaaugacgaugggaacaaugaggacaacgagaaacugcgcaagccgaaacacaagaagcucaaacagcccgcagauggaaauccugacccaaacgccaaucccaacgucgauccuaacgcuaauccaaacguugaccccaaugcaaacccuaauguggauccaaacgccaauccgaacgcuaaucccaacgccaauccuaacgcgaauccaaacgcaaaucccaacgccaacccuaaugcuaacccaaaugccaaccccaaugcaaacccgaaugcuaacccuaaugccaaccccaaugcgaacccaaaugccaacccuaaugcaaaccccaacgcuaauccaaacgccaaucccaacgcuaauccuaacguagacccaaaugccaacccgaaugcaaaccccaaugccaacccuaaugcuaacccaaaugcgaaccccaacgcaaauccuaacgccaauccaaacgcuaaucccaacgccaauccgaacgcaaauccuaacgccaauccaaacgcuaaucccaacgccaauccuaacgcaaaucccaacgcgaacccaaaugcuaacccuaaugccaaccccaaugcaaacccaaauaagaacaaucagggcaacggucaagggcauaauaugccgaacgauccuaaucgaaacguggacgaaaaugccaacgcuaacuccgccgucaaaaauaacaauaacgaggaacccucugauaagcacaucaaagaguauuuaaauaagauucagaacucgcugucaacugaguggagcccauguagugugacgugcggaaauggcauacagguucguaucaagcccggcuccgcaaacaaaccuaaggacgaacuugacuacgcuaaugauauugagaaaaagaucuguaaaauggaaaagugcucuagcguguuuaacgucguaaauuccucaauuggguugaucauggugcugaguuuccuauuucucaacugaggacuagucccuguucccagagcccacuuuuuuuucuuuuuuugaaauaaaauagccugucuuucagaucucaaaggcucuuuucagagccaccaaaaaaaaaaaaaaaaaaaaaaaaaaaaaaaaaaaaaaaaaaaaaaaaaaaaaaaaaaaaaaaaaaaaaaaaaaaaaaaaaaaaaaaaaaaaaaaaaaaaa

SEQ ID NO: 8111 - RNA, 1463 nt, Artificial Sequence
  mRNA Design a-1 (hSL-A100) comprising derived and/or modified sequence from Pf(3D7)__XP_001351122.1__HsSPARC_Pf-CSP(19-397) (opt3)
aggagagucccgcagucggcguccagcggcucugcuuguucgugugugugucguugcaggccuuauucaagcuuaccaugagagccuggaucuucuuucugcucugccuugcuggcagggcacuggccuuguuccaggaguaccaauguuaugggagcuccucuaacacccggguguuaaaugaacugaacuacgacaaugcgggaacaaaccuauauaaugagcucgaaaugaacuacuaugguaagcaggagaauugguacucacugaaaaagaacagucgcagccuuggcgaaaaugaugacgggaacaaugaggauaacgagaaacugcgaaagcccaaacacaagaaguugaaacagccugcugacggaaauccagauccgaacgccaaucccaacgucgacccuaacgcaaauccaaacguugaucccaaugccaacccuaauguggacccaaacgcuaaucccaacgcaaauccuaacgccaauccaaacgcuaauccgaacgccaaucccaacgcgaacccuaaugcaaacccaaaugccaaccccaaugcuaacccuaaugccaacccaaaugcaaaccccaaugcuaacccgaaugccaacccuaaugcgaaccccaacgccaauccaaacgcaaauccuaacgcuaaucccaacguagauccaaaugccaaccccaaugcuaacccuaaugccaacccaaaugcaaacccgaaugccaaccccaacgcuaauccuaacgcgaauccaaacgcaaaucccaacgccaauccuaacgcuaauccaaacgccaaucccaacgcaaauccgaacgccaauccuaacgcuaauccaaacgccaaccccaaugcaaacccuaaugcgaaccccaaugcuaacccaaauaagaacaaucagggcaacggucaagggcauaauaugccuaacgaccccaaucguaacguggaugaaaaugccaacgcaaacuccgccgucaaaaauaacaauaacgaggaaccaucugacaagcacauuaaagaguaucucaauaagauacagaacucgcugucaacugaguggagcccgugcagugugacguguggaaauggcauccagguuagaauuaagccuggcuccgcuaacaaacccaaggaugaacuggacuacgccaaugacaucgagaaaaagauuugcaaaauggaaaaguguucuagcguguuuaacgucguaaauuccucaaucgggcucauaaugguguuaaguuuccuguuucuuaacugaggacuagucccuguucccagagcccacuuuuuuuucuuuuuuugaaauaaaauagccugucuuucagaucucaaaggcucuuuucagagccaccaaaaaaaaaaaaaaaaaaaaaaaaaaaaaaaaaaaaaaaaaaaaaaaaaaaaaaaaaaaaaaaaaaaaaaaaaaaaaaaaaaaaaaaaaaaaaaaaaaaaa

SEQ ID NO: 8112 - RNA, 1466 nt, Artificial Sequence
  mRNA Design a-1 (hSL-A100) comprising derived and/or modified sequence from Pf(3D7)__XP_001351122.1__IgE_Pf-CSP(19-397) (opt3)
aggagagucccgcagucggcguccagcggcucugcuuguucgugugugugucguugcaggccuuauucaagcuuaccauggacuggaccuggauccuguuccucguggccgcugcaacaagaguccacagccuuuuucaggaguaccaaugcuauggcuccucuucaaacacuaggguucugaaugaauugaacuacgauaaugccgggacgaacuuauauaaugagcuggaaaugaacuacuauggaaagcaggagaauugguacagucuaaagaagaacagccggucccucggugaaaaugacgauggcaacaaugaggacaacgagaaacugcgcaagcccaaacauaagaaacuuaaacagccugcggaugggaauccagacccgaacgcuaaucccaacguggauccuaacgccaauccaaacguagaccccaaugcaaacccuaauguggauccaaacgccaaucccaacgcuaauccuaacgcaaauccaaacgccaauccgaacgcuaaucccaacgccaacccuaaugcgaacccaaaugcaaaccccaaugccaacccuaaugcuaacccaaaugccaaccccaaugcaaacccgaaugcuaacccuaaugccaaccccaacgcgaauccaaacgccaauccuaacgcaaaucccaacgucgacccaaaugcuaaccccaaugccaacccuaaugcuaacccaaaugccaacccgaaugcaaaccccaacgccaauccuaacgcuaauccaaacgcgaaucccaacgcaaauccuaacgccaauccaaacgcuaaucccaacgccaauccgaacgcaaauccuaacgccaauccaaacgcuaaccccaaugccaacccuaaugcaaaccccaaugcgaacccaaauaagaacaaucagggaaacggccaaggucacaauaugccuaacgaucccaaucgaaacguggacgaaaaugcuaacgccaacucugcaguuaaaaauaacaauaacgaggaaccaucggauaagcauauuaaagaguaucugaauaagauacagaacucauugagcaccgaguggaguccguguuccgugacaugcgggaauggaauccagguccguauuaagccuggcucugccaacaaacccaaggacgaacucgacuacgcuaaugauaucgagaaaaagauuuguaaaauggaaaagugcagcuccguguucaacguaguuaauucaaguaucggccugauaauggugcugagcuuucucuucuuaaacugaggacuagucccuguucccagagcccacuuuuuuuucuuuuuuugaaauaaaauagccugucuuucagaucucaaaggcucuuuucagagccaccaaaaaaaaaaaaaaaaaaaaaaaaaaaaaaaaaaaaaaaaaaaaaaaaaaaaaaaaaaaaaaaaaaaaaaaaaaaaaaaaaaaaaaaaaaaaaaaaaaaaa

SEQ ID NO: 8113 - RNA, 1631 nt, Artificial Sequence
  mRNA Design a-1 (hSL-A100) comprising derived and/or modified sequence from Pf(3D7)__XP_001351122.1__Pf-CSP_L(G4SG4)_TM domain HA (opt3)
aggagagucccgcagucggcguccagcggcucugcuuguucgugugugugucguugcaggccuuauucaagcuuaccaugaugagaaagcuggccauccucagcguguccucuuuccuuuuugucgaggcucuguuccaggaauaccaaugcuauggcucaaguagcaacaccaggguuuugaaugaguuaaacuacgacaaugcagggacaaaccuguauaaugaacuagagaugaacuacuauggaaagcaggaaaauugguacucccucaagaaaaacucucggucgcugggugagaaugaugacggcaacaaugaggauaacgaaaaacuucgcaagcccaagcacaagaaacugaagcagccugccgacgggaauccagauccgaacgcgaaucccaacguggacccuaacgcuaauccaaacguagaucccaaugccaacccuaauguggacccaaacgcaaaucccaacgccaauccuaacgcuaauccaaacgcaaauccgaacgccaaucccaacgcuaacccuaaugccaacccaaaugcgaaccccaaugcaaacccuaaugccaacccaaaugcuaaccccaaugccaacccgaaugcaaacccuaaugcuaaccccaacgccaauccaaacgcgaauccuaacgccaaucccaacgucgauccaaaugcaaaccccaaugcuaacccuaaugccaacccaaaugcuaacccgaaugccaaccccaacgcaaauccuaacgccaauccaaacgcuaaucccaacgcgaauccuaacgcaaauccaaacgccaaucccaacgcuaauccgaacgccaauccuaacgcaaauccaaacgccaaccccaaugcuaacccuaaugccaaccccaaugcaaacccaaauaaaaacaaucagggaaacggccaaggucauaauaugccuaacgaccccaaucgaaacguggaugagaaugcgaacgcuaacucagccguuaagaauaacaauaacgaggaaccaagcgacaaacacauuaaggaguauuugaauaagauacagaacagucucuccacugaauggucuccguguagcgugacgugcgggaauggaauccagguccguauuaaaccuggcuccgcaaacaagcccaaagaugagcuggacuacgccaaugacaucgaaaagaaaauuuguaagauggagaaaugcucaaguguguuuaacguaguuaauagcucuaucggccugauaauggugcucuccuucuuauuucugaacgggggagguggcucagggggaggcgguaaacuugaaagcaccagaaucuaccagauuuuggcuaucuauaguacagucgccucuucccuggugcuaguggucagccucggggcaauuucguucuggauguguucuaauggaucccugcaaugcaggaucuguauaugaggacuagucccuguucccagagcccacuuuuuuuucuuuuuuugaaauaaaauagccugucuuucagaucucaaaggcucuuuucagagccaccaaaaaaaaaaaaaaaaaaaaaaaaaaaaaaaaaaaaaaaaaaaaaaaaaaaaaaaaaaaaaaaaaaaaaaaaaaaaaaaaaaaaaaaaaaaaaaaaaaaaa

SEQ ID NO: 8114 - RNA, 1505 nt, Artificial Sequence
  mRNA Design a-1 (hSL-A100) comprising derived and/or modified sequence from Pf(3D7)__XP_001351122.1__Pf-CSP(199-377)_L(PVTN)_HBsAg (opt3)
aggagagucccgcagucggcguccagcggcucugcuuguucgugugugugucguugcaggccuuauucaagcuuaccauggaccccaacgccaauccuaacgcuaauccaaacgcaaauccgaacgccaaucccaacgcgaauccuaacgcuaauccaaacgccaaucccaacgcaaauccuaacgccaacccaaaugcuaaccccaaugcaaacccuaaugccaacccaaaugcuaacccgaaugccaaccccaaugcgaacccuaaugcaaacccaaaugccaaccccaacgcuaauccuaacaagaauaaccagggcaaugggcaaggacacaacaugccaaaugaucccaacagaaauguggacgagaacgccaaugcaaacagcgcugucaaaaauaacaauaacgaggaaccguccgauaagcauaucaaagaauaccugaacaagauucaaaauucucucucaaccgaguggaguccuugcagcguuacaugugguaacggcauacaggugaggaucaaacccggguccgccaauaagccaaaggacgaacuugauuaugcgaacgacauugagaaaaagaucugcaaaauggagaaguguucuucgguaccugugacuaauauggaaaacauuacgucaggauuccugggccccuuguuaguccugcaggccggguuuuuccuacucacccggauccugacaauaccacagagccuugauaguugguggacuucccugaauuuucucgguggaucucccgugugcuugggccagaacagccaguccccuaccucaaaucacaguccaacaagcuguccgcccaucugcccuggcuaccgcuggaugugucugcgacguuucauuaucuuucuguucauucucuuacugugccuuaucuuuuugcugguucuacucgacuaucaggggaugcugccaguguguccccuuauaccuggaucuaccacuacaaacaccgguccaugcaaaacguguacuacccccgcacaaggcaauuccauguucccgucaugcugcuguacaaagccuacugaugggaacugcaccuguauuccaauccccagcaguugggcuuuugccaaguaccugugggagugggcuucugucagauucuccugguugagccuccuggugccuuuuguacagugguucguuggauuaucgcccacaguguggcugucugccauuuggaugaugugguauuggggcccaucccucuacucaaucgucaguccuuuuaucccccuucugccaauuuucuucugcuuguggguguauauaugaggacuagucccuguucccagagcccacuuuuuuuucuuuuuuugaaauaaaauagccugucuuucagaucucaaaggcucuuuucagagccaccaaaaaaaaaaaaaaaaaaaaaaaaaaaaaaaaaaaaaaaaaaaaaaaaaaaaaaaaaaaaaaaaaaaaaaaaaaaaaaaaaaaaaaaaaaaaaaaaaaaaa

SEQ ID NO: 8115 - RNA, 1547 nt, Artificial Sequence
  mRNA Design a-1 (hSL-A100) comprising derived and/or modified sequence from Pf(3D7)__XP_001351122.1__Pf-CSP(199-387)_L(PVTN)_HBsAg (opt3)
aggagagucccgcagucggcguccagcggcucugcuuguucgugugugugucguugcaggccuuauucaagcuuaccaugauggcccccgacccuaacgcuaauccaaacgcaaauccgaacgccaaucccaacgcgaauccuaacgcuaauccaaacgccaaucccaacgcaaauccuaacgccaauccaaacgcuaaccccaaugcaaacccuaaugccaacccaaaugcuaacccgaaugccaaccccaaugcgaacccuaaugcaaacccaaaugccaaccccaaugcuaacccuaacgccaauccaaacaagaauaaccagggcaaugggcaaggacacaacaugcccaaugauccgaacagaaauguggacgagaacgcaaaugcuaacagcgccgucaaaaauaacaauaacgaggaaccuuccgauaagcauaucaaagaauaccugaacaagauucaaaauucucucucaaccgaguggagucccugcagcguuacaugugguaacggcauacaggugaggaucaaaccaggguccgcgaauaagccuaaggacgaacuugauuaugccaacgacauugagaaaaagaucugcaaaauggagaaguguucuucgguauucaauguggucaacucaagcauuggacugggccccgugacuaauauggaaaacaucacgaguggguuuuuggguccauuacugguucuacaggcaggauucuuucuccugacccggauacuuacaaucccccagucccuggauucuugguggacuagcuugaauuuccucggcggcuccccugugugccuggggcagaacucacagaguccaaccagcaaucacucuccgacauccugucccccuauuugcccaggauaccgcuggaugugucugcgacguuuuaucauuuuccucuuuaucuuacugcuuugcuugauauuccugcuaguccuccuggacuaucaggguaugcuucccguguguccucugauuccaggcucaaccacuacaaacaccgggcccugcaaaacguguacuaccccggcucaaggaaauagcauguuuccuaguugcugcuguacaaagccaacugauggcaacugcaccuguauccccauuccuucuuccugggccuucgcuaaguacuugugggagugggccagcguaagauuuucguggcucucucuguuaguucccuucgugcagugguuugucggucuguccccaacaguguggcucucagcaaucuggaugaugugguauugggggccuagucuuuacagcaucgugucccccuucauuccacuguugccgauauucuuuugccuaugggucuauaucugaggacuagucccuguucccagagcccacuuuuuuuucuuuuuuugaaauaaaauagccugucuuucagaucucaaaggcucuuuucagagccaccaaaaaaaaaaaaaaaaaaaaaaaaaaaaaaaaaaaaaaaaaaaaaaaaaaaaaaaaaaaaaaaaaaaaaaaaaaaaaaaaaaaaaaaaaaaaaaaaaaaaa

SEQ ID NO: 8116 - RNA, 731 nt, Artificial Sequence
  mRNA Design a-1 (hSL-A100) comprising derived and/or modified sequence from Pf(3D7)__XP_001351122.1__HsALB_Pf-CSP(19-152) (opt3)
aggagagucccgcagucggcguccagcggcucugcuuguucgugugugugucguugcaggccuuauucaagcuuaccaugaagugggugaccuucaucagccugcucuuucuuuucuccucugccuacucacuguuucaggaguaucaaugcuacggcaguagcuccaacacaagagucuugaaugaauuaaacuaugacaaugcugggacuaaccuguacaaugagcuagaaaugaacuauuacggaaaacaggagaauugguauucucucaagaaaaacucgaggucacugggugaaaaugaugacggcaacaaugaggauaacgagaaacuucggaagcccaagcacaagaaacugaagcagccugcagacgggaauccagauccgaacgccaaucccaacguugacccuaacgcgaauccaaacguggaucccaaugcuaacccuaauguagacccaaacgccaaucccaacgcaaauccuaacgccaauccaaacgcuaauccgaacgcaaaucccaacgccaacccuugaggacuagucccuguucccagagcccacuuuuuuuucuuuuuuugaaauaaaauagccugucuuucagaucucaaaggcucuuuucagagccaccaaaaaaaaaaaaaaaaaaaaaaaaaaaaaaaaaaaaaaaaaaaaaaaaaaaaaaaaaaaaaaaaaaaaaaaaaaaaaaaaaaaaaaaaaaaaaaaaaaaaa

SEQ ID NO: 8117 - RNA, 851 nt, Artificial Sequence
  mRNA Design a-1 (hSL-A100) comprising derived and/or modified sequence from Pf(3D7)__XP_001351122.1__HsALB_Pf-CSP(19-192) (opt3)
aggagagucccgcagucggcguccagcggcucugcuuguucgugugugugucguugcaggccuuauucaagcuuaccaugaagugggugaccuucaucagccugcucuuucuuuucuccucugccuacucacuguuucaggaguaucaaugcuacggcaguagcuccaacacaagagucuugaaugaauuaaacuaugacaaugcugggacuaaccuguacaaugagcuagaaaugaacuauuacggaaaacaggagaauugguauucucucaagaaaaacucgaggucacugggugaaaaugaugacggcaacaaugaggauaacgagaaacuucggaagcccaagcacaagaaacugaagcagccugcagacgggaauccagauccgaacgccaaucccaacguugacccuaacgcgaauccaaacguggaucccaaugcuaacccuaauguagacccaaacgccaaucccaacgcaaauccuaacgccaauccaaacgcuaauccgaacgcaaaucccaacgccaacccuaaugcuaacccaaaugccaaccccaaugcgaacccuaaugcaaacccaaaugccaaccccaaugcuaacccgaaugccaacccuaaugcaaaccccaacgcuaauccaaacgccaauccuugaggacuagucccuguucccagagcccacuuuuuuuucuuuuuuugaaauaaaauagccugucuuucagaucucaaaggcucuuuucagagccaccaaaaaaaaaaaaaaaaaaaaaaaaaaaaaaaaaaaaaaaaaaaaaaaaaaaaaaaaaaaaaaaaaaaaaaaaaaaaaaaaaaaaaaaaaaaaaaaaaaaaa

SEQ ID NO: 8118 - RNA, 1091 nt, Artificial Sequence
  mRNA Design a-1 (hSL-A100) comprising derived and/or modified sequence from Pf(3D7)__XP_001351122.1__HsALB_Pf-CSP(19-272) (opt3)
aggagagucccgcagucggcguccagcggcucugcuuguucgugugugugucguugcaggccuuauucaagcuuaccaugaagugggugaccuucaucagccugcucuuucuuuucuccucugccuacucacuguuucaggaguaucaaugcuacggcaguagcuccaacacaagagucuugaaugaauuaaacuaugacaaugcugggacuaaccuguacaaugagcuagaaaugaacuauuacggaaaacaggagaauugguauucucucaagaaaaacucgaggucacugggugaaaaugaugacggcaacaaugaggauaacgagaaacuucggaagcccaagcacaagaaacugaagcagccugcagacgggaauccagauccgaacgccaaucccaacguugacccuaacgcgaauccaaacguggaucccaaugcuaacccuaauguagacccaaacgccaaucccaacgcaaauccuaacgccaauccaaacgcuaauccgaacgcaaaucccaacgccaacccuaaugcuaacccaaaugccaaccccaaugcgaacccuaaugcaaacccaaaugccaaccccaaugcuaacccgaaugccaacccuaaugcaaaccccaacgcuaauccaaacgccaauccuaacgcgaaucccaacguggauccaaaugccaaccccaaugcaaacccuaaugcuaacccaaaugccaacccgaaugcuaaccccaacgccaauccuaacgcaaauccaaacgccaaucccaacgcuaauccuaacgcgaauccaaacgcaaaucccaacgccaauccgaacgcuaauccuaacgccaauccaaacgcaaaccccaaugccaacccuaaugcuaaccccaaugccaacccaugaggacuagucccuguucccagagcccacuuuuuuuucuuuuuuugaaauaaaauagccugucuuucagaucucaaaggcucuuuucagagccaccaaaaaaaaaaaaaaaaaaaaaaaaaaaaaaaaaaaaaaaaaaaaaaaaaaaaaaaaaaaaaaaaaaaaaaaaaaaaaaaaaaaaaaaaaaaaaaaaaaaaa

SEQ ID NO: 8119 - RNA, 1253 nt, Artificial Sequence
  mRNA Design a-1 (hSL-A100) comprising derived and/or modified sequence from Pf(3D7)__XP_001351122.1__HsALB_Pf-CSP(19-272)_L(AAY)_Pf-CSP(310-3 27)_L(AAY)_Pf-CSP(346-375) (opt3)
aggagagucccgcagucggcguccagcggcucugcuuguucgugugugugucguugcaggccuuauucaagcuuaccaugaagugggugaccuucaucagccugcucuuucuuuucuccucugccuacucacuguuucaggaguaucaaugcuacggcaguagcuccaacacaagagucuugaaugaauuaaacuaugacaaugcugggacuaaccuguacaaugagcuagaaaugaacuauuacggaaaacaggagaauugguauucucucaagaaaaacucgaggucacugggugaaaaugaugacggcaacaaugaggauaacgagaaacuucggaagcccaagcacaagaaacugaagcagccugcagacgggaauccagauccgaacgccaaucccaacguugacccuaacgcgaauccaaacguggaucccaaugcuaacccuaauguagacccaaacgccaaucccaacgcaaauccuaacgccaauccaaacgcuaauccgaacgcaaaucccaacgccaacccuaaugcuaacccaaaugccaaccccaaugcgaacccuaaugcaaacccaaaugccaaccccaaugcuaacccgaaugccaacccuaaugcaaaccccaacgcuaauccaaacgccaauccuaacgcgaaucccaacguggauccaaaugccaaccccaaugcaaacccuaaugcuaacccaaaugccaacccgaaugcuaaccccaacgccaauccuaacgcaaauccaaacgccaaucccaacgcuaauccuaacgcgaauccaaacgcaaaucccaacgccaauccgaacgcuaauccuaacgccaauccaaacgcaaaccccaaugccaacccuaaugcuaaccccaaugccaacccagcagcguacgaaccuagcgacaaacauauuaaggaguacuugaauaaaauacagaacagucucgcugccuauaucaagcccggauccgcaaauaagccaaaagaugaacuggacuacgccaacgauauugagaagaaaaucuguaagauggagaaaugcucuugaggacuagucccuguucccagagcccacuuuuuuuucuuuuuuugaaauaaaauagccugucuuucagaucucaaaggcucuuuucagagccaccaaaaaaaaaaaaaaaaaaaaaaaaaaaaaaaaaaaaaaaaaaaaaaaaaaaaaaaaaaaaaaaaaaaaaaaaaaaaaaaaaaaaaaaaaaaaaaaaaaaaa

SEQ ID NO: 8120 - RNA, 1214 nt, Artificial Sequence
  mRNA Design a-1 (hSL-A100) comprising derived and/or modified sequence from Pf(3D7)__XP_001351122.1__HsALB_Pf-CSP(19-272)_L(AAY)_Pf-CSP(346-3 65)_L(AAY)_P2 (opt3)
aggagagucccgcagucggcguccagcggcucugcuuguucgugugugugucguugcaggccuuauucaagcuuaccaugaagugggugaccuucaucagccugcucuuucuuuucuccucugccuacucacuguuucaggaguaucaaugcuacggcaguagcuccaacacaagagucuugaaugaauuaaacuaugacaaugcugggacuaaccuguacaaugagcuagaaaugaacuauuacggaaaacaggagaauugguauucucucaagaaaaacucgaggucacugggugaaaaugaugacggcaacaaugaggauaacgagaaacuucggaagcccaagcacaagaaacugaagcagccugcagacgggaauccagauccgaacgccaaucccaacguugacccuaacgcgaauccaaacguggaucccaaugcuaacccuaauguagacccaaacgccaaucccaacgcaaauccuaacgccaauccaaacgcuaauccgaacgcaaaucccaacgccaacccuaaugcuaacccaaaugccaaccccaaugcgaacccuaaugcaaacccaaaugccaaccccaaugcuaacccgaaugccaacccuaaugcaaaccccaacgcuaauccaaacgccaauccuaacgcgaaucccaacguggauccaaaugccaaccccaaugcaaacccuaaugcuaacccaaaugccaacccgaaugcuaaccccaacgccaauccuaacgcaaauccaaacgccaaucccaacgcuaauccuaacgcgaauccaaacgcaaaucccaacgccaauccgaacgcuaauccuaacgccaauccaaacgcaaaccccaaugccaacccuaaugcuaaccccaaugccaacccagcagcguacauuaaaccuggaagcgcuaauaagcccaaagacgaauuggauuacgccaacgacauagaggcagccuaucaguacaucaaggcuaauaguaaguucauuggcaucacggaacucugaggacuagucccuguucccagagcccacuuuuuuuucuuuuuuugaaauaaaauagccugucuuucagaucucaaaggcucuuuucagagccaccaaaaaaaaaaaaaaaaaaaaaaaaaaaaaaaaaaaaaaaaaaaaaaaaaaaaaaaaaaaaaaaaaaaaaaaaaaaaaaaaaaaaaaaaaaaaaaaaaaaaa

SEQ ID NO: 8121 - RNA, 1208 nt, Artificial Sequence
  mRNA Design a-1 (hSL-A100) comprising derived and/or modified sequence from Pf(3D7)__XP_001351122.1__HsALB_Pf-CSP(19-272)_L(AAY)_Pf-CSP(346-3 65)_L(AAY)_PADRE (opt3)
aggagagucccgcagucggcguccagcggcucugcuuguucgugugugugucguugcaggccuuauucaagcuuaccaugaagugggugaccuucaucagccugcucuuucuuuucuccucugccuacucacuguuucaggaguaucaaugcuacggcaguagcuccaacacaagagucuugaaugaauuaaacuaugacaaugcugggacuaaccuguacaaugagcuagaaaugaacuauuacggaaaacaggagaauugguauucucucaagaaaaacucgaggucacugggugaaaaugaugacggcaacaaugaggauaacgagaaacuucggaagcccaagcacaagaaacugaagcagccugcagacgggaauccagauccgaacgccaaucccaacguugacccuaacgcgaauccaaacguggaucccaaugcuaacccuaauguagacccaaacgccaaucccaacgcaaauccuaacgccaauccaaacgcuaauccgaacgcaaaucccaacgccaacccuaaugcuaacccaaaugccaaccccaaugcgaacccuaaugcaaacccaaaugccaaccccaaugcuaacccgaaugccaacccuaaugcaaaccccaacgcuaauccaaacgccaauccuaacgcgaaucccaacguggauccaaaugccaaccccaaugcaaacccuaaugcuaacccaaaugccaacccgaaugcuaaccccaacgccaauccuaacgcaaauccaaacgccaaucccaacgcuaauccuaacgcgaauccaaacgcaaaucccaacgccaauccgaacgcuaauccuaacgccaauccaaacgcaaaccccaaugccaacccuaaugcuaaccccaaugccaacccagcagcguacauuaaaccuggaagcgcuaauaagcccaaagacgaauuggauuacgccaacgacauagaggcagccuaugcuaaguucgucgccgcauggacgcucaaggcugccgcgugaggacuagucccuguucccagagcccacuuuuuuuucuuuuuuugaaauaaaauagccugucuuucagaucucaaaggcucuuuucagagccaccaaaaaaaaaaaaaaaaaaaaaaaaaaaaaaaaaaaaaaaaaaaaaaaaaaaaaaaaaaaaaaaaaaaaaaaaaaaaaaaaaaaaaaaaaaaaaaaaaaaaa

SEQ ID NO: 8122 - RNA, 1265 nt, Artificial Sequence
  mRNA Design a-1 (hSL-A100) comprising derived and/or modified sequence from Pf(3D7)__XP_001351122.1__HsALB_Pf-CSP(19-272)_L(G4S)_Pf-CSP(310-3 27)_L(G4S)_Pf-CSP(346-375) (opt3)
aggagagucccgcagucggcguccagcggcucugcuuguucgugugugugucguugcaggccuuauucaagcuuaccaugaagugggugaccuucaucagccugcucuuucuuuucuccucugccuacucacuguuucaggaguaucaaugcuacggcaguagcuccaacacaagagucuugaaugaauuaaacuaugacaaugcugggacuaaccuguacaaugagcuagaaaugaacuauuacggaaaacaggagaauugguauucucucaagaaaaacucgaggucacugggugaaaaugaugacggcaacaaugaggauaacgagaaacuucggaagcccaagcacaagaaacugaagcagccugcagacgggaauccagauccgaacgccaaucccaacguugacccuaacgcgaauccaaacguggaucccaaugcuaacccuaauguagacccaaacgccaaucccaacgcaaauccuaacgccaauccaaacgcuaauccgaacgcaaaucccaacgccaacccuaaugcuaacccaaaugccaaccccaaugcgaacccuaaugcaaacccaaaugccaaccccaaugcuaacccgaaugccaacccuaaugcaaaccccaacgcuaauccaaacgccaauccuaacgcgaaucccaacguggauccaaaugccaaccccaaugcaaacccuaaugcuaacccaaaugccaacccgaaugcuaaccccaacgccaauccuaacgcaaauccaaacgccaaucccaacgcuaauccuaacgcgaauccaaacgcaaaucccaacgccaauccgaacgcuaauccuaacgccaauccaaacgcaaaccccaaugccaacccuaaugcuaaccccaaugccaacccaggaggcggugggagcgaaccuagugacaaacauauuaaggaguacuugaauaaaauacagaacucccucggaggcggcgggucuaucaagcccggaagcgcaaauaagccaaaagaugaacuggacuacgcgaacgauauugagaagaaaaucuguaagauggagaaaugcuccugaggacuagucccuguucccagagcccacuuuuuuuucuuuuuuugaaauaaaauagccugucuuucagaucucaaaggcucuuuucagagccaccaaaaaaaaaaaaaaaaaaaaaaaaaaaaaaaaaaaaaaaaaaaaaaaaaaaaaaaaaaaaaaaaaaaaaaaaaaaaaaaaaaaaaaaaaaaaaaaaaaaaa

SEQ ID NO: 8123 - RNA, 1250 nt, Artificial Sequence
  mRNA Design a-1 (hSL-A100) comprising derived and/or modified sequence from Pf(3D7)__XP_001351122.1__HsALB_Pf-CSP(19-272)_L(G4S)_Pf-CSP(310-3 27)_Pf-CSP(346-375) (opt3)
aggagagucccgcagucggcguccagcggcucugcuuguucgugugugugucguugcaggccuuauucaagcuuaccaugaagugggugaccuucaucagccugcucuuucuuuucuccucugccuacucacuguuucaggaguaucaaugcuacggcaguagcuccaacacaagagucuugaaugaauuaaacuaugacaaugcugggacuaaccuguacaaugagcuagaaaugaacuauuacggaaaacaggagaauugguauucucucaagaaaaacucgaggucacugggugaaaaugaugacggcaacaaugaggauaacgagaaacuucggaagcccaagcacaagaaacugaagcagccugcagacgggaauccagauccgaacgccaaucccaacguugacccuaacgcgaauccaaacguggaucccaaugcuaacccuaauguagacccaaacgccaaucccaacgcaaauccuaacgccaauccaaacgcuaauccgaacgcaaaucccaacgccaacccuaaugcuaacccaaaugccaaccccaaugcgaacccuaaugcaaacccaaaugccaaccccaaugcuaacccgaaugccaacccuaaugcaaaccccaacgcuaauccaaacgccaauccuaacgcgaaucccaacguggauccaaaugccaaccccaaugcaaacccuaaugcuaacccaaaugccaacccgaaugcuaaccccaacgccaauccuaacgcaaauccaaacgccaaucccaacgcuaauccuaacgcgaauccaaacgcaaaucccaacgccaauccgaacgcuaauccuaacgccaauccaaacgcaaaccccaaugccaacccuaaugcuaaccccaaugccaacccaggaggcggugggagcgaaccuagugacaaacauauuaaggaguacuugaauaaaauacagaacucccucaucaagcccggaucugcaaauaagccaaaagaugaacuggacuacgcgaacgauauugagaagaaaaucuguaagauggagaaaugcagcugaggacuagucccuguucccagagcccacuuuuuuuucuuuuuuugaaauaaaauagccugucuuucagaucucaaaggcucuuuucagagccaccaaaaaaaaaaaaaaaaaaaaaaaaaaaaaaaaaaaaaaaaaaaaaaaaaaaaaaaaaaaaaaaaaaaaaaaaaaaaaaaaaaaaaaaaaaaaaaaaaaaaa

SEQ ID NO: 8124 - RNA, 1250 nt, Artificial Sequence
  mRNA Design a-1 (hSL-A100) comprising derived and/or modified sequence from Pf(3D7)__XP_001351122.1__HsALB_Pf-CSP(19-325) (opt3)
aggagagucccgcagucggcguccagcggcucugcuuguucgugugugugucguugcaggccuuauucaagcuuaccaugaagugggugaccuucaucagccugcucuuucuuuucuccucugccuacucacuguuucaggaguaucaaugcuacggcaguagcuccaacacaagagucuugaaugaauuaaacuaugacaaugcugggacuaaccuguacaaugagcuagaaaugaacuauuacggaaaacaggagaauugguauucucucaagaaaaacucgaggucacugggugaaaaugaugacggcaacaaugaggauaacgagaaacuucggaagcccaagcacaagaaacugaagcagccugcagacgggaauccagauccgaacgccaaucccaacguugacccuaacgcgaauccaaacguggaucccaaugcuaacccuaauguagacccaaacgccaaucccaacgcaaauccuaacgccaauccaaacgcuaauccgaacgcaaaucccaacgccaacccuaaugcuaacccaaaugccaaccccaaugcgaacccuaaugcaaacccaaaugccaaccccaaugcuaacccgaaugccaacccuaaugcaaaccccaacgcuaauccaaacgccaauccuaacgcgaaucccaacguggauccaaaugccaaccccaaugcaaacccuaaugcuaacccaaaugccaacccgaaugcuaaccccaacgccaauccuaacgcaaauccaaacgccaaucccaacgcuaauccuaacgcgaauccaaacgcaaaucccaacgccaauccgaacgcuaauccuaacgccaauccaaacgcaaaccccaaugccaacccuaaugcuaaccccaaugccaacccaaauaaaaacaaucagggaaacggccaaggucauaauaugccuaacgaccccaaucgcaacgucgaugaaaaugcaaacgcgaacagcgcugugaagaauaacaauaacgaggaaccaagugacaaacacauuaaggaguacuugaauaagauacagaacugaggacuagucccuguucccagagcccacuuuuuuuucuuuuuuugaaauaaaauagccugucuuucagaucucaaaggcucuuuucagagccaccaaaaaaaaaaaaaaaaaaaaaaaaaaaaaaaaaaaaaaaaaaaaaaaaaaaaaaaaaaaaaaaaaaaaaaaaaaaaaaaaaaaaaaaaaaaaaaaaaaaaa

SEQ ID NO: 8125 - RNA, 1427 nt, Artificial Sequence
  mRNA Design a-1 (hSL-A100) comprising derived and/or modified sequence from Pf(3D7)__XP_001351122.1__HsALB_Pf-CSP(19-384) (opt3)
aggagagucccgcagucggcguccagcggcucugcuuguucgugugugugucguugcaggccuuauucaagcuuaccaugaagugggugaccuucaucagccugcucuuucuuuucuccucugccuacucacuguuucaggaguaucaaugcuacggcaguagcuccaacacaagagucuugaaugaauuaaacuaugacaaugcugggacuaaccuguacaaugagcuagaaaugaacuauuacggaaaacaggagaauugguauucucucaagaaaaacucgaggucacugggugaaaaugaugacggcaacaaugaggauaacgagaaacuucggaagcccaagcacaagaaacugaagcagccugcagacgggaauccagauccgaacgccaaucccaacguugacccuaacgcgaauccaaacguggaucccaaugcuaacccuaauguagacccaaacgccaaucccaacgcaaauccuaacgccaauccaaacgcuaauccgaacgcaaaucccaacgccaacccuaaugcuaacccaaaugccaaccccaaugcgaacccuaaugcaaacccaaaugccaaccccaaugcuaacccgaaugccaacccuaaugcaaaccccaacgcuaauccaaacgccaauccuaacgcgaaucccaacguggauccaaaugccaaccccaaugcaaacccuaaugcuaacccaaaugccaacccgaaugcuaaccccaacgccaauccuaacgcaaauccaaacgccaaucccaacgcuaauccuaacgcgaauccaaacgcaaaucccaacgccaauccgaacgcuaauccuaacgccaauccaaacgcaaaccccaaugccaacccuaaugcuaaccccaaugccaacccaaauaaaaacaaucagggaaacggccaaggucauaauaugccuaacgaccccaaucgcaacgucgaugaaaaugcaaacgcgaacagcgcugugaagaauaacaauaacgaggaaccaagugacaaacacauuaaggaguacuugaauaagauacagaacucccucucuacggaguggagcccguguuccguuaccugcgggaauggaauccaggugcgaauuaaaccuggcucagccaacaagcccaaagaugaacuggacuacgcaaaugacaucgagaagaaaauuuguaagauggaaaaaugcaguagcgucuucaacgugguaaauucuuccugaggacuagucccuguucccagagcccacuuuuuuuucuuuuuuugaaauaaaauagccugucuuucagaucucaaaggcucuuuucagagccaccaaaaaaaaaaaaaaaaaaaaaaaaaaaaaaaaaaaaaaaaaaaaaaaaaaaaaaaaaaaaaaaaaaaaaaaaaaaaaaaaaaaaaaaaaaaaaaaaaaaaa

SEQ ID NO: 8126 - RNA, 1565 nt, Artificial Sequence
  mRNA Design a-1 (hSL-A100) comprising derived and/or modified sequence from Pf(3D7)__XP_001351122.1__HsALB_Pf-CSP(19-384)_TM domain HA (opt3)
aggagagucccgcagucggcguccagcggcucugcuuguucgugugugugucguugcaggccuuauucaagcuuaccaugaagugggugaccuucaucagccugcucuuucuuuucuccucugccuacucacuguuucaggaguaucaaugcuacggcaguagcuccaacacaagagucuugaaugaauuaaacuaugacaaugcugggacuaaccuguacaaugagcuagaaaugaacuauuacggaaaacaggagaauugguauucucucaagaaaaacucgaggucacugggugaaaaugaugacggcaacaaugaggauaacgagaaacuucggaagcccaagcacaagaaacugaagcagccugcagacgggaauccagauccgaacgccaaucccaacguugacccuaacgcgaauccaaacguggaucccaaugcuaacccuaauguagacccaaacgccaaucccaacgcaaauccuaacgccaauccaaacgcuaauccgaacgcaaaucccaacgccaacccuaaugcuaacccaaaugccaaccccaaugcgaacccuaaugcaaacccaaaugccaaccccaaugcuaacccgaaugccaacccuaaugcaaaccccaacgcuaauccaaacgccaauccuaacgcgaaucccaacguggauccaaaugccaaccccaaugcaaacccuaaugcuaacccaaaugccaacccgaaugcuaaccccaacgccaauccuaacgcaaauccaaacgccaaucccaacgcuaauccuaacgcgaauccaaacgcaaaucccaacgccaauccgaacgcuaauccuaacgccaauccaaacgcaaaccccaaugccaacccuaaugcuaaccccaaugccaacccaaauaaaaacaaucagggaaacggccaaggucauaauaugccuaacgaccccaaucgcaacgucgaugaaaaugcaaacgcgaacagcgcugugaagaauaacaauaacgaggaaccaagugacaaacacauuaaggaguacuugaauaagauacagaacucccucucuacggaguggagcccguguuccguuaccugcgggaauggaauccaggugcgaauuaaaccuggcucagccaacaagcccaaagaugaacuggacuacgcaaaugacaucgagaagaaaauuuguaagauggaaaaaugcaguagcgucuucaacgugguaaauucuuccaagcuggagucaacacguaucuaucagauacucgccaucuacagcacuguugcuaguucuuuagugcuggucgugucccuuggcgccauuagcuuuuggauguguucgaacgggucuuugcaaugcagaaucuguauuugaggacuagucccuguucccagagcccacuuuuuuuucuuuuuuugaaauaaaauagccugucuuucagaucucaaaggcucuuuucagagccaccaaaaaaaaaaaaaaaaaaaaaaaaaaaaaaaaaaaaaaaaaaaaaaaaaaaaaaaaaaaaaaaaaaaaaaaaaaaaaaaaaaaaaaaaaaaaaaaaaaaaa

SEQ ID NO: 8127 - RNA, 1277 nt, Artificial Sequence
  mRNA Design a-1 (hSL-A100) comprising derived and/or modified sequence from Pf(3D7)__XP_001351122.1__HsALB_Pf-CSP(82-397) (opt3)
aggagagucccgcagucggcguccagcggcucugcuuguucgugugugugucguugcaggccuuauucaagcuuaccaugaagugggugaccuucaucagccugcucuuucuuuucuccucugccuacucagacaacgagaaacugagaaagcccaaacacaagaaauugaagcagccugcugauggcaauccagacccgaacgcaaaucccaacgucgauccuaaugccaacccaaauguugaccccaacgcgaauccuaacguggauccaaaugcuaaccccaaugccaacccuaaugcaaacccaaacgccaauccgaacgcuaaucccaacgcaaauccuaacgccaauccaaacgcuaaucccaacgccaauccuaacgcgaauccaaacgcaaaucccaacgccaacccgaaugcuaacccuaaugccaaccccaaugcaaacccaaaugcuaacccuaaugccaaccccaauguagacccaaacgcgaaucccaacgccaauccuaacgcaaacccaaaugcuaacccgaaugccaaccccaaugcuaacccuaaugccaacccaaaugcaaaccccaaugccaacccuaaugcuaacccaaaugcgaaccccaacgcaaauccgaacgccaauccuaacgcuaauccaaacgccaaucccaacgcaaauccuaacgccaaucccaacgcuaauccaaacaagaauaaccaggggaauggacagggucauaacaugccuaacgaucccaauaggaacguggacgaaaaugccaacgcaaauagugcggucaaaaacaauaacaaugaggaaccaagcgauaagcacauuaaagaguauuuaaacaagauacaaaauucccugucuacagaauggucgccgugcucagugacuuguggcaacgggauccagguucggauuaaaccuggaagcgcuaauaagcccaaggacgagcuagauuacgccaacgacaucgagaaaaagauuugcaaaauggaaaaguguaguuccguguuuaaugucgugaacucuagcaucggccucauaaugguacuguccuuccuuuuucugaacugaggacuagucccuguucccagagcccacuuuuuuuucuuuuuuugaaauaaaauagccugucuuucagaucucaaaggcucuuuucagagccaccaaaaaaaaaaaaaaaaaaaaaaaaaaaaaaaaaaaaaaaaaaaaaaaaaaaaaaaaaaaaaaaaaaaaaaaaaaaaaaaaaaaaaaaaaaaaaaaaaaaaa

SEQ ID NO: 8128 - RNA, 629 nt, Artificial Sequence
  mRNA Design a-1 (hSL-A100) comprising derived and/or modified sequence from Pf(3D7)__XP_001351122.1__HsALB_Pf-CSP(93-192) (opt3)
aggagagucccgcagucggcguccagcggcucugcuuguucgugugugugucguugcaggccuuauucaagcuuaccaugaagugggugaccuucaucagccugcucuuucuuuucuccucugccuacucaaaacugaagcagcccgcugacggcaacccugauccaaaugcaaacccgaaugucgaccccaacgccaauccuaacguugauccaaaugcgaaccccaauguggacccuaacgcuaauccaaacgccaaucccaacgcaaauccuaacgccaacccaaaugcuaacccgaaugcaaaccccaaugccaacccuaaugcuaacccaaaugccaaccccaaugcgaacccuaaugcaaacccaaaugccaaccccaacgcuaauccgaacgccaauccuaacgcaaaucccaacgcuaauccaugaggacuagucccuguucccagagcccacuuuuuuuucuuuuuuugaaauaaaauagccugucuuucagaucucaaaggcucuuuucagagccaccaaaaaaaaaaaaaaaaaaaaaaaaaaaaaaaaaaaaaaaaaaaaaaaaaaaaaaaaaaaaaaaaaaaaaaaaaaaaaaaaaaaaaaaaaaaaaaaaaaaaa

SEQ ID NO: 8129 - RNA, 869 nt, Artificial Sequence
  mRNA Design a-1 (hSL-A100) comprising derived and/or modified sequence from Pf(3D7)__XP_001351122.1__HsALB_Pf-CSP(93-272) (opt3)
aggagagucccgcagucggcguccagcggcucugcuuguucgugugugugucguugcaggccuuauucaagcuuaccaugaagugggugaccuucaucagccugcucuuucuuuucuccucugccuacucaaaacugaagcagcccgcugacggcaacccugauccaaaugcaaacccgaaugucgaccccaacgccaauccuaacguugauccaaaugcgaaccccaauguggacccuaacgcuaauccaaacgccaaucccaacgcaaauccuaacgccaacccaaaugcuaacccgaaugcaaaccccaaugccaacccuaaugcuaacccaaaugccaaccccaaugcgaacccuaaugcaaacccaaaugccaaccccaacgcuaauccgaacgccaauccuaacgcaaaucccaacgcuaauccaaacgccaauccuaacguagaucccaaugcgaacccaaaugccaaccccaaugcaaacccuaacgcuaauccaaacgccaauccgaacgcuaaucccaacgccaauccuaacgcaaauccaaacgccaaucccaacgcuaauccuaacgcgaauccaaacgcaaaccccaaugccaacccgaaugcuaacccuaaugccaacccaaaugcaaaccccaaugccaacccuaaugcuaaccccugaggacuagucccuguucccagagcccacuuuuuuuucuuuuuuugaaauaaaauagccugucuuucagaucucaaaggcucuuuucagagccaccaaaaaaaaaaaaaaaaaaaaaaaaaaaaaaaaaaaaaaaaaaaaaaaaaaaaaaaaaaaaaaaaaaaaaaaaaaaaaaaaaaaaaaaaaaaaaaaaaaaaa

SEQ ID NO: 8130 - RNA, 1244 nt, Artificial Sequence
  mRNA Design a-1 (hSL-A100) comprising derived and/or modified sequence from Pf(3D7)__XP_001351122.1__HsALB_Pf-CSP(93-397) (opt3)
aggagagucccgcagucggcguccagcggcucugcuuguucgugugugugucguugcaggccuuauucaagcuuaccaugaagugggugaccuucaucagccugcucuuucuuuucuccucugccuacucaaaacugaagcagcccgcugacggcaacccugauccaaaugcaaacccgaaugucgaccccaacgccaauccuaacguugauccaaaugcgaaccccaauguggacccuaacgcuaauccaaacgccaaucccaacgcaaauccuaacgccaacccaaaugcuaacccgaaugcaaaccccaaugccaacccuaaugcuaacccaaaugccaaccccaaugcgaacccuaaugcaaacccaaaugccaaccccaacgcuaauccgaacgccaauccuaacgcaaaucccaacgcuaauccaaacgccaauccuaacguagaucccaaugcgaacccaaaugccaaccccaaugcaaacccuaacgcuaauccaaacgccaauccgaacgcuaaucccaacgccaauccuaacgcaaauccaaacgccaaucccaacgcuaauccuaacgcgaauccaaacgcaaaccccaaugccaacccgaaugcuaacccuaaugccaacccaaaugcaaaccccaaugccaacccuaaugcuaaccccaauaaaaacaaucaagggaacggacagggucacaauaugccaaacgacccuaacagaaauguggaugagaacgccaaugcaaacagugcggucaagaauaacaauaacgaggaacccagcgacaaacauauuaaggaauauuugaauaagauacagaacuccuuaucuacagaguggucgccaugcucagugacuuguggcaaugggauccagguuaggauuaaaccgggaagcgcuaacaagccuaaagaugaacuggacuacgccaaugauaucgagaagaaaauuugcaagauggagaaguguaguuccguguuuaacgucguaaauucuagcaucggccuaauaauggugcucuccuuccuguuucuuaacugaggacuagucccuguucccagagcccacuuuuuuuucuuuuuuugaaauaaaauagccugucuuucagaucucaaaggcucuuuucagagccaccaaaaaaaaaaaaaaaaaaaaaaaaaaaaaaaaaaaaaaaaaaaaaaaaaaaaaaaaaaaaaaaaaaaaaaaaaaaaaaaaaaaaaaaaaaaaaaaaaaaaa

SEQ ID NO: 8131 - RNA, 614 nt, Artificial Sequence
  mRNA Design a-1 (hSL-A100) comprising derived and/or modified sequence from Pf(3D7)__XP_001351122.1__HsALB_Pf-CSP(98-192) (opt3)
aggagagucccgcagucggcguccagcggcucugcuuguucgugugugugucguugcaggccuuauucaagcuuaccaugaagugggugaccuucaucagccugcucuuucuuuucuccucugccuacucagcugacggcaaccccgauccuaaugcaaacccaaaugucgacccgaacgccaaucccaacguugauccuaaugcgaacccaaauguggaccccaacgcuaauccuaacgccaauccaaacgcaaaucccaacgccaacccuaaugcuaacccaaaugcaaacccgaaugccaaccccaaugcuaacccuaaugccaacccaaaugcgaaccccaaugcaaacccuaaugccaacccaaacgcuaaucccaacgccaauccgaacgcaaauccuaacgcuaaucccugaggacuagucccuguucccagagcccacuuuuuuuucuuuuuuugaaauaaaauagccugucuuucagaucucaaaggcucuuuucagagccaccaaaaaaaaaaaaaaaaaaaaaaaaaaaaaaaaaaaaaaaaaaaaaaaaaaaaaaaaaaaaaaaaaaaaaaaaaaaaaaaaaaaaaaaaaaaaaaaaaaaaa

SEQ ID NO: 8132 - RNA, 854 nt, Artificial Sequence
  mRNA Design a-1 (hSL-A100) comprising derived and/or modified sequence from Pf(3D7)__XP_001351122.1__HsALB_Pf-CSP(98-272) (opt3)
aggagagucccgcagucggcguccagcggcucugcuuguucgugugugugucguugcaggccuuauucaagcuuaccaugaagugggugaccuucaucagccugcucuuucuuuucuccucugccuacucagcugacggcaaccccgauccuaaugcaaacccaaaugucgacccgaacgccaaucccaacguugauccuaaugcgaacccaaauguggaccccaacgcuaauccuaacgccaauccaaacgcaaaucccaacgccaacccuaaugcuaacccaaaugcaaacccgaaugccaaccccaaugcuaacccuaaugccaacccaaaugcgaaccccaaugcaaacccuaaugccaacccaaacgcuaaucccaacgccaauccgaacgcaaauccuaacgcuaaucccaacgccaauccaaacguagauccuaaugcgaaccccaaugccaacccaaaugcaaaccccaacgcuaauccuaacgccaauccaaacgcuaauccgaacgccaaucccaacgcaaauccuaacgccaauccaaacgcuaaucccaacgcgaauccuaacgcaaacccaaaugccaaccccaaugcuaacccgaaugccaacccuaaugcaaacccaaaugccaaccccaaugcuaacccuugaggacuagucccuguucccagagcccacuuuuuuuucuuuuuuugaaauaaaauagccugucuuucagaucucaaaggcucuuuucagagccaccaaaaaaaaaaaaaaaaaaaaaaaaaaaaaaaaaaaaaaaaaaaaaaaaaaaaaaaaaaaaaaaaaaaaaaaaaaaaaaaaaaaaaaaaaaaaaaaaaaaaa

SEQ ID NO: 8133 - RNA, 1160 nt, Artificial Sequence
  mRNA Design a-1 (hSL-A100) comprising derived and/or modified sequence from Pf(3D7)__XP_001351122.1__HsALB_Pf-CSP(98-374) (opt3)
aggagagucccgcagucggcguccagcggcucugcuuguucgugugugugucguugcaggccuuauucaagcuuaccaugaagugggugaccuucaucagccugcucuuucuuuucuccucugccuacucagcugacggcaaccccgauccuaaugcaaacccaaaugucgacccgaacgccaaucccaacguugauccuaaugcgaacccaaauguggaccccaacgcuaauccuaacgccaauccaaacgcaaaucccaacgccaacccuaaugcuaacccaaaugcaaacccgaaugccaaccccaaugcuaacccuaaugccaacccaaaugcgaaccccaaugcaaacccuaaugccaacccaaacgcuaaucccaacgccaauccgaacgcaaauccuaacgcuaaucccaacgccaauccaaacguagauccuaaugcgaaccccaaugccaacccaaaugcaaaccccaacgcuaauccuaacgccaauccaaacgcuaauccgaacgccaaucccaacgcaaauccuaacgccaauccaaacgcuaaucccaacgcgaauccuaacgcaaacccaaaugccaaccccaaugcuaacccgaaugccaacccuaaugcaaacccaaaugccaaccccaaugcuaacccuaauaaaaacaaucaggggaacggacaaggucacaauaugcccaacgacccaaacagaaauguggaugagaacgccaaugcaaacagugcggucaagaauaacaauaacgaggaaccuagcgacaaacauauuaaggaauaucugaauaaaauacagaacuccuugucuacagaguggucgcccugcucagugacuuguggcaaugggauccagguuaggauuaagccaggaagcgcuaacaagccgaaagaugaauuagacuacgccaaugauaucgagaagaaaauuugcaagauggagaaauguugaggacuagucccuguucccagagcccacuuuuuuuucuuuuuuugaaauaaaauagccugucuuucagaucucaaaggcucuuuucagagccaccaaaaaaaaaaaaaaaaaaaaaaaaaaaaaaaaaaaaaaaaaaaaaaaaaaaaaaaaaaaaaaaaaaaaaaaaaaaaaaaaaaaaaaaaaaaaaaaaaaaaa

SEQ ID NO: 8134 - RNA, 1229 nt, Artificial Sequence
  mRNA Design a-1 (hSL-A100) comprising derived and/or modified sequence from Pf(3D7)__XP_001351122.1__HsALB_Pf-CSP(98-397) (opt3)
aggagagucccgcagucggcguccagcggcucugcuuguucgugugugugucguugcaggccuuauucaagcuuaccaugaagugggugaccuucaucagccugcucuuucuuuucuccucugccuacucagcugacggcaaccccgauccuaaugcaaacccaaaugucgacccgaacgccaaucccaacguugauccuaaugcgaacccaaauguggaccccaacgcuaauccuaacgccaauccaaacgcaaaucccaacgccaacccuaaugcuaacccaaaugcaaacccgaaugccaaccccaaugcuaacccuaaugccaacccaaaugcgaaccccaaugcaaacccuaaugccaacccaaacgcuaaucccaacgccaauccgaacgcaaauccuaacgcuaaucccaacgccaauccaaacguagauccuaaugcgaaccccaaugccaacccaaaugcaaaccccaacgcuaauccuaacgccaauccaaacgcuaauccgaacgccaaucccaacgcaaauccuaacgccaauccaaacgcuaaucccaacgcgaauccuaacgcaaacccaaaugccaaccccaaugcuaacccgaaugccaacccuaaugcaaacccaaaugccaaccccaaugcuaacccuaauaaaaacaaucaggggaacggacaaggucacaauaugcccaacgacccaaacagaaauguggaugagaacgccaaugcaaacagugcggucaagaauaacaauaacgaggaaccuagcgacaaacauauuaaggaauaucugaauaaaauacagaacuccuugucuacagaguggucgcccugcucagugacuuguggcaaugggauccagguuaggauuaagccaggaagcgcuaacaagccgaaagaugaauuagacuacgccaaugauaucgagaagaaaauuugcaagauggagaaauguaguuccguguuuaacgucguaaauucuagcaucggccugauaauggugcuauccuuccucuuucugaacugaggacuagucccuguucccagagcccacuuuuuuuucuuuuuuugaaauaaaauagccugucuuucagaucucaaaggcucuuuucagagccaccaaaaaaaaaaaaaaaaaaaaaaaaaaaaaaaaaaaaaaaaaaaaaaaaaaaaaaaaaaaaaaaaaaaaaaaaaaaaaaaaaaaaaaaaaaaaaaaaaaaaa

SEQ ID NO: 8135 - RNA, 1556 nt, Artificial Sequence
  mRNA Design a-1 (hSL-A100) comprising derived and/or modified sequence from Pf(3D7)__XP_001351122.1__HsALB_Pf-CSP(199-377)_L(PVTN)_HBsAg (opt3)
aggagagucccgcagucggcguccagcggcucugcuuguucgugugugugucguugcaggccuuauucaagcuuaccaugaagugggugaccuucaucagccugcucuuucuuuucuccucugccuacucagaccccaacgcuaauccuaacgcaaauccaaacgccaauccgaacgcgaaucccaacgcuaauccuaacgccaauccaaacgcaaaucccaacgccaauccuaacgcuaacccaaaugcaaaccccaaugccaacccuaaugcuaacccaaaugccaacccgaaugcgaaccccaaugcaaacccuaaugccaacccaaaugcuaaccccaacgccaauccuaacaaaaauaaccagggcaaugggcaaggacacaacaugccaaaugaucccaacagaaaugucgacgagaacgcaaaugcuaacagugccguuaagaauaacaauaacgaggaaccgagcgauaaacauauuaaggaauaucugaacaaaauacaaaauuccuugucuacagaguggucgccuugcucagugacuugugguaacggcauccagguaaggauuaagcccgggagcgcgaauaagccaaaagacgaauuagauuacgccaacgacaucgagaagaaaauuugcaagauggagaaauguaguuccgugccugucacgaauauggaaaacaucaccucuggauuucugggcccccuacucgugcugcaggcagguuucuuucuucugacacggauauugacuaucccacagagccucgauuccugguggaccucacugaauuuccucgggggaagucccguuugccugggccagaacagccagucuccuacauccaaucacucaccaaccagcuguccgcccauuugcccuggcuaucgcuggauguguuuacgacguuuuaucauuuuccuguuuauccuuuugcugugccuaauauuccuccuggugcuucuggacuaccaggggauguugccagucuguccccucauuccuggaaguacuacaaccaacacggguccaugcaagacuuguaccacacccgcucaaggcaauucuauguuuccguccugcugcuguacuaagccuaccgaugggaacugcacauguaucccaauucccagcucgugggccuucgcuaaauaucugugggagugggccucugugagauuuuccugguuaucacugcucguaccuuucguucagugguucgugggacuuagucccaccgucuggcugagcgcaaucuggaugaugugguacuggggcccauccuuguauucuaucgugagcccuuuuauuccccuacugccaauauucuuuugccucuggguguacaucugaggacuagucccuguucccagagcccacuuuuuuuucuuuuuuugaaauaaaauagccugucuuucagaucucaaaggcucuuuucagagccaccaaaaaaaaaaaaaaaaaaaaaaaaaaaaaaaaaaaaaaaaaaaaaaaaaaaaaaaaaaaaaaaaaaaaaaaaaaaaaaaaaaaaaaaaaaaaaaaaaaaaa

SEQ ID NO: 8136 - RNA, 1466 nt, Artificial Sequence
  mRNA Design a-1 (hSL-A100) comprising derived and/or modified sequence from Pf(3D7)__XP_001351122.1__Pf-CSP (opt4)
aggagagucccgcagucggcguccagcggcucugcuuguucgugugugugucguugcaggccuuauucaagcuuaccaugaugagaaagcuggccauccugagcgugagcagcuuccuguucguggaggcccuguuccaggaguaccagugcuacggcagcagcagcaacaccagagugcugaacgagcugaacuacgacaacgccggcaccaaccuguacaacgagcuggagaugaacuacuacggcaagcaggagaacugguacagccugaagaagaacagcagaagccugggcgagaacgacgacggcaacaacgaggacaacgagaagcugagaaagcccaagcacaagaagcugaagcagcccgccgacggcaaccccgaccccaacgccaaccccaacguggaccccaacgccaaccccaacguggaccccaacgccaaccccaacguggaccccaacgccaaccccaacgccaaccccaacgccaaccccaacgccaaccccaacgccaaccccaacgccaaccccaacgccaaccccaacgccaaccccaacgccaaccccaacgccaaccccaacgccaaccccaacgccaaccccaacgccaaccccaacgccaaccccaacgccaaccccaacgccaaccccaacgccaaccccaacguggaccccaacgccaaccccaacgccaaccccaacgccaaccccaacgccaaccccaacgccaaccccaacgccaaccccaacgccaaccccaacgccaaccccaacgccaaccccaacgccaaccccaacgccaaccccaacgccaaccccaacgccaaccccaacgccaaccccaacgccaaccccaacgccaaccccaacgccaaccccaacgccaaccccaacaagaacaaccagggcaacggccagggccacaacaugcccaacgaccccaacagaaacguggacgagaacgccaacgccaacagcgccgugaagaacaacaacaacgaggagcccagcgacaagcacaucaaggaguaccugaacaagauccagaacagccugagcaccgaguggagccccugcagcgugaccugcggcaacggcauccaggugagaaucaagcccggcagcgccaacaagcccaaggacgagcuggacuacgccaacgacaucgagaagaagaucugcaagauggagaagugcagcagcguguucaacguggugaacagcagcaucggccugaucauggugcugagcuuccuguuccugaacugaggacuagucccuguucccagagcccacuuuuuuuucuuuuuuugaaauaaaauagccugucuuucagaucucaaaggcucuuuucagagccaccaaaaaaaaaaaaaaaaaaaaaaaaaaaaaaaaaaaaaaaaaaaaaaaaaaaaaaaaaaaaaaaaaaaaaaaaaaaaaaaaaaaaaaaaaaaaaaaaaaaaa

SEQ ID NO: 8137 - RNA, 1397 nt, Artificial Sequence
  mRNA Design a-1 (hSL-A100) comprising derived and/or modified sequence from Pf(3D7)__XP_001351122.1__Pf-CSP(1-374) (opt4)
aggagagucccgcagucggcguccagcggcucugcuuguucgugugugugucguugcaggccuuauucaagcuuaccaugaugagaaagcuggccauccugagcgugagcagcuuccuguucguggaggcccuguuccaggaguaccagugcuacggcagcagcagcaacaccagagugcugaacgagcugaacuacgacaacgccggcaccaaccuguacaacgagcuggagaugaacuacuacggcaagcaggagaacugguacagccugaagaagaacagcagaagccugggcgagaacgacgacggcaacaacgaggacaacgagaagcugagaaagcccaagcacaagaagcugaagcagcccgccgacggcaaccccgaccccaacgccaaccccaacguggaccccaacgccaaccccaacguggaccccaacgccaaccccaacguggaccccaacgccaaccccaacgccaaccccaacgccaaccccaacgccaaccccaacgccaaccccaacgccaaccccaacgccaaccccaacgccaaccccaacgccaaccccaacgccaaccccaacgccaaccccaacgccaaccccaacgccaaccccaacgccaaccccaacgccaaccccaacgccaaccccaacgccaaccccaacguggaccccaacgccaaccccaacgccaaccccaacgccaaccccaacgccaaccccaacgccaaccccaacgccaaccccaacgccaaccccaacgccaaccccaacgccaaccccaacgccaaccccaacgccaaccccaacgccaaccccaacgccaaccccaacgccaaccccaacgccaaccccaacgccaaccccaacgccaaccccaacgccaaccccaacaagaacaaccagggcaacggccagggccacaacaugcccaacgaccccaacagaaacguggacgagaacgccaacgccaacagcgccgugaagaacaacaacaacgaggagcccagcgacaagcacaucaaggaguaccugaacaagauccagaacagccugagcaccgaguggagccccugcagcgugaccugcggcaacggcauccaggugagaaucaagcccggcagcgccaacaagcccaaggacgagcuggacuacgccaacgacaucgagaagaagaucugcaagauggagaagugcugaggacuagucccuguucccagagcccacuuuuuuuucuuuuuuugaaauaaaauagccugucuuucagaucucaaaggcucuuuucagagccaccaaaaaaaaaaaaaaaaaaaaaaaaaaaaaaaaaaaaaaaaaaaaaaaaaaaaaaaaaaaaaaaaaaaaaaaaaaaaaaaaaaaaaaaaaaaaaaaaaaaaa

SEQ ID NO: 8138 - RNA, 1250 nt, Artificial Sequence
  mRNA Design a-1 (hSL-A100) comprising derived and/or modified sequence from Pf(3D7)__XP_001351122.1__Pf-CSP(1-325) (opt4)
aggagagucccgcagucggcguccagcggcucugcuuguucgugugugugucguugcaggccuuauucaagcuuaccaugaugagaaagcuggccauccugagcgugagcagcuuccuguucguggaggcccuguuccaggaguaccagugcuacggcagcagcagcaacaccagagugcugaacgagcugaacuacgacaacgccggcaccaaccuguacaacgagcuggagaugaacuacuacggcaagcaggagaacugguacagccugaagaagaacagcagaagccugggcgagaacgacgacggcaacaacgaggacaacgagaagcugagaaagcccaagcacaagaagcugaagcagcccgccgacggcaaccccgaccccaacgccaaccccaacguggaccccaacgccaaccccaacguggaccccaacgccaaccccaacguggaccccaacgccaaccccaacgccaaccccaacgccaaccccaacgccaaccccaacgccaaccccaacgccaaccccaacgccaaccccaacgccaaccccaacgccaaccccaacgccaaccccaacgccaaccccaacgccaaccccaacgccaaccccaacgccaaccccaacgccaaccccaacgccaaccccaacgccaaccccaacguggaccccaacgccaaccccaacgccaaccccaacgccaaccccaacgccaaccccaacgccaaccccaacgccaaccccaacgccaaccccaacgccaaccccaacgccaaccccaacgccaaccccaacgccaaccccaacgccaaccccaacgccaaccccaacgccaaccccaacgccaaccccaacgccaaccccaacgccaaccccaacgccaaccccaacaagaacaaccagggcaacggccagggccacaacaugcccaacgaccccaacagaaacguggacgagaacgccaacgccaacagcgccgugaagaacaacaacaacgaggagcccagcgacaagcacaucaaggaguaccugaacaagauccagaacugaggacuagucccuguucccagagcccacuuuuuuuucuuuuuuugaaauaaaauagccugucuuucagaucucaaaggcucuuuucagagccaccaaaaaaaaaaaaaaaaaaaaaaaaaaaaaaaaaaaaaaaaaaaaaaaaaaaaaaaaaaaaaaaaaaaaaaaaaaaaaaaaaaaaaaaaaaaaaaaaaaaaa

SEQ ID NO: 8139 - RNA, 1466 nt, Artificial Sequence
  mRNA Design a-1 (hSL-A100) comprising derived and/or modified sequence from Pf(3D7)__XP_001351122.1__HsALB_Pf-CSP(19-397) (opt4)
aggagagucccgcagucggcguccagcggcucugcuuguucgugugugugucguugcaggccuuauucaagcuuaccaugaagugggugaccuucaucagccugcuguuccuguucagcagcgccuacagccuguuccaggaguaccagugcuacggcagcagcagcaacaccagagugcugaacgagcugaacuacgacaacgccggcaccaaccuguacaacgagcuggagaugaacuacuacggcaagcaggagaacugguacagccugaagaagaacagcagaagccugggcgagaacgacgacggcaacaacgaggacaacgagaagcugagaaagcccaagcacaagaagcugaagcagcccgccgacggcaaccccgaccccaacgccaaccccaacguggaccccaacgccaaccccaacguggaccccaacgccaaccccaacguggaccccaacgccaaccccaacgccaaccccaacgccaaccccaacgccaaccccaacgccaaccccaacgccaaccccaacgccaaccccaacgccaaccccaacgccaaccccaacgccaaccccaacgccaaccccaacgccaaccccaacgccaaccccaacgccaaccccaacgccaaccccaacgccaaccccaacgccaaccccaacguggaccccaacgccaaccccaacgccaaccccaacgccaaccccaacgccaaccccaacgccaaccccaacgccaaccccaacgccaaccccaacgccaaccccaacgccaaccccaacgccaaccccaacgccaaccccaacgccaaccccaacgccaaccccaacgccaaccccaacgccaaccccaacgccaaccccaacgccaaccccaacgccaaccccaacaagaacaaccagggcaacggccagggccacaacaugcccaacgaccccaacagaaacguggacgagaacgccaacgccaacagcgccgugaagaacaacaacaacgaggagcccagcgacaagcacaucaaggaguaccugaacaagauccagaacagccugagcaccgaguggagccccugcagcgugaccugcggcaacggcauccaggugagaaucaagcccggcagcgccaacaagcccaaggacgagcuggacuacgccaacgacaucgagaagaagaucugcaagauggagaagugcagcagcguguucaacguggugaacagcagcaucggccugaucauggugcugagcuuccuguuccugaacugaggacuagucccuguucccagagcccacuuuuuuuucuuuuuuugaaauaaaauagccugucuuucagaucucaaaggcucuuuucagagccaccaaaaaaaaaaaaaaaaaaaaaaaaaaaaaaaaaaaaaaaaaaaaaaaaaaaaaaaaaaaaaaaaaaaaaaaaaaaaaaaaaaaaaaaaaaaaaaaaaaaaa

SEQ ID NO: 8140 - RNA, 1484 nt, Artificial Sequence
  mRNA Design a-1 (hSL-A100) comprising derived and/or modified sequence from Pf(3D7)__XP_001351122.1__HsIns-iso1_Pf-CSP(19-397) (opt4)
aggagagucccgcagucggcguccagcggcucugcuuguucgugugugugucguugcaggccuuauucaagcuuaccauggcccuguggaugagacugcugccccugcuggcccugcuggcccuguggggccccgaccccgccgccgcccuguuccaggaguaccagugcuacggcagcagcagcaacaccagagugcugaacgagcugaacuacgacaacgccggcaccaaccuguacaacgagcuggagaugaacuacuacggcaagcaggagaacugguacagccugaagaagaacagcagaagccugggcgagaacgacgacggcaacaacgaggacaacgagaagcugagaaagcccaagcacaagaagcugaagcagcccgccgacggcaaccccgaccccaacgccaaccccaacguggaccccaacgccaaccccaacguggaccccaacgccaaccccaacguggaccccaacgccaaccccaacgccaaccccaacgccaaccccaacgccaaccccaacgccaaccccaacgccaaccccaacgccaaccccaacgccaaccccaacgccaaccccaacgccaaccccaacgccaaccccaacgccaaccccaacgccaaccccaacgccaaccccaacgccaaccccaacgccaaccccaacgccaaccccaacguggaccccaacgccaaccccaacgccaaccccaacgccaaccccaacgccaaccccaacgccaaccccaacgccaaccccaacgccaaccccaacgccaaccccaacgccaaccccaacgccaaccccaacgccaaccccaacgccaaccccaacgccaaccccaacgccaaccccaacgccaaccccaacgccaaccccaacgccaaccccaacgccaaccccaacaagaacaaccagggcaacggccagggccacaacaugcccaacgaccccaacagaaacguggacgagaacgccaacgccaacagcgccgugaagaacaacaacaacgaggagcccagcgacaagcacaucaaggaguaccugaacaagauccagaacagccugagcaccgaguggagccccugcagcgugaccugcggcaacggcauccaggugagaaucaagcccggcagcgccaacaagcccaaggacgagcuggacuacgccaacgacaucgagaagaagaucugcaagauggagaagugcagcagcguguucaacguggugaacagcagcaucggccugaucauggugcugagcuuccuguuccugaacugaggacuagucccuguucccagagcccacuuuuuuuucuuuuuuugaaauaaaauagccugucuuucagaucucaaaggcucuuuucagagccaccaaaaaaaaaaaaaaaaaaaaaaaaaaaaaaaaaaaaaaaaaaaaaaaaaaaaaaaaaaaaaaaaaaaaaaaaaaaaaaaaaaaaaaaaaaaaaaaaaaaaa

SEQ ID NO: 8141 - RNA, 1463 nt, Artificial Sequence
  mRNA Design a-1 (hSL-A100) comprising derived and/or modified sequence from Pf(3D7)__XP_001351122.1__HsSPARC_Pf-CSP(19-397) (opt4)
aggagagucccgcagucggcguccagcggcucugcuuguucgugugugugucguugcaggccuuauucaagcuuaccaugagagccuggaucuucuuccugcugugccuggccggcagagcccuggcccuguuccaggaguaccagugcuacggcagcagcagcaacaccagagugcugaacgagcugaacuacgacaacgccggcaccaaccuguacaacgagcuggagaugaacuacuacggcaagcaggagaacugguacagccugaagaagaacagcagaagccugggcgagaacgacgacggcaacaacgaggacaacgagaagcugagaaagcccaagcacaagaagcugaagcagcccgccgacggcaaccccgaccccaacgccaaccccaacguggaccccaacgccaaccccaacguggaccccaacgccaaccccaacguggaccccaacgccaaccccaacgccaaccccaacgccaaccccaacgccaaccccaacgccaaccccaacgccaaccccaacgccaaccccaacgccaaccccaacgccaaccccaacgccaaccccaacgccaaccccaacgccaaccccaacgccaaccccaacgccaaccccaacgccaaccccaacgccaaccccaacgccaaccccaacguggaccccaacgccaaccccaacgccaaccccaacgccaaccccaacgccaaccccaacgccaaccccaacgccaaccccaacgccaaccccaacgccaaccccaacgccaaccccaacgccaaccccaacgccaaccccaacgccaaccccaacgccaaccccaacgccaaccccaacgccaaccccaacgccaaccccaacgccaaccccaacgccaaccccaacaagaacaaccagggcaacggccagggccacaacaugcccaacgaccccaacagaaacguggacgagaacgccaacgccaacagcgccgugaagaacaacaacaacgaggagcccagcgacaagcacaucaaggaguaccugaacaagauccagaacagccugagcaccgaguggagccccugcagcgugaccugcggcaacggcauccaggugagaaucaagcccggcagcgccaacaagcccaaggacgagcuggacuacgccaacgacaucgagaagaagaucugcaagauggagaagugcagcagcguguucaacguggugaacagcagcaucggccugaucauggugcugagcuuccuguuccugaacugaggacuagucccuguucccagagcccacuuuuuuuucuuuuuuugaaauaaaauagccugucuuucagaucucaaaggcucuuuucagagccaccaaaaaaaaaaaaaaaaaaaaaaaaaaaaaaaaaaaaaaaaaaaaaaaaaaaaaaaaaaaaaaaaaaaaaaaaaaaaaaaaaaaaaaaaaaaaaaaaaaaaa

SEQ ID NO: 8142 - RNA, 1466 nt, Artificial Sequence
  mRNA Design a-1 (hSL-A100) comprising derived and/or modified sequence from Pf(3D7)__XP_001351122.1__IgE_Pf-CSP(19-397) (opt4)
aggagagucccgcagucggcguccagcggcucugcuuguucgugugugugucguugcaggccuuauucaagcuuaccauggacuggaccuggauccuguuccugguggccgccgccaccagagugcacagccuguuccaggaguaccagugcuacggcagcagcagcaacaccagagugcugaacgagcugaacuacgacaacgccggcaccaaccuguacaacgagcuggagaugaacuacuacggcaagcaggagaacugguacagccugaagaagaacagcagaagccugggcgagaacgacgacggcaacaacgaggacaacgagaagcugagaaagcccaagcacaagaagcugaagcagcccgccgacggcaaccccgaccccaacgccaaccccaacguggaccccaacgccaaccccaacguggaccccaacgccaaccccaacguggaccccaacgccaaccccaacgccaaccccaacgccaaccccaacgccaaccccaacgccaaccccaacgccaaccccaacgccaaccccaacgccaaccccaacgccaaccccaacgccaaccccaacgccaaccccaacgccaaccccaacgccaaccccaacgccaaccccaacgccaaccccaacgccaaccccaacgccaaccccaacguggaccccaacgccaaccccaacgccaaccccaacgccaaccccaacgccaaccccaacgccaaccccaacgccaaccccaacgccaaccccaacgccaaccccaacgccaaccccaacgccaaccccaacgccaaccccaacgccaaccccaacgccaaccccaacgccaaccccaacgccaaccccaacgccaaccccaacgccaaccccaacgccaaccccaacaagaacaaccagggcaacggccagggccacaacaugcccaacgaccccaacagaaacguggacgagaacgccaacgccaacagcgccgugaagaacaacaacaacgaggagcccagcgacaagcacaucaaggaguaccugaacaagauccagaacagccugagcaccgaguggagccccugcagcgugaccugcggcaacggcauccaggugagaaucaagcccggcagcgccaacaagcccaaggacgagcuggacuacgccaacgacaucgagaagaagaucugcaagauggagaagugcagcagcguguucaacguggugaacagcagcaucggccugaucauggugcugagcuuccuguuccugaacugaggacuagucccuguucccagagcccacuuuuuuuucuuuuuuugaaauaaaauagccugucuuucagaucucaaaggcucuuuucagagccaccaaaaaaaaaaaaaaaaaaaaaaaaaaaaaaaaaaaaaaaaaaaaaaaaaaaaaaaaaaaaaaaaaaaaaaaaaaaaaaaaaaaaaaaaaaaaaaaaaaaaa

SEQ ID NO: 8143 - RNA, 1631 nt, Artificial Sequence
  mRNA Design a-1 (hSL-A100) comprising derived and/or modified sequence from Pf(3D7)__XP_001351122.1__Pf-CSP_L(G4SG4)_TM domain HA (opt4)
aggagagucccgcagucggcguccagcggcucugcuuguucgugugugugucguugcaggccuuauucaagcuuaccaugaugagaaagcuggccauccugagcgugagcagcuuccuguucguggaggcccuguuccaggaguaccagugcuacggcagcagcagcaacaccagagugcugaacgagcugaacuacgacaacgccggcaccaaccuguacaacgagcuggagaugaacuacuacggcaagcaggagaacugguacagccugaagaagaacagcagaagccugggcgagaacgacgacggcaacaacgaggacaacgagaagcugagaaagcccaagcacaagaagcugaagcagcccgccgacggcaaccccgaccccaacgccaaccccaacguggaccccaacgccaaccccaacguggaccccaacgccaaccccaacguggaccccaacgccaaccccaacgccaaccccaacgccaaccccaacgccaaccccaacgccaaccccaacgccaaccccaacgccaaccccaacgccaaccccaacgccaaccccaacgccaaccccaacgccaaccccaacgccaaccccaacgccaaccccaacgccaaccccaacgccaaccccaacgccaaccccaacgccaaccccaacguggaccccaacgccaaccccaacgccaaccccaacgccaaccccaacgccaaccccaacgccaaccccaacgccaaccccaacgccaaccccaacgccaaccccaacgccaaccccaacgccaaccccaacgccaaccccaacgccaaccccaacgccaaccccaacgccaaccccaacgccaaccccaacgccaaccccaacgccaaccccaacgccaaccccaacaagaacaaccagggcaacggccagggccacaacaugcccaacgaccccaacagaaacguggacgagaacgccaacgccaacagcgccgugaagaacaacaacaacgaggagcccagcgacaagcacaucaaggaguaccugaacaagauccagaacagccugagcaccgaguggagccccugcagcgugaccugcggcaacggcauccaggugagaaucaagcccggcagcgccaacaagcccaaggacgagcuggacuacgccaacgacaucgagaagaagaucugcaagauggagaagugcagcagcguguucaacguggugaacagcagcaucggccugaucauggugcugagcuuccuguuccugaacggcggcggcggcagcggcggcggcggcaagcuggagagcaccagaaucuaccagauccuggccaucuacagcaccguggccagcagccuggugcugguggugagccugggcgccaucagcuucuggaugugcagcaacggcagccugcagugcagaaucugcaucugaggacuagucccuguucccagagcccacuuuuuuuucuuuuuuugaaauaaaauagccugucuuucagaucucaaaggcucuuuucagagccaccaaaaaaaaaaaaaaaaaaaaaaaaaaaaaaaaaaaaaaaaaaaaaaaaaaaaaaaaaaaaaaaaaaaaaaaaaaaaaaaaaaaaaaaaaaaaaaaaaaaaa

SEQ ID NO: 8144 - RNA, 1505 nt, Artificial Sequence
  mRNA Design a-1 (hSL-A100) comprising derived and/or modified sequence from Pf(3D7)__XP_001351122.1__Pf-CSP(199-377)_L(PVTN)_HBsAg (opt4)
aggagagucccgcagucggcguccagcggcucugcuuguucgugugugugucguugcaggccuuauucaagcuuaccauggaccccaacgccaaccccaacgccaaccccaacgccaaccccaacgccaaccccaacgccaaccccaacgccaaccccaacgccaaccccaacgccaaccccaacgccaaccccaacgccaaccccaacgccaaccccaacgccaaccccaacgccaaccccaacgccaaccccaacgccaaccccaacgccaaccccaacgccaaccccaacgccaaccccaacaagaacaaccagggcaacggccagggccacaacaugcccaacgaccccaacagaaacguggacgagaacgccaacgccaacagcgccgugaagaacaacaacaacgaggagcccagcgacaagcacaucaaggaguaccugaacaagauccagaacagccugagcaccgaguggagccccugcagcgugaccugcggcaacggcauccaggugagaaucaagcccggcagcgccaacaagcccaaggacgagcuggacuacgccaacgacaucgagaagaagaucugcaagauggagaagugcagcagcgugcccgugaccaacauggagaacaucaccagcggcuuccugggcccccugcuggugcugcaggccggcuucuuccugcugaccagaauccugaccaucccccagagccuggacagcugguggaccagccugaacuuccugggcggcagccccgugugccugggccagaacagccagagccccaccagcaaccacagccccaccagcugcccccccaucugccccggcuacagauggaugugccugagaagauucaucaucuuccuguucauccugcugcugugccugaucuuccugcuggugcugcuggacuaccagggcaugcugcccgugugcccccugauccccggcagcaccaccaccaacaccggccccugcaagaccugcaccacccccgcccagggcaacagcauguuccccagcugcugcugcaccaagcccaccgacggcaacugcaccugcauccccauccccagcagcugggccuucgccaaguaccugugggagugggccagcgugagauucagcuggcugagccugcuggugcccuucgugcagugguucgugggccugagccccaccguguggcugagcgccaucuggaugaugugguacuggggccccagccuguacagcaucgugagccccuucaucccccugcugcccaucuucuucugccuguggguguacaucugaggacuagucccuguucccagagcccacuuuuuuuucuuuuuuugaaauaaaauagccugucuuucagaucucaaaggcucuuuucagagccaccaaaaaaaaaaaaaaaaaaaaaaaaaaaaaaaaaaaaaaaaaaaaaaaaaaaaaaaaaaaaaaaaaaaaaaaaaaaaaaaaaaaaaaaaaaaaaaaaaaaaa

SEQ ID NO: 8145 - RNA, 1547 nt, Artificial Sequence
  mRNA Design a-1 (hSL-A100) comprising derived and/or modified sequence from Pf(3D7)__XP_001351122.1__Pf-CSP(199-387)_L(PVTN)_HBsAg (opt4)
aggagagucccgcagucggcguccagcggcucugcuuguucgugugugugucguugcaggccuuauucaagcuuaccaugauggcccccgaccccaacgccaaccccaacgccaaccccaacgccaaccccaacgccaaccccaacgccaaccccaacgccaaccccaacgccaaccccaacgccaaccccaacgccaaccccaacgccaaccccaacgccaaccccaacgccaaccccaacgccaaccccaacgccaaccccaacgccaaccccaacgccaaccccaacgccaaccccaacgccaaccccaacaagaacaaccagggcaacggccagggccacaacaugcccaacgaccccaacagaaacguggacgagaacgccaacgccaacagcgccgugaagaacaacaacaacgaggagcccagcgacaagcacaucaaggaguaccugaacaagauccagaacagccugagcaccgaguggagccccugcagcgugaccugcggcaacggcauccaggugagaaucaagcccggcagcgccaacaagcccaaggacgagcuggacuacgccaacgacaucgagaagaagaucugcaagauggagaagugcagcagcguguucaacguggugaacagcagcaucggccugggccccgugaccaacauggagaacaucaccagcggcuuccugggcccccugcuggugcugcaggccggcuucuuccugcugaccagaauccugaccaucccccagagccuggacagcugguggaccagccugaacuuccugggcggcagccccgugugccugggccagaacagccagagccccaccagcaaccacagccccaccagcugcccccccaucugccccggcuacagauggaugugccugagaagauucaucaucuuccuguucauccugcugcugugccugaucuuccugcuggugcugcuggacuaccagggcaugcugcccgugugcccccugauccccggcagcaccaccaccaacaccggccccugcaagaccugcaccacccccgcccagggcaacagcauguuccccagcugcugcugcaccaagcccaccgacggcaacugcaccugcauccccauccccagcagcugggccuucgccaaguaccugugggagugggccagcgugagauucagcuggcugagccugcuggugcccuucgugcagugguucgugggccugagccccaccguguggcugagcgccaucuggaugaugugguacuggggccccagccuguacagcaucgugagccccuucaucccccugcugcccaucuucuucugccuguggguguacaucugaggacuagucccuguucccagagcccacuuuuuuuucuuuuuuugaaauaaaauagccugucuuucagaucucaaaggcucuuuucagagccaccaaaaaaaaaaaaaaaaaaaaaaaaaaaaaaaaaaaaaaaaaaaaaaaaaaaaaaaaaaaaaaaaaaaaaaaaaaaaaaaaaaaaaaaaaaaaaaaaaaaaa

SEQ ID NO: 8146 - RNA, 731 nt, Artificial Sequence
  mRNA Design a-1 (hSL-A100) comprising derived and/or modified sequence from Pf(3D7)__XP_001351122.1__HsALB_Pf-CSP(19-152) (opt4)
aggagagucccgcagucggcguccagcggcucugcuuguucgugugugugucguugcaggccuuauucaagcuuaccaugaagugggugaccuucaucagccugcuguuccuguucagcagcgccuacagccuguuccaggaguaccagugcuacggcagcagcagcaacaccagagugcugaacgagcugaacuacgacaacgccggcaccaaccuguacaacgagcuggagaugaacuacuacggcaagcaggagaacugguacagccugaagaagaacagcagaagccugggcgagaacgacgacggcaacaacgaggacaacgagaagcugagaaagcccaagcacaagaagcugaagcagcccgccgacggcaaccccgaccccaacgccaaccccaacguggaccccaacgccaaccccaacguggaccccaacgccaaccccaacguggaccccaacgccaaccccaacgccaaccccaacgccaaccccaacgccaaccccaacgccaaccccaacgccaaccccugaggacuagucccuguucccagagcccacuuuuuuuucuuuuuuugaaauaaaauagccugucuuucagaucucaaaggcucuuuucagagccaccaaaaaaaaaaaaaaaaaaaaaaaaaaaaaaaaaaaaaaaaaaaaaaaaaaaaaaaaaaaaaaaaaaaaaaaaaaaaaaaaaaaaaaaaaaaaaaaaaaaaa

SEQ ID NO: 8147 - RNA, 851 nt, Artificial Sequence
  mRNA Design a-1 (hSL-A100) comprising derived and/or modified sequence from Pf(3D7)__XP_001351122.1__HsALB_Pf-CSP(19-192) (opt4)
aggagagucccgcagucggcguccagcggcucugcuuguucgugugugugucguugcaggccuuauucaagcuuaccaugaagugggugaccuucaucagccugcuguuccuguucagcagcgccuacagccuguuccaggaguaccagugcuacggcagcagcagcaacaccagagugcugaacgagcugaacuacgacaacgccggcaccaaccuguacaacgagcuggagaugaacuacuacggcaagcaggagaacugguacagccugaagaagaacagcagaagccugggcgagaacgacgacggcaacaacgaggacaacgagaagcugagaaagcccaagcacaagaagcugaagcagcccgccgacggcaaccccgaccccaacgccaaccccaacguggaccccaacgccaaccccaacguggaccccaacgccaaccccaacguggaccccaacgccaaccccaacgccaaccccaacgccaaccccaacgccaaccccaacgccaaccccaacgccaaccccaacgccaaccccaacgccaaccccaacgccaaccccaacgccaaccccaacgccaaccccaacgccaaccccaacgccaaccccaacgccaaccccaacgccaaccccaacgccaaccccugaggacuagucccuguucccagagcccacuuuuuuuucuuuuuuugaaauaaaauagccugucuuucagaucucaaaggcucuuuucagagccaccaaaaaaaaaaaaaaaaaaaaaaaaaaaaaaaaaaaaaaaaaaaaaaaaaaaaaaaaaaaaaaaaaaaaaaaaaaaaaaaaaaaaaaaaaaaaaaaaaaaaa

SEQ ID NO: 8148 - RNA, 1091 nt, Artificial Sequence
  mRNA Design a-1 (hSL-A100) comprising derived and/or modified sequence from Pf(3D7)__XP_001351122.1__HsALB_Pf-CSP(19-272) (opt4)
aggagagucccgcagucggcguccagcggcucugcuuguucgugugugugucguugcaggccuuauucaagcuuaccaugaagugggugaccuucaucagccugcuguuccuguucagcagcgccuacagccuguuccaggaguaccagugcuacggcagcagcagcaacaccagagugcugaacgagcugaacuacgacaacgccggcaccaaccuguacaacgagcuggagaugaacuacuacggcaagcaggagaacugguacagccugaagaagaacagcagaagccugggcgagaacgacgacggcaacaacgaggacaacgagaagcugagaaagcccaagcacaagaagcugaagcagcccgccgacggcaaccccgaccccaacgccaaccccaacguggaccccaacgccaaccccaacguggaccccaacgccaaccccaacguggaccccaacgccaaccccaacgccaaccccaacgccaaccccaacgccaaccccaacgccaaccccaacgccaaccccaacgccaaccccaacgccaaccccaacgccaaccccaacgccaaccccaacgccaaccccaacgccaaccccaacgccaaccccaacgccaaccccaacgccaaccccaacgccaaccccaacgccaaccccaacguggaccccaacgccaaccccaacgccaaccccaacgccaaccccaacgccaaccccaacgccaaccccaacgccaaccccaacgccaaccccaacgccaaccccaacgccaaccccaacgccaaccccaacgccaaccccaacgccaaccccaacgccaaccccaacgccaaccccaacgccaaccccaacgccaaccccaacgccaaccccaacgccaaccccugaggacuagucccuguucccagagcccacuuuuuuuucuuuuuuugaaauaaaauagccugucuuucagaucucaaaggcucuuuucagagccaccaaaaaaaaaaaaaaaaaaaaaaaaaaaaaaaaaaaaaaaaaaaaaaaaaaaaaaaaaaaaaaaaaaaaaaaaaaaaaaaaaaaaaaaaaaaaaaaaaaaaa

SEQ ID NO: 8149 - RNA, 1253 nt, Artificial Sequence
  mRNA Design a-1 (hSL-A100) comprising derived and/or modified sequence from Pf(3D7)__XP_001351122.1__HsALB_Pf-CSP(19-272)_L(AAY)_Pf-CSP(310-3 27)_L(AAY)_Pf-CSP(346-375) (opt4)
aggagagucccgcagucggcguccagcggcucugcuuguucgugugugugucguugcaggccuuauucaagcuuaccaugaagugggugaccuucaucagccugcuguuccuguucagcagcgccuacagccuguuccaggaguaccagugcuacggcagcagcagcaacaccagagugcugaacgagcugaacuacgacaacgccggcaccaaccuguacaacgagcuggagaugaacuacuacggcaagcaggagaacugguacagccugaagaagaacagcagaagccugggcgagaacgacgacggcaacaacgaggacaacgagaagcugagaaagcccaagcacaagaagcugaagcagcccgccgacggcaaccccgaccccaacgccaaccccaacguggaccccaacgccaaccccaacguggaccccaacgccaaccccaacguggaccccaacgccaaccccaacgccaaccccaacgccaaccccaacgccaaccccaacgccaaccccaacgccaaccccaacgccaaccccaacgccaaccccaacgccaaccccaacgccaaccccaacgccaaccccaacgccaaccccaacgccaaccccaacgccaaccccaacgccaaccccaacgccaaccccaacgccaaccccaacguggaccccaacgccaaccccaacgccaaccccaacgccaaccccaacgccaaccccaacgccaaccccaacgccaaccccaacgccaaccccaacgccaaccccaacgccaaccccaacgccaaccccaacgccaaccccaacgccaaccccaacgccaaccccaacgccaaccccaacgccaaccccaacgccaaccccaacgccaaccccaacgccaaccccgccgccuacgagcccagcgacaagcacaucaaggaguaccugaacaagauccagaacagccuggccgccuacaucaagcccggcagcgccaacaagcccaaggacgagcuggacuacgccaacgacaucgagaagaagaucugcaagauggagaagugcagcugaggacuagucccuguucccagagcccacuuuuuuuucuuuuuuugaaauaaaauagccugucuuucagaucucaaaggcucuuuucagagccaccaaaaaaaaaaaaaaaaaaaaaaaaaaaaaaaaaaaaaaaaaaaaaaaaaaaaaaaaaaaaaaaaaaaaaaaaaaaaaaaaaaaaaaaaaaaaaaaaaaaaa

SEQ ID NO: 8150 - RNA, 1214 nt, Artificial Sequence
  mRNA Design a-1 (hSL-A100) comprising derived and/or modified sequence from Pf(3D7)__XP_001351122.1__HsALB_Pf-CSP(19-272)_L(AAY)_Pf-CSP(346-3 65)_L(AAY)_P2 (opt4)
aggagagucccgcagucggcguccagcggcucugcuuguucgugugugugucguugcaggccuuauucaagcuuaccaugaagugggugaccuucaucagccugcuguuccuguucagcagcgccuacagccuguuccaggaguaccagugcuacggcagcagcagcaacaccagagugcugaacgagcugaacuacgacaacgccggcaccaaccuguacaacgagcuggagaugaacuacuacggcaagcaggagaacugguacagccugaagaagaacagcagaagccugggcgagaacgacgacggcaacaacgaggacaacgagaagcugagaaagcccaagcacaagaagcugaagcagcccgccgacggcaaccccgaccccaacgccaaccccaacguggaccccaacgccaaccccaacguggaccccaacgccaaccccaacguggaccccaacgccaaccccaacgccaaccccaacgccaaccccaacgccaaccccaacgccaaccccaacgccaaccccaacgccaaccccaacgccaaccccaacgccaaccccaacgccaaccccaacgccaaccccaacgccaaccccaacgccaaccccaacgccaaccccaacgccaaccccaacgccaaccccaacgccaaccccaacguggaccccaacgccaaccccaacgccaaccccaacgccaaccccaacgccaaccccaacgccaaccccaacgccaaccccaacgccaaccccaacgccaaccccaacgccaaccccaacgccaaccccaacgccaaccccaacgccaaccccaacgccaaccccaacgccaaccccaacgccaaccccaacgccaaccccaacgccaaccccaacgccaaccccgccgccuacaucaagcccggcagcgccaacaagcccaaggacgagcuggacuacgccaacgacaucgaggccgccuaccaguacaucaaggccaacagcaaguucaucggcaucaccgagcugugaggacuagucccuguucccagagcccacuuuuuuuucuuuuuuugaaauaaaauagccugucuuucagaucucaaaggcucuuuucagagccaccaaaaaaaaaaaaaaaaaaaaaaaaaaaaaaaaaaaaaaaaaaaaaaaaaaaaaaaaaaaaaaaaaaaaaaaaaaaaaaaaaaaaaaaaaaaaaaaaaaaaa

SEQ ID NO: 8151 - RNA, 1208 nt, Artificial Sequence
  mRNA Design a-1 (hSL-A100) comprising derived and/or modified sequence from Pf(3D7)__XP_001351122.1__HsALB_Pf-CSP(19-272)_L(AAY)_Pf-CSP(346-3 65)_L(AAY)_PADRE (opt4)
aggagagucccgcagucggcguccagcggcucugcuuguucgugugugugucguugcaggccuuauucaagcuuaccaugaagugggugaccuucaucagccugcuguuccuguucagcagcgccuacagccuguuccaggaguaccagugcuacggcagcagcagcaacaccagagugcugaacgagcugaacuacgacaacgccggcaccaaccuguacaacgagcuggagaugaacuacuacggcaagcaggagaacugguacagccugaagaagaacagcagaagccugggcgagaacgacgacggcaacaacgaggacaacgagaagcugagaaagcccaagcacaagaagcugaagcagcccgccgacggcaaccccgaccccaacgccaaccccaacguggaccccaacgccaaccccaacguggaccccaacgccaaccccaacguggaccccaacgccaaccccaacgccaaccccaacgccaaccccaacgccaaccccaacgccaaccccaacgccaaccccaacgccaaccccaacgccaaccccaacgccaaccccaacgccaaccccaacgccaaccccaacgccaaccccaacgccaaccccaacgccaaccccaacgccaaccccaacgccaaccccaacgccaaccccaacguggaccccaacgccaaccccaacgccaaccccaacgccaaccccaacgccaaccccaacgccaaccccaacgccaaccccaacgccaaccccaacgccaaccccaacgccaaccccaacgccaaccccaacgccaaccccaacgccaaccccaacgccaaccccaacgccaaccccaacgccaaccccaacgccaaccccaacgccaaccccaacgccaaccccgccgccuacaucaagcccggcagcgccaacaagcccaaggacgagcuggacuacgccaacgacaucgaggccgccuacgccaaguucguggccgccuggacccugaaggccgccgccugaggacuagucccuguucccagagcccacuuuuuuuucuuuuuuugaaauaaaauagccugucuuucagaucucaaaggcucuuuucagagccaccaaaaaaaaaaaaaaaaaaaaaaaaaaaaaaaaaaaaaaaaaaaaaaaaaaaaaaaaaaaaaaaaaaaaaaaaaaaaaaaaaaaaaaaaaaaaaaaaaaaaa

SEQ ID NO: 8152 - RNA, 1265 nt, Artificial Sequence
  mRNA Design a-1 (hSL-A100) comprising derived and/or modified sequence from Pf(3D7)__XP_001351122.1__HsALB_Pf-CSP(19-272)_L(G4S)_Pf-CSP(310-3 27)_L(G4S)_Pf-CSP(346-375) (opt4)
aggagagucccgcagucggcguccagcggcucugcuuguucgugugugugucguugcaggccuuauucaagcuuaccaugaagugggugaccuucaucagccugcuguuccuguucagcagcgccuacagccuguuccaggaguaccagugcuacggcagcagcagcaacaccagagugcugaacgagcugaacuacgacaacgccggcaccaaccuguacaacgagcuggagaugaacuacuacggcaagcaggagaacugguacagccugaagaagaacagcagaagccugggcgagaacgacgacggcaacaacgaggacaacgagaagcugagaaagcccaagcacaagaagcugaagcagcccgccgacggcaaccccgaccccaacgccaaccccaacguggaccccaacgccaaccccaacguggaccccaacgccaaccccaacguggaccccaacgccaaccccaacgccaaccccaacgccaaccccaacgccaaccccaacgccaaccccaacgccaaccccaacgccaaccccaacgccaaccccaacgccaaccccaacgccaaccccaacgccaaccccaacgccaaccccaacgccaaccccaacgccaaccccaacgccaaccccaacgccaaccccaacgccaaccccaacguggaccccaacgccaaccccaacgccaaccccaacgccaaccccaacgccaaccccaacgccaaccccaacgccaaccccaacgccaaccccaacgccaaccccaacgccaaccccaacgccaaccccaacgccaaccccaacgccaaccccaacgccaaccccaacgccaaccccaacgccaaccccaacgccaaccccaacgccaaccccaacgccaaccccggcggcggcggcagcgagcccagcgacaagcacaucaaggaguaccugaacaagauccagaacagccugggcggcggcggcagcaucaagcccggcagcgccaacaagcccaaggacgagcuggacuacgccaacgacaucgagaagaagaucugcaagauggagaagugcagcugaggacuagucccuguucccagagcccacuuuuuuuucuuuuuuugaaauaaaauagccugucuuucagaucucaaaggcucuuuucagagccaccaaaaaaaaaaaaaaaaaaaaaaaaaaaaaaaaaaaaaaaaaaaaaaaaaaaaaaaaaaaaaaaaaaaaaaaaaaaaaaaaaaaaaaaaaaaaaaaaaaaaa

SEQ ID NO: 8153 - RNA, 1250 nt, Artificial Sequence
  mRNA Design a-1 (hSL-A100) comprising derived and/or modified sequence from Pf(3D7)__XP_001351122.1__HsALB_Pf-CSP(19-272)_L(G4S)_Pf-CSP(310-3 27)_Pf-CSP(346-375) (opt4)
aggagagucccgcagucggcguccagcggcucugcuuguucgugugugugucguugcaggccuuauucaagcuuaccaugaagugggugaccuucaucagccugcuguuccuguucagcagcgccuacagccuguuccaggaguaccagugcuacggcagcagcagcaacaccagagugcugaacgagcugaacuacgacaacgccggcaccaaccuguacaacgagcuggagaugaacuacuacggcaagcaggagaacugguacagccugaagaagaacagcagaagccugggcgagaacgacgacggcaacaacgaggacaacgagaagcugagaaagcccaagcacaagaagcugaagcagcccgccgacggcaaccccgaccccaacgccaaccccaacguggaccccaacgccaaccccaacguggaccccaacgccaaccccaacguggaccccaacgccaaccccaacgccaaccccaacgccaaccccaacgccaaccccaacgccaaccccaacgccaaccccaacgccaaccccaacgccaaccccaacgccaaccccaacgccaaccccaacgccaaccccaacgccaaccccaacgccaaccccaacgccaaccccaacgccaaccccaacgccaaccccaacgccaaccccaacguggaccccaacgccaaccccaacgccaaccccaacgccaaccccaacgccaaccccaacgccaaccccaacgccaaccccaacgccaaccccaacgccaaccccaacgccaaccccaacgccaaccccaacgccaaccccaacgccaaccccaacgccaaccccaacgccaaccccaacgccaaccccaacgccaaccccaacgccaaccccaacgccaaccccggcggcggcggcagcgagcccagcgacaagcacaucaaggaguaccugaacaagauccagaacagccugaucaagcccggcagcgccaacaagcccaaggacgagcuggacuacgccaacgacaucgagaagaagaucugcaagauggagaagugcagcugaggacuagucccuguucccagagcccacuuuuuuuucuuuuuuugaaauaaaauagccugucuuucagaucucaaaggcucuuuucagagccaccaaaaaaaaaaaaaaaaaaaaaaaaaaaaaaaaaaaaaaaaaaaaaaaaaaaaaaaaaaaaaaaaaaaaaaaaaaaaaaaaaaaaaaaaaaaaaaaaaaaaa

SEQ ID NO: 8154 - RNA, 1250 nt, Artificial Sequence
  mRNA Design a-1 (hSL-A100) comprising derived and/or modified sequence from Pf(3D7)__XP_001351122.1__HsALB_Pf-CSP(19-325) (opt4)
aggagagucccgcagucggcguccagcggcucugcuuguucgugugugugucguugcaggccuuauucaagcuuaccaugaagugggugaccuucaucagccugcuguuccuguucagcagcgccuacagccuguuccaggaguaccagugcuacggcagcagcagcaacaccagagugcugaacgagcugaacuacgacaacgccggcaccaaccuguacaacgagcuggagaugaacuacuacggcaagcaggagaacugguacagccugaagaagaacagcagaagccugggcgagaacgacgacggcaacaacgaggacaacgagaagcugagaaagcccaagcacaagaagcugaagcagcccgccgacggcaaccccgaccccaacgccaaccccaacguggaccccaacgccaaccccaacguggaccccaacgccaaccccaacguggaccccaacgccaaccccaacgccaaccccaacgccaaccccaacgccaaccccaacgccaaccccaacgccaaccccaacgccaaccccaacgccaaccccaacgccaaccccaacgccaaccccaacgccaaccccaacgccaaccccaacgccaaccccaacgccaaccccaacgccaaccccaacgccaaccccaacgccaaccccaacguggaccccaacgccaaccccaacgccaaccccaacgccaaccccaacgccaaccccaacgccaaccccaacgccaaccccaacgccaaccccaacgccaaccccaacgccaaccccaacgccaaccccaacgccaaccccaacgccaaccccaacgccaaccccaacgccaaccccaacgccaaccccaacgccaaccccaacgccaaccccaacgccaaccccaacaagaacaaccagggcaacggccagggccacaacaugcccaacgaccccaacagaaacguggacgagaacgccaacgccaacagcgccgugaagaacaacaacaacgaggagcccagcgacaagcacaucaaggaguaccugaacaagauccagaacugaggacuagucccuguucccagagcccacuuuuuuuucuuuuuuugaaauaaaauagccugucuuucagaucucaaaggcucuuuucagagccaccaaaaaaaaaaaaaaaaaaaaaaaaaaaaaaaaaaaaaaaaaaaaaaaaaaaaaaaaaaaaaaaaaaaaaaaaaaaaaaaaaaaaaaaaaaaaaaaaaaaaa

SEQ ID NO: 8155 - RNA, 1427 nt, Artificial Sequence
  mRNA Design a-1 (hSL-A100) comprising derived and/or modified sequence from Pf(3D7)__XP_001351122.1__HsALB_Pf-CSP(19-384) (opt4)
aggagagucccgcagucggcguccagcggcucugcuuguucgugugugugucguugcaggccuuauucaagcuuaccaugaagugggugaccuucaucagccugcuguuccuguucagcagcgccuacagccuguuccaggaguaccagugcuacggcagcagcagcaacaccagagugcugaacgagcugaacuacgacaacgccggcaccaaccuguacaacgagcuggagaugaacuacuacggcaagcaggagaacugguacagccugaagaagaacagcagaagccugggcgagaacgacgacggcaacaacgaggacaacgagaagcugagaaagcccaagcacaagaagcugaagcagcccgccgacggcaaccccgaccccaacgccaaccccaacguggaccccaacgccaaccccaacguggaccccaacgccaaccccaacguggaccccaacgccaaccccaacgccaaccccaacgccaaccccaacgccaaccccaacgccaaccccaacgccaaccccaacgccaaccccaacgccaaccccaacgccaaccccaacgccaaccccaacgccaaccccaacgccaaccccaacgccaaccccaacgccaaccccaacgccaaccccaacgccaaccccaacgccaaccccaacguggaccccaacgccaaccccaacgccaaccccaacgccaaccccaacgccaaccccaacgccaaccccaacgccaaccccaacgccaaccccaacgccaaccccaacgccaaccccaacgccaaccccaacgccaaccccaacgccaaccccaacgccaaccccaacgccaaccccaacgccaaccccaacgccaaccccaacgccaaccccaacgccaaccccaacaagaacaaccagggcaacggccagggccacaacaugcccaacgaccccaacagaaacguggacgagaacgccaacgccaacagcgccgugaagaacaacaacaacgaggagcccagcgacaagcacaucaaggaguaccugaacaagauccagaacagccugagcaccgaguggagccccugcagcgugaccugcggcaacggcauccaggugagaaucaagcccggcagcgccaacaagcccaaggacgagcuggacuacgccaacgacaucgagaagaagaucugcaagauggagaagugcagcagcguguucaacguggugaacagcagcugaggacuagucccuguucccagagcccacuuuuuuuucuuuuuuugaaauaaaauagccugucuuucagaucucaaaggcucuuuucagagccaccaaaaaaaaaaaaaaaaaaaaaaaaaaaaaaaaaaaaaaaaaaaaaaaaaaaaaaaaaaaaaaaaaaaaaaaaaaaaaaaaaaaaaaaaaaaaaaaaaaaaa

SEQ ID NO: 8156 - RNA, 1565 nt, Artificial Sequence
  mRNA Design a-1 (hSL-A100) comprising derived and/or modified sequence from Pf(3D7)__XP_001351122.1__HsALB_Pf-CSP(19-384)_TM domain HA (opt4)
aggagagucccgcagucggcguccagcggcucugcuuguucgugugugugucguugcaggccuuauucaagcuuaccaugaagugggugaccuucaucagccugcuguuccuguucagcagcgccuacagccuguuccaggaguaccagugcuacggcagcagcagcaacaccagagugcugaacgagcugaacuacgacaacgccggcaccaaccuguacaacgagcuggagaugaacuacuacggcaagcaggagaacugguacagccugaagaagaacagcagaagccugggcgagaacgacgacggcaacaacgaggacaacgagaagcugagaaagcccaagcacaagaagcugaagcagcccgccgacggcaaccccgaccccaacgccaaccccaacguggaccccaacgccaaccccaacguggaccccaacgccaaccccaacguggaccccaacgccaaccccaacgccaaccccaacgccaaccccaacgccaaccccaacgccaaccccaacgccaaccccaacgccaaccccaacgccaaccccaacgccaaccccaacgccaaccccaacgccaaccccaacgccaaccccaacgccaaccccaacgccaaccccaacgccaaccccaacgccaaccccaacgccaaccccaacguggaccccaacgccaaccccaacgccaaccccaacgccaaccccaacgccaaccccaacgccaaccccaacgccaaccccaacgccaaccccaacgccaaccccaacgccaaccccaacgccaaccccaacgccaaccccaacgccaaccccaacgccaaccccaacgccaaccccaacgccaaccccaacgccaaccccaacgccaaccccaacgccaaccccaacaagaacaaccagggcaacggccagggccacaacaugcccaacgaccccaacagaaacguggacgagaacgccaacgccaacagcgccgugaagaacaacaacaacgaggagcccagcgacaagcacaucaaggaguaccugaacaagauccagaacagccugagcaccgaguggagccccugcagcgugaccugcggcaacggcauccaggugagaaucaagcccggcagcgccaacaagcccaaggacgagcuggacuacgccaacgacaucgagaagaagaucugcaagauggagaagugcagcagcguguucaacguggugaacagcagcaagcuggagagcaccagaaucuaccagauccuggccaucuacagcaccguggccagcagccuggugcugguggugagccugggcgccaucagcuucuggaugugcagcaacggcagccugcagugcagaaucugcaucugaggacuagucccuguucccagagcccacuuuuuuuucuuuuuuugaaauaaaauagccugucuuucagaucucaaaggcucuuuucagagccaccaaaaaaaaaaaaaaaaaaaaaaaaaaaaaaaaaaaaaaaaaaaaaaaaaaaaaaaaaaaaaaaaaaaaaaaaaaaaaaaaaaaaaaaaaaaaaaaaaaaaa

SEQ ID NO: 8157 - RNA, 1277 nt, Artificial Sequence
  mRNA Design a-1 (hSL-A100) comprising derived and/or modified sequence from Pf(3D7)__XP_001351122.1__HsALB_Pf-CSP(82-397) (opt4)
aggagagucccgcagucggcguccagcggcucugcuuguucgugugugugucguugcaggccuuauucaagcuuaccaugaagugggugaccuucaucagccugcuguuccuguucagcagcgccuacagcgacaacgagaagcugagaaagcccaagcacaagaagcugaagcagcccgccgacggcaaccccgaccccaacgccaaccccaacguggaccccaacgccaaccccaacguggaccccaacgccaaccccaacguggaccccaacgccaaccccaacgccaaccccaacgccaaccccaacgccaaccccaacgccaaccccaacgccaaccccaacgccaaccccaacgccaaccccaacgccaaccccaacgccaaccccaacgccaaccccaacgccaaccccaacgccaaccccaacgccaaccccaacgccaaccccaacgccaaccccaacgccaaccccaacguggaccccaacgccaaccccaacgccaaccccaacgccaaccccaacgccaaccccaacgccaaccccaacgccaaccccaacgccaaccccaacgccaaccccaacgccaaccccaacgccaaccccaacgccaaccccaacgccaaccccaacgccaaccccaacgccaaccccaacgccaaccccaacgccaaccccaacgccaaccccaacgccaaccccaacaagaacaaccagggcaacggccagggccacaacaugcccaacgaccccaacagaaacguggacgagaacgccaacgccaacagcgccgugaagaacaacaacaacgaggagcccagcgacaagcacaucaaggaguaccugaacaagauccagaacagccugagcaccgaguggagccccugcagcgugaccugcggcaacggcauccaggugagaaucaagcccggcagcgccaacaagcccaaggacgagcuggacuacgccaacgacaucgagaagaagaucugcaagauggagaagugcagcagcguguucaacguggugaacagcagcaucggccugaucauggugcugagcuuccuguuccugaacugaggacuagucccuguucccagagcccacuuuuuuuucuuuuuuugaaauaaaauagccugucuuucagaucucaaaggcucuuuucagagccaccaaaaaaaaaaaaaaaaaaaaaaaaaaaaaaaaaaaaaaaaaaaaaaaaaaaaaaaaaaaaaaaaaaaaaaaaaaaaaaaaaaaaaaaaaaaaaaaaaaaaa

SEQ ID NO: 8158 - RNA, 629 nt, Artificial Sequence
  mRNA Design a-1 (hSL-A100) comprising derived and/or modified sequence from Pf(3D7)__XP_001351122.1__HsALB_Pf-CSP(93-192) (opt4)
aggagagucccgcagucggcguccagcggcucugcuuguucgugugugugucguugcaggccuuauucaagcuuaccaugaagugggugaccuucaucagccugcuguuccuguucagcagcgccuacagcaagcugaagcagcccgccgacggcaaccccgaccccaacgccaaccccaacguggaccccaacgccaaccccaacguggaccccaacgccaaccccaacguggaccccaacgccaaccccaacgccaaccccaacgccaaccccaacgccaaccccaacgccaaccccaacgccaaccccaacgccaaccccaacgccaaccccaacgccaaccccaacgccaaccccaacgccaaccccaacgccaaccccaacgccaaccccaacgccaaccccaacgccaaccccaacgccaaccccugaggacuagucccuguucccagagcccacuuuuuuuucuuuuuuugaaauaaaauagccugucuuucagaucucaaaggcucuuuucagagccaccaaaaaaaaaaaaaaaaaaaaaaaaaaaaaaaaaaaaaaaaaaaaaaaaaaaaaaaaaaaaaaaaaaaaaaaaaaaaaaaaaaaaaaaaaaaaaaaaaaaaa

SEQ ID NO: 8159 - RNA, 869 nt, Artificial Sequence
  mRNA Design a-1 (hSL-A100) comprising derived and/or modified sequence from Pf(3D7)__XP_001351122.1__HsALB_Pf-CSP(93-272) (opt4)
aggagagucccgcagucggcguccagcggcucugcuuguucgugugugugucguugcaggccuuauucaagcuuaccaugaagugggugaccuucaucagccugcuguuccuguucagcagcgccuacagcaagcugaagcagcccgccgacggcaaccccgaccccaacgccaaccccaacguggaccccaacgccaaccccaacguggaccccaacgccaaccccaacguggaccccaacgccaaccccaacgccaaccccaacgccaaccccaacgccaaccccaacgccaaccccaacgccaaccccaacgccaaccccaacgccaaccccaacgccaaccccaacgccaaccccaacgccaaccccaacgccaaccccaacgccaaccccaacgccaaccccaacgccaaccccaacgccaaccccaacgccaaccccaacguggaccccaacgccaaccccaacgccaaccccaacgccaaccccaacgccaaccccaacgccaaccccaacgccaaccccaacgccaaccccaacgccaaccccaacgccaaccccaacgccaaccccaacgccaaccccaacgccaaccccaacgccaaccccaacgccaaccccaacgccaaccccaacgccaaccccaacgccaaccccaacgccaaccccugaggacuagucccuguucccagagcccacuuuuuuuucuuuuuuugaaauaaaauagccugucuuucagaucucaaaggcucuuuucagagccaccaaaaaaaaaaaaaaaaaaaaaaaaaaaaaaaaaaaaaaaaaaaaaaaaaaaaaaaaaaaaaaaaaaaaaaaaaaaaaaaaaaaaaaaaaaaaaaaaaaaaa

SEQ ID NO: 8160 - RNA, 1244 nt, Artificial Sequence
  mRNA Design a-1 (hSL-A100) comprising derived and/or modified sequence from Pf(3D7)__XP_001351122.1__HsALB_Pf-CSP(93-397) (opt4)
aggagagucccgcagucggcguccagcggcucugcuuguucgugugugugucguugcaggccuuauucaagcuuaccaugaagugggugaccuucaucagccugcuguuccuguucagcagcgccuacagcaagcugaagcagcccgccgacggcaaccccgaccccaacgccaaccccaacguggaccccaacgccaaccccaacguggaccccaacgccaaccccaacguggaccccaacgccaaccccaacgccaaccccaacgccaaccccaacgccaaccccaacgccaaccccaacgccaaccccaacgccaaccccaacgccaaccccaacgccaaccccaacgccaaccccaacgccaaccccaacgccaaccccaacgccaaccccaacgccaaccccaacgccaaccccaacgccaaccccaacgccaaccccaacguggaccccaacgccaaccccaacgccaaccccaacgccaaccccaacgccaaccccaacgccaaccccaacgccaaccccaacgccaaccccaacgccaaccccaacgccaaccccaacgccaaccccaacgccaaccccaacgccaaccccaacgccaaccccaacgccaaccccaacgccaaccccaacgccaaccccaacgccaaccccaacgccaaccccaacaagaacaaccagggcaacggccagggccacaacaugcccaacgaccccaacagaaacguggacgagaacgccaacgccaacagcgccgugaagaacaacaacaacgaggagcccagcgacaagcacaucaaggaguaccugaacaagauccagaacagccugagcaccgaguggagccccugcagcgugaccugcggcaacggcauccaggugagaaucaagcccggcagcgccaacaagcccaaggacgagcuggacuacgccaacgacaucgagaagaagaucugcaagauggagaagugcagcagcguguucaacguggugaacagcagcaucggccugaucauggugcugagcuuccuguuccugaacugaggacuagucccuguucccagagcccacuuuuuuuucuuuuuuugaaauaaaauagccugucuuucagaucucaaaggcucuuuucagagccaccaaaaaaaaaaaaaaaaaaaaaaaaaaaaaaaaaaaaaaaaaaaaaaaaaaaaaaaaaaaaaaaaaaaaaaaaaaaaaaaaaaaaaaaaaaaaaaaaaaaaa

SEQ ID NO: 8161 - RNA, 614 nt, Artificial Sequence
  mRNA Design a-1 (hSL-A100) comprising derived and/or modified sequence from Pf(3D7)__XP_001351122.1__HsALB_Pf-CSP(98-192) (opt4)
aggagagucccgcagucggcguccagcggcucugcuuguucgugugugugucguugcaggccuuauucaagcuuaccaugaagugggugaccuucaucagccugcuguuccuguucagcagcgccuacagcgccgacggcaaccccgaccccaacgccaaccccaacguggaccccaacgccaaccccaacguggaccccaacgccaaccccaacguggaccccaacgccaaccccaacgccaaccccaacgccaaccccaacgccaaccccaacgccaaccccaacgccaaccccaacgccaaccccaacgccaaccccaacgccaaccccaacgccaaccccaacgccaaccccaacgccaaccccaacgccaaccccaacgccaaccccaacgccaaccccaacgccaaccccugaggacuagucccuguucccagagcccacuuuuuuuucuuuuuuugaaauaaaauagccugucuuucagaucucaaaggcucuuuucagagccaccaaaaaaaaaaaaaaaaaaaaaaaaaaaaaaaaaaaaaaaaaaaaaaaaaaaaaaaaaaaaaaaaaaaaaaaaaaaaaaaaaaaaaaaaaaaaaaaaaaaaa

SEQ ID NO: 8162 - RNA, 854 nt, Artificial Sequence
  mRNA Design a-1 (hSL-A100) comprising derived and/or modified sequence from Pf(3D7)__XP_001351122.1__HsALB_Pf-CSP(98-272) (opt4)
aggagagucccgcagucggcguccagcggcucugcuuguucgugugugugucguugcaggccuuauucaagcuuaccaugaagugggugaccuucaucagccugcuguuccuguucagcagcgccuacagcgccgacggcaaccccgaccccaacgccaaccccaacguggaccccaacgccaaccccaacguggaccccaacgccaaccccaacguggaccccaacgccaaccccaacgccaaccccaacgccaaccccaacgccaaccccaacgccaaccccaacgccaaccccaacgccaaccccaacgccaaccccaacgccaaccccaacgccaaccccaacgccaaccccaacgccaaccccaacgccaaccccaacgccaaccccaacgccaaccccaacgccaaccccaacgccaaccccaacguggaccccaacgccaaccccaacgccaaccccaacgccaaccccaacgccaaccccaacgccaaccccaacgccaaccccaacgccaaccccaacgccaaccccaacgccaaccccaacgccaaccccaacgccaaccccaacgccaaccccaacgccaaccccaacgccaaccccaacgccaaccccaacgccaaccccaacgccaaccccaacgccaaccccugaggacuagucccuguucccagagcccacuuuuuuuucuuuuuuugaaauaaaauagccugucuuucagaucucaaaggcucuuuucagagccaccaaaaaaaaaaaaaaaaaaaaaaaaaaaaaaaaaaaaaaaaaaaaaaaaaaaaaaaaaaaaaaaaaaaaaaaaaaaaaaaaaaaaaaaaaaaaaaaaaaaaa

SEQ ID NO: 8163 - RNA, 1160 nt, Artificial Sequence
  mRNA Design a-1 (hSL-A100) comprising derived and/or modified sequence from Pf(3D7)__XP_001351122.1__HsALB_Pf-CSP(98-374) (opt4)
aggagagucccgcagucggcguccagcggcucugcuuguucgugugugugucguugcaggccuuauucaagcuuaccaugaagugggugaccuucaucagccugcuguuccuguucagcagcgccuacagcgccgacggcaaccccgaccccaacgccaaccccaacguggaccccaacgccaaccccaacguggaccccaacgccaaccccaacguggaccccaacgccaaccccaacgccaaccccaacgccaaccccaacgccaaccccaacgccaaccccaacgccaaccccaacgccaaccccaacgccaaccccaacgccaaccccaacgccaaccccaacgccaaccccaacgccaaccccaacgccaaccccaacgccaaccccaacgccaaccccaacgccaaccccaacgccaaccccaacguggaccccaacgccaaccccaacgccaaccccaacgccaaccccaacgccaaccccaacgccaaccccaacgccaaccccaacgccaaccccaacgccaaccccaacgccaaccccaacgccaaccccaacgccaaccccaacgccaaccccaacgccaaccccaacgccaaccccaacgccaaccccaacgccaaccccaacgccaaccccaacgccaaccccaacaagaacaaccagggcaacggccagggccacaacaugcccaacgaccccaacagaaacguggacgagaacgccaacgccaacagcgccgugaagaacaacaacaacgaggagcccagcgacaagcacaucaaggaguaccugaacaagauccagaacagccugagcaccgaguggagccccugcagcgugaccugcggcaacggcauccaggugagaaucaagcccggcagcgccaacaagcccaaggacgagcuggacuacgccaacgacaucgagaagaagaucugcaagauggagaagugcugaggacuagucccuguucccagagcccacuuuuuuuucuuuuuuugaaauaaaauagccugucuuucagaucucaaaggcucuuuucagagccaccaaaaaaaaaaaaaaaaaaaaaaaaaaaaaaaaaaaaaaaaaaaaaaaaaaaaaaaaaaaaaaaaaaaaaaaaaaaaaaaaaaaaaaaaaaaaaaaaaaaaa

SEQ ID NO: 8164 - RNA, 1229 nt, Artificial Sequence
  mRNA Design a-1 (hSL-A100) comprising derived and/or modified sequence from Pf(3D7)__XP_001351122.1__HsALB_Pf-CSP(98-397) (opt4)
aggagagucccgcagucggcguccagcggcucugcuuguucgugugugugucguugcaggccuuauucaagcuuaccaugaagugggugaccuucaucagccugcuguuccuguucagcagcgccuacagcgccgacggcaaccccgaccccaacgccaaccccaacguggaccccaacgccaaccccaacguggaccccaacgccaaccccaacguggaccccaacgccaaccccaacgccaaccccaacgccaaccccaacgccaaccccaacgccaaccccaacgccaaccccaacgccaaccccaacgccaaccccaacgccaaccccaacgccaaccccaacgccaaccccaacgccaaccccaacgccaaccccaacgccaaccccaacgccaaccccaacgccaaccccaacgccaaccccaacguggaccccaacgccaaccccaacgccaaccccaacgccaaccccaacgccaaccccaacgccaaccccaacgccaaccccaacgccaaccccaacgccaaccccaacgccaaccccaacgccaaccccaacgccaaccccaacgccaaccccaacgccaaccccaacgccaaccccaacgccaaccccaacgccaaccccaacgccaaccccaacgccaaccccaacaagaacaaccagggcaacggccagggccacaacaugcccaacgaccccaacagaaacguggacgagaacgccaacgccaacagcgccgugaagaacaacaacaacgaggagcccagcgacaagcacaucaaggaguaccugaacaagauccagaacagccugagcaccgaguggagccccugcagcgugaccugcggcaacggcauccaggugagaaucaagcccggcagcgccaacaagcccaaggacgagcuggacuacgccaacgacaucgagaagaagaucugcaagauggagaagugcagcagcguguucaacguggugaacagcagcaucggccugaucauggugcugagcuuccuguuccugaacugaggacuagucccuguucccagagcccacuuuuuuuucuuuuuuugaaauaaaauagccugucuuucagaucucaaaggcucuuuucagagccaccaaaaaaaaaaaaaaaaaaaaaaaaaaaaaaaaaaaaaaaaaaaaaaaaaaaaaaaaaaaaaaaaaaaaaaaaaaaaaaaaaaaaaaaaaaaaaaaaaaaaa

SEQ ID NO: 8165 - RNA, 1556 nt, Artificial Sequence
  mRNA Design a-1 (hSL-A100) comprising derived and/or modified sequence from Pf(3D7)__XP_001351122.1__HsALB_Pf-CSP(199-377)_L(PVTN)_HBsAg (opt4)
aggagagucccgcagucggcguccagcggcucugcuuguucgugugugugucguugcaggccuuauucaagcuuaccaugaagugggugaccuucaucagccugcuguuccuguucagcagcgccuacagcgaccccaacgccaaccccaacgccaaccccaacgccaaccccaacgccaaccccaacgccaaccccaacgccaaccccaacgccaaccccaacgccaaccccaacgccaaccccaacgccaaccccaacgccaaccccaacgccaaccccaacgccaaccccaacgccaaccccaacgccaaccccaacgccaaccccaacgccaaccccaacgccaaccccaacaagaacaaccagggcaacggccagggccacaacaugcccaacgaccccaacagaaacguggacgagaacgccaacgccaacagcgccgugaagaacaacaacaacgaggagcccagcgacaagcacaucaaggaguaccugaacaagauccagaacagccugagcaccgaguggagccccugcagcgugaccugcggcaacggcauccaggugagaaucaagcccggcagcgccaacaagcccaaggacgagcuggacuacgccaacgacaucgagaagaagaucugcaagauggagaagugcagcagcgugcccgugaccaacauggagaacaucaccagcggcuuccugggcccccugcuggugcugcaggccggcuucuuccugcugaccagaauccugaccaucccccagagccuggacagcugguggaccagccugaacuuccugggcggcagccccgugugccugggccagaacagccagagccccaccagcaaccacagccccaccagcugcccccccaucugccccggcuacagauggaugugccugagaagauucaucaucuuccuguucauccugcugcugugccugaucuuccugcuggugcugcuggacuaccagggcaugcugcccgugugcccccugauccccggcagcaccaccaccaacaccggccccugcaagaccugcaccacccccgcccagggcaacagcauguuccccagcugcugcugcaccaagcccaccgacggcaacugcaccugcauccccauccccagcagcugggccuucgccaaguaccugugggagugggccagcgugagauucagcuggcugagccugcuggugcccuucgugcagugguucgugggccugagccccaccguguggcugagcgccaucuggaugaugugguacuggggccccagccuguacagcaucgugagccccuucaucccccugcugcccaucuucuucugccuguggguguacaucugaggacuagucccuguucccagagcccacuuuuuuuucuuuuuuugaaauaaaauagccugucuuucagaucucaaaggcucuuuucagagccaccaaaaaaaaaaaaaaaaaaaaaaaaaaaaaaaaaaaaaaaaaaaaaaaaaaaaaaaaaaaaaaaaaaaaaaaaaaaaaaaaaaaaaaaaaaaaaaaaaaaaa

SEQ ID NO: 8166 - RNA, 1466 nt, Artificial Sequence
  mRNA Design a-1 (hSL-A100) comprising derived and/or modified sequence from Pf(3D7)__XP_001351122.1__Pf-CSP (opt5)
aggagagucccgcagucggcguccagcggcucugcuuguucgugugugugucguugcaggccuuauucaagcuuaccaugaugagaaagcuggccauccucagcguguccucuuuccuguuugucgaggcucuuuuccaggaauaccaaugcuauggcagcuccucuaacacccggguucugaaugagcucaacuacgacaaugccgggacaaaccuguauaaugaacuugagaugaacuacuauggaaaacaggaaaauugguacagccugaagaaaaacucccgcucucucggcgagaaugaugacgggaacaaugaggauaacgaaaagcugagaaaacccaagcacaagaaacugaagcagccugcggacggaaauccggaucccaacgcuaauccuaacguggaccccaacgccaauccuaacguggaucccaaugccaacccuaaugucgacccgaacgcuaaucccaacgccaauccuaacgcuaaucccaacgccaauccuaacgcgaaucccaacgccaacccgaaugcuaacccuaaugccaaccccaaugcuaacccuaaugccaaccccaaugcgaaccccaaugccaacccuaaugcuaacccgaaugccaaccccaacgcuaauccuaacgccaaucccaacgccaauccuaacguggaucccaaugcuaacccgaaugcgaacccuaaugccaaccccaaugcuaacccuaaugccaaccccaacgccaauccuaacgcuaaucccaacgccaauccgaacgcgaauccuaacgcuaaucccaacgccaaucccaacgccaauccuaacgcuaauccgaacgccaaucccaacgcuaacccuaaugccaaccccaaugcgaacccuaaugccaaccccaauaaaaacaaucagggcaacgggcaaggacauaauaugccuaacgaccccaaucggaacguugaugagaaugcuaacgccaacagcgcugugaagaauaacaauaacgaggaaccguccgacaaacacauuaaggaguaucucaauaagauccagaacagccugucuacggaaugguccccuuguagcgugaccugcggcaauggcauucagguccgcaucaaacccgggucugccaacaagccuaaagaugagcuugacuacgcgaaugacauugaaaagaaaaucuguaagauggagaaaugcuccagcguuuuuaacguggucaauucuuccaucggacugauuauggugcucagcuuccuguuucuuaacugaggacuagucccuguucccagagcccacuuuuuuuucuuuuuuugaaauaaaauagccugucuuucagaucucaaaggcucuuuucagagccaccaaaaaaaaaaaaaaaaaaaaaaaaaaaaaaaaaaaaaaaaaaaaaaaaaaaaaaaaaaaaaaaaaaaaaaaaaaaaaaaaaaaaaaaaaaaaaaaaaaaaa

SEQ ID NO: 8167 - RNA, 1397 nt, Artificial Sequence
  mRNA Design a-1 (hSL-A100) comprising derived and/or modified sequence from Pf(3D7)__XP_001351122.1__Pf-CSP(1-374) (opt5)
aggagagucccgcagucggcguccagcggcucugcuuguucgugugugugucguugcaggccuuauucaagcuuaccaugaugagaaagcuggccauccucagcguguccucuuuccuguuugucgaggcucuuuuccaggaauaccaaugcuauggcagcuccucuaacacccggguucugaaugagcucaacuacgacaaugccgggacaaaccuguauaaugaacuugagaugaacuacuauggaaaacaggaaaauugguacagccugaagaaaaacucccgcucucucggcgagaaugaugacgggaacaaugaggauaacgaaaagcugagaaaacccaagcacaagaaacugaagcagccugcggacggaaauccggaucccaacgcuaauccuaacguggaccccaacgccaauccuaacguggaucccaaugccaacccuaaugucgacccgaacgcuaaucccaacgccaauccuaacgcuaaucccaacgccaauccuaacgcgaaucccaacgccaacccgaaugcuaacccuaaugccaaccccaaugcuaacccuaaugccaaccccaaugcgaaccccaaugccaacccuaaugcuaacccgaaugccaaccccaacgcuaauccuaacgccaaucccaacgccaauccuaacguggaucccaaugcuaacccgaaugcgaacccuaaugccaaccccaaugcuaacccuaaugccaaccccaacgccaauccuaacgcuaaucccaacgccaauccgaacgcgaauccuaacgcuaaucccaacgccaaucccaacgccaauccuaacgcuaauccgaacgccaaucccaacgcuaacccuaaugccaaccccaaugcgaacccuaaugccaaccccaauaaaaacaaucagggcaacgggcaaggacauaauaugccuaacgaccccaaucggaacguugaugagaaugcuaacgccaacagcgcugugaagaauaacaauaacgaggaaccguccgacaaacacauuaaggaguaucucaauaagauccagaacagccugucuacggaaugguccccuuguagcgugaccugcggcaauggcauucagguccgcaucaaacccgggucugccaacaagccuaaagaugagcuugacuacgcgaaugacauugaaaagaaaaucuguaagauggagaaaugcugaggacuagucccuguucccagagcccacuuuuuuuucuuuuuuugaaauaaaauagccugucuuucagaucucaaaggcucuuuucagagccaccaaaaaaaaaaaaaaaaaaaaaaaaaaaaaaaaaaaaaaaaaaaaaaaaaaaaaaaaaaaaaaaaaaaaaaaaaaaaaaaaaaaaaaaaaaaaaaaaaaaaa

SEQ ID NO: 8168 - RNA, 1250 nt, Artificial Sequence
  mRNA Design a-1 (hSL-A100) comprising derived and/or modified sequence from Pf(3D7)__XP_001351122.1__Pf-CSP(1-325) (opt5)
aggagagucccgcagucggcguccagcggcucugcuuguucgugugugugucguugcaggccuuauucaagcuuaccaugaugagaaagcuggccauccucagcguguccucuuuccuguuugucgaggcucuuuuccaggaauaccaaugcuauggcagcuccucuaacacccggguucugaaugagcucaacuacgacaaugccgggacaaaccuguauaaugaacuugagaugaacuacuauggaaaacaggaaaauugguacagccugaagaaaaacucccgcucucucggcgagaaugaugacgggaacaaugaggauaacgaaaagcugagaaaacccaagcacaagaaacugaagcagccugcggacggaaauccggaucccaacgcuaauccuaacguggaccccaacgccaauccuaacguggaucccaaugccaacccuaaugucgacccgaacgcuaaucccaacgccaauccuaacgcuaaucccaacgccaauccuaacgcgaaucccaacgccaacccgaaugcuaacccuaaugccaaccccaaugcuaacccuaaugccaaccccaaugcgaaccccaaugccaacccuaaugcuaacccgaaugccaaccccaacgcuaauccuaacgccaaucccaacgccaauccuaacguggaucccaaugcuaacccgaaugcgaacccuaaugccaaccccaaugcuaacccuaaugccaaccccaacgccaauccuaacgcuaaucccaacgccaauccgaacgcgaauccuaacgcuaaucccaacgccaaucccaacgccaauccuaacgcuaauccgaacgccaaucccaacgcuaacccuaaugccaaccccaaugcgaacccuaaugccaaccccaauaaaaacaaucagggcaacgggcaaggacauaauaugccuaacgaccccaaucggaacguugaugagaaugcuaacgccaacagcgcugugaagaauaacaauaacgaggaaccguccgacaaacacauuaaggaguaucucaauaagauccagaacugaggacuagucccuguucccagagcccacuuuuuuuucuuuuuuugaaauaaaauagccugucuuucagaucucaaaggcucuuuucagagccaccaaaaaaaaaaaaaaaaaaaaaaaaaaaaaaaaaaaaaaaaaaaaaaaaaaaaaaaaaaaaaaaaaaaaaaaaaaaaaaaaaaaaaaaaaaaaaaaaaaaaa

SEQ ID NO: 8169 - RNA, 1466 nt, Artificial Sequence
  mRNA Design a-1 (hSL-A100) comprising derived and/or modified sequence from Pf(3D7)__XP_001351122.1__HsALB_Pf-CSP(19-397) (opt5)
aggagagucccgcagucggcguccagcggcucugcuuguucgugugugugucguugcaggccuuauucaagcuuaccaugaagugggugaccuucaucagccugcucuuucuguucuccucugccuacagccuuuuucaggaguaucaaugcuacggcuccucuagcaacacaagaguccugaaugaacucaacuaugacaaugcugggacgaaccuguacaaugagcuugaaaugaacuauuacggaaaacaggagaauugguauucccugaagaaaaacucucggagccucggcgaaaaugaugacgggaacaaugaggauaacgagaagcugcgcaaacccaagcacaagaaacugaagcagccugccgacggaaauccggaucccaacgcgaauccuaacguugaccccaacgcuaauccuaacguggaucccaaugccaacccuaauguggacccgaacgccaaucccaacgcuaauccuaacgccaaucccaacgcuaauccuaacgccaaucccaacgcgaacccgaaugccaacccuaaugcuaaccccaaugccaacccuaaugcuaaccccaaugccaaccccaaugcgaacccuaaugccaacccgaaugcuaaccccaacgccaauccuaacgcuaaucccaacgccaauccuaacgucgaucccaaugccaacccgaaugcuaacccuaaugcgaaccccaaugccaacccuaaugcuaaccccaacgccaauccuaacgccaaucccaacgcuaauccgaacgccaauccuaacgcgaaucccaacgcuaaucccaacgccaauccuaacgccaauccgaacgcuaaucccaacgccaacccuaaugcuaaccccaaugccaacccuaaugcgaaccccaauaaaaacaaucagggcaacgggcaaggacauaauaugccuaacgaccccaauagaaacguggaugaaaaugccaacgcuaacuccgccguuaagaauaacaauaacgaggaaccgagcgacaaacacauuaaggaguaccucaauaagauccagaacucucuguccaccgaguggagcccuuguucugugacaugcggcaauggcauucagguccggaucaaacccggguccgcuaacaagccuaaagaugaacuugacuacgccaaugacauugagaagaaaaucuguaagauggaaaaaugcagcucuguguucaacguugucaauuccagcaucggacugauuauggugcucuccuuucuguuccuuaacugaggacuagucccuguucccagagcccacuuuuuuuucuuuuuuugaaauaaaauagccugucuuucagaucucaaaggcucuuuucagagccaccaaaaaaaaaaaaaaaaaaaaaaaaaaaaaaaaaaaaaaaaaaaaaaaaaaaaaaaaaaaaaaaaaaaaaaaaaaaaaaaaaaaaaaaaaaaaaaaaaaaaa

SEQ ID NO: 8170 - RNA, 1484 nt, Artificial Sequence
  mRNA Design a-1 (hSL-A100) comprising derived and/or modified sequence from Pf(3D7)__XP_001351122.1__HsIns-iso1_Pf-CSP(19-397) (opt5)
aggagagucccgcagucggcguccagcggcucugcuuguucgugugugugucguugcaggccuuauucaagcuuaccauggcccuguggaugagacuccugccccuucuggcucuccuggcccuuuggggcccugacccggcggcugcccuguuccaggaguaccaaugcuaugggagcuccucuaacacccgggugcucaaugaacugaacuacgauaaugccggaacaaaccuguauaaugagcucgaaaugaacuacuauggcaagcaggagaauugguacagccugaaaaagaacucccgcucucuuggggaaaaugacgauggaaacaaugaggacaacgagaaacugagaaagcccaaacacaagaagcucaaacagccugcugauggcaaucccgacccuaacgccaaucccaacgucgauccuaacgcuaauccgaacguugaccccaaugccaacccuaauguggaucccaacgcgaauccuaacgccaaucccaacgcuaauccgaacgccaauccuaacgcuaaucccaacgccaacccuaaugcgaaccccaaugccaaccccaaugcuaacccuaaugccaacccgaaugcuaaccccaaugccaacccuaaugccaaccccaaugcuaacccuaacgcgaaucccaacgccaauccgaacgcuaauccuaacguggaccccaaugccaacccuaaugccaaccccaaugcuaacccuaaugccaaccccaaugcgaacccgaacgcuaauccuaacgccaaucccaacgccaaucccaacgcuaauccuaacgccaauccgaacgcuaaucccaacgccaauccuaacgcgaaucccaacgccaauccuaacgcuaaccccaaugccaacccuaaugcuaaccccaaugccaacccgaauaagaacaaucaggggaacggacaaggccauaauaugccuaacgaucccaaucggaacgucgacgaaaaugcgaacgccaacagcgcugugaaaaauaacaauaacgaggaaccuuccgauaagcacaucaaagaguaucugaauaagauucagaacucucuuagcacggaguggucccccuguagcguuaccugcggcaaugggauccaggugcgcauuaagccgggaucugccaacaaaccuaaggacgaacuggacuacgcuaaugauaucgagaaaaagauuuguaaaauggaaaagugcuccagcgucuuuaacgugguuaauucuuccaucggccucaucauggugcugagcuuccuguuucucaacugaggacuagucccuguucccagagcccacuuuuuuuucuuuuuuugaaauaaaauagccugucuuucagaucucaaaggcucuuuucagagccaccaaaaaaaaaaaaaaaaaaaaaaaaaaaaaaaaaaaaaaaaaaaaaaaaaaaaaaaaaaaaaaaaaaaaaaaaaaaaaaaaaaaaaaaaaaaaaaaaaaaaa

SEQ ID NO: 8171 - RNA, 1463 nt, Artificial Sequence
  mRNA Design a-1 (hSL-A100) comprising derived and/or modified sequence from Pf(3D7)__XP_001351122.1__HsSPARC_Pf-CSP(19-397) (opt5)
aggagagucccgcagucggcguccagcggcucugcuuguucgugugugugucguugcaggccuuauucaagcuuaccaugagagccuggaucuucuuucugcucugccuggcuggccgggcccuugcgcuguuccaggaguaccaauguuaugggagcuccucuaacacccgcgugcucaaugaacugaacuacgacaaugcuggaacaaaccuuuauaaugagcuggaaaugaacuacuauggcaagcaggagaauugguacagccucaaaaagaacuccagaucucugggggaaaaugaugacggaaacaaugaggauaacgagaaacugcggaagcccaaacacaagaagcucaaacagccugccgacggcaauccggaucccaacgccaauccuaacgucgaccccaacgcuaauccuaacguugaucccaaugccaacccuaauguggacccgaacgcuaaucccaacgccaauccuaacgcgaaucccaacgccaauccuaacgcuaaucccaacgccaacccgaaugcuaacccuaaugccaaccccaaugcgaacccuaaugccaaccccaaugcuaaccccaaugccaacccuaaugcuaacccgaaugccaaccccaacgccaauccuaacgcuaaucccaacgcgaauccuaacguggaucccaaugccaacccgaaugcuaacccuaaugccaaccccaaugccaacccuaaugcuaaccccaacgccaauccuaacgcgaaucccaacgcuaauccgaacgccaauccuaacgccaaucccaacgcuaaucccaacgccaauccuaacgcuaauccgaacgccaaucccaacgcgaacccuaaugccaaccccaaugcuaacccuaaugccaaccccaauaagaacaaucaggggaacggacaaggccauaauaugccuaacgaccccaaucgcaacgucgaugaaaaugcuaacgccaacagcgcggugaaaaauaacaauaacgaggaaccguccgacaagcacauuaaagaguaucugaauaagauccagaacucucuuagcacggagugguccccuugcagcguuaccuguggcaaugggauucaggugagaaucaagcccggaucugccaacaaaccuaaggaugaacuggacuacgcuaaugacauugagaaaaagaucugcaaaauggaaaaguguuccagcgucuuuaacgugguuaauucuuccaucggccucauuauggugcugagcuuccuuuuucugaacugaggacuagucccuguucccagagcccacuuuuuuuucuuuuuuugaaauaaaauagccugucuuucagaucucaaaggcucuuuucagagccaccaaaaaaaaaaaaaaaaaaaaaaaaaaaaaaaaaaaaaaaaaaaaaaaaaaaaaaaaaaaaaaaaaaaaaaaaaaaaaaaaaaaaaaaaaaaaaaaaaaaaa

SEQ ID NO: 8172 - RNA, 1466 nt, Artificial Sequence
  mRNA Design a-1 (hSL-A100) comprising derived and/or modified sequence from Pf(3D7)__XP_001351122.1__IgE_Pf-CSP(19-397) (opt5)
aggagagucccgcagucggcguccagcggcucugcuuguucgugugugugucguugcaggccuuauucaagcuuaccauggacuggaccuggauccuguuccucguggccgcugccacaagaguccacagccuguuucaggaguaccaaugcuauggcuccucuagcaacacgcggguucuuaaugaacugaacuacgauaaugcggggaccaaccucuauaaugagcuggaaaugaacuacuauggaaagcaggagaauugguacucccuuaaaaagaacucucgcagccugggcgaaaaugacgaugggaacaaugaggacaacgagaaacucagaaagcccaaacauaagaagcugaaacagccugcugauggaaauccggaccccaacgccaauccuaacguggaucccaacgccaauccuaacguggaccccaaugcuaacccuaaugucgauccgaacgccaaucccaacgcuaauccuaacgccaaucccaacgcgaauccuaacgccaaucccaacgcuaacccgaaugccaacccuaaugcuaaccccaaugccaacccuaaugcgaaccccaaugccaaccccaaugcuaacccuaaugccaacccgaaugcuaaccccaacgccaauccuaacgccaaucccaacgcuaauccuaacguggaccccaaugcgaacccgaaugccaacccuaaugcuaaccccaaugccaacccuaaugccaaccccaacgcuaauccuaacgccaaucccaacgcgaauccgaacgcuaauccuaacgccaaucccaacgccaaucccaacgcuaauccuaacgccaauccgaacgcuaaucccaacgccaacccuaaugcgaaccccaaugccaacccuaaugcuaaccccaauaagaacaaucagggcaacgggcaaggacacaauaugccuaacgaucccaaucggaacguugacgaaaaugccaacgcuaacuccgccgugaaaaauaacaauaacgaggaaccgucugauaagcauauuaaagaguaucugaauaagauccagaacagccucuccacagaguggagcccuuguucugugaccugcggcaauggcauucagguccgcaucaagcccggguccgcgaacaaaccuaaggacgaacuggacuacgccaaugauauugagaaaaagaucuguaaaauggaaaagugcagcucuguuuucaacguggucaauuccagcaucggacuuauuauggugcugucuuuucucuuccugaacugaggacuagucccuguucccagagcccacuuuuuuuucuuuuuuugaaauaaaauagccugucuuucagaucucaaaggcucuuuucagagccaccaaaaaaaaaaaaaaaaaaaaaaaaaaaaaaaaaaaaaaaaaaaaaaaaaaaaaaaaaaaaaaaaaaaaaaaaaaaaaaaaaaaaaaaaaaaaaaaaaaaaa

SEQ ID NO: 8173 - RNA, 1631 nt, Artificial Sequence
  mRNA Design a-1 (hSL-A100) comprising derived and/or modified sequence from Pf(3D7)__XP_001351122.1__Pf-CSP_L(G4SG4)_TM domain HA (opt5)
aggagagucccgcagucggcguccagcggcucugcuuguucgugugugugucguugcaggccuuauucaagcuuaccaugaugagaaagcuggccauccucagcguguccucuuuccuguuugucgaggcucuuuuccaggaauaccaaugcuauggcagcuccucuaacacccggguucugaaugagcucaacuacgacaaugccgggacaaaccuguauaaugaacuugagaugaacuacuauggaaaacaggaaaauugguacagccugaagaaaaacucccgcucucucggcgagaaugaugacgggaacaaugaggauaacgaaaagcugagaaaacccaagcacaagaaacugaagcagccugcggacggaaauccggaucccaacgcuaauccuaacguggaccccaacgccaauccuaacguggaucccaaugccaacccuaaugucgacccgaacgcuaaucccaacgccaauccuaacgcuaaucccaacgccaauccuaacgcgaaucccaacgccaacccgaaugcuaacccuaaugccaaccccaaugcuaacccuaaugccaaccccaaugcgaaccccaaugccaacccuaaugcuaacccgaaugccaaccccaacgcuaauccuaacgccaaucccaacgccaauccuaacguggaucccaaugcuaacccgaaugcgaacccuaaugccaaccccaaugcuaacccuaaugccaaccccaacgccaauccuaacgcuaaucccaacgccaauccgaacgcgaauccuaacgcuaaucccaacgccaaucccaacgccaauccuaacgcuaauccgaacgccaaucccaacgcuaacccuaaugccaaccccaaugcgaacccuaaugccaaccccaauaaaaacaaucagggcaacgggcaaggacauaauaugccuaacgaccccaaucggaacguugaugagaaugcuaacgccaacagcgcugugaagaauaacaauaacgaggaaccguccgacaaacacauuaaggaguaucucaauaagauccagaacagccugucuacggaaugguccccuuguagcgugaccugcggcaauggcauucagguccgcaucaaacccgggucugccaacaagccuaaagaugagcuugacuacgcgaaugacauugaaaagaaaaucuguaagauggagaaaugcuccagcguuuuuaacguggucaauucuuccaucggacugauuauggugcucagcuuccuguuucuuaacggcgggggaggcuccgggggaggcggcaagcuggaaucuacaagaaucuaccagauucucgccaucuauagcaccguggcuuccagccugguccugguugugucucucggggccauuuccuucuggauguguagcaauggaucucugcaaugccggaucuguauuugaggacuagucccuguucccagagcccacuuuuuuuucuuuuuuugaaauaaaauagccugucuuucagaucucaaaggcucuuuucagagccaccaaaaaaaaaaaaaaaaaaaaaaaaaaaaaaaaaaaaaaaaaaaaaaaaaaaaaaaaaaaaaaaaaaaaaaaaaaaaaaaaaaaaaaaaaaaaaaaaaaaaa

SEQ ID NO: 8174 - RNA, 1505 nt, Artificial Sequence
  mRNA Design a-1 (hSL-A100) comprising derived and/or modified sequence from Pf(3D7)__XP_001351122.1__Pf-CSP(199-377)_L(PVTN)_HBsAg (opt5)
aggagagucccgcagucggcguccagcggcucugcuuguucgugugugugucguugcaggccuuauucaagcuuaccauggaccccaacgccaauccuaacgcuaauccgaacgccaaucccaacgcgaauccuaacgcuaaucccaacgccaauccuaacgccaaucccaacgcuaauccuaacgccaacccgaaugcuaaccccaaugccaacccuaaugcgaaccccaaugccaacccuaaugcuaaccccaaugccaacccgaaugcuaacccuaaugccaaccccaacgcgaauccuaacaagaauaaccagggcaaugggcaaggacacaacaugcccaaugaucccaacagaaauguggacgagaacgccaaugcuaacagcgccgucaaaaauaacaauaacgaggaaccuuccgauaagcauaucaaagaauaccugaacaagauucaaaauucucucagcaccgagugguccccgugcucuguuacauguggcaacgggauccaggugcggauuaaacccggaagcgcuaauaagccuaaggacgaacuggauuaugccaacgacaucgagaaaaagauuugcaaaauggagaaguguuccucugugcccgucacgaauauggaaaacaucaccagcggcuuccuugggccucugcucgugcugcaggccggauuuuuccuucugacacgcauccucaccauuccccagucccuggauagcugguggacaucucugaauuuucucggcggcuccccgguuugccuggggcagaacagccagucuccuaccuccaaucacagccccacaucuuguccucccaucugcccuggauacagauggaugugucuucggcgcuucauuaucuuucuguucauucuccugcuuugccugaucuuucuccuggugcugcucgacuaucagggcaugcugcccgucuguccgcuuauuccuggguccaccacgaccaacacaggacccugcaaaaccuguacaacccccgcucaaggcaauagcauguucccuuccugcugcuguacgaagccgacagaugggaacugcaccuguauccccaucccuucuagcugggcguuugccaaguaccugugggagugggcuuccgugagauucagcuggcucucucugcuuguucccuuugugcagugguucgucggacuguccccuacaguguggcucagcgccauuuggaugaugugguauuggggccccucucuguacagcaucguguccccuuuuauuccccugcucccgaucuucuucugccugugggucuauauuugaggacuagucccuguucccagagcccacuuuuuuuucuuuuuuugaaauaaaauagccugucuuucagaucucaaaggcucuuuucagagccaccaaaaaaaaaaaaaaaaaaaaaaaaaaaaaaaaaaaaaaaaaaaaaaaaaaaaaaaaaaaaaaaaaaaaaaaaaaaaaaaaaaaaaaaaaaaaaaaaaaaaa

SEQ ID NO: 8175 - RNA, 1547 nt, Artificial Sequence
  mRNA Design a-1 (hSL-A100) comprising derived and/or modified sequence from Pf(3D7)__XP_001351122.1__Pf-CSP(199-387)_L(PVTN)_HBsAg (opt5)
aggagagucccgcagucggcguccagcggcucugcuuguucgugugugugucguugcaggccuuauucaagcuuaccaugauggcccccgacccuaacgcuaauccgaacgccaaucccaacgcgaauccuaacgcuaaucccaacgccaauccuaacgccaaucccaacgcuaauccuaacgccaauccgaacgcuaaccccaaugccaacccuaaugcgaaccccaaugccaacccuaaugcuaaccccaaugccaacccgaaugcuaacccuaaugccaaccccaaugcgaacccuaacgccaaucccaacaagaauaaccagggcaaugggcaaggacacaacaugcccaaugauccuaacagaaauguggacgagaacgcuaaugccaacagcgcugucaaaaauaacaauaacgaggaaccguccgauaagcauaucaaagaauaccugaacaagauucaaaauucucucagcaccgaguggucccccugcucuguuacauguggcaacgggauccaggugcggauuaaaccuggaagcgccaauaagcccaaggacgaacuggauuaugccaacgacaucgagaaaaagauuugcaaaauggagaaguguuccucuguguucaaugucgugaacagcuccaucggccuugggccuguuacgaauauggaaaacaucaccagcggauuucugggcccccuccuggugcuucaggcuggcuucuuucugcucacacgcauucugaccaucccgcagucucuggauuccugguggacaagccucaauuuccuugggggaucuccugucugccugggccagaacucccagagccccaccucuaaucacuccccuacaagcugucccccuauuugccccggguacagauggaugugucugcggcgcuuuaucauuuuccucuuuauccugcuucugugccucauuuuccugcuggugcuccuggacuaucagggaaugcuuccgguuuguccucugauccccggcuccaccacgaccaacacagggcccugcaaaaccuguacaaccccugcgcaaggaaauucuauguuuccgagcugcugcuguacgaagcccacagauggcaacugcaccuguaucccuauucccuccagcugggccuucgcuaaguaccucugggagugggccucugugagauuuuccuggcugagccuucuggucccuuucgugcagugguuugugggccucucucccacagucuggcugagcgccaucuggaugaugugguauugggggccuucccuguacucuauuguuagccccuucaucccgcuccugccuauuuucuuuugccuuuggguguauaucugaggacuagucccuguucccagagcccacuuuuuuuucuuuuuuugaaauaaaauagccugucuuucagaucucaaaggcucuuuucagagccaccaaaaaaaaaaaaaaaaaaaaaaaaaaaaaaaaaaaaaaaaaaaaaaaaaaaaaaaaaaaaaaaaaaaaaaaaaaaaaaaaaaaaaaaaaaaaaaaaaaaaa

SEQ ID NO: 8176 - RNA, 731 nt, Artificial Sequence
  mRNA Design a-1 (hSL-A100) comprising derived and/or modified sequence from Pf(3D7)__XP_001351122.1__HsALB_Pf-CSP(19-152) (opt5)
aggagagucccgcagucggcguccagcggcucugcuuguucgugugugugucguugcaggccuuauucaagcuuaccaugaagugggugaccuucaucagccugcucuuucuguucuccucugccuacagccuuuuucaggaguaucaaugcuacggcuccucuagcaacacaagaguccugaaugaacucaacuaugacaaugcugggacgaaccuguacaaugagcuugaaaugaacuauuacggaaaacaggagaauugguauucccugaagaaaaacucucggagccucggcgaaaaugaugacgggaacaaugaggauaacgagaagcugcgcaaacccaagcacaagaaacugaagcagccugccgacggaaauccggaucccaacgcgaauccuaacguugaccccaacgcuaauccuaacguggaucccaaugccaacccuaauguggacccgaacgccaaucccaacgcuaauccuaacgccaaucccaacgcuaauccuaacgccaaucccaacgcgaacccgugaggacuagucccuguucccagagcccacuuuuuuuucuuuuuuugaaauaaaauagccugucuuucagaucucaaaggcucuuuucagagccaccaaaaaaaaaaaaaaaaaaaaaaaaaaaaaaaaaaaaaaaaaaaaaaaaaaaaaaaaaaaaaaaaaaaaaaaaaaaaaaaaaaaaaaaaaaaaaaaaaaaaa

SEQ ID NO: 8177 - RNA, 851 nt, Artificial Sequence
  mRNA Design a-1 (hSL-A100) comprising derived and/or modified sequence from Pf(3D7)__XP_001351122.1__HsALB_Pf-CSP(19-192) (opt5)
aggagagucccgcagucggcguccagcggcucugcuuguucgugugugugucguugcaggccuuauucaagcuuaccaugaagugggugaccuucaucagccugcucuuucuguucuccucugccuacagccuuuuucaggaguaucaaugcuacggcuccucuagcaacacaagaguccugaaugaacucaacuaugacaaugcugggacgaaccuguacaaugagcuugaaaugaacuauuacggaaaacaggagaauugguauucccugaagaaaaacucucggagccucggcgaaaaugaugacgggaacaaugaggauaacgagaagcugcgcaaacccaagcacaagaaacugaagcagccugccgacggaaauccggaucccaacgcgaauccuaacguugaccccaacgcuaauccuaacguggaucccaaugccaacccuaauguggacccgaacgccaaucccaacgcuaauccuaacgccaaucccaacgcuaauccuaacgccaaucccaacgcgaacccgaaugccaacccuaaugcuaaccccaaugccaacccuaaugcuaaccccaaugccaaccccaaugcgaacccuaaugccaacccgaaugcuaaccccaacgccaauccuaacgcuaaucccugaggacuagucccuguucccagagcccacuuuuuuuucuuuuuuugaaauaaaauagccugucuuucagaucucaaaggcucuuuucagagccaccaaaaaaaaaaaaaaaaaaaaaaaaaaaaaaaaaaaaaaaaaaaaaaaaaaaaaaaaaaaaaaaaaaaaaaaaaaaaaaaaaaaaaaaaaaaaaaaaaaaaa

SEQ ID NO: 8178 - RNA, 1091 nt, Artificial Sequence
  mRNA Design a-1 (hSL-A100) comprising derived and/or modified sequence from Pf(3D7)__XP_001351122.1__HsALB_Pf-CSP(19-272) (opt5)
aggagagucccgcagucggcguccagcggcucugcuuguucgugugugugucguugcaggccuuauucaagcuuaccaugaagugggugaccuucaucagccugcucuuucuguucuccucugccuacagccuuuuucaggaguaucaaugcuacggcuccucuagcaacacaagaguccugaaugaacucaacuaugacaaugcugggacgaaccuguacaaugagcuugaaaugaacuauuacggaaaacaggagaauugguauucccugaagaaaaacucucggagccucggcgaaaaugaugacgggaacaaugaggauaacgagaagcugcgcaaacccaagcacaagaaacugaagcagccugccgacggaaauccggaucccaacgcgaauccuaacguugaccccaacgcuaauccuaacguggaucccaaugccaacccuaauguggacccgaacgccaaucccaacgcuaauccuaacgccaaucccaacgcuaauccuaacgccaaucccaacgcgaacccgaaugccaacccuaaugcuaaccccaaugccaacccuaaugcuaaccccaaugccaaccccaaugcgaacccuaaugccaacccgaaugcuaaccccaacgccaauccuaacgcuaaucccaacgccaauccuaacgucgaucccaaugccaacccgaaugcuaacccuaaugcgaaccccaaugccaacccuaaugcuaaccccaacgccaauccuaacgccaaucccaacgcuaauccgaacgccaauccuaacgcgaaucccaacgcuaaucccaacgccaauccuaacgccaauccgaacgcuaaucccaacgccaacccuaaugcuaaccccaaugccaacccuaaugcgaaccccugaggacuagucccuguucccagagcccacuuuuuuuucuuuuuuugaaauaaaauagccugucuuucagaucucaaaggcucuuuucagagccaccaaaaaaaaaaaaaaaaaaaaaaaaaaaaaaaaaaaaaaaaaaaaaaaaaaaaaaaaaaaaaaaaaaaaaaaaaaaaaaaaaaaaaaaaaaaaaaaaaaaaa

SEQ ID NO: 8179 - RNA, 1253 nt, Artificial Sequence
  mRNA Design a-1 (hSL-A100) comprising derived and/or modified sequence from Pf(3D7)__XP_001351122.1__HsALB_Pf-CSP(19-272)_L(AAY)_Pf-CSP(310-3 27)_L(AAY)_Pf-CSP(346-375) (opt5)
aggagagucccgcagucggcguccagcggcucugcuuguucgugugugugucguugcaggccuuauucaagcuuaccaugaagugggugaccuucaucagccugcucuuucuguucuccucugccuacagccuuuuucaggaguaucaaugcuacggcuccucuagcaacacaagaguccugaaugaacucaacuaugacaaugcugggacgaaccuguacaaugagcuugaaaugaacuauuacggaaaacaggagaauugguauucccugaagaaaaacucucggagccucggcgaaaaugaugacgggaacaaugaggauaacgagaagcugcgcaaacccaagcacaagaaacugaagcagccugccgacggaaauccggaucccaacgcgaauccuaacguugaccccaacgcuaauccuaacguggaucccaaugccaacccuaauguggacccgaacgccaaucccaacgcuaauccuaacgccaaucccaacgcuaauccuaacgccaaucccaacgcgaacccgaaugccaacccuaaugcuaaccccaaugccaacccuaaugcuaaccccaaugccaaccccaaugcgaacccuaaugccaacccgaaugcuaaccccaacgccaauccuaacgcuaaucccaacgccaauccuaacgucgaucccaaugccaacccgaaugcuaacccuaaugcgaaccccaaugccaacccuaaugcuaaccccaacgccaauccuaacgccaaucccaacgcuaauccgaacgccaauccuaacgcgaaucccaacgcuaaucccaacgccaauccuaacgccaauccgaacgcuaaucccaacgccaacccuaaugcuaaccccaaugccaacccuaaugcgaaccccgccgcuuacgaaccuuccgacaaacauauuaaggaguaccucaauaaaauccagaacagccuggccgcuuauauuaagcccggcucugccaauaagccgaaagaugaacuugacuacgcgaacgauaucgagaagaaaauuuguaagauggagaaaugcuccugaggacuagucccuguucccagagcccacuuuuuuuucuuuuuuugaaauaaaauagccugucuuucagaucucaaaggcucuuuucagagccaccaaaaaaaaaaaaaaaaaaaaaaaaaaaaaaaaaaaaaaaaaaaaaaaaaaaaaaaaaaaaaaaaaaaaaaaaaaaaaaaaaaaaaaaaaaaaaaaaaaaaa

SEQ ID NO: 8180 - RNA, 1214 nt, Artificial Sequence
  mRNA Design a-1 (hSL-A100) comprising derived and/or modified sequence from Pf(3D7)__XP_001351122.1__HsALB_Pf-CSP(19-272)_L(AAY)_Pf-CSP(346-3 65)_L(AAY)_P2 (opt5)
aggagagucccgcagucggcguccagcggcucugcuuguucgugugugugucguugcaggccuuauucaagcuuaccaugaagugggugaccuucaucagccugcucuuucuguucuccucugccuacagccuuuuucaggaguaucaaugcuacggcuccucuagcaacacaagaguccugaaugaacucaacuaugacaaugcugggacgaaccuguacaaugagcuugaaaugaacuauuacggaaaacaggagaauugguauucccugaagaaaaacucucggagccucggcgaaaaugaugacgggaacaaugaggauaacgagaagcugcgcaaacccaagcacaagaaacugaagcagccugccgacggaaauccggaucccaacgcgaauccuaacguugaccccaacgcuaauccuaacguggaucccaaugccaacccuaauguggacccgaacgccaaucccaacgcuaauccuaacgccaaucccaacgcuaauccuaacgccaaucccaacgcgaacccgaaugccaacccuaaugcuaaccccaaugccaacccuaaugcuaaccccaaugccaaccccaaugcgaacccuaaugccaacccgaaugcuaaccccaacgccaauccuaacgcuaaucccaacgccaauccuaacgucgaucccaaugccaacccgaaugcuaacccuaaugcgaaccccaaugccaacccuaaugcuaaccccaacgccaauccuaacgccaaucccaacgcuaauccgaacgccaauccuaacgcgaaucccaacgcuaaucccaacgccaauccuaacgccaauccgaacgcuaaucccaacgccaacccuaaugcuaaccccaaugccaacccuaaugcgaaccccgccgcuuacauuaaaccuggcuccgccaauaagcccaaagacgaacucgauuacgcuaacgacaucgaggccgcguaucaguacauuaaggccaauagcaaguucaucgggauuaccgaacugugaggacuagucccuguucccagagcccacuuuuuuuucuuuuuuugaaauaaaauagccugucuuucagaucucaaaggcucuuuucagagccaccaaaaaaaaaaaaaaaaaaaaaaaaaaaaaaaaaaaaaaaaaaaaaaaaaaaaaaaaaaaaaaaaaaaaaaaaaaaaaaaaaaaaaaaaaaaaaaaaaaaaa

SEQ ID NO: 8181 - RNA, 1208 nt, Artificial Sequence
  mRNA Design a-1 (hSL-A100) comprising derived and/or modified sequence from Pf(3D7)__XP_001351122.1__HsALB_Pf-CSP(19-272)_L(AAY)_Pf-CSP(346-3 65)_L(AAY)_PADRE (opt5)
aggagagucccgcagucggcguccagcggcucugcuuguucgugugugugucguugcaggccuuauucaagcuuaccaugaagugggugaccuucaucagccugcucuuucuguucuccucugccuacagccuuuuucaggaguaucaaugcuacggcuccucuagcaacacaagaguccugaaugaacucaacuaugacaaugcugggacgaaccuguacaaugagcuugaaaugaacuauuacggaaaacaggagaauugguauucccugaagaaaaacucucggagccucggcgaaaaugaugacgggaacaaugaggauaacgagaagcugcgcaaacccaagcacaagaaacugaagcagccugccgacggaaauccggaucccaacgcgaauccuaacguugaccccaacgcuaauccuaacguggaucccaaugccaacccuaauguggacccgaacgccaaucccaacgcuaauccuaacgccaaucccaacgcuaauccuaacgccaaucccaacgcgaacccgaaugccaacccuaaugcuaaccccaaugccaacccuaaugcuaaccccaaugccaaccccaaugcgaacccuaaugccaacccgaaugcuaaccccaacgccaauccuaacgcuaaucccaacgccaauccuaacgucgaucccaaugccaacccgaaugcuaacccuaaugcgaaccccaaugccaacccuaaugcuaaccccaacgccaauccuaacgccaaucccaacgcuaauccgaacgccaauccuaacgcgaaucccaacgcuaaucccaacgccaauccuaacgccaauccgaacgcuaaucccaacgccaacccuaaugcuaaccccaaugccaacccuaaugcgaaccccgccgcuuacauuaaaccuggcuccgccaauaagcccaaagacgaacucgauuacgcuaacgacaucgaggccgcguaugccaaguucguggcugccuggacccugaaggcugccgccugaggacuagucccuguucccagagcccacuuuuuuuucuuuuuuugaaauaaaauagccugucuuucagaucucaaaggcucuuuucagagccaccaaaaaaaaaaaaaaaaaaaaaaaaaaaaaaaaaaaaaaaaaaaaaaaaaaaaaaaaaaaaaaaaaaaaaaaaaaaaaaaaaaaaaaaaaaaaaaaaaaaaa

SEQ ID NO: 8182 - RNA, 1265 nt, Artificial Sequence
  mRNA Design a-1 (hSL-A100) comprising derived and/or modified sequence from Pf(3D7)__XP_001351122.1__HsALB_Pf-CSP(19-272)_L(G4S)_Pf-CSP(310-3 27)_L(G4S)_Pf-CSP(346-375) (opt5)
aggagagucccgcagucggcguccagcggcucugcuuguucgugugugugucguugcaggccuuauucaagcuuaccaugaagugggugaccuucaucagccugcucuuucuguucuccucugccuacagccuuuuucaggaguaucaaugcuacggcuccucuagcaacacaagaguccugaaugaacucaacuaugacaaugcugggacgaaccuguacaaugagcuugaaaugaacuauuacggaaaacaggagaauugguauucccugaagaaaaacucucggagccucggcgaaaaugaugacgggaacaaugaggauaacgagaagcugcgcaaacccaagcacaagaaacugaagcagccugccgacggaaauccggaucccaacgcgaauccuaacguugaccccaacgcuaauccuaacguggaucccaaugccaacccuaauguggacccgaacgccaaucccaacgcuaauccuaacgccaaucccaacgcuaauccuaacgccaaucccaacgcgaacccgaaugccaacccuaaugcuaaccccaaugccaacccuaaugcuaaccccaaugccaaccccaaugcgaacccuaaugccaacccgaaugcuaaccccaacgccaauccuaacgcuaaucccaacgccaauccuaacgucgaucccaaugccaacccgaaugcuaacccuaaugcgaaccccaaugccaacccuaaugcuaaccccaacgccaauccuaacgccaaucccaacgcuaauccgaacgccaauccuaacgcgaaucccaacgcuaaucccaacgccaauccuaacgccaauccgaacgcuaaucccaacgccaacccuaaugcuaaccccaaugccaacccuaaugcgaaccccggcgggggaggcuccgaaccuagcgacaaacauauuaaggaguaccucaauaaaauccagaacucucugggcgggggaggcuccauuaagcccgggagcgccaauaagccgaaagaugaacuugacuacgcuaacgauaucgagaagaaaauuuguaagauggagaaaugcucuugaggacuagucccuguucccagagcccacuuuuuuuucuuuuuuugaaauaaaauagccugucuuucagaucucaaaggcucuuuucagagccaccaaaaaaaaaaaaaaaaaaaaaaaaaaaaaaaaaaaaaaaaaaaaaaaaaaaaaaaaaaaaaaaaaaaaaaaaaaaaaaaaaaaaaaaaaaaaaaaaaaaaa

SEQ ID NO: 8183 - RNA, 1250 nt, Artificial Sequence
  mRNA Design a-1 (hSL-A100) comprising derived and/or modified sequence from Pf(3D7)__XP_001351122.1__HsALB_Pf-CSP(19-272)_L(G4S)_Pf-CSP(310-3 27)_Pf-CSP(346-375) (opt5)
aggagagucccgcagucggcguccagcggcucugcuuguucgugugugugucguugcaggccuuauucaagcuuaccaugaagugggugaccuucaucagccugcucuuucuguucuccucugccuacagccuuuuucaggaguaucaaugcuacggcuccucuagcaacacaagaguccugaaugaacucaacuaugacaaugcugggacgaaccuguacaaugagcuugaaaugaacuauuacggaaaacaggagaauugguauucccugaagaaaaacucucggagccucggcgaaaaugaugacgggaacaaugaggauaacgagaagcugcgcaaacccaagcacaagaaacugaagcagccugccgacggaaauccggaucccaacgcgaauccuaacguugaccccaacgcuaauccuaacguggaucccaaugccaacccuaauguggacccgaacgccaaucccaacgcuaauccuaacgccaaucccaacgcuaauccuaacgccaaucccaacgcgaacccgaaugccaacccuaaugcuaaccccaaugccaacccuaaugcuaaccccaaugccaaccccaaugcgaacccuaaugccaacccgaaugcuaaccccaacgccaauccuaacgcuaaucccaacgccaauccuaacgucgaucccaaugccaacccgaaugcuaacccuaaugcgaaccccaaugccaacccuaaugcuaaccccaacgccaauccuaacgccaaucccaacgcuaauccgaacgccaauccuaacgcgaaucccaacgcuaaucccaacgccaauccuaacgccaauccgaacgcuaaucccaacgccaacccuaaugcuaaccccaaugccaacccuaaugcgaaccccggcgggggaggcuccgaaccuagcgacaaacauauuaaggaguaccucaauaaaauccagaacucucugauuaagcccggcuccgccaauaagccgaaagaugaacuugacuacgcuaacgauaucgagaagaaaauuuguaagauggagaaaugcagcugaggacuagucccuguucccagagcccacuuuuuuuucuuuuuuugaaauaaaauagccugucuuucagaucucaaaggcucuuuucagagccaccaaaaaaaaaaaaaaaaaaaaaaaaaaaaaaaaaaaaaaaaaaaaaaaaaaaaaaaaaaaaaaaaaaaaaaaaaaaaaaaaaaaaaaaaaaaaaaaaaaaaa

SEQ ID NO: 8184 - RNA, 1250 nt, Artificial Sequence
  mRNA Design a-1 (hSL-A100) comprising derived and/or modified sequence from Pf(3D7)__XP_001351122.1__HsALB_Pf-CSP(19-325) (opt5)
aggagagucccgcagucggcguccagcggcucugcuuguucgugugugugucguugcaggccuuauucaagcuuaccaugaagugggugaccuucaucagccugcucuuucuguucuccucugccuacagccuuuuucaggaguaucaaugcuacggcuccucuagcaacacaagaguccugaaugaacucaacuaugacaaugcugggacgaaccuguacaaugagcuugaaaugaacuauuacggaaaacaggagaauugguauucccugaagaaaaacucucggagccucggcgaaaaugaugacgggaacaaugaggauaacgagaagcugcgcaaacccaagcacaagaaacugaagcagccugccgacggaaauccggaucccaacgcgaauccuaacguugaccccaacgcuaauccuaacguggaucccaaugccaacccuaauguggacccgaacgccaaucccaacgcuaauccuaacgccaaucccaacgcuaauccuaacgccaaucccaacgcgaacccgaaugccaacccuaaugcuaaccccaaugccaacccuaaugcuaaccccaaugccaaccccaaugcgaacccuaaugccaacccgaaugcuaaccccaacgccaauccuaacgcuaaucccaacgccaauccuaacgucgaucccaaugccaacccgaaugcuaacccuaaugcgaaccccaaugccaacccuaaugcuaaccccaacgccaauccuaacgccaaucccaacgcuaauccgaacgccaauccuaacgcgaaucccaacgcuaaucccaacgccaauccuaacgccaauccgaacgcuaaucccaacgccaacccuaaugcuaaccccaaugccaacccuaaugcgaaccccaauaaaaacaaucagggcaacgggcaaggacauaauaugccuaacgaccccaauagaaacguggaugaaaaugccaacgcuaacuccgccguuaagaauaacaauaacgaggaaccgagcgacaaacacauuaaggaguaccucaauaagauccagaacugaggacuagucccuguucccagagcccacuuuuuuuucuuuuuuugaaauaaaauagccugucuuucagaucucaaaggcucuuuucagagccaccaaaaaaaaaaaaaaaaaaaaaaaaaaaaaaaaaaaaaaaaaaaaaaaaaaaaaaaaaaaaaaaaaaaaaaaaaaaaaaaaaaaaaaaaaaaaaaaaaaaaa

SEQ ID NO: 8185 - RNA, 1427 nt, Artificial Sequence
  mRNA Design a-1 (hSL-A100) comprising derived and/or modified sequence from Pf(3D7)__XP_001351122.1__HsALB_Pf-CSP(19-384) (opt5)
aggagagucccgcagucggcguccagcggcucugcuuguucgugugugugucguugcaggccuuauucaagcuuaccaugaagugggugaccuucaucagccugcucuuucuguucuccucugccuacagccuuuuucaggaguaucaaugcuacggcuccucuagcaacacaagagugcugaaugaacucaacuaugacaaugcugggacgaaccuguacaaugagcuugaaaugaacuauuacggaaaacaggagaauugguauucccugaagaaaaacucucggagccucggcgaaaaugaugacgggaacaaugaggauaacgagaagcugcgcaaacccaagcacaagaaacugaagcagccugccgacggaaauccggaucccaacgcgaauccuaacguugaccccaacgcuaauccuaacguggaucccaaugccaacccuaauguggacccgaacgccaaucccaacgcuaauccuaacgccaaucccaacgcuaauccuaacgccaaucccaacgcgaacccgaaugccaacccuaaugcuaaccccaaugccaacccuaaugcuaaccccaaugccaaccccaaugcgaacccuaaugccaacccgaaugcuaaccccaacgccaauccuaacgcuaaucccaacgccaauccuaacgucgaucccaaugccaacccgaaugcuaacccuaaugcgaaccccaaugccaacccuaaugcuaaccccaacgccaauccuaacgccaaucccaacgcuaauccgaacgccaauccuaacgcgaaucccaacgcuaaucccaacgccaauccuaacgccaauccgaacgcuaaucccaacgccaacccuaaugcuaaccccaaugccaacccuaaugcgaaccccaauaaaaacaaucagggcaacgggcaaggacauaauaugccuaacgaccccaauagaaacguggaugaaaaugccaacgcuaacuccgccguuaagaauaacaauaacgaggaaccgagcgacaaacacauuaaggaguaccucaauaagauccagaacucucuguccaccgaguggagcccuuguucugugacaugcggcaauggcauucagguccggaucaaacccggguccgcuaacaagccuaaagaugaacuugacuacgccaaugacauugagaagaaaaucuguaagauggaaaaaugcagcucuguguucaacguugucaauuccagcugaggacuagucccuguucccagagcccacuuuuuuuucuuuuuuugaaauaaaauagccugucuuucagaucucaaaggcucuuuucagagccaccaaaaaaaaaaaaaaaaaaaaaaaaaaaaaaaaaaaaaaaaaaaaaaaaaaaaaaaaaaaaaaaaaaaaaaaaaaaaaaaaaaaaaaaaaaaaaaaaaaaaa

SEQ ID NO: 8186 - RNA, 1565 nt, Artificial Sequence
  mRNA Design a-1 (hSL-A100) comprising derived and/or modified sequence from Pf(3D7)__XP_001351122.1__HsALB_Pf-CSP(19-384)_TM domain HA (opt5)
aggagagucccgcagucggcguccagcggcucugcuuguucgugugugugucguugcaggccuuauucaagcuuaccaugaagugggugaccuucaucagccugcucuuucuguucuccucugccuacagccuuuuucaggaguaucaaugcuacggcuccucuagcaacacaagaguccugaaugaacucaacuaugacaaugcugggacgaaccuguacaaugagcuugaaaugaacuauuacggaaaacaggagaauugguauucccugaagaaaaacucucggagccucggcgaaaaugaugacgggaacaaugaggauaacgagaagcugcgcaaacccaagcacaagaaacugaagcagccugccgacggaaauccggaucccaacgcgaauccuaacguugaccccaacgcuaauccuaacguggaucccaaugccaacccuaauguggacccgaacgccaaucccaacgcuaauccuaacgccaaucccaacgcuaauccuaacgccaaucccaacgcgaacccgaaugccaacccuaaugcuaaccccaaugccaacccuaaugcuaaccccaaugccaaccccaaugcgaacccuaaugccaacccgaaugcuaaccccaacgccaauccuaacgcuaaucccaacgccaauccuaacgucgaucccaaugccaacccgaaugcuaacccuaaugcgaaccccaaugccaacccuaaugcuaaccccaacgccaauccuaacgccaaucccaacgcuaauccgaacgccaauccuaacgcgaaucccaacgcuaaucccaacgccaauccuaacgccaauccgaacgcuaaucccaacgccaacccuaaugcuaaccccaaugccaacccuaaugcgaaccccaauaaaaacaaucagggcaacgggcaaggacauaauaugccuaacgaccccaauagaaacguggaugaaaaugccaacgcuaacuccgccguuaagaauaacaauaacgaggaaccgagcgacaaacacauuaaggaguaccucaauaagauccagaacucucuguccaccgaguggagcccuuguucugugacaugcggcaauggcauucagguccggaucaaacccggguccgcuaacaagccuaaagaugaacuugacuacgccaaugacauugagaagaaaaucuguaagauggaaaaaugcagcucuguguucaacguugucaauuccagcaagcuggaguccacccgcaucuaucagauucucgcgaucuacucuacaguggccagcucccuggugcuuguggucagccugggagcuauuucuuuuuggauguguuccaacggcagccuccaaugcagaaucuguauuugaggacuagucccuguucccagagcccacuuuuuuuucuuuuuuugaaauaaaauagccugucuuucagaucucaaaggcucuuuucagagccaccaaaaaaaaaaaaaaaaaaaaaaaaaaaaaaaaaaaaaaaaaaaaaaaaaaaaaaaaaaaaaaaaaaaaaaaaaaaaaaaaaaaaaaaaaaaaaaaaaaaaa

SEQ ID NO: 8187 - RNA, 1277 nt, Artificial Sequence
  mRNA Design a-1 (hSL-A100) comprising derived and/or modified sequence from Pf(3D7)__XP_001351122.1__HsALB_Pf-CSP(82-397) (opt5)
aggagagucccgcagucggcguccagcggcucugcuuguucgugugugugucguugcaggccuuauucaagcuuaccaugaagugggugaccuucaucagccugcucuuucuguucuccucugccuacagcgacaacgagaaacuuagaaagcccaaacacaagaaacugaagcagccugcugauggcaauccggaccccaacgccaauccuaacgucgaucccaaugcgaacccuaauguugaccccaacgcuaauccuaacguggauccgaaugccaaccccaaugccaacccuaaugcuaaccccaacgccaauccuaacgcuaaucccaacgccaauccgaacgcgaauccuaacgccaaucccaacgcuaauccuaacgccaaucccaacgcuaaucccaacgccaacccuaaugcgaacccgaaugccaaccccaaugcuaacccuaaugccaaccccaaugcuaacccuaauguggaccccaacgccaauccgaacgccaauccuaacgcuaaccccaaugcgaacccuaaugccaaccccaaugcuaacccuaaugccaaccccaaugccaacccgaaugcuaacccuaaugccaaccccaaugcgaaccccaacgcuaauccuaacgccaauccgaacgccaaucccaacgcuaauccuaacgccaaucccaacgcuaauccuaacgccaaucccaacaagaauaaccaagggaauggacagggccauaacaugccuaacgaucccaaucggaacgucgacgaaaaugcgaacgccaauuccgcugugaaaaacaauaacaaugaggaaccgucugauaagcacauuaaagaguaucucaacaagauccagaauagccuguccacagaauggucuccuugcagcguuacgugugggaacggcauucaggugcgcaucaaacccggauccgccaauaagccuaaggacgagcuugauuacgcuaacgacauugagaaaaagaucugcaaaauggaaaaguguagcucugucuuuaaugugguuaacuccagcaucgggcugauuauggugcucucuuuccuguuucugaacugaggacuagucccuguucccagagcccacuuuuuuuucuuuuuuugaaauaaaauagccugucuuucagaucucaaaggcucuuuucagagccaccaaaaaaaaaaaaaaaaaaaaaaaaaaaaaaaaaaaaaaaaaaaaaaaaaaaaaaaaaaaaaaaaaaaaaaaaaaaaaaaaaaaaaaaaaaaaaaaaaaaaa

SEQ ID NO: 8188 - RNA, 629 nt, Artificial Sequence
  mRNA Design a-1 (hSL-A100) comprising derived and/or modified sequence from Pf(3D7)__XP_001351122.1__HsALB_Pf-CSP(93-192) (opt5)
aggagagucccgcagucggcguccagcggcucugcuuguucgugugugugucguugcaggccuuauucaagcuuaccaugaagugggugaccuucaucagccugcucuuucuguucuccucugccuacagcaaacuuaagcagcccgcugacggcaacccugauccgaaugccaaccccaaugucgacccuaacgcgaaucccaacguugauccuaaugcuaaccccaauguggacccuaacgccaauccgaacgccaaucccaacgcuaauccuaacgccaaccccaaugcuaacccuaaugccaaccccaaugcgaacccgaaugccaacccuaaugcuaaccccaaugccaacccuaaugcuaaccccaaugccaaccccaacgcgaauccuaacgccaauccgaacgcuaaucccaacgccaauccuugaggacuagucccuguucccagagcccacuuuuuuuucuuuuuuugaaauaaaauagccugucuuucagaucucaaaggcucuuuucagagccaccaaaaaaaaaaaaaaaaaaaaaaaaaaaaaaaaaaaaaaaaaaaaaaaaaaaaaaaaaaaaaaaaaaaaaaaaaaaaaaaaaaaaaaaaaaaaaaaaaaaaa

SEQ ID NO: 8189 - RNA, 869 nt, Artificial Sequence
  mRNA Design a-1 (hSL-A100) comprising derived and/or modified sequence from Pf(3D7)__XP_001351122.1__HsALB_Pf-CSP(93-272) (opt5)
aggagagucccgcagucggcguccagcggcucugcuuguucgugugugugucguugcaggccuuauucaagcuuaccaugaagugggugaccuucaucagccugcucuuucuguucuccucugccuacagcaaacuuaagcagcccgcugacggcaacccugauccgaaugccaaccccaaugucgacccuaacgcgaaucccaacguugauccuaaugcuaaccccaauguggacccuaacgccaauccgaacgccaaucccaacgcuaauccuaacgccaaccccaaugcuaacccuaaugccaaccccaaugcgaacccgaaugccaacccuaaugcuaaccccaaugccaacccuaaugcuaaccccaaugccaaccccaacgcgaauccuaacgccaauccgaacgcuaaucccaacgccaauccuaacgcuaaucccaacguggauccuaaugccaaccccaaugccaacccgaaugcuaacccuaacgcgaaucccaacgccaauccuaacgcuaaucccaacgccaauccuaacgccaaucccaacgcuaauccgaacgccaauccuaacgcgaaucccaacgcuaaccccaaugccaacccuaaugccaacccgaaugcuaaccccaaugccaacccuaaugcuaaccccaaugccaacccuugaggacuagucccuguucccagagcccacuuuuuuuucuuuuuuugaaauaaaauagccugucuuucagaucucaaaggcucuuuucagagccaccaaaaaaaaaaaaaaaaaaaaaaaaaaaaaaaaaaaaaaaaaaaaaaaaaaaaaaaaaaaaaaaaaaaaaaaaaaaaaaaaaaaaaaaaaaaaaaaaaaaaa

SEQ ID NO: 8190 - RNA, 1244 nt, Artificial Sequence
  mRNA Design a-1 (hSL-A100) comprising derived and/or modified sequence from Pf(3D7)__XP_001351122.1__HsALB_Pf-CSP(93-397) (opt5)
aggagagucccgcagucggcguccagcggcucugcuuguucgugugugugucguugcaggccuuauucaagcuuaccaugaagugggugaccuucaucagccugcucuuucuguucuccucugccuacagcaaacuuaagcagcccgcugacggcaacccugauccgaaugccaaccccaaugucgacccuaacgcgaaucccaacguugauccuaaugcuaaccccaauguggacccuaacgccaauccgaacgccaaucccaacgcuaauccuaacgccaaccccaaugcuaacccuaaugccaaccccaaugcgaacccgaaugccaacccuaaugcuaaccccaaugccaacccuaaugcuaaccccaaugccaaccccaacgcgaauccuaacgccaauccgaacgcuaaucccaacgccaauccuaacgcuaaucccaacguggauccuaaugccaaccccaaugccaacccgaaugcuaacccuaacgcgaaucccaacgccaauccuaacgcuaaucccaacgccaauccuaacgccaaucccaacgcuaauccgaacgccaauccuaacgcgaaucccaacgcuaaccccaaugccaacccuaaugccaacccgaaugcuaaccccaaugccaacccuaaugcuaaccccaaugccaacccuaauaaaaacaaucaagggaacggacagggccacaauaugcccaacgacccuaacagaaaugucgaugagaacgcgaaugccaacuccgcugugaagaauaacaauaacgaggaacccucugacaaacauauuaaggaauaucugaauaagauccagaacagccucuccacagaguggucuccgugcagcguuacgugugggaauggcauucaggugcggaucaaaccuggauccgccaacaagcccaaagaugaacuggacuacgcuaaugauauugagaagaaaaucugcaagauggagaaguguagcucugucuuuaacgugguuaauuccagcaucgggcuuauuauggugcugucuuuccucuuucugaacugaggacuagucccuguucccagagcccacuuuuuuuucuuuuuuugaaauaaaauagccugucuuucagaucucaaaggcucuuuucagagccaccaaaaaaaaaaaaaaaaaaaaaaaaaaaaaaaaaaaaaaaaaaaaaaaaaaaaaaaaaaaaaaaaaaaaaaaaaaaaaaaaaaaaaaaaaaaaaaaaaaaaa

SEQ ID NO: 8191 - RNA, 614 nt, Artificial Sequence
  mRNA Design a-1 (hSL-A100) comprising derived and/or modified sequence from Pf(3D7)__XP_001351122.1__HsALB_Pf-CSP(98-192) (opt5)
aggagagucccgcagucggcguccagcggcucugcuuguucgugugugugucguugcaggccuuauucaagcuuaccaugaagugggugaccuucaucagccugcucuuucuguucuccucugccuacagcgcugacggcaaccccgauccuaaugccaacccgaaugucgaccccaacgcgaauccuaacguugaucccaaugcuaacccuaauguggaccccaacgccaauccuaacgccaauccgaacgcuaaucccaacgccaacccuaaugcuaaccccaaugccaacccuaaugcgaaccccaaugccaacccgaaugcuaacccuaaugccaaccccaaugcuaacccuaaugccaaccccaacgcgaaucccaacgccaauccuaacgcuaauccgaacgccaaucccugaggacuagucccuguucccagagcccacuuuuuuuucuuuuuuugaaauaaaauagccugucuuucagaucucaaaggcucuuuucagagccaccaaaaaaaaaaaaaaaaaaaaaaaaaaaaaaaaaaaaaaaaaaaaaaaaaaaaaaaaaaaaaaaaaaaaaaaaaaaaaaaaaaaaaaaaaaaaaaaaaaaaa

SEQ ID NO: 8192 - RNA, 854 nt, Artificial Sequence
  mRNA Design a-1 (hSL-A100) comprising derived and/or modified sequence from Pf(3D7)__XP_001351122.1__HsALB_Pf-CSP(98-272) (opt5)
aggagagucccgcagucggcguccagcggcucugcuuguucgugugugugucguugcaggccuuauucaagcuuaccaugaagugggugaccuucaucagccugcucuuucuguucuccucugccuacagcgcugacggcaaccccgauccuaaugccaacccgaaugucgaccccaacgcgaauccuaacguugaucccaaugcuaacccuaauguggaccccaacgccaauccuaacgccaauccgaacgcuaaucccaacgccaacccuaaugcuaaccccaaugccaacccuaaugcgaaccccaaugccaacccgaaugcuaacccuaaugccaaccccaaugcuaacccuaaugccaaccccaacgcgaaucccaacgccaauccuaacgcuaauccgaacgccaaucccaacgcuaauccuaacguggaucccaaugccaacccuaaugccaaccccaaugcuaacccgaacgcgaauccuaacgccaaucccaacgcuaauccuaacgccaaucccaacgccaauccuaacgcuaaucccaacgccaauccgaacgcgaauccuaacgcuaaccccaaugccaaccccaaugccaacccuaaugcuaacccgaaugccaaccccaaugcuaacccuaaugccaaccccugaggacuagucccuguucccagagcccacuuuuuuuucuuuuuuugaaauaaaauagccugucuuucagaucucaaaggcucuuuucagagccaccaaaaaaaaaaaaaaaaaaaaaaaaaaaaaaaaaaaaaaaaaaaaaaaaaaaaaaaaaaaaaaaaaaaaaaaaaaaaaaaaaaaaaaaaaaaaaaaaaaaaa

SEQ ID NO: 8193 - RNA, 1160 nt, Artificial Sequence
  mRNA Design a-1 (hSL-A100) comprising derived and/or modified sequence from Pf(3D7)__XP_001351122.1__HsALB_Pf-CSP(98-374) (opt5)
aggagagucccgcagucggcguccagcggcucugcuuguucgugugugugucguugcaggccuuauucaagcuuaccaugaagugggugaccuucaucagccugcucuuucuguucuccucugccuacagcgcugacggcaaccccgauccuaaugccaacccgaaugucgaccccaacgcgaauccuaacguugaucccaaugcuaacccuaauguggaccccaacgccaauccuaacgccaauccgaacgcuaaucccaacgccaacccuaaugcuaaccccaaugccaacccuaaugcgaaccccaaugccaacccgaaugcuaacccuaaugccaaccccaaugcuaacccuaaugccaaccccaacgcgaaucccaacgccaauccuaacgcuaauccgaacgccaaucccaacgcuaauccuaacguggaucccaaugccaacccuaaugccaaccccaaugcuaacccgaacgcgaauccuaacgccaaucccaacgcuaauccuaacgccaaucccaacgccaauccuaacgcuaaucccaacgccaauccgaacgcgaauccuaacgcuaaccccaaugccaaccccaaugccaacccuaaugcuaacccgaaugccaaccccaaugcuaacccuaaugccaaccccaauaaaaacaaucaggggaacggacaaggccacaauaugccuaacgaccccaacagaaaugucgaugagaacgcgaaugccaacuccgcugugaagaauaacaauaacgaggaaccuucugacaaacauauuaaggaauaucuuaauaaaauccagaacagccuguccacagaguggucucccugcagcguuacgugugggaauggcauucaggugcggaucaagccgggauccgccaacaagccuaaagaugaacucgacuacgcuaaugauauugagaagaaaaucugcaagauggagaaauguugaggacuagucccuguucccagagcccacuuuuuuuucuuuuuuugaaauaaaauagccugucuuucagaucucaaaggcucuuuucagagccaccaaaaaaaaaaaaaaaaaaaaaaaaaaaaaaaaaaaaaaaaaaaaaaaaaaaaaaaaaaaaaaaaaaaaaaaaaaaaaaaaaaaaaaaaaaaaaaaaaaaaa

SEQ ID NO: 8194 - RNA, 1229 nt, Artificial Sequence
  mRNA Design a-1 (hSL-A100) comprising derived and/or modified sequence from Pf(3D7)__XP_001351122.1__HsALB_Pf-CSP(98-397) (opt5)
aggagagucccgcagucggcguccagcggcucugcuuguucgugugugugucguugcaggccuuauucaagcuuaccaugaagugggugaccuucaucagccugcucuuucuguucuccucugccuacagcgcugacggcaaccccgauccuaaugccaacccgaaugucgaccccaacgcgaauccuaacguugaucccaaugcuaacccuaauguggaccccaacgccaauccuaacgccaauccgaacgcuaaucccaacgccaacccuaaugcuaaccccaaugccaacccuaaugcgaaccccaaugccaacccgaaugcuaacccuaaugccaaccccaaugcuaacccuaaugccaaccccaacgcgaaucccaacgccaauccuaacgcuaauccgaacgccaaucccaacgcuaauccuaacguggaucccaaugccaacccuaaugccaaccccaaugcuaacccgaacgcgaauccuaacgccaaucccaacgcuaauccuaacgccaaucccaacgccaauccuaacgcuaaucccaacgccaauccgaacgcgaauccuaacgcuaaccccaaugccaaccccaaugccaacccuaaugcuaacccgaaugccaaccccaaugcuaacccuaaugccaaccccaauaaaaacaaucaggggaacggacaaggccacaauaugccuaacgaccccaacagaaaugucgaugagaacgcgaaugccaacuccgcugugaagaauaacaauaacgaggaaccuucugacaaacauauuaaggaauaucuuaauaaaauccagaacagccuguccacagaguggucucccugcagcguuacgugugggaauggcauucaggugcggaucaagccgggauccgccaacaagccuaaagaugaacucgacuacgcuaaugauauugagaagaaaaucugcaagauggagaaauguagcucugucuuuaacgugguuaauuccagcaucgggcugauuauggugcuuucuuuccuguuucucaacugaggacuagucccuguucccagagcccacuuuuuuuucuuuuuuugaaauaaaauagccugucuuucagaucucaaaggcucuuuucagagccaccaaaaaaaaaaaaaaaaaaaaaaaaaaaaaaaaaaaaaaaaaaaaaaaaaaaaaaaaaaaaaaaaaaaaaaaaaaaaaaaaaaaaaaaaaaaaaaaaaaaaa

SEQ ID NO: 8195 - RNA, 1556 nt, Artificial Sequence
  mRNA Design a-1 (hSL-A100) comprising derived and/or modified sequence from Pf(3D7)__XP_001351122.1__HsALB_Pf-CSP(199-377)_L(PVTN)_HBsAg (opt5)
aggagagucccgcagucggcguccagcggcucugcuuguucgugugugugucguugcaggccuuauucaagcuuaccaugaagugggugaccuucaucagccugcucuuucuguucuccucugccuacagcgaccccaacgcuaauccuaacgccaauccgaacgcgaaucccaacgcuaauccuaacgccaaucccaacgccaauccuaacgcuaaucccaacgccaauccuaacgcuaacccgaaugccaaccccaaugcgaacccuaaugccaaccccaaugcuaacccuaaugccaaccccaaugcuaacccgaaugccaacccuaaugcgaaccccaacgccaauccuaacaaaaauaaccagggcaaugggcaaggacacaacaugcccaaugaucccaacagaaaugucgacgagaacgcuaaugccaacuccgcuguuaagaauaacaauaacgaggaaccuucugauaaacauauuaaggaauaucuuaacaaaauccagaauagccuguccacagaguggucuccgugcagcgugacguguggcaacgggauucaggugcggaucaagcccggauccgccaauaagccuaaagacgaacucgauuacgccaacgacauugagaagaaaaucugcaagauggagaaauguagcucuguccccgugaccaauauggaaaacaucacauccggcuuucuggggccucuucugguucuccaggcuggauucuuucugcugacccgcauucucacaaucccccaaagccuggauucuugguggaccucccuuaauuuccugggcggcagcccggugugccucgggcagaacucucaguccccuacaagcaaucacucccccaccucuuguccucccauuugcccuggauauagauggaugugucugcggcgcuuuaucauuuuccuuuuuauccugcuccugugccugauuuuccuccugguccuucuggacuaccagggcaugcuccccguguguccgcugaucccugggagcacgaccacaaacaccggacccugcaagacauguaccacgcccgcgcaaggcaauuccauguuuccuagcugcugcuguacaaagccgaccgaugggaacugcacauguauccccauuccuucuuccugggccuucgcuaaauaucuuugggagugggccagcguuagauuuucuuggcugagccuccuggugcccuucguccagugguucgugggacuguccccuaccguguggcucucugccaucuggaugaugugguacuggggccccagccuguauuccauugucagcccuuuuaucccccuucugccgauuuucuuuugccucuggguuuacaucugaggacuagucccuguucccagagcccacuuuuuuuucuuuuuuugaaauaaaauagccugucuuucagaucucaaaggcucuuuucagagccaccaaaaaaaaaaaaaaaaaaaaaaaaaaaaaaaaaaaaaaaaaaaaaaaaaaaaaaaaaaaaaaaaaaaaaaaaaaaaaaaaaaaaaaaaaaaaaaaaaaaaa

SEQ ID NO: 8196 - RNA, 1466 nt, Artificial Sequence
  mRNA Design a-1 (hSL-A100) comprising derived and/or modified sequence from Pf(3D7)__XP_001351122.1__Pf-CSP (opt6)
aggagagucccgcagucggcguccagcggcucugcuuguucgugugugugucguugcaggccuuauucaagcuuaccaugaugagaaaacuugcaauacuaagcguaucuucauuccuauucguagaagcacuauuccaagaauaucaaugcuauggaucaagcuccaacacaagaguacuuaacgaacuaaauuacgacaaugcaggaacaaaccuauacaaugaacuugaaaugaauuacuacggcaaacaagaaaacugguacucccuaaaaaaaaacucaaggucauuaggagaaaacgacgacggaaacaacgaagacaacgaaaaacuacgaaaacccaaacacaaaaaauuaaaacaaccagcagacggaaaccccgacccaaacgcaaacccaaacgucgacccaaacgcaaacccgaacguagacccaaacgcgaacccaaacguagacccaaacgcaaacccaaacgcaaacccaaacgcaaacccaaacgcaaacccaaaugcaaacccaaacgcaaacccaaacgccaauccaaacgccaacccaaacgcaaacccaaacgcaaacccaaacgcaaacccaaacgcaaaccccaacgcaaacccaaacgcuaacccaaacgcaaacccuaaugcaaacccuaacgcaaacccaaacgucgacccgaacgcaaacccaaaugcaaacccaaacgcaaacccaaacgcaaaccccaacgccaacccaaaugcaaacccaaaugcaaauccaaacgcaaacccaaacgcaaacccuaacgcaaacccaaacgcaaaccccaacgcaaacccaaacgcaaacccaaacgccaacccaaacgcaaaccccaaugcaaacccaaacgcaaacccaaacgcaaacccaaacaaaaacaaucaaggcaacggacaaggacacaacaugcccaacgacccaaaccgaaacgucgacgaaaacgccaacgcaaacagcgcaguaaaaaacaacaacaacgaagaacccucagacaaacacauaaaagaauacuuaaacaaaauacaaaacucacuaucuacagaauggucacccuguagcguaaccugcggcaacggaauacaaguaagaauaaaaccaggcucagcaaacaaaccaaaagaugaacuagacuacgccaaugauauagaaaaaaaaauauguaaaauggaaaaauguagcucagucuucaacguagucaacucaucaauaggacuaauaaugguacucuccuuccucuuccuaaauuaaggacuagucccuguucccagagcccacuuuuuuuucuuuuuuugaaauaaaauagccugucuuucagaucucaaaggcucuuuucagagccaccaaaaaaaaaaaaaaaaaaaaaaaaaaaaaaaaaaaaaaaaaaaaaaaaaaaaaaaaaaaaaaaaaaaaaaaaaaaaaaaaaaaaaaaaaaaaaaaaaaaaa

SEQ ID NO: 8197 - RNA, 1397 nt, Artificial Sequence
  mRNA Design a-1 (hSL-A100) comprising derived and/or modified sequence from Pf(3D7)__XP_001351122.1__Pf-CSP(1-374) (opt6)
aggagagucccgcagucggcguccagcggcucugcuuguucgugugugugucguugcaggccuuauucaagcuuaccaugaugagaaaacuagcaauauuaagcguaagcucauuccuauucguugaagcauuauuccaagaauaccaaugcuacggcucaagcucaaacacaagaguauuaaacgaauuaaacuacgacaaugcaggaaccaaccucuacaacgaacuagaaaugaauuauuacggcaaacaagaaaacugguacucacucaaaaaaaacucacgaucccuaggagaaaacgaugacggaaacaaugaagauaacgaaaaauuaagaaaaccaaaacacaaaaaauuaaaacaaccugcagacggaaacccagacccaaacgcaaauccaaauguagacccaaacgcaaaccccaacguagacccaaaugcaaacccaaacguagacccaaacgcaaacccaaaugcaaacccaaacgcaaacccaaacgcaaacccaaacgcaaaccccaacgcaaacccaaacgcaaacccaaacgccaaccccaacgcaaacccaaacgcaaacccgaaugcaaacccaaacgcaaacccaaacgcaaacccaaacgcaaacccaaacgcaaacccaaacgcaaacccaaaugcaaacccaaacguggauccaaacgcaaauccaaacgcaaacccaaacgcaaacccaaacgcaaaccccaacgcaaauccaaacgcaaaccccaaugcaaauccaaacgcaaacccaaacgccaacccaaacgcaaacccgaacgccaauccaaacgcaaacccaaacgcaaacccaaacgcaaacccaaacgccaacccaaacgcaaacccaaacgcaaacccaaacgcaaaccccaacaaaaacaaccaaggaaacggacaaggacacaacaugccaaacgauccaaacagaaacgucgacgaaaacgccaacgcuaacagcgcaguaaaaaacaauaacaacgaagaaccaucagacaaacauauaaaagaauacuuaaacaaaauccaaaacucacuaucaacagaauggucccccuguuccguaacaugcggaaacggaauacaaguacgaaucaaaccaggaucagccaacaaaccgaaagacgaacuagacuaugccaacgauauagaaaaaaaaauaugcaaaauggaaaaaugcugaggacuagucccuguucccagagcccacuuuuuuuucuuuuuuugaaauaaaauagccugucuuucagaucucaaaggcucuuuucagagccaccaaaaaaaaaaaaaaaaaaaaaaaaaaaaaaaaaaaaaaaaaaaaaaaaaaaaaaaaaaaaaaaaaaaaaaaaaaaaaaaaaaaaaaaaaaaaaaaaaaaaa

SEQ ID NO: 8198 - RNA, 1250 nt, Artificial Sequence
  mRNA Design a-1 (hSL-A100) comprising derived and/or modified sequence from Pf(3D7)__XP_001351122.1__Pf-CSP(1-325) (opt6)
aggagagucccgcagucggcguccagcggcucugcuuguucgugugugugucguugcaggccuuauucaagcuuaccaugaugcgaaaauuagcaauacuaagcguaagcucauucuuauucguagaagcacucuuccaagaauaccaaugcuacggaucaagcucaaacacaagaguccuaaacgaauuaaacuaugacaacgcaggaacaaaccuauacaacgaacuagaaaugaacuacuacggaaaacaagaaaacugguacucacucaaaaaaaacagcagaagucuaggagaaaacgacgacggaaacaacgaagacaacgaaaaacuacgaaaaccaaaacacaaaaaacuaaaacaaccagcagacgggaacccagacccaaacgcaaacccaaacguagauccaaacgcaaacccaaauguagacccuaacgcaaacccaaauguagacccaaacgcaaacccuaacgcaaacccaaaugcaaacccaaacgcaaauccaaacgcaaacccaaacgcaaacccaaacgcgaacccaaacgcaaacccaaacgcaaacccaaaugcaaaccccaacgcaaauccaaaugcaaacccaaaugcaaauccaaacgcaaacccaaacgcaaacccaaaugcaaauccaaacgcaaauccaaacguggauccaaacgcaaacccaaacgcaaacccaaacgcaaacccaaacgcaaacccaaacgcaaacccaaacgcaaauccaaacgccaauccaaacgcaaauccaaaugcaaacccaaacgcaaacccaaacgcaaacccaaacgcaaacccaaacgcaaacccaaacgcaaacccaaacgcaaacccaaacgcaaacccaaacgcaaacccaaacgcaaacccaaacaaaaacaaccaaggaaacggacaaggacacaacaugccaaacgacccaaacagaaacguagacgaaaacgccaacgcaaauagcgcagucaaaaacaacaauaacgaagaaccaucggacaaacacauaaaagaauacuuaaacaaaauacaaaacugaggacuagucccuguucccagagcccacuuuuuuuucuuuuuuugaaauaaaauagccugucuuucagaucucaaaggcucuuuucagagccaccaaaaaaaaaaaaaaaaaaaaaaaaaaaaaaaaaaaaaaaaaaaaaaaaaaaaaaaaaaaaaaaaaaaaaaaaaaaaaaaaaaaaaaaaaaaaaaaaaaaaa

SEQ ID NO: 8199 - RNA, 1466 nt, Artificial Sequence
  mRNA Design a-1 (hSL-A100) comprising derived and/or modified sequence from Pf(3D7)__XP_001351122.1__HsALB_Pf-CSP(19-397) (opt6)
aggagagucccgcagucggcguccagcggcucugcuuguucgugugugugucguugcaggccuuauucaagcuuaccaugaaaugggucacauuuauuucacuacuauucuuauucucaagcgcauacucacuauuucaagaauaccaaugcuacggcucauccucaaauacacgaguacuaaaugaacucaacuacgacaacgcaggaaccaaucucuacaacgaauuagaaaugaacuacuacggcaaacaagaaaacugguauucacuaaaaaaaaacaguagaucacuaggagaaaaugacgacggaaacaaugaagacaacgaaaaacuaagaaaaccaaaacacaaaaaauuaaaacaaccagcagacggaaacccagacccaaacgcaaacccuaacguagaucccaaugccaacccaaauguagacccaaacgcaaaccccaacgucgauccaaacgcaaacccaaacgcaaacccaaacgcaaacccaaacgcaaacccaaacgcaaacccaaaugcaaaccccaacgcaaacccaaacgcuaacccaaacgcaaacccaaacgcaaacccaaacgcaaacccaaacgcaaacccaaacgccaacccaaacgccaacccaaacgcaaauccaaacgcaaacccaaaugccaauccaaacguugacccaaacgcaaacccaaacgcaaaccccaacgcaaacccaaacgcaaauccaaacgcgaaccccaacgcaaacccaaacgcaaacccaaaugcaaacccaaacgcuaacccaaaugcaaacccaaacgccaacccaaacgccaacccaaacgcaaaccccaacgcaaacccaaacgcaaacccaaacgccaauccaaacgcaaacccaaaugcaaacccaaacaaaaacaaccaaggaaacggacaaggacacaacaugccaaacgaccccaacagaaacguagaugaaaaugcaaaugcuaacucagccguaaaaaacaauaacaacgaagaaccaucagacaaacacauaaaagaauaccuaaauaaaauacaaaauuccuuaucaacagaaugguccccaugcucaguaacuugcgguaacggcauacaaguaagaauaaaaccaggaucagcaaacaaaccaaaagacgaauuagacuaugcaaacgacauagaaaaaaaaauauguaaaauggaaaaaugcagcucaguauucaacguaguaaauuccucaaucggacucaucaugguauuaucauuccuauuuuuaaauuaaggacuagucccuguucccagagcccacuuuuuuuucuuuuuuugaaauaaaauagccugucuuucagaucucaaaggcucuuuucagagccaccaaaaaaaaaaaaaaaaaaaaaaaaaaaaaaaaaaaaaaaaaaaaaaaaaaaaaaaaaaaaaaaaaaaaaaaaaaaaaaaaaaaaaaaaaaaaaaaaaaaaa

SEQ ID NO: 8200 - RNA, 1484 nt, Artificial Sequence
  mRNA Design a-1 (hSL-A100) comprising derived and/or modified sequence from Pf(3D7)__XP_001351122.1__HsIns-iso1_Pf-CSP(19-397) (opt6)
aggagagucccgcagucggcguccagcggcucugcuuguucgugugugugucguugcaggccuuauucaagcuuaccauggcacuauggaugagacuacuaccacuacuagcacuccuagccuuauggggacccgauccagccgcagcacucuuccaagaauaccaaugcuauggaucauccuccaacacaagaguccuaaacgaauuaaauuacgacaacgcuggaacaaaccuauacaaugaacuagaaaugaauuauuacggaaaacaagaaaauugguacucacuaaaaaaaaacucuagaagccuaggagaaaacgacgacggaaacaacgaagauaacgaaaaacuaagaaaaccaaaacacaaaaaauuaaaacaacccgcagacggcaacccagacccaaaugcaaauccaaacguagacccaaacgcaaauccaaacguagacccaaacgcaaacccaaauguagacccaaacgcaaauccaaacgcaaacccaaaugcaaacccaaaugcaaacccaaacgcaaauccaaacgcaaaucccaacgccaacccaaacgcaaacccaaacgcaaauccaaacgcaaacccaaacgcaaacccaaacgcaaacccaaacgcaaacccaaaugcaaacccaaaugccaauccaaacgccaacccaaacgcaaacccaaacguagacccaaacgcaaacccaaacgccaacccaaacgcaaaccccaaugcaaacccaaacgcaaacccaaacgcaaaccccaacgcaaauccaaacgcaaacccaaacgcaaauccaaacgcaaauccaaacgccaacccaaacgcaaacccaaacgcaaauccaaacgcaaaccccaacgcaaacccaaacgccaacccaaaugcaaacccaaacgcaaaucccaauaaaaacaaccaaggaaacggacaaggacacaacaugccaaacgauccaaacagaaacguagacgaaaacgcaaacgcaaacucagcagucaaaaacaauaacaacgaagaaccaucagacaaacacauaaaagaauaccuaaacaaaauacaaaacucacuauccacagaauggucaccaugcucaguaaccugcggaaacggaauacaaguaagaauaaaaccaggaucagccaacaaaccaaaagacgaacuagacuaugcuaaugacauagaaaaaaaaauaugcaaaauggaaaaaugcuccucaguauucaacgucguaaacucuucaauaggacuaauaaugguacuauccuucuuauuucuaaacuaaggacuagucccuguucccagagcccacuuuuuuuucuuuuuuugaaauaaaauagccugucuuucagaucucaaaggcucuuuucagagccaccaaaaaaaaaaaaaaaaaaaaaaaaaaaaaaaaaaaaaaaaaaaaaaaaaaaaaaaaaaaaaaaaaaaaaaaaaaaaaaaaaaaaaaaaaaaaaaaaaaaaa

SEQ ID NO: 8201 - RNA, 1463 nt, Artificial Sequence
  mRNA Design a-1 (hSL-A100) comprising derived and/or modified sequence from Pf(3D7)__XP_001351122.1__HsSPARC_Pf-CSP(19-397) (opt6)
aggagagucccgcagucggcguccagcggcucugcuuguucgugugugugucguugcaggccuuauucaagcuuaccaugcgcgcauggauauucuuccuccuaugucuagcaggucgagcacuugcacucuuccaagaauaccaauguuacggauccucaagcaacacacgaguacuaaacgaacuaaacuacgauaacgcaggaaccaacuuauacaacgaacuagaaaugaacuacuacggcaaacaagaaaacugguacucacucaaaaaaaacagcagaagccuaggagaaaaugacgacggaaacaacgaagauaacgaaaaauuacgaaaacccaaacacaaaaaauuaaaacaacccgcagauggaaauccagacccgaacgcaaacccaaacguagacccaaacgcaaacccaaacguugacccaaacgcaaacccaaacguagacccaaacgcaaacccuaacgccaacccaaacgcaaacccaaacgcaaacccaaaugcgaacccaaaugcaaacccaaacgccaacccaaaugcaaaccccaacgcaaauccaaacgcaaacccaaaugcaaacccaaacgcaaacccaaacgcaaacccaaacgcaaacccaaacgccaaccccaaugcaaacccaaacgcaaacccaaacgucgacccaaacgcaaacccaaacgcaaacccaaacgcaaauccaaacgcaaauccaaacgcaaacccuaacgcaaacccaaacgcaaacccaaaugcaaauccaaacgcaaacccaaacgcaaacccaaacgcaaauccaaacgcaaacccaaacgcaaacccaaacgcaaacccuaaugcaaacccaaaugcaaauccaaacgcaaacccaaaugcaaaccccaacaaaaacaaccaaggaaacggacaaggacacaauaugccaaacgacccaaacagaaacguagacgaaaacgcaaacgccaacagcgcaguaaaaaacaacaacaacgaagaaccaucagacaaacacauaaaagaauaccuaaacaaaauacaaaacucacuaucaacagaauggucucccugcuccguaacaugcggaaacggcauacaaguacgaauaaaaccuggaucagccaacaaaccaaaagacgaacuagacuaugcaaaugacauagaaaaaaaaauaugcaaaauggaaaaaugcaguucagucuucaacguagucaacagcucaauaggccuaauaaugguacucucauuccuauucuuaaacuaaggacuagucccuguucccagagcccacuuuuuuuucuuuuuuugaaauaaaauagccugucuuucagaucucaaaggcucuuuucagagccaccaaaaaaaaaaaaaaaaaaaaaaaaaaaaaaaaaaaaaaaaaaaaaaaaaaaaaaaaaaaaaaaaaaaaaaaaaaaaaaaaaaaaaaaaaaaaaaaaaaaaa

SEQ ID NO: 8202 - RNA, 1466 nt, Artificial Sequence
  mRNA Design a-1 (hSL-A100) comprising derived and/or modified sequence from Pf(3D7)__XP_001351122.1__IgE_Pf-CSP(19-397) (opt6)
aggagagucccgcagucggcguccagcggcucugcuuguucgugugugugucguugcaggccuuauucaagcuuaccauggauuggacauggauucucuuccucguagcagcagccacaagaguacacucuuuauuucaagaauaccaaugcuacggaucaagcucaaacacacgcguacuaaacgaacuaaacuacgacaacgcaggaacaaacuuauacaacgaacuagaaaugaacuauuauggcaaacaagaaaacugguacucacuaaaaaaaaacuccagaagcuuaggagaaaacgacgacggaaacaacgaagacaacgaaaaacuacgcaaaccuaaacacaaaaaacuaaaacaaccugcagacggaaacccagacccaaacgcgaacccaaacguagauccaaacgcaaacccaaacguagaucccaacgcaaacccgaacguagacccuaacgcaaauccaaacgcaaaccccaacgcaaacccgaacgcaaacccaaacgcaaacccaaacgcaaacccaaacgcaaacccaaacgcaaacccaaacgccaacccaaacgcaaauccaaacgcuaacccaaaugcaaacccuaacgcaaacccaaacgccaacccaaacgcaaacccaaacgcaaacccaaacgcaaaucccaauguagacccaaacgcaaacccaaacgcaaacccaaacgcuaacccaaaugcaaacccaaacgcaaacccaaacgcaaacccaaacgcuaaccccaacgcaaacccgaacgcaaacccaaaugcaaacccaaacgcaaacccaaaugcaaacccaaacgcaaacccaaacgcaaaccccaaugccaacccaaacgcaaauccaaaugccaauccaaacgcaaacccaaacaaaaacaaccaaggaaauggacaaggacauaacaugccaaacgaccccaaccgaaauguagacgaaaacgccaacgcaaauagugcagucaaaaacaauaacaaugaagaacccucagauaaacauauaaaagaauacuuaaacaaaauacaaaacucacuaucaaccgaguggucuccuugcucaguaacauguggaaacggaauacaaguacgaauaaaaccaggaucagcaaacaaaccgaaagacgaacuagacuacgccaacgacauagaaaagaaaauauguaaaauggagaaauguaguucaguauucaacgugguaaacagcucaauaggccuaauaaugguacucucuuuccuauuccuaaacuaaggacuagucccuguucccagagcccacuuuuuuuucuuuuuuugaaauaaaauagccugucuuucagaucucaaaggcucuuuucagagccaccaaaaaaaaaaaaaaaaaaaaaaaaaaaaaaaaaaaaaaaaaaaaaaaaaaaaaaaaaaaaaaaaaaaaaaaaaaaaaaaaaaaaaaaaaaaaaaaaaaaaa

SEQ ID NO: 8203 - RNA, 1631 nt, Artificial Sequence
  mRNA Design a-1 (hSL-A100) comprising derived and/or modified sequence from Pf(3D7)__XP_001351122.1__Pf-CSP_L(G4SG4)_TM domain HA (opt6)
aggagagucccgcagucggcguccagcggcucugcuuguucgugugugugucguugcaggccuuauucaagcuuaccaugaugcguaaacuagcaauacuaucugucaguucauucuuauucguagaagcacuauuccaagaauaccaauguuacggaucuucaucaaacacaagaguacucaacgaauuaaacuacgauaacgcuggaaccaauuuauacaacgaacuagaaaugaacuacuauggaaaacaagaaaacugguauucacuaaaaaaaaacagcagaaguuuaggagaaaaugacgacggaaacaaugaagacaaugaaaaauuacgaaaaccaaaacacaaaaaauuaaaacaacccgccgacggaaauccagacccaaacgcaaacccaaauguagacccaaacgcaaacccaaauguagaucccaacgcaaacccaaacguagaucccaaugcaaacccaaacgcaaacccaaaugcaaaccccaacgcaaacccaaaugcaaacccuaacgcaaacccgaacgcaaacccaaacgcaaaucccaaugcaaaccccaacgcaaauccaaaugcaaacccuaacgcaaauccgaacgcaaauccaaacgcaaacccaaacgcaaacccaaacgcaaacccaaacgcaaacccaaacgucgacccaaacgccaauccaaacgcaaaccccaaugcaaacccaaaugcaaacccaaacgcaaacccaaaugccaacccaaacgcaaacccaaacgcaaacccaaacgcaaacccaaacgcaaacccaaaugcaaacccaaaugcaaacccaaacgccaacccaaacgcaaacccaaacgcaaacccaaacgccaacccaaacgcaaacccuaacgcaaauccaaacaaaaacaaccaagggaacggacaaggacacaacaugccaaacgacccaaacagaaacguagacgaaaacgccaacgcaaacucagcugucaaaaacaauaacaacgaagaacccuccgauaaacacauaaaagaauaccuaaacaaaauccaaaacucccuuucuacagaauggucacccugcucaguaacaugcggcaacggcauacaaguuagaaucaaaccaggaucagcaaauaaaccaaaagacgaauuagacuaugccaacgacauagaaaaaaaaauauguaaaauggaaaaaugcucaucaguuuucaacguaguaaacagcucaaucggauuaauaaugguacuaucauucuuauuuuuaaacggaggaggaggcuccggcggagguggaaaacuagaaucaacuagaauauaccaaauauuagcaauauacucaacaguagcaucaucacucguauuaguaguaucgcuaggagcaauaaguuucuggaugugcucuaacggaagccuacaaugccgaauaugcauauaaggacuagucccuguucccagagcccacuuuuuuuucuuuuuuugaaauaaaauagccugucuuucagaucucaaaggcucuuuucagagccaccaaaaaaaaaaaaaaaaaaaaaaaaaaaaaaaaaaaaaaaaaaaaaaaaaaaaaaaaaaaaaaaaaaaaaaaaaaaaaaaaaaaaaaaaaaaaaaaaaaaaa

SEQ ID NO: 8204 - RNA, 1505 nt, Artificial Sequence
  mRNA Design a-1 (hSL-A100) comprising derived and/or modified sequence from Pf(3D7)__XP_001351122.1__Pf-CSP(199-377)_L(PVTN)_HBsAg (opt6)
aggagagucccgcagucggcguccagcggcucugcuuguucgugugugugucguugcaggccuuauucaagcuuaccauggacccaaacgccaaccccaacgcaaacccaaaugcaaacccaaacgcuaaccccaacgcaaacccaaacgcuaacccuaacgcaaauccaaacgcaaaucccaacgcaaauccaaacgcaaacccaaacgcaaacccaaaugccaacccaaacgcaaacccuaacgcaaaucccaacgcaaauccaaaugcaaaccccaaugcaaacccaaacgcaaauccaaacaaaaauaaucaaggaaauggacaaggacauaacaugccaaacgacccuaaccgaaacgucgacgaaaaugcaaacgcaaacuccgcaguaaaaaacaacaacaacgaagaaccuuccgacaaacacauaaaagaauaccuaaacaaaauacaaaacucucuauccacugaauggucaccaugcucaguaaccugcggaaauggcauacaaguaagaauaaaaccaggaucugcaaauaaaccuaaagacgaacuagauuacgcaaaugacauagaaaaaaaaauaugcaaaauggaaaaaugcucaucagucccaguaacaaacauggaaaacaucacaucaggauucuuaggaccacuacucguauuacaagcaggauucuuucuuuuaacaagaauauuaacaauaccacaaucccuagacucaugguggacaucauuaaacuuccuagguggaucaccagucugccucggacaaaacucacaaucaccaacaucaaaccacucaccaacauccugcccaccaauuuguccaggauacagauggaugugccuacgaagauucauaauauucuuauuuauauuacuacuaugucucauauuuuuacucguacuauuagacuaucagggcauguuacccguauguccacuaauaccaggcucaaccaccacaaacacagguccaugcaaaaccugcaccacaccagcacaaggaaacuccauguuucccucauguugcugcaccaaacccaccgauggaaacugcaccugcauaccaaucccaucuucaugggcauucgcaaaauaucuaugggaaugggcauccguaagauuuucauggcuaucacuauuaguaccauucguacaaugguucguaggauuaucaccaacaguaugguuaucagcaauauggaugaugugguacuggggaccaucacuauacucaauaguauccccuuucauaccauuacucccaauauuuuucugccuuuggguauacauauaaggacuagucccuguucccagagcccacuuuuuuuucuuuuuuugaaauaaaauagccugucuuucagaucucaaaggcucuuuucagagccaccaaaaaaaaaaaaaaaaaaaaaaaaaaaaaaaaaaaaaaaaaaaaaaaaaaaaaaaaaaaaaaaaaaaaaaaaaaaaaaaaaaaaaaaaaaaaaaaaaaaaa

SEQ ID NO: 8205 - RNA, 1547 nt, Artificial Sequence
  mRNA Design a-1 (hSL-A100) comprising derived and/or modified sequence from Pf(3D7)__XP_001351122.1__Pf-CSP(199-387)_L(PVTN)_HBsAg (opt6)
aggagagucccgcagucggcguccagcggcucugcuuguucgugugugugucguugcaggccuuauucaagcuuaccaugauggcaccagauccaaacgcaaacccaaacgcaaacccaaacgcaaauccaaaugcaaacccaaacgcaaaucccaaugcaaacccuaacgcaaacccaaacgccaacccaaaugccaacccaaacgcaaacccaaacgcaaauccaaacgcaaacccaaacgcuaacccaaaugcaaaccccaacgcaaauccaaacgcaaacccaaacgcaaauccaaacgcuaacccaaacaaaaauaaccaaggaaacggacaaggacacaauaugccaaaugacccaaauagaaacguagacgaaaacgcaaacgcaaauucagcagucaaaaacaauaacaacgaagaaccauccgauaaacacauaaaagaauacuuaaacaaaauccaaaacucacuaucaacugaauggucaccuuguucaguaacauguggcaacggaauacaaguaagaauaaaaccagguucagccaacaaaccuaaagacgaacuagacuacgcaaacgacauagaaaaaaaaaucugcaaaauggaaaaaugcucaucaguauuuaauguaguaaacucaucaauaggacuaggcccuguaacaaacauggaaaacauaaccucaggauucuuaggcccacuacuaguacuccaagcaggauucuuucuucuaacaagaauauuaaccauuccucaaucauuagacucaugguggacaucccuuaacuuucuaggaggaagccccguaugcuuaggacaaaacagccaauccccaacauccaaccacuccccaacaucaugccccccaauaugcccaggauacagauggaugugccuaagaagauucaucauauuccuauuuauucucuuacucugcuuaauauucuuacucguauuacucgacuaccaaggaauguuaccaguaugcccacuaauaccaggauccacaacaacaaacacgggaccaugcaaaacaugcacaacaccugcccaaggaaauuccauguucccaucaugcugcugcacaaaaccaaccgacggcaacugcacaugcauaccaauaccaucaagcugggccuucgcaaaauaccuaugggaaugggcaucagugagauucucauggcucucauuacuagucccauucguacaaugguuuguaggauuaucaccaacaguuuggcucagcgcaauauggaugaugugguacuggggccccucuuuauauucaauaguauccccauuuauaccacuacucccaauauucuucuguuuauggguauacauauaaggacuagucccuguucccagagcccacuuuuuuuucuuuuuuugaaauaaaauagccugucuuucagaucucaaaggcucuuuucagagccaccaaaaaaaaaaaaaaaaaaaaaaaaaaaaaaaaaaaaaaaaaaaaaaaaaaaaaaaaaaaaaaaaaaaaaaaaaaaaaaaaaaaaaaaaaaaaaaaaaaaaa

SEQ ID NO: 8206 - RNA, 731 nt, Artificial Sequence
  mRNA Design a-1 (hSL-A100) comprising derived and/or modified sequence from Pf(3D7)__XP_001351122.1__HsALB_Pf-CSP(19-152) (opt6)
aggagagucccgcagucggcguccagcggcucugcuuguucgugugugugucguugcaggccuuauucaagcuuaccaugaaauggguaacauucauaucacuacuauuccuauucuccagcgcauacucacuauuccaagaauaccaaugcuacggaucaagcucaaacacacgaguacuaaacgaacuaaacuacgacaacgcaggaaccaaccuauacaacgaacuagaaaugaacuacuacggaaaacaagaaaacugguacucacuaaaaaaaaacagcagaucacuaggagaaaacgacgacggaaacaacgaagacaacgaaaaacuaagaaaaccaaaacacaaaaaacuaaaacaacccgcagacggaaacccagacccaaacgcaaacccaaacguagacccaaaugcaaacccaaacguagacccaaacgcaaacccaaacguagacccaaacgcaaacccaaacgcaaacccaaacgcaaacccaaacgcaaacccaaacgcaaacccaaacgcaaacccauaaggacuagucccuguucccagagcccacuuuuuuuucuuuuuuugaaauaaaauagccugucuuucagaucucaaaggcucuuuucagagccaccaaaaaaaaaaaaaaaaaaaaaaaaaaaaaaaaaaaaaaaaaaaaaaaaaaaaaaaaaaaaaaaaaaaaaaaaaaaaaaaaaaaaaaaaaaaaaaaaaaaaa

SEQ ID NO: 8207 - RNA, 851 nt, Artificial Sequence
  mRNA Design a-1 (hSL-A100) comprising derived and/or modified sequence from Pf(3D7)__XP_001351122.1__HsALB_Pf-CSP(19-192) (opt6)
aggagagucccgcagucggcguccagcggcucugcuuguucgugugugugucguugcaggccuuauucaagcuuaccaugaaauggguaacauucaucucacuacuauucuuauucucaucagcauacucacuauuccaagaauaccaaugcuacggaucaucaucaaacacacgaguacucaacgaacuaaacuacgacaacgcaggaacaaaccuauacaacgaacuagaaaugaacuacuacggaaaacaagaaaacugguauucacuaaaaaaaaacucaagaucacuaggagaaaacgacgacggaaacaacgaagacaacgaaaaacuaagaaaaccaaaacacaaaaaacuaaaacaaccagcagacggaaacccagacccaaacgcaaacccaaacguagacccaaacgccaacccaaacguagacccaaacgcaaacccaaacguagacccaaacgcaaacccaaacgcaaacccaaacgcaaacccaaacgcaaacccaaacgcaaacccaaacgcaaacccaaacgcaaacccaaacgcaaacccaaacgcaaacccaaacgcaaacccaaacgcaaacccaaacgcaaauccaaacgcaaacccaaacgcaaacccaaacgcaaacccaaacgcaaaccccuaaggacuagucccuguucccagagcccacuuuuuuuucuuuuuuugaaauaaaauagccugucuuucagaucucaaaggcucuuuucagagccaccaaaaaaaaaaaaaaaaaaaaaaaaaaaaaaaaaaaaaaaaaaaaaaaaaaaaaaaaaaaaaaaaaaaaaaaaaaaaaaaaaaaaaaaaaaaaaaaaaaaaa

SEQ ID NO: 8208 - RNA, 1091 nt, Artificial Sequence
  mRNA Design a-1 (hSL-A100) comprising derived and/or modified sequence from Pf(3D7)__XP_001351122.1__HsALB_Pf-CSP(19-272) (opt6)
aggagagucccgcagucggcguccagcggcucugcuuguucgugugugugucguugcaggccuuauucaagcuuaccaugaaauggguaacauucauaucacuacuauuccuauucucaagcgcauauucacuauuccaagaauaccaaugcuacggaucaagcucaaacacaagaguacuuaacgaacuaaacuacgacaacgcaggaacaaaccuauacaacgaacuugaaaugaacuacuacggaaaacaagaaaacugguacucacuaaaaaaaaauagcagaagcuuaggagaaaacgacgacggaaacaacgaagacaacgaaaaauuaagaaaaccuaaacacaaaaaacuaaaacaacccgcagacggaaacccagacccuaacgccaacccaaauguagacccaaacgcaaacccaaacguagacccaaacgcaaaccccaacguagacccaaacgcaaacccaaacgcaaacccaaacgcaaacccaaacgcaaaccccaacgcaaacccaaacgcaaacccaaacgcaaacccaaacgcaaacccaaacgcaaacccaaacgcaaacccaaacgcaaacccaaacgcaaacccaaacgcgaacccaaacgcaaacccaaacgcaaacccaaacgcaaacccaaacgcaaacccaaacguagacccaaaugcaaaccccaacgcaaacccaaacgcaaacccaaaugcaaaccccaacgcaaacccaaacgcaaacccaaacgcaaacccaaacgcaaacccaaaugcaaacccaaacgcaaacccaaacgccaacccaaacgcaaacccaaacgcaaacccaaacgcaaacccaaacgcaaacccgaacgcaaacccaaacgcaaacccaaacgcaaacccauaaggacuagucccuguucccagagcccacuuuuuuuucuuuuuuugaaauaaaauagccugucuuucagaucucaaaggcucuuuucagagccaccaaaaaaaaaaaaaaaaaaaaaaaaaaaaaaaaaaaaaaaaaaaaaaaaaaaaaaaaaaaaaaaaaaaaaaaaaaaaaaaaaaaaaaaaaaaaaaaaaaaaa

SEQ ID NO: 8209 - RNA, 1253 nt, Artificial Sequence
  mRNA Design a-1 (hSL-A100) comprising derived and/or modified sequence from Pf(3D7)__XP_001351122.1__HsALB_Pf-CSP(19-272)_L(AAY)_Pf-CSP(310-3 27)_L(AAY)_Pf-CSP(346-375) (opt6)
aggagagucccgcagucggcguccagcggcucugcuuguucgugugugugucguugcaggccuuauucaagcuuaccaugaaauggguaacauuuauaucacuccuauuccuuuuuucgucagcauacucacuauuccaagaauaucaaugcuacggaucaagcuccaacacaagaguacuaaacgaacuaaacuacgacaacgcaggaacaaaccuauacaacgaacuagaaaugaacuacuacggaaaacaagaaaacugguacucacuaaaaaaaaacagccgaagcuuaggagaaaaugacgacggaaacaacgaagacaacgaaaaauuacgcaaacccaaacacaaaaaacugaaacaaccagcagacggaaacccagacccaaacgcaaacccaaacguagacccaaacgcaaacccaaacguagacccaaacgcaaacccaaacguagacccaaacgcaaacccaaacgcgaacccaaacgccaacccaaacgcaaacccaaacgcaaacccaaacgcaaacccaaacgcaaacccaaacgcaaacccaaacgccaacccgaacgcaaacccaaacgcaaacccaaacgcaaauccaaacgcaaacccaaacgcaaacccaaacgccaacccaaacgcaaacccaaacgcaaacccaaauguggacccaaacgcaaacccaaacgcaaacccaaacgcaaacccaaaugcaaacccaaacgcaaacccaaacgcaaacccaaacgcaaacccaaacgcaaacccaaaugcaaacccaaacgcaaauccaaacgcaaacccaaacgcaaacccaaacgcaaacccaaacgcaaacccuaacgcaaacccaaacgcaaacccaaacgccaaccccaaugcaaacccagcagcauacgaaccaucagacaaacacauaaaagaauaccuaaacaaaauacaaaacucacucgcagcauauauaaagccaggaagcgccaacaaaccaaaagacgaacuagauuacgcaaacgacauagaaaaaaaaaucuguaaaauggaaaaaugcucauaaggacuagucccuguucccagagcccacuuuuuuuucuuuuuuugaaauaaaauagccugucuuucagaucucaaaggcucuuuucagagccaccaaaaaaaaaaaaaaaaaaaaaaaaaaaaaaaaaaaaaaaaaaaaaaaaaaaaaaaaaaaaaaaaaaaaaaaaaaaaaaaaaaaaaaaaaaaaaaaaaaaaa

SEQ ID NO: 8210 - RNA, 1214 nt, Artificial Sequence
  mRNA Design a-1 (hSL-A100) comprising derived and/or modified sequence from Pf(3D7)__XP_001351122.1__HsALB_Pf-CSP(19-272)_L(AAY)_Pf-CSP(346-3 65)_L(AAY)_P2 (opt6)
aggagagucccgcagucggcguccagcggcucugcuuguucgugugugugucguugcaggccuuauucaagcuuaccaugaaauggguaacauucauaucacuauuauuccuuuucucaucagcuuacucacuauuccaagaauaccaaugcuacggaucauccucaaacacaagaguacuaaacgaacuaaacuacgacaacgccggaaccaaccuauacaacgaacucgaaaugaacuacuacggaaaacaagaaaacugguacucacuaaaaaaaaacagccgaucccuaggagaaaacgacgacggaaauaacgaagacaaugaaaaauuaagaaaaccaaaacacaaaaaacuaaaacaaccagcagacggaaacccagacccaaacgcaaacccaaacguagauccaaacgcaaacccaaacguagacccaaacgcaaacccaaacguagacccaaacgcuaacccaaacgcaaacccaaacgcaaacccaaacgcaaacccaaacgcaaacccaaacgcaaacccgaacgcaaaccccaacgcaaacccaaacgcaaacccaaacgcaaaccccaacgcaaacccaaacgcaaacccgaacgcaaacccaaacgcaaacccaaacgcaaacccaaacgcaaacccaaacgcaaacccaaacguagacccaaacgccaacccaaacgcaaacccaaacgcaaacccaaacgcaaacccaaacgcaaacccaaacgcaaacccaaacgcaaacccaaacgcaaacccaaacgcaaacccaaacgcaaaccccaacgcaaacccaaaugcaaacccaaacgcaaacccaaaugcaaaccccaacgcaaacccaaaugccaauccaaacgcaaacccaaacgcaaacccagccgcauacauaaaaccaggauccgcaaacaaaccaaaagacgaacuagacuacgcaaacgacauagaagcagcauaccaauauauaaaagccaacuccaaauucauagguauaacagaacucuaaggacuagucccuguucccagagcccacuuuuuuuucuuuuuuugaaauaaaauagccugucuuucagaucucaaaggcucuuuucagagccaccaaaaaaaaaaaaaaaaaaaaaaaaaaaaaaaaaaaaaaaaaaaaaaaaaaaaaaaaaaaaaaaaaaaaaaaaaaaaaaaaaaaaaaaaaaaaaaaaaaaaa

SEQ ID NO: 8211 - RNA, 1208 nt, Artificial Sequence
  mRNA Design a-1 (hSL-A100) comprising derived and/or modified sequence from Pf(3D7)__XP_001351122.1__HsALB_Pf-CSP(19-272)_L(AAY)_Pf-CSP(346-3 65)_L(AAY)_PADRE (opt6)
aggagagucccgcagucggcguccagcggcucugcuuguucgugugugugucguugcaggccuuauucaagcuuaccaugaaauggguaaccuucauaucacuacuauucuuauucucaucagcauacucacucuuccaagaauaccaaugcuacggcucaagcucaaacacaagaguacuaaacgaauuaaacuaugacaacgccggaacaaaccuauacaaugaauuagaaaugaacuacuacggcaaacaagaaaacugguacucacucaaaaaaaacuccagaaguuuaggagaaaaugacgacggaaacaaugaagacaaugaaaaauuacgaaaaccaaaacacaaaaaacuaaaacaacccgccgacggaaaccccgacccgaacgcaaacccaaacguagacccaaacgcaaacccaaacguagacccaaaugcaaacccaaacguagacccaaacgcaaacccaaacgcaaacccaaacgcaaauccaaacgcaaacccaaaugcaaacccaaaugcaaauccaaacgcaaaccccaacgcaaacccaaacgcaaacccaaaugcaaauccaaacgccaacccaaaugcaaacccaaacgcaaauccaaacgcaaacccaaacgcaaauccaaacgcaaacccaaaugcaaacccaaacguagauccaaacgcaaacccaaacgccaacccaaacgcaaacccgaacgcaaacccaaacgcaaacccaaacgccaacccaaacgccaacccaaacgccaacccaaacgcaaacccaaacgcaaacccaaacgcaaacccaaacgcaaacccaaaugcaaacccuaacgcaaacccaaacgcaaacccaaacgcaaacccaaacgccaacccaaacgcaaauccagcagcauacauaaaaccaggaucagcaaacaaaccaaaagaugaacuagacuacgcaaaugacaucgaagcagccuacgcuaaauucguagcagccuggacacuaaaagcagcagccuaaggacuagucccuguucccagagcccacuuuuuuuucuuuuuuugaaauaaaauagccugucuuucagaucucaaaggcucuuuucagagccaccaaaaaaaaaaaaaaaaaaaaaaaaaaaaaaaaaaaaaaaaaaaaaaaaaaaaaaaaaaaaaaaaaaaaaaaaaaaaaaaaaaaaaaaaaaaaaaaaaaaaa

SEQ ID NO: 8212 - RNA, 1265 nt, Artificial Sequence
  mRNA Design a-1 (hSL-A100) comprising derived and/or modified sequence from Pf(3D7)__XP_001351122.1__HsALB_Pf-CSP(19-272)_L(G4S)_Pf-CSP(310-3 27)_L(G4S)_Pf-CSP(346-375) (opt6)
aggagagucccgcagucggcguccagcggcucugcuuguucgugugugugucguugcaggccuuauucaagcuuaccaugaaauggguaaccuucaucucacuacuauuccuauucucaagcgcauacucacucuuucaagaauaccaaugcuacggcucaagcucaaacacacgaguacuaaacgaacuaaacuacgacaacgcaggaacaaaccuauauaacgaacucgaaaugaacuacuacggcaaacaagaaaauugguacucacuaaaaaaaaacagcagaagcuuaggagaaaacgacgacggaaacaacgaagauaacgaaaaacuaagaaaaccaaaacacaaaaaacuaaaacaacccgcagacggaaacccagacccaaacgcaaauccaaauguagacccgaacgcaaacccaaacguagacccaaaugcgaacccaaacgucgacccaaacgcaaacccaaaugcaaacccaaaugcgaacccaaacgcaaacccaaacgcaaauccaaacgcaaauccaaaugcaaacccaaacgcgaauccaaacgcaaacccaaacgcaaacccaaacgcaaacccaaacgcaaacccaaacgcaaacccaaacgcaaacccgaacgcuaacccaaacgcaaacccaaacgcaaacccaaacguagauccaaacgcgaacccaaacgcaaacccaaaugcaaacccaaacgcaaacccaaacgcaaacccaaacgcaaacccaaacgcaaacccaaacgcaaacccaaacgcgaacccaaacgcaaauccaaaugcaaacccaaacgcaaacccaaacgcaaacccaaacgcaaacccaaaugcaaacccaaacgcaaacccaaaugcaaacccaaacgcaaacccaggaggaggaggaucagaacccucagacaaacacauaaaagaauaccuaaacaaaauacaaaacucacuaggaggaggaggaucgaucaaaccaggaagcgcaaacaaaccaaaagacgaacucgacuacgcaaacgauauagaaaaaaaaauaugcaaaauggaaaaaugcucguaaggacuagucccuguucccagagcccacuuuuuuuucuuuuuuugaaauaaaauagccugucuuucagaucucaaaggcucuuuucagagccaccaaaaaaaaaaaaaaaaaaaaaaaaaaaaaaaaaaaaaaaaaaaaaaaaaaaaaaaaaaaaaaaaaaaaaaaaaaaaaaaaaaaaaaaaaaaaaaaaaaaaa

SEQ ID NO: 8213 - RNA, 1250 nt, Artificial Sequence
  mRNA Design a-1 (hSL-A100) comprising derived and/or modified sequence from Pf(3D7)__XP_001351122.1__HsALB_Pf-CSP(19-272)_L(G4S)_Pf-CSP(310-3 27)_Pf-CSP(346-375) (opt6)
aggagagucccgcagucggcguccagcggcucugcuuguucgugugugugucguugcaggccuuauucaagcuuaccaugaaauggguaacauucauaucacuccuauuccuauucuccucagcauacucccucuuccaagaauaccaaugcuacggcucaagcucaaacacacgaguacuaaacgaacuaaauuacgacaacgccggaacaaaccuauauaaugaacuagaaaugaauuacuacggaaaacaagaaaacugguacucacuuaaaaaaaacucaagaucauuaggagaaaacgacgacggcaacaacgaagacaacgaaaaacuaagaaaaccaaaacacaaaaaacuaaaacaacccgcagacggaaauccagauccaaacgcaaacccaaacguagacccaaacgcaaacccaaacguagacccaaacgcaaacccaaacgucgacccaaacgccaacccaaacgcaaacccaaacgcaaacccaaacgcaaacccaaacgccaacccaaacgcaaacccaaacgcaaacccaaacgcaaacccaaacgcaaacccaaacgcaaacccaaacgcaaacccgaacgcaaacccaaacgcaaauccuaacgcaaacccaaacgcaaacccaaacgcaaauccgaacgcaaacccaaacguagacccaaacgcaaacccaaacgcaaacccaaacgcaaacccaaacgcaaacccaaacgcaaacccuaacgcaaacccaaaugcaaacccaaacgcgaacccaaaugcaaacccaaaugcaaacccaaacgcaaacccaaacgcaaacccaaacgcaaauccaaacgcaaauccaaacgcaaacccaaacgcaaacccaaacgcaaacccaaacgccaacccaggaggagguggaagcgaaccauccgacaaacacauaaaagaauaccuaaacaaaauacaaaacucacuaauaaaacccggcucagcaaacaaaccaaaagacgaacuagacuacgccaacgacauagaaaaaaaaauauguaaaauggaaaaaugcucauaaggacuagucccuguucccagagcccacuuuuuuuucuuuuuuugaaauaaaauagccugucuuucagaucucaaaggcucuuuucagagccaccaaaaaaaaaaaaaaaaaaaaaaaaaaaaaaaaaaaaaaaaaaaaaaaaaaaaaaaaaaaaaaaaaaaaaaaaaaaaaaaaaaaaaaaaaaaaaaaaaaaaa

SEQ ID NO: 8214 - RNA, 1250 nt, Artificial Sequence
  mRNA Design a-1 (hSL-A100) comprising derived and/or modified sequence from Pf(3D7)__XP_001351122.1__HsALB_Pf-CSP(19-325) (opt6)
aggagagucccgcagucggcguccagcggcucugcuuguucgugugugugucguugcaggccuuauucaagcuuaccaugaaauggguaacauucauaucacuccuauuccuauucucaagcgcauacucauuauuccaagaauaccaaugcuacggaucaucaucuaacacaagaguacucaacgaacuaaacuacgacaacgcaggaacuaaucucuacaacgaacuagaaaugaacuacuacggaaaacaagaaaacugguauucacuaaaaaaaaacagccgaucauuaggagaaaacgacgacggcaacaacgaagacaacgaaaaacuacgaaaaccaaaacacaaaaaauuaaaacagccagccgacggaaacccagacccaaacgcaaacccaaacguagacccaaacgcaaacccaaacguagacccaaacgcaaacccaaacguagacccaaacgcaaacccaaacgcaaacccaaacgcaaauccaaacgcaaacccaaacgccaacccaaacgcaaacccaaacgcaaaccccaacgcaaacccaaacgcaaacccaaacgcaaacccaaaugccaacccaaacgcaaacccaaacgcaaacccaaacgcaaacccaaacgcaaacccaaaugcaaacccaaacgcaaacccaaacguagacccaaacgcaaacccaaaugcaaacccaaacgcaaaccccaacgcaaacccaaacgcaaacccaaacgcaaacccaaacgcaaacccaaacgccaacccaaacgcaaacccaaacgcaaacccaaacgcaaacccaaacgcaaacccaaacgcaaauccaaacgcaaacccaaacgcaaacccaaacgcaaacccaaacgcaaacccaaacgcaaacccaaauaaaaacaaucaaggaaacggacaaggacacaacaugccaaacgauccaaaucgcaacguagacgaaaacgcaaacgcaaacagcgcagucaaaaacaacaacaacgaagaaccaucagacaaacacauaaaagaauaccuaaauaaaauacaaaacuagggacuagucccuguucccagagcccacuuuuuuuucuuuuuuugaaauaaaauagccugucuuucagaucucaaaggcucuuuucagagccaccaaaaaaaaaaaaaaaaaaaaaaaaaaaaaaaaaaaaaaaaaaaaaaaaaaaaaaaaaaaaaaaaaaaaaaaaaaaaaaaaaaaaaaaaaaaaaaaaaaaaa

SEQ ID NO: 8215 - RNA, 1427 nt, Artificial Sequence
  mRNA Design a-1 (hSL-A100) comprising derived and/or modified sequence from Pf(3D7)__XP_001351122.1__HsALB_Pf-CSP(19-384) (opt6)
aggagagucccgcagucggcguccagcggcucugcuuguucgugugugugucguugcaggccuuauucaagcuuaccaugaaauggguaaccuuuauaucacucuuauuccuauuuucaucagcauacucacucuuccaagaauaucaaugcuacggaucaucaucaaacacaagaguccucaaugaauuaaacuaugacaaugcaggaaccaaccuauacaacgaauuagaaaugaacuacuacggcaaacaagaaaacugguacucacucaaaaaaaacucaagauccuuaggagaaaaugaugacggaaacaacgaagacaacgaaaaacuccgaaaaccaaaacacaaaaaacuaaaacaacccgccgacggaaacccagaccccaacgcaaacccaaauguagaccccaacgcaaacccaaacguagacccaaacgcaaacccaaacguagacccaaacgcaaauccaaacgccaacccaaacgcaaacccaaacgccaacccaaacgcaaacccaaacgcaaacccaaacgcaaacccaaacgcaaacccaaaugcaaacccaaaugcaaacccaaacgcaaacccaaacgcaaacccaaacgcaaacccaaacgcaaacccaaaugcaaacccaaacgcaaacccaaacgcaaacccaaacguagacccaaaugcaaacccaaacgcaaacccaaacgcaaauccaaaugcaaauccaaacgcaaauccaaacgcaaacccaaacgcaaacccaaacgcaaacccaaacgcaaauccaaaugcaaacccaaacgcaaacccaaacgcaaacccaaacgcuaacccaaacgccaauccaaacgcaaacccaaacgcaaacccuaaugcaaacccaaacgccaacccaaauaaaaauaaccaaggaaacggacaaggacacaacaugccaaacgacccaaacagaaacgucgaugaaaacgcaaacgcaaauuccgcagucaaaaacaacaacaacgaagaaccaucagacaaacacauaaaagaauaccucaacaaaauacaaaacucccuaucaacagaauggucacccugcuccguuacaugcgguaacggcauacaaguaagaauaaaaccaggaucagcuaacaaacccaaagacgaacuagacuacgccaacgacauagaaaaaaaaauaugcaaaauggaaaaaugcuccucaguauucaacguaguaaacucaucauaaggacuagucccuguucccagagcccacuuuuuuuucuuuuuuugaaauaaaauagccugucuuucagaucucaaaggcucuuuucagagccaccaaaaaaaaaaaaaaaaaaaaaaaaaaaaaaaaaaaaaaaaaaaaaaaaaaaaaaaaaaaaaaaaaaaaaaaaaaaaaaaaaaaaaaaaaaaaaaaaaaaaa

SEQ ID NO: 8216 - RNA, 1565 nt, Artificial Sequence
  mRNA Design a-1 (hSL-A100) comprising derived and/or modified sequence from Pf(3D7)__XP_001351122.1__HsALB_Pf-CSP(19-384)_TM domain HA (opt6)
aggagagucccgcagucggcguccagcggcucugcuuguucgugugugugucguugcaggccuuauucaagcuuaccaugaaauggguaacauuuauaucacuacuuuuccuauucucaucagcauacucacucuuccaagaauaucaaugcuauggauccucaucaaacacaagaguacucaacgaauuaaacuacgauaaugccggaacaaaccuauauaacgaacuagaaaugaacuacuacggaaaacaagaaaauugguacucauuaaaaaaaaacuccagaucccuuggagaaaacgacgauggaaacaacgaagauaacgaaaaauuaagaaaaccaaaacacaaaaaauugaaacaaccagcagacgguaacccagacccaaacgccaacccaaacguagacccaaacgcgaauccaaacgucgacccaaacgcaaaucccaacguagacccaaaugcaaauccaaaugccaauccaaacgcaaacccaaacgcaaacccaaaugcaaacccaaacgccaacccaaacgcaaauccaaacgcaaacccaaacgcaaacccaaacgccaacccaaacgccaaccccaaugcaaacccaaaugcaaacccaaacgcaaacccaaacgcaaauccaaacgcaaacccaaacgccaacccaaacguagacccaaacgcaaauccaaacgcaaacccaaacgccaauccaaacgcaaacccaaacgccaacccaaaugcaaaucccaacgcaaacccaaacgcaaauccaaaugcaaaccccaacgcaaauccaaacgcaaacccaaacgcaaauccaaacgcaaauccaaaugcaaacccaaacgcaaacccuaaugcaaacccaaacgcaaacccaaacgccaacccaaacaaaaacaaccaaggaaacggacaaggucacaauaugccaaaugacccaaaccgaaacguagacgaaaacgcaaaugccaauagcgcaguaaaaaacaauaacaacgaagaaccuucagauaaacacauaaaagaauaccuaaacaaaauacaaaacucccuaucaacagaauggucaccuuguucagucacauguggaaacggaauacaaguaagaauaaaaccaggaucagcaaacaaaccaaaagacgaacuagauuacgcaaacgauauagaaaaaaaaauauguaaaauggaaaaaugcuccucagucuucaacguagucaacaguuccaaacuagaaucaaccagaaucuaccaaauacuagcaauauauuccacaguagcaagcucacucguauuaguagucucccuaggagcaauaucauucuggaugugcucaaacggaagcuuacaaugccgaauauguauauaaggacuagucccuguucccagagcccacuuuuuuuucuuuuuuugaaauaaaauagccugucuuucagaucucaaaggcucuuuucagagccaccaaaaaaaaaaaaaaaaaaaaaaaaaaaaaaaaaaaaaaaaaaaaaaaaaaaaaaaaaaaaaaaaaaaaaaaaaaaaaaaaaaaaaaaaaaaaaaaaaaaaa

SEQ ID NO: 8217 - RNA, 1277 nt, Artificial Sequence
  mRNA Design a-1 (hSL-A100) comprising derived and/or modified sequence from Pf(3D7)__XP_001351122.1__HsALB_Pf-CSP(82-397) (opt6)
aggagagucccgcagucggcguccagcggcucugcuuguucgugugugugucguugcaggccuuauucaagcuuaccaugaaauggguaacauucauaucacuacuauuccucuucaguucagccuauagcgauaacgaaaaacuaagaaaaccaaaacacaaaaaacucaaacaaccagcagacggaaacccagacccaaacgcaaacccaaacguagacccaaacgcaaacccaaacguagacccaaacgcaaauccaaacguagacccaaaugcaaaccccaacgcaaacccaaacgcaaacccaaacgcaaacccaaacgcaaacccaaaugcgaacccaaaugcaaauccaaacgcaaacccaaacgcaaacccaaacgcaaacccaaacgcuaacccaaacgcaaacccaaacgcaaacccaaaugcaaacccaaacgcaaacccaaacgcaaaccccaacgcaaacccaaacguagacccaaacgcaaacccaaacgcaaacccaaacgcaaacccaaacgccaacccaaaugccaacccaaacgcaaacccaaaugcaaaccccaacgcaaacccaaacgccaacccaaacgcaaacccaaacgcaaacccaaacgcaaaccccaaugcaaacccaaacgcaaacccaaaugcaaauccaaacgcaaacccaaacgcaaacccaaacgcaaacccaaacaaaaacaaccaaggaaacggacaaggacacaacaugccaaacgacccaaaucgaaacgucgaugaaaacgccaacgcaaacucagcaguaaaaaacaacaacaacgaagaaccaucugacaaacacauaaaagaauaccuaaacaaaauacaaaacucauuauccaccgaauggucaccauguucaguaacaugcggcaacggaauacaagucagaauaaaaccaggcucagcaaauaaaccaaaagacgaacuagacuacgcaaacgacauagaaaaaaaaauaugcaaaauggaaaaauguucaucagucuucaacguaguaaacucaucaauaggacucauaaugguacuaucauuccuauucuuaaacuaaggacuagucccuguucccagagcccacuuuuuuuucuuuuuuugaaauaaaauagccugucuuucagaucucaaaggcucuuuucagagccaccaaaaaaaaaaaaaaaaaaaaaaaaaaaaaaaaaaaaaaaaaaaaaaaaaaaaaaaaaaaaaaaaaaaaaaaaaaaaaaaaaaaaaaaaaaaaaaaaaaaaa

SEQ ID NO: 8218 - RNA, 629 nt, Artificial Sequence
  mRNA Design a-1 (hSL-A100) comprising derived and/or modified sequence from Pf(3D7)__XP_001351122.1__HsALB_Pf-CSP(93-192) (opt6)
aggagagucccgcagucggcguccagcggcucugcuuguucgugugugugucguugcaggccuuauucaagcuuaccaugaaauggguaacauucaucucacuacuauuccuauucucaagcgcauacucaaaacuaaaacaaccagcagacggaaacccagacccaaacgcaaacccaaacguagacccaaacgcaaacccaaacguagacccaaacgcaaacccaaacguagacccaaacgcaaacccaaacgcaaacccaaacgcaaacccaaacgcaaacccaaacgcaaacccaaacgcaaacccaaacgcaaacccaaacgcaaacccaaacgcaaacccaaacgcaaacccaaacgcaaacccaaacgcaaacccaaacgcaaacccaaacgcaaacccaaacgcaaacccaaacgcaaacccauaaggacuagucccuguucccagagcccacuuuuuuuucuuuuuuugaaauaaaauagccugucuuucagaucucaaaggcucuuuucagagccaccaaaaaaaaaaaaaaaaaaaaaaaaaaaaaaaaaaaaaaaaaaaaaaaaaaaaaaaaaaaaaaaaaaaaaaaaaaaaaaaaaaaaaaaaaaaaaaaaaaaaa

SEQ ID NO: 8219 - RNA, 869 nt, Artificial Sequence
  mRNA Design a-1 (hSL-A100) comprising derived and/or modified sequence from Pf(3D7)__XP_001351122.1__HsALB_Pf-CSP(93-272) (opt6)
aggagagucccgcagucggcguccagcggcucugcuuguucgugugugugucguugcaggccuuauucaagcuuaccaugaaaugggucacauucauaucacuccuauuccuauucucaagcgcauacucaaaacuaaaacaaccagcagacggaaacccagacccaaacgcaaacccaaacguagacccaaacgcaaacccaaacguagacccaaacgcaaacccaaacguagacccaaacgcaaacccaaacgcaaacccaaacgccaacccaaacgcaaacccaaacgcaaacccaaacgcaaacccaaacgcaaacccaaacgcaaacccaaacgcaaacccaaacgcaaacccaaacgcaaacccaaacgcaaacccaaacgcaaauccaaacgcaaacccaaacgccaacccaaacgcaaacccaaacgcaaacccaaacguagacccaaacgcaaacccaaacgcaaacccaaacgcaaacccaaacgcaaacccaaacgcaaacccaaacgcaaacccaaacgcaaacccaaacgcaaacccaaacgcaaauccaaacgcaaacccaaacgcaaacccaaacgcaaacccaaacgcaaacccaaacgcaaacccaaacgcaaacccaaacgcaaacccaaacgcaaacccaaacgcaaacccauaaggacuagucccuguucccagagcccacuuuuuuuucuuuuuuugaaauaaaauagccugucuuucagaucucaaaggcucuuuucagagccaccaaaaaaaaaaaaaaaaaaaaaaaaaaaaaaaaaaaaaaaaaaaaaaaaaaaaaaaaaaaaaaaaaaaaaaaaaaaaaaaaaaaaaaaaaaaaaaaaaaaaa

SEQ ID NO: 8220 - RNA, 1244 nt, Artificial Sequence
  mRNA Design a-1 (hSL-A100) comprising derived and/or modified sequence from Pf(3D7)__XP_001351122.1__HsALB_Pf-CSP(93-397) (opt6)
aggagagucccgcagucggcguccagcggcucugcuuguucgugugugugucguugcaggccuuauucaagcuuaccaugaaauggguaacauucauaucacuccuauuccuauucucaucagcauacucaaaacuaaaacaacccgcagacggaaacccagacccaaacgccaacccaaacguagacccaaacgcaaacccgaacguagacccaaacgcaaaccccaacguagacccaaacgcaaacccaaaugcaaacccaaacgcaaacccaaacgcaaacccaaacgcaaacccaaacgcaaacccaaacgcaaacccaaacgcaaacccaaacgcaaacccaaacgcgaaucccaacgcaaauccaaacgcaaacccaaacgcaaauccaaacgcaaacccgaacgcaaacccaaacgcaaacccaaacgcaaacccaaacguagauccaaacgcaaauccaaacgcaaacccaaacgcaaauccaaacgcaaacccaaacgcaaacccaaacgcaaaccccaacgcaaacccaaacgcaaacccaaacgcaaacccaaacgcaaauccaaacgccaacccaaacgcaaacccaaacgcaaacccaaacgcgaacccaaacgcgaacccaaacgcaaacccaaacgcaaacccaaacgcaaacccaaacaaaaacaaccaagggaacggacaaggacacaacaugccaaacgauccaaacagaaacguagacgaaaacgcaaacgcaaacucagcaguaaaaaacaacaacaacgaagaaccaucagacaaacacauaaaagaauaccuaaacaaaauacaaaacucacucucaacagaauggucaccaugcaguguaacaugcggaaauggaauacaaguacguauaaaaccaggaucagcaaacaaaccaaaagacgaauuagacuacgccaacgauauagaaaaaaaaauaugcaaaauggaaaaaugcagcucagucuucaacguagucaacagcucaauaggacuaauaaugguccucucauucuuauuucuaaacugaggacuagucccuguucccagagcccacuuuuuuuucuuuuuuugaaauaaaauagccugucuuucagaucucaaaggcucuuuucagagccaccaaaaaaaaaaaaaaaaaaaaaaaaaaaaaaaaaaaaaaaaaaaaaaaaaaaaaaaaaaaaaaaaaaaaaaaaaaaaaaaaaaaaaaaaaaaaaaaaaaaaa

SEQ ID NO: 8221 - RNA, 614 nt, Artificial Sequence
  mRNA Design a-1 (hSL-A100) comprising derived and/or modified sequence from Pf(3D7)__XP_001351122.1__HsALB_Pf-CSP(98-192) (opt6)
aggagagucccgcagucggcguccagcggcucugcuuguucgugugugugucguugcaggccuuauucaagcuuaccaugaaauggguaacauucauaagccuacuauuccuauucagcucagcauacagcgcagacggaaacccagacccaaacgcaaacccaaacguagacccaaacgcaaacccaaacguagacccaaacgcaaacccaaacguagacccaaacgcaaacccaaacgcaaacccaaacgcaaacccaaacgcaaacccaaacgcaaacccaaacgcaaacccaaacgcaaacccaaacgcaaacccaaacgcaaacccaaacgcaaacccaaacgcaaacccaaacgcaaacccaaacgcaaacccaaacgcaaacccaaacgcaaacccaaacgcaaacccauaaggacuagucccuguucccagagcccacuuuuuuuucuuuuuuugaaauaaaauagccugucuuucagaucucaaaggcucuuuucagagccaccaaaaaaaaaaaaaaaaaaaaaaaaaaaaaaaaaaaaaaaaaaaaaaaaaaaaaaaaaaaaaaaaaaaaaaaaaaaaaaaaaaaaaaaaaaaaaaaaaaaaa

SEQ ID NO: 8222 - RNA, 854 nt, Artificial Sequence
  mRNA Design a-1 (hSL-A100) comprising derived and/or modified sequence from Pf(3D7)__XP_001351122.1__HsALB_Pf-CSP(98-272) (opt6)
aggagagucccgcagucggcguccagcggcucugcuuguucgugugugugucguugcaggccuuauucaagcuuaccaugaaauggguaacauucauaucacuacuauuccuauucagcucagccuacagcgcagacggaaacccagacccaaacgcaaacccaaacguagacccaaacgcaaacccaaacgucgacccaaacgcaaacccaaacguagacccaaacgcaaacccaaacgcaaacccaaacgcaaacccaaacgcaaacccaaacgcaaacccaaacgcaaacccaaacgcaaacccaaacgcaaacccaaacgcaaacccaaacgcaaacccaaacgcaaacccaaacgcaaacccaaacgcaaacccaaacgcaaacccaaacgcaaacccaaacgcaaacccaaacgcaaacccaaacguagacccaaaugcaaacccaaacgcaaacccaaacgcaaacccaaacgcaaacccaaacgcaaacccaaacgcaaacccaaacgcaaacccaaacgcaaacccaaacgcaaacccaaacgcaaacccaaacgcaaacccaaacgcgaacccaaacgcaaacccaaacgcaaacccaaacgcaaacccaaacgcaaacccaaaugcaaacccaaacgcaaacccauaaggacuagucccuguucccagagcccacuuuuuuuucuuuuuuugaaauaaaauagccugucuuucagaucucaaaggcucuuuucagagccaccaaaaaaaaaaaaaaaaaaaaaaaaaaaaaaaaaaaaaaaaaaaaaaaaaaaaaaaaaaaaaaaaaaaaaaaaaaaaaaaaaaaaaaaaaaaaaaaaaaaaa

SEQ ID NO: 8223 - RNA, 1160 nt, Artificial Sequence
  mRNA Design a-1 (hSL-A100) comprising derived and/or modified sequence from Pf(3D7)__XP_001351122.1__HsALB_Pf-CSP(98-374) (opt6)
aggagagucccgcagucggcguccagcggcucugcuuguucgugugugugucguugcaggccuuauucaagcuuaccaugaaaugggucacauucauaucccuacuauuccuauucucaucagcauauucagcagauggaaacccagacccaaacgccaacccaaacguagacccaaacgcaaacccaaacguagacccaaacgcaaacccaaacguagacccaaacgcaaacccaaacgcaaacccaaacgcaaacccaaacgcaaacccaaacgcaaacccaaacgcaaacccaaacgcaaacccaaacgcaaacccaaacgcaaacccaaacgcaaacccaaacgcaaacccaaaugcaaauccaaacgcaaauccaaacgcaaacccaaacgccaacccaaacgcaaauccaaacgcaaacccaaacguagacccgaacgcaaacccgaacgcaaacccaaacgcaaacccaaaugcaaacccaaacgcaaacccaaacgccaacccaaacgcaaacccaaacgcaaacccaaaugcaaacccaaacgcaaacccaaacgccaacccaaacgcaaacccaaacgcaaacccaaacgcaaacccaaacgcaaacccaaaugcaaacccaaacgcaaacccaaacgcaaacccaaacaaaaacaaccaaggaaauggacaaggccacaacaugccaaacgacccaaacagaaacguagacgaaaacgcaaacgcaaacuccgcagucaaaaacaacaacaacgaagaaccauccgacaaacacauaaaagaauaccucaauaaaauacaaaacucacuaucaacagaaugguccccaugcucaguaacaugcggaaacggaauacaaguaagaauaaaaccaggauccgcaaacaaaccaaaagacgaacuagacuacgcaaacgauauagaaaaaaaaauaugcaaaauggaaaaaugcuaaggacuagucccuguucccagagcccacuuuuuuuucuuuuuuugaaauaaaauagccugucuuucagaucucaaaggcucuuuucagagccaccaaaaaaaaaaaaaaaaaaaaaaaaaaaaaaaaaaaaaaaaaaaaaaaaaaaaaaaaaaaaaaaaaaaaaaaaaaaaaaaaaaaaaaaaaaaaaaaaaaaaa

SEQ ID NO: 8224 - RNA, 1229 nt, Artificial Sequence
  mRNA Design a-1 (hSL-A100) comprising derived and/or modified sequence from Pf(3D7)__XP_001351122.1__HsALB_Pf-CSP(98-397) (opt6)
aggagagucccgcagucggcguccagcggcucugcuuguucgugugugugucguugcaggccuuauucaagcuuaccaugaaauggguaaccuucauaucauuacuauuccuuuucagcucggcauacucagcagacggcaacccagacccaaacgcaaacccaaacgucgacccaaaugcgaacccaaacguagacccaaacgcaaacccaaacguagauccaaacgcaaacccaaacgcaaacccaaacgcaaacccaaacgcaaacccaaacgccaacccaaaugcaaacccaaacgcaaaccccaacgcaaacccaaacgcaaacccaaacgcaaacccaaacgcaaaucccaacgcaaauccaaacgcaaacccaaaugcaaacccaaacgccaacccaaacgcaaacccaaacgcaaaccccaaugucgacccaaacgcaaacccaaacgcaaacccaaacgcaaacccaaacgcaaauccaaacgcaaaccccaacgcaaacccaaacgcaaacccaaacgcaaacccaaacgcaaacccaaacgcaaacccaaacgcaaacccaaacgcaaacccaaacgcaaacccaaacgcaaacccaaacgcaaauccaaacgcaaacccaaacgcaaacccaaacgcaaacccaaacaaaaacaaccaaggaaauggacaaggacacaacaugccaaaugaccccaacagaaacgucgacgaaaacgccaacgcaaacagcgcaguaaaaaacaacaacaaugaagaaccaucagacaaacacauaaaagaauaccuaaacaaaauucaaaacucacuaucaaccgaaugguccccaugcucaguaacaugcggaaacgguauacaaguacgaauaaaaccaggaucagcaaacaaaccaaaagacgaacuagacuacgcaaacgacauagaaaaaaaaauaugcaaaauggaaaaaugcucaucaguuuuuaacguagucaauagcucaaucggacucauaaugguacuaucauuucucuuccuaaauuaaggacuagucccuguucccagagcccacuuuuuuuucuuuuuuugaaauaaaauagccugucuuucagaucucaaaggcucuuuucagagccaccaaaaaaaaaaaaaaaaaaaaaaaaaaaaaaaaaaaaaaaaaaaaaaaaaaaaaaaaaaaaaaaaaaaaaaaaaaaaaaaaaaaaaaaaaaaaaaaaaaaaa

SEQ ID NO: 8225 - RNA, 1556 nt, Artificial Sequence
  mRNA Design a-1 (hSL-A100) comprising derived and/or modified sequence from Pf(3D7)__XP_001351122.1__HsALB_Pf-CSP(199-377)_L(PVTN)_HBsAg (opt6)
aggagagucccgcagucggcguccagcggcucugcuuguucgugugugugucguugcaggccuuauucaagcuuaccaugaaauggguaacauuuauauccuuacuauuucucuucuccucagcuuacucugacccaaacgcaaaucccaacgcaaacccaaaugcaaacccaaacgcaaauccaaacgcaaacccaaaugcuaaucccaacgcaaacccaaacgcaaaccccaaugccaacccaaacgcuaacccaaacgcaaacccaaacgccaacccaaaugcaaacccaaacgcaaacccaaacgcaaauccaaaugcaaacccaaacgcaaauccaaacgcaaacccaaacaaaaacaaccaaggaaacggacaaggccauaauaugccuaaugaccccaacagaaacguagacgaaaaugcuaacgccaacucagcaguaaaaaacaacaauaacgaagaaccaucagauaaacacauaaaagaauacuuaaacaaaauacaaaauucauuaucaacagaauggucaccaugcucagucaccugcggaaacgguauacaaguacgcauaaaaccaggcucagcaaauaaaccaaaagacgaacuagauuacgcuaacgacauagaaaaaaaaauaugcaaaauggaaaaaugcucaucaguaccaguaacaaauauggaaaacauaacaucaggauuccuaggcccacucuuaguacuacaagcaggauuuuuucuucuaacaagaaucuuaacuauaccccaaucacucgacucaugguggaccucacuaaauuuccucggaggaucuccaguaugccucggacaaaauucacaaucaccaacauccaaucacucacccaccuccugcccaccaaucugcccaggauacagauggaugugcuuacgaagauucauaauauuccuauucauacuacuucuaugcuuaauauuccuucucguccuacucgacuaucaaggaaugcucccuguaugcccacucauaccaggauccacaacaacuaacacaggacccuguaaaacaugcacaacacccgcccaaggaaauucaauguuccccucuugcugcugcacaaaaccaacagacggaaauugcacaugcauuccaauuccaucaucuugggcauuugcaaaauacuuaugggaaugggcaucaguccgauucucgugguuaucuuuacuaguaccauucguucaaugguuuguaggacuuucaccuacaguaugguuaucugcaauauggaugaugugguacuggggaccaucauuauacucaaucguaucaccauuuauaccacuacuacccauauuuuucugccuauggguauacauauaaggacuagucccuguucccagagcccacuuuuuuuucuuuuuuugaaauaaaauagccugucuuucagaucucaaaggcucuuuucagagccaccaaaaaaaaaaaaaaaaaaaaaaaaaaaaaaaaaaaaaaaaaaaaaaaaaaaaaaaaaaaaaaaaaaaaaaaaaaaaaaaaaaaaaaaaaaaaaaaaaaaaa

SEQ ID NO: 8226 - RNA, 1466 nt, Artificial Sequence
  mRNA Design a-1 (hSL-A100) comprising derived and/or modified sequence from Pf(3D7)__XP_001351122.1__Pf-CSP (opt11)
aggagagucccgcagucggcguccagcggcucugcuuguucgugugugugucguugcaggccuuauucaagcuuaccaugaugcgaaagcuugcgauccucagcgucuccucauuccuauucguagaagcacuauuccaagaauaccaaugcuacggcucauccucaaacacacgcguacucaacgaacucaacuacgacaacgcaggaacaaaccucuacaacgaacuagagaugaacuacuacggcaaacaagaaaacugguacucucucaaaaaaaacucacgaagccucggcgagaacgacgacggaaacaacgaagacaacgaaaaacuccgcaaaccaaaacacaaaaaacucaaacaacccgccgacggaaacccagacccaaacgcaaacccaaacguagacccaaacgccaaccccaacguagaccccaacgccaacccuaacgucgaccccaaugcaaaccccaacgcgaacccaaacgcaaaccccaacgcaaaccccaacgcaaacccaaacgccaaccccaacgcaaacccaaacgcaaacccuaacgccaacccaaacgccaacccaaacgccaacccaaacgcaaacccgaacgccaaccccaacgccaacccaaacgcaaacccaaacgcaaaccccaacgccaaccccaacguagaccccaacgcaaaccccaacgcaaacccaaacgccaaccccaacgccaaccccaacgccaaccccaacgccaaccccaaugccaacccaaacgcgaaccccaacgcaaacccgaacgcaaacccaaacgcgaacccaaacgcgaacccaaacgccaaccccaacgccaaccccaacgcaaacccaaacgcgaacccaaacgcaaaccccaacgccaacccaaacaaaaacaaccaaggaaacggacaaggccacaacaugccaaacgaccccaaccgcaacguagacgaaaacgccaacgccaacuccgcugucaagaacaacaacaacgaagaaccauccgacaaacacauaaaagaauaccuaaacaaaauccaaaacucccucucaaccgaauggucccccugcuccgucacaugcggaaacggcauccaaguccgaaucaaaccaggcuccgccaacaaacccaaagacgaacuggacuacgccaacgacaucgaaaaaaaaaucugcaaaauggaaaaaugcucauccgucuucaacguggucaacuccuccaucggacuaauaaugguccucuccuuccuauuccuaaacuaaggacuagucccuguucccagagcccacuuuuuuuucuuuuuuugaaauaaaauagccugucuuucagaucucaaaggcucuuuucagagccaccaaaaaaaaaaaaaaaaaaaaaaaaaaaaaaaaaaaaaaaaaaaaaaaaaaaaaaaaaaaaaaaaaaaaaaaaaaaaaaaaaaaaaaaaaaaaaaaaaaaaa

SEQ ID NO: 8227 - RNA, 1397 nt, Artificial Sequence
  mRNA Design a-1 (hSL-A100) comprising derived and/or modified sequence from Pf(3D7)__XP_001351122.1__Pf-CSP(1-374) (opt11)
aggagagucccgcagucggcguccagcggcucugcuuguucgugugugugucguugcaggccuuauucaagcuuaccaugaugcgcaaacucgcaauccucuccgucucaucguuccuauucguagaagcacucuuccaagaauaccaaugcuacggcucaagcuccaacacaagaguacucaacgaacucaacuacgacaaugccggaacaaaccuauacaacgagcuagaaaugaacuacuacggcaaacaagaaaacugguacucgcuaaaaaaaaacagcagaagccuaggugaaaacgacgacggaaacaacgaagacaacgaaaaacugcgcaaaccaaaacacaaaaaacuaaaacaacccgcagacggcaacccagacccaaacgcaaacccaaacguagaccccaacgccaacccaaacguagacccaaacgccaacccaaacguagacccaaacgcaaacccgaacgcaaacccaaacgcaaacccaaacgcaaacccaaacgcaaacccaaacgccaaccccaacgcaaauccaaacgcaaaccccaacgcaaaccccaacgccaacccaaacgcaaaccccaacgcgaacccaaacgccaaccccaacgccaacccaaacgcaaacccaaacgcaaacccaaacgccaaccccaacgucgacccaaacgccaacccaaacgcaaaccccaacgccaaccccaacgcaaacccaaacgccaacccgaacgcaaacccgaacgcaaacccaaacgcaaaccccaacgcaaaccccaacgcaaacccaaacgcaaaccccaacgccaaccccaacgccaaccccaacgcaaacccaaacgcaaacccgaacgcaaaccccaacgcaaaccccaacgccaaucccaacaaaaacaaccaaggcaacggacaaggacacaacaugccaaacgaccccaaccgcaacgucgacgaaaacgccaacgccaacuccgcggucaaaaacaacaacaacgaagagcccucagacaaacacauaaaagaauaccuaaacaaaauccaaaacucccucucgacagaauggucccccugcagcgucaccugcggaaacggcauacaaguacgaauaaaacccggcucagccaacaaaccaaaagacgaacuagacuacgccaacgacauagaaaaaaaaauaugcaaaauggaaaaaugcugaggacuagucccuguucccagagcccacuuuuuuuucuuuuuuugaaauaaaauagccugucuuucagaucucaaaggcucuuuucagagccaccaaaaaaaaaaaaaaaaaaaaaaaaaaaaaaaaaaaaaaaaaaaaaaaaaaaaaaaaaaaaaaaaaaaaaaaaaaaaaaaaaaaaaaaaaaaaaaaaaaaaa

SEQ ID NO: 8228 - RNA, 1250 nt, Artificial Sequence
  mRNA Design a-1 (hSL-A100) comprising derived and/or modified sequence from Pf(3D7)__XP_001351122.1__Pf-CSP(1-325) (opt11)
aggagagucccgcagucggcguccagcggcucugcuuguucgugugugugucguugcaggccuuauucaagcuuaccaugaugcgcaaacucgcaauccuaucaguaagcucauuccuguucguagaagcacuauuccaagaauaccaaugcuacggcucauccucaaacacaagaguacuaaacgaacuaaacuacgacaacgccggaaccaaccuauacaacgaacucgaaaugaacuacuacggcaaacaagaaaacugguacucacuaaagaaaaacagcagaagccucggcgaaaacgacgacggcaacaacgaagacaacgagaaacugagaaaaccaaaacacaagaaacuaaaacaacccgcggacgggaacccagacccaaaugcaaacccaaacgucgacccaaacgcaaacccaaacguagacccaaacgcaaaccccaacguagaccccaacgcaaacccaaacgcaaacccaaacgcaaacccaaacgcaaacccaaacgcaaaccccaacgcaaacccaaacgcaaacccaaacgcaaaccccaacgccaacccaaacgccaaccccaacgcaaacccaaacgcaaacccaaacgcaaaccccaacgccaacccgaacgcaaacccaaacgcaaacccaaacgcaaaccccaacguagacccaaacgcaaacccaaacgccaaccccaacgcaaacccaaacgcaaacccgaacgcaaaccccaacgcaaaccccaacgcaaacccaaacgcaaaccccaacgcaaauccaaacgcaaacccaaacgcaaacccaaacgccaacccaaacgcaaaucccaacgcaaacccaaacgcaaaccccaacgcaaacccaaacgcaaacccaaacgcaaacccaaacaaaaacaaccaaggaaacggccaaggacacaacaugccaaacgacccaaaccgaaacguagacgaaaacgccaacgccaacagcgcagucaaaaacaacaauaaugaagaacccuccgacaaacacauaaaagaauaccuaaacaaaauccaaaacugaggacuagucccuguucccagagcccacuuuuuuuucuuuuuuugaaauaaaauagccugucuuucagaucucaaaggcucuuuucagagccaccaaaaaaaaaaaaaaaaaaaaaaaaaaaaaaaaaaaaaaaaaaaaaaaaaaaaaaaaaaaaaaaaaaaaaaaaaaaaaaaaaaaaaaaaaaaaaaaaaaaaa

SEQ ID NO: 8229 - RNA, 1466 nt, Artificial Sequence
  mRNA Design a-1 (hSL-A100) comprising derived and/or modified sequence from Pf(3D7)__XP_001351122.1__HsALB_Pf-CSP(19-397) (opt11)
aggagagucccgcagucggcguccagcggcucugcuuguucgugugugugucguugcaggccuuauucaagcuuaccaugaaaugggucaccuucauaucccuccuauuccucuucucaucagccuacucccucuuccaggaauaccaaugcuacggaucguccucaaacacuagaguacucaaugaauuaaacuacgacaacgccggcaccaaccucuacaacgaacucgaaaugaacuacuacggaaaacaagaaaacugguacucacucaaaaaaaacucucgaucccucggcgaaaacgacgacggcaacaacgaagacaacgagaaacuacgcaaaccaaaacacaaaaaauuaaaacaacccgccgacggcaaccccgaccccaacgccaaccccaacguagaccccaacgcgaaccccaacgucgacccaaacgccaaccccaacguggaccccaacgccaacccaaacgccaaccccaacgccaacccaaacgcaaaccccaacgccaacccaaacgccaaccccaacgcaaacccaaacgcgaacccaaacgcaaacccaaacgccaacccaaacgcaaacccaaacgcgaacccaaacgccaacccaaacgccaaccccaacgcaaacccaaacgccaacccaaacgccaacccaaacguagacccaaacgcgaaccccaacgcuaacccaaacgcaaacccaaacgccaacccaaacgccaacccuaacgcaaacccaaacgccaaccccaacgccaaccccaacgccaaccccaacgcaaacccaaacgccaacccaaacgccaaccccaacgccaacccaaacgcaaacccaaacgcaaacccaaacgcaaaccccaacgccaacccaaacgccaacccaaacaaaaauaaccaaggcaaugggcaaggccacaacaugccaaacgaccccaaccgcaaugucgacgaaaacgccaacgccaacucugcaguaaaaaacaauaacaacgaagaacccucagacaaacacaucaaagaauaccucaacaagauccaaaauucccucuccacagaauggucccccugcagcguaaccugcggcaacggcauccaaguccgcaucaaacccggcuccgccaacaaaccgaaagacgaacuagacuacgccaacgacauagaaaaaaaaaucugcaaaauggaaaaaugcagcuccgucuucaacgucgucaacagcuccaucggccucaucaugguccucuccuuccuguuccucaacuaaggacuagucccuguucccagagcccacuuuuuuuucuuuuuuugaaauaaaauagccugucuuucagaucucaaaggcucuuuucagagccaccaaaaaaaaaaaaaaaaaaaaaaaaaaaaaaaaaaaaaaaaaaaaaaaaaaaaaaaaaaaaaaaaaaaaaaaaaaaaaaaaaaaaaaaaaaaaaaaaaaaaa

SEQ ID NO: 8230 - RNA, 1484 nt, Artificial Sequence
  mRNA Design a-1 (hSL-A100) comprising derived and/or modified sequence from Pf(3D7)__XP_001351122.1__HsIns-iso1_Pf-CSP(19-397) (opt11)
aggagagucccgcagucggcguccagcggcucugcuuguucgugugugugucguugcaggccuuauucaagcuuaccauggcacucuggaugagacuccucccccuccucgcacuccucgcccuauggggcccagacccagcggcagcccucuuccaagaauaccaaugcuacggcucauccuccaacacccgaguccucaaugaacuaaacuacgacaacgccggcaccaaccuauacaacgaacuagaaaugaacuacuacggcaaacaagaaaacugguacucccucaaaaaaaauucacgcucccuaggugagaacgacgacggaaacaacgaagacaacgaaaaacuccgaaaacccaaacacaaaaaacuaaaacaaccagcagacggcaaccccgaccccaacgcaaaccccaacguagacccaaacgcgaaccccaacgucgauccaaacgccaacccaaacguugaccccaacgcgaaccccaacgcaaacccaaacgcaaacccuaacgcgaaccccaacgcaaaccccaacgccaaccccaacgccaaccccaacgccaacccaaacgcaaaccccaacgccaaccccaacgcaaacccaaacgcaaacccgaacgcaaaccccaacgccaacccaaacgcaaacccaaacgccaacccaaacgcaaaccccaacguagacccaaacgccaaucccaacgcgaaccccaacgcaaacccaaacgcgaacccaaacgccaacccaaacgcaaacccgaacgccaacccaaacgccaaccccaacgcaaaccccaacgcaaacccaaacgccaacccaaacgcaaacccaaacgcaaaccccaacgccaaccccaacgcaaacccaaaugccaaccccaacgccaaccccaacgcaaacccaaacaaaaacaaccaaggaaacggccaaggccacaacaugccgaacgaccccaaccgaaacgucgacgaaaacgcaaacgccaacucagcggucaaaaacaacaacaacgaagaacccucagacaaacacaucaaagaauaccuaaacaagauccagaacucucucucaacagaauggucccccugcuccguaacaugcggcaacggcauccaaguacgaaucaaaccgggaucagccaauaaacccaaagacgaacucgacuacgccaacgacaucgaaaaaaaaauaugcaaaauggaaaaaugcagcucagucuucaacguagucaacagcuccauaggccucaucaugguacucuccuuccuguuccuaaacuaaggacuagucccuguucccagagcccacuuuuuuuucuuuuuuugaaauaaaauagccugucuuucagaucucaaaggcucuuuucagagccaccaaaaaaaaaaaaaaaaaaaaaaaaaaaaaaaaaaaaaaaaaaaaaaaaaaaaaaaaaaaaaaaaaaaaaaaaaaaaaaaaaaaaaaaaaaaaaaaaaaaaa

SEQ ID NO: 8231 - RNA, 1463 nt, Artificial Sequence
  mRNA Design a-1 (hSL-A100) comprising derived and/or modified sequence from Pf(3D7)__XP_001351122.1__HsSPARC_Pf-CSP(19-397) (opt11)
aggagagucccgcagucggcguccagcggcucugcuuguucgugugugugucguugcaggccuuauucaagcuuaccaugcgcgccuggauauucuuccuccuaugccuagcaggacgcgcccucgcacucuuccaagaauaccaaugcuacggcucauccucaaacacccgcguacuuaacgaacuaaacuacgacaacgccggaaccaaccuauacaacgaacucgaaaugaacuacuacgguaaacaagaaaacugguacucccucaaaaaaaacagccgaagccuaggagaaaacgacgacggaaacaacgaagacaacgaaaaacugcgcaaacccaaacacaaaaaacucaaacaacccgcagacgggaacccagacccaaacgcaaacccaaacguggacccaaacgccaacccuaacguagaccccaacgcaaaccccaacgucgacccuaaugcaaacccaaacgccaaccccaacgcgaacccaaacgcaaaccccaacgcuaacccgaacgccaaccccaacgccaacccgaacgcaaacccaaacgcaaacccaaacgcgaacccaaacgcaaacccaaacgccaaccccaacgcgaacccaaacgccaauccaaacgccaacccaaacgcaaacccaaacgccaaccccaacguagacccaaacgccaacccaaacgcgaacccaaacgcaaaccccaacgcaaacccaaacgcaaacccaaacgccaacccuaacgcaaacccaaacgccaaccccaacgccaacccaaacgcaaacccaaacgccaacccaaacgccaaccccaacgcaaacccgaacgcaaaccccaacgcaaacccaaacgcaaacccaaacgcgaacccgaacgccaacccaaauaagaacaaccaaggaaacggacaaggccacaacaugccaaacgaccccaaccgcaacgucgacgaaaacgcaaaugccaacuccgcagucaaaaacaacaauaacgaagaacccucggacaaacacaucaaagaauaccucaacaagauccaaaacucacucuccaccgaauggucacccugcagcguaacuugcggcaacggcauccaaguccgcauaaaaccaggcuccgcaaacaaacccaaagacgaacucgacuaugccaacgacaucgaaaaaaaaauaugcaaaauggaaaaaugcagcucagucuucaacguagucaacagcucuaucggacuaauaaugguacucuccuuccuauucuuaaacuaaggacuagucccuguucccagagcccacuuuuuuuucuuuuuuugaaauaaaauagccugucuuucagaucucaaaggcucuuuucagagccaccaaaaaaaaaaaaaaaaaaaaaaaaaaaaaaaaaaaaaaaaaaaaaaaaaaaaaaaaaaaaaaaaaaaaaaaaaaaaaaaaaaaaaaaaaaaaaaaaaaaaa

SEQ ID NO: 8232 - RNA, 1466 nt, Artificial Sequence
  mRNA Design a-1 (hSL-A100) comprising derived and/or modified sequence from Pf(3D7)__XP_001351122.1__IgE_Pf-CSP(19-397) (opt11)
aggagagucccgcagucggcguccagcggcucugcuuguucgugugugugucguugcaggccuuauucaagcuuaccauggacuggacauggauccucuuccucgucgccgcggccacacgcguacacucacucuuccaagaauaucaaugcuacggcucaagcucgaacacgcgcguacucaacgaacuaaacuacgacaacgccggcaccaaccuauacaacgaacucgaaaugaacuacuacggcaaacaagaaaacugguacucacuuaagaaaaauucacgaucccucggagaaaacgacgaugggaacaacgaagacaacgaaaaacuacgcaaacccaaacacaagaaacuuaaacaacccgcagacggcaacccagacccaaacgcaaaccccaacguagaccccaacgcaaacccaaacguagacccaaacgccaacccaaacguagacccaaacgcgaacccaaacgccaacccaaacgccaaccccaacgcaaacccaaacgcaaauccaaacgcaaacccaaaugcaaacccgaacgccaauccaaacgcaaaccccaacgcaaacccaaacgcaaaccccaaugccaacccaaacgcaaaccccaacgcaaaccccaacgcaaaccccaacgcaaacccaaacgcgaacccaaacguagaccccaacgccaaccccaacgccaacccaaacgcaaacccaaacgccaacccaaacgccaaccccaacgcaaaccccaacgcaaacccgaacgcaaacccaaacgcaaacccaaacgcaaacccgaacgcaaacccuaacgcgaaccccaacgccaaccccaacgcaaacccaaacgcaaacccaaacgccaacccaaacgcaaacccaaacgcaaacccaaacaaaaacaaccaaggaaacgggcaaggacauaacaugccgaacgaccccaaccgcaacguagacgaaaacgccaacgccaacagcgcagucaaaaacaacaacaacgaagaacccuccgacaaacacaucaaagaauaccuaaacaaaauccagaacucacuauccaccgaauggucccccugcagcgugaccugcggcaacggcauacaaguccgcauaaaaccaggcuccgccaacaaacccaaagacgaacuagacuacgccaacgacauagaaaagaaaauaugcaaaauggaaaaaugcagcucagucuucaauguagucaacuccuccaucggacucauaaugguccuaucauuccucuuccuaaacuaaggacuagucccuguucccagagcccacuuuuuuuucuuuuuuugaaauaaaauagccugucuuucagaucucaaaggcucuuuucagagccaccaaaaaaaaaaaaaaaaaaaaaaaaaaaaaaaaaaaaaaaaaaaaaaaaaaaaaaaaaaaaaaaaaaaaaaaaaaaaaaaaaaaaaaaaaaaaaaaaaaaaa

SEQ ID NO: 8233 - RNA, 1631 nt, Artificial Sequence
  mRNA Design a-1 (hSL-A100) comprising derived and/or modified sequence from Pf(3D7)__XP_001351122.1__Pf-CSP_L(G4SG4)_TM domain HA (opt11)
aggagagucccgcagucggcguccagcggcucugcuuguucgugugugugucguugcaggccuuauucaagcuuaccaugaugcgcaaacucgccauccucagcgucagcucguuccucuucgucgaagcacuauuccaagaauaccaguguuacggcucauccucaaacacacgcgugcucaacgaacuaaacuacgacaacgccggcaccaaccucuacaacgaacuagaaaugaacuauuacggcaagcaagaaaacugguacucacucaaaaaaaacagccgaagccuaggcgagaacgacgacgggaacaacgaagacaacgaaaaacuacgcaaacccaagcacaaaaaacugaaacaaccagccgacggaaauccagaccccaacgcaaacccgaacguagaccccaacgcgaaccccaacguggacccgaacgcaaacccgaacguagacccaaacgcaaacccaaacgcgaacccaaacgcaaacccaaacgcuaacccaaacgcaaaccccaacgccaaccccaacgcgaacccaaacgcaaacccaaacgcaaacccaaacgcaaacccgaacgcaaacccaaacgccaacccaaacgcgaacccaaacgccaacccaaacgcaaacccaaacgcaaacccaaacgcaaacccaaacguagacccgaacgccaacccgaaugcaaacccaaacgcaaacccgaacgcaaacccaaacgcgaacccgaacgccaacccaaacgcaaacccgaacgcaaaccccaacgccaacccaaacgcaaaccccaacgcaaaccccaacgcaaacccgaacgcaaacccaaacgcaaacccaaacgccaaccccaacgccaaccccaacgcaaacccgaacgccaacccaaacaaaaacaaccaaggcaacgggcaaggacacaacaugccaaacgaccccaaccgaaacgucgacgaaaacgccaacgccaacuccgcagucaaaaacaacaacaacgaagaacccucagacaaacacauaaaagaauaccucaacaaaauccaaaacucacucucaaccgaguggucacccugcagugugaccuguggcaacggaauacaaguacgcauaaaacccggaucagccaacaaaccgaaagacgaacuagacuacgccaacgacauagaaaaaaaaauaugcaaaauggagaaaugcagcucugucuucaacgucgucaacagcucaaucggacucauaaugguccucuccuuccuauuccucaacggcggagggggcucaggcggcggaggaaaauuagaauccaccagaaucuaucagauucucgccauauacagcacagucgcaagcucgcuuguccuugucguaucacuaggcgcaaucucauucuggaugugcuccaacggaagccugcaaugccgcauuugcauauaaggacuagucccuguucccagagcccacuuuuuuuucuuuuuuugaaauaaaauagccugucuuucagaucucaaaggcucuuuucagagccaccaaaaaaaaaaaaaaaaaaaaaaaaaaaaaaaaaaaaaaaaaaaaaaaaaaaaaaaaaaaaaaaaaaaaaaaaaaaaaaaaaaaaaaaaaaaaaaaaaaaaa

SEQ ID NO: 8234 - RNA, 1505 nt, Artificial Sequence
  mRNA Design a-1 (hSL-A100) comprising derived and/or modified sequence from Pf(3D7)__XP_001351122.1__Pf-CSP(199-377)_L(PVTN)_HBsAg (opt11)
aggagagucccgcagucggcguccagcggcucugcuuguucgugugugugucguugcaggccuuauucaagcuuaccauggaccccaacgccaaccccaacgccaaccccaacgccaaucccaacgcuaaccccaacgccaaccccaacgcaaaccccaacgccaacccaaacgccaaccccaacgcaaaccccaacgccaaucccaaugccaaccccaacgccaaccccaacgcgaaccccaacgccaaccccaacgcaaacccaaacgccaaccccaacgccaaccccaacgccaaccccaacaaaaacaaccaaggcaacggccaaggccacaacaugcccaacgaccccaaccgcaacguagacgagaacgccaacgccaacagcgcugucaaaaacaacaacaacgaggaacccuccgacaaacacaucaaagaauaccuuaacaaaauccaaaacucucucuccaccgaguggucccccugcucagucacaugcggcaacggcauacaaguucguaucaaacccggcucagcaaacaaacccaaagacgaacucgacuacgcaaacgacauagaaaagaaaaucugcaaaauggaaaaauguucauccguccccgucaccaacauggaaaacaucacuuccggauuccucgguccccuacucguacuccaagccggcuucuuccuccucacccgcauccucaccaucccccaaucacuugacuccugguggaccucccucaacuuccucggcggcucccccgucugccuaggccaaaacagccaaucccccacuagcaaccacucccccacauccugcccacccaucugccccggauaucgauggaugugccuucgccgauucauaaucuuccucuucauccuccuacucugccucaucuuccuccucguccuucuagauuaccaaggcaugcuccccgucugcccccuuauccccggcuccaccaccacaaacaccggccccugcaaaaccugcacaacccccgcccaaggcaauagcauguuccccuccugcugcugcacuaaaccaacagacggcaacuguaccugcaucccaaucccaucaucaugggccuucgccaaauaccucugggaaugggcaucuguacgauucuccuggcucucccuucucguacccuucguccagugguucgucggccucucccccaccguauggcuauccgccaucuggaugaugugguacuggggccccucccuauacuccaucgucuccccauucauaccacuccuacccaucuucuucugccucugggucuacaucugaggacuagucccuguucccagagcccacuuuuuuuucuuuuuuugaaauaaaauagccugucuuucagaucucaaaggcucuuuucagagccaccaaaaaaaaaaaaaaaaaaaaaaaaaaaaaaaaaaaaaaaaaaaaaaaaaaaaaaaaaaaaaaaaaaaaaaaaaaaaaaaaaaaaaaaaaaaaaaaaaaaaa

SEQ ID NO: 8235 - RNA, 1547 nt, Artificial Sequence
  mRNA Design a-1 (hSL-A100) comprising derived and/or modified sequence from Pf(3D7)__XP_001351122.1__Pf-CSP(199-387)_L(PVTN)_HBsAg (opt11)
aggagagucccgcagucggcguccagcggcucugcuuguucgugugugugucguugcaggccuuauucaagcuuaccaugauggcccccgaccccaacgcaaauccaaacgcaaaccccaacgccaacccuaacgcaaaccccaacgccaacccaaacgccaaucccaacgccaacccuaacgccaaccccaacgcaaaccccaacgccaaccccaacgccaacccuaacgcaaaccccaacgccaacccaaacgcaaaccccaacgccaaccccaacgccaaccccaacgcaaacccaaacgcaaaccccaacaaaaacaaccaaggaaacggacaaggccacaacaugccuaacgaccccaaucgcaacgucgacgaaaacgcaaacgccaacuccgccgucaaaaacaacaacaacgaagaacccucugacaaacacaucaaagaauaccucaacaagauccaaaacucccuauccaccgaauggucccccugcuccgucacuugcgguaauggcauccaaguccgcauaaaaccaggauccgcaaacaaacccaaagacgaacuagacuacgccaacgacauagaaaagaaaaucugcaaaauggaaaaaugcuccucagucuucaaugucguaaacuccuccauuggccuaggccccgucaccaacauggaaaacauuaccuccggauuccucgguccucuccucguccuccaagccggauucuuucuccucacacgaauccucacuaucccucaaucccuggacucaugguggaccucccucaacuuccugggcggcucccccgucugccucggccaaaacagccaauccccaaccuccaaucacucccccacaagcugcccucccauaugccccggcuaccgcuggaugugccuccgucgcuucaucauauuccucuucauacuucuccucugccucaucuuccuccuuguccugcuagacuaccaaggcaugcuccccgucugcccacucauccccgguuccaccacaacaaacaccggccccugcaaaacaugcaccacacccgcccaagguaacuccauguuccccuccugcugcugcaccaaaccaaccgacggcaacugcacuugcauucccauccccucauccugggccuucgccaaauaccucugggaaugggcauccguccguuucucauggcuaucucuccuaguaccauucguacaaugguucguuggccucucccccaccguauggcucuccgccauauggaugaugugguacuggggcccuucacuuuacuccaucgucucacccuucaucccacuccuacccaucuucuucugccuuuggguauacaucuaaggacuagucccuguucccagagcccacuuuuuuuucuuuuuuugaaauaaaauagccugucuuucagaucucaaaggcucuuuucagagccaccaaaaaaaaaaaaaaaaaaaaaaaaaaaaaaaaaaaaaaaaaaaaaaaaaaaaaaaaaaaaaaaaaaaaaaaaaaaaaaaaaaaaaaaaaaaaaaaaaaaaa

SEQ ID NO: 8236 - RNA, 731 nt, Artificial Sequence
  mRNA Design a-1 (hSL-A100) comprising derived and/or modified sequence from Pf(3D7)__XP_001351122.1__HsALB_Pf-CSP(19-152) (opt11)
aggagagucccgcagucggcguccagcggcucugcuuguucgugugugugucguugcaggccuuauucaagcuuaccaugaaaugggucaccuucaucucccuccucuuccucuucuccagcgcauacucccucuuccaagaauaccaaugcuacggcuccuccuccaacacccgcguccucaacgaacucaacuacgacaacgccggcaccaaccucuacaacgaacucgaaaugaacuacuacggcaaacaagaaaacugguacucccucaaaaaaaacucccgcucccuaggcgaaaacgacgacggaaacaacgaagacaacgaaaaacuccgcaaacccaaacacaaaaaacucaaacaacccgccgacggaaaccccgaccccaacgccaacccaaacgucgaccccaacgccaaccccaacgucgaccccaacgccaaccccaacgucgaccccaacgccaaccccaacgcaaacccaaacgcaaacccaaacgccaaccccaacgccaaccccaacgccaaccccuaaggacuagucccuguucccagagcccacuuuuuuuucuuuuuuugaaauaaaauagccugucuuucagaucucaaaggcucuuuucagagccaccaaaaaaaaaaaaaaaaaaaaaaaaaaaaaaaaaaaaaaaaaaaaaaaaaaaaaaaaaaaaaaaaaaaaaaaaaaaaaaaaaaaaaaaaaaaaaaaaaaaaa

SEQ ID NO: 8237 - RNA, 851 nt, Artificial Sequence
  mRNA Design a-1 (hSL-A100) comprising derived and/or modified sequence from Pf(3D7)__XP_001351122.1__HsALB_Pf-CSP(19-192) (opt11)
aggagagucccgcagucggcguccagcggcucugcuuguucgugugugugucguugcaggccuuauucaagcuuaccaugaaauggguaaccuucauaucccuccucuuccuauucucgagcgccuacucccucuuccaagaauaccaaugcuacggcucauccuccaacacccgcguccucaacgaacucaacuacgacaacgccggcaccaaccucuacaacgaacuagagaugaacuacuacggcaaacaagaaaacugguacucacucaaaaaaaacucccgaucccuaggagaaaacgacgacggcaacaacgaagacaacgaaaaacuacgaaaacccaaacacaaaaaacucaaacaacccgccgacggcaaccccgaccccaacgccaaccccaacgucgaccccaacgccaacccaaacguagaccccaacgccaaccccaacgucgacccaaacgccaaccccaacgccaaccccaacgccaacccaaacgcaaacccaaacgcaaacccaaacgccaacccaaacgccaaccccaacgccaaccccaacgcaaaccccaacgcaaaccccaacgccaacccaaacgcaaaccccaacgccaacccaaacgccaacccaaacgccaaccccaacgcaaaccccuaaggacuagucccuguucccagagcccacuuuuuuuucuuuuuuugaaauaaaauagccugucuuucagaucucaaaggcucuuuucagagccaccaaaaaaaaaaaaaaaaaaaaaaaaaaaaaaaaaaaaaaaaaaaaaaaaaaaaaaaaaaaaaaaaaaaaaaaaaaaaaaaaaaaaaaaaaaaaaaaaaaaaa

SEQ ID NO: 8238 - RNA, 1091 nt, Artificial Sequence
  mRNA Design a-1 (hSL-A100) comprising derived and/or modified sequence from Pf(3D7)__XP_001351122.1__HsALB_Pf-CSP(19-272) (opt11)
aggagagucccgcagucggcguccagcggcucugcuuguucgugugugugucguugcaggccuuauucaagcuuaccaugaaauggguaaccuucaucucccuccucuuccuauucucaucagcauacucacucuuccaagaauaccaaugcuacggcucgagcucaaacacacgcguacucaacgaacugaacuacgacaacgccggaaccaaccucuacaaugaacucgaaaugaacuacuacggcaaacaagagaacugguacucacucaaaaaaaacagcagaagccucggagaaaacgacgacggaaacaacgaagacaacgaaaaacuccgcaaacccaagcacaaaaaacuaaaacaacccgcagacggaaaccccgaccccaacgcaaacccgaacgucgacccaaacgccaacccaaacguagaccccaacgcgaacccaaacguagacccaaacgccaacccaaacgcaaaccccaacgccaaccccaacgcaaacccaaacgccaacccaaacgcaaaccccaaugcaaaccccaacgcaaacccaaacgccaaccccaacgcaaacccaaacgcaaacccaaacgcaaacccaaacgcaaacccaaacgcgaacccaaacgcaaacccaaacgcaaacccgaacgcaaacccaaacguagacccaaacgcaaaccccaacgccaacccaaacgcaaacccaaacgcaaacccaaacgcaaacccaaacgcgaacccaaacgccaacccaaacgcaaacccaaacgcaaacccaaacgcaaacccaaacgcaaacccaaacgcaaacccaaacgcaaacccgaacgcgaacccaaacgcaaacccaaacgcgaacccgaacgcaaaccccaacgcaaacccauaaggacuagucccuguucccagagcccacuuuuuuuucuuuuuuugaaauaaaauagccugucuuucagaucucaaaggcucuuuucagagccaccaaaaaaaaaaaaaaaaaaaaaaaaaaaaaaaaaaaaaaaaaaaaaaaaaaaaaaaaaaaaaaaaaaaaaaaaaaaaaaaaaaaaaaaaaaaaaaaaaaaaa

SEQ ID NO: 8239 - RNA, 1253 nt, Artificial Sequence
  mRNA Design a-1 (hSL-A100) comprising derived and/or modified sequence from Pf(3D7)__XP_001351122.1__HsALB_Pf-CSP(19-272)_L(AAY)_Pf-CSP(310-3 27)_L(AAY)_Pf-CSP(346-375) (opt11)
aggagagucccgcagucggcguccagcggcucugcuuguucgugugugugucguugcaggccuuauucaagcuuaccaugaaaugggucaccuucaucucacuccuauuccuauucuccuccgcauacucacucuuccaagaauaccagugcuacggaucaagcuccaacacacgcguacuaaacgaacugaacuacgacaacgccggaaccaaccucuacaacgaacucgaaaugaauuacuacggcaaacaagagaacugguacucacucaaaaaaaacagcagaucccuaggcgaaaacgacgacggaaacaacgaagacaacgaaaaacuacgcaaacccaaacacaaaaaacuaaaacaacccgcagacggaaacccagauccaaacgcaaacccaaacguagacccaaacgccaacccaaacguagacccaaacgcaaacccaaacguagaccccaacgcaaacccaaacgcaaacccgaacgccaacccaaacgcaaaccccaacgccaacccaaacgcaaacccaaacgcaaacccaaacgcaaacccaaacgccaaccccaacgcgaacccaaacgcaaacccuaacgccaacccaaacgcaaacccaaacgcaaacccgaacgcaaacccaaacgcaaacccaaacgcaaacccgaacguagacccaaacgcaaacccaaacgcaaacccaaacgcaaacccaaacgccaacccaaacgccaacccaaacgcaaaccccaacgcaaaccccaacgcgaacccaaacgccaaccccaacgcaaacccaaacgccaacccaaacgccaacccgaacgcaaacccaaacgccaacccaaacgccaacccgaacgcaaacccaaacgccaacccaaacgccaacccagccgcguacgaacccucagauaaacacauaaaagaauaccucaacaaaauccaaaacucacuagcagccuacaucaaaccaggauccgccaacaaacccaaggacgaacucgacuacgcaaacgacaucgaaaaaaaaaucugcaaaauggaaaaaugcucaugaggacuagucccuguucccagagcccacuuuuuuuucuuuuuuugaaauaaaauagccugucuuucagaucucaaaggcucuuuucagagccaccaaaaaaaaaaaaaaaaaaaaaaaaaaaaaaaaaaaaaaaaaaaaaaaaaaaaaaaaaaaaaaaaaaaaaaaaaaaaaaaaaaaaaaaaaaaaaaaaaaaaa

SEQ ID NO: 8240 - RNA, 1214 nt, Artificial Sequence
  mRNA Design a-1 (hSL-A100) comprising derived and/or modified sequence from Pf(3D7)__XP_001351122.1__HsALB_Pf-CSP(19-272)_L(AAY)_Pf-CSP(346-3 65)_L(AAY)_P2 (opt11)
aggagagucccgcagucggcguccagcggcucugcuuguucgugugugugucguugcaggccuuauucaagcuuaccaugaaaugggucaccuucaucucacuccuauuccuauucucgagcgcauacucacucuuccaagaauaccaaugcuauggcuccagcucaaacacacgcguccuaaacgaacucaacuacgacaacgccggaacaaaccucuacaacgaacucgaaaugaacuacuacggcaaacaagaaaacugguacucgcucaaaaaaaacucccgaagucuaggcgaaaacgacgacggaaacaacgaagacaacgaaaaacuacgcaaacccaaacacaaaaaacuaaaacaacccgcagacggaaaccccgacccaaacgcaaaccccaacguagacccaaacgcaaaccccaacguagacccaaacgcaaacccgaacguagacccaaacgccaacccaaacgccaaccccaacgcaaacccaaacgccaaccccaacgcaaacccaaacgcaaacccaaacgcaaacccaaacgcaaacccaaacgccaaccccaacgccaacccaaacgccaaccccaacgcgaaccccaacgcgaacccaaacgccaacccaaacgcaaaccccaacgcaaacccaaacgcaaacccaaacgucgacccaaacgcaaacccaaacgcaaacccgaacgcaaacccaaacgcaaaccccaacgccaacccaaacgcgaacccaaacgccaacccaaacgccaacccaaacgcaaacccaaacgccaacccaaacgcaaacccaaacgcaaaccccaacgcaaaccccaacgcaaacccaaacgccaaccccaacgcaaaccccaacgcaaacccaaacgccaacccagccgcauacauaaaacccggcuccgccaacaaaccaaaagacgaacuagacuacgccaacgacauagaagcagccuaccaauacaucaaagccaacagcaaauucauaggaauaaccgagcuauaaggacuagucccuguucccagagcccacuuuuuuuucuuuuuuugaaauaaaauagccugucuuucagaucucaaaggcucuuuucagagccaccaaaaaaaaaaaaaaaaaaaaaaaaaaaaaaaaaaaaaaaaaaaaaaaaaaaaaaaaaaaaaaaaaaaaaaaaaaaaaaaaaaaaaaaaaaaaaaaaaaaaa

SEQ ID NO: 8241 - RNA, 1208 nt, Artificial Sequence
  mRNA Design a-1 (hSL-A100) comprising derived and/or modified sequence from Pf(3D7)__XP_001351122.1__HsALB_Pf-CSP(19-272)_L(AAY)_Pf-CSP(346-3 65)_L(AAY)_PADRE (opt11)
aggagagucccgcagucggcguccagcggcucugcuuguucgugugugugucguugcaggccuuauucaagcuuaccaugaaauggguaaccuucaucucgcuacuguuccucuucucauccgcauacucccucuuccaagaauaccaaugcuacggcucauccucaaacacacgaguacuaaacgaacucaacuacgacaacgccggaaccaaccuauacaacgaacucgaaaugaacuacuacggcaaacaagaaaacugguacucacucaaaaaaaacucccgaucccucggcgaaaacgacgacggaaacaacgaagacaacgaaaaacugagaaaacccaaacacaaaaaacuaaaacaaccagccgacggcaacccagaccccaacgcaaaccccaacguagacccaaacgccaaccccaacguagacccaaacgcaaacccaaacguagaccccaacgccaacccaaacgccaacccaaacgccaaccccaacgcaaacccaaacgcaaacccaaacgcaaacccaaacgccaacccaaacgcaaacccaaacgccaacccgaacgcaaaccccaacgcaaacccaaacgcaaaccccaacgccaacccaaacgcaaacccaaacgcaaaccccaacgcaaacccaaaugcgaacccaaacguggacccgaacgcaaaccccaacgccaacccaaacgcaaaccccaacgccaaccccaacgccaaccccaacgcaaaccccaacgccaaccccaacgccaacccaaacgccaacccaaacgcgaacccaaacgcaaaccccaacgcaaacccaaacgcaaacccaaacgcaaacccaaacgcaaaccccaacgcaaacccaaacgcaaacccaaacgcaaaccccgcagccuacauuaaaccaggcuccgccaacaaacccaaagacgaacucgacuacgccaacgacauagaagcagccuacgccaaauucguagccgcauggacacucaaagccgcagccuaaggacuagucccuguucccagagcccacuuuuuuuucuuuuuuugaaauaaaauagccugucuuucagaucucaaaggcucuuuucagagccaccaaaaaaaaaaaaaaaaaaaaaaaaaaaaaaaaaaaaaaaaaaaaaaaaaaaaaaaaaaaaaaaaaaaaaaaaaaaaaaaaaaaaaaaaaaaaaaaaaaaaa

SEQ ID NO: 8242 - RNA, 1265 nt, Artificial Sequence
  mRNA Design a-1 (hSL-A100) comprising derived and/or modified sequence from Pf(3D7)__XP_001351122.1__HsALB_Pf-CSP(19-272)_L(G4S)_Pf-CSP(310-3 27)_L(G4S)_Pf-CSP(346-375) (opt11)
aggagagucccgcagucggcguccagcggcucugcuuguucgugugugugucguugcaggccuuauucaagcuuaccaugaaaugggucaccuucaucucccuacuauuccucuucucaucagccuacucacucuuccaagaguaccaaugcuacggcucaagcucaaacacacgcguacucaacgaacuaaacuacgacaacgcaggcaccaaccucuacaacgaacucgagaugaacuacuacggcaaacaagaaaacugguacucacucaaaaaaaacucccgcagccucggcgaaaacgacgacggcaacaacgaagauaacgagaaacuacgcaaacccaaacacaaaaaacuaaaacaacccgccgacggaaacccagacccaaacgccaacccaaacguagacccaaacgcaaacccaaacguagacccaaacgccaaccccaacguagacccaaacgccaacccaaacgccaacccaaacgcaaacccaaacgcaaacccaaacgcgaacccaaacgcaaaccccaacgccaacccaaacgcaaacccaaacgccaaccccaacgcaaacccaaacgcaaaccccaacgcaaacccaaacgccaaccccaacgcaaaccccaacgcaaacccaaacgcaaacccaaacgcaaacccaaacgucgacccaaacgcaaaccccaacgcaaacccaaacgcaaacccaaacgccaacccaaacgcaaacccaaacgccaacccaaacgcaaaccccaacgcaaaccccaacgccaacccaaacgcaaaccccaacgcgaacccaaacgcaaacccaaacgcaaacccaaacgcaaaccccaacgcaaaccccaacgcaaacccaaacgcaaacccaaacgcaaacccaggcggcggcggaagcgaacccucggacaaacacauaaaagaauaccucaacaaaauccaaaacucccucggaggcggaggcuccaucaaacccggaagcgcaaacaaacccaaagacgaacucgacuacgcaaacgacaucgagaaaaaaauaugcaaaauggaaaaaugcucauaaggacuagucccuguucccagagcccacuuuuuuuucuuuuuuugaaauaaaauagccugucuuucagaucucaaaggcucuuuucagagccaccaaaaaaaaaaaaaaaaaaaaaaaaaaaaaaaaaaaaaaaaaaaaaaaaaaaaaaaaaaaaaaaaaaaaaaaaaaaaaaaaaaaaaaaaaaaaaaaaaaaaa

SEQ ID NO: 8243 - RNA, 1250 nt, Artificial Sequence
  mRNA Design a-1 (hSL-A100) comprising derived and/or modified sequence from Pf(3D7)__XP_001351122.1__HsALB_Pf-CSP(19-272)_L(G4S)_Pf-CSP(310-3 27)_Pf-CSP(346-375) (opt11)
aggagagucccgcagucggcguccagcggcucugcuuguucgugugugugucguugcaggccuuauucaagcuuaccaugaaauggguaaccuucaucucacuccuauuccucuucuccuccgcauacucgcucuuccaagaauaccaaugcuacggcucaagcucaaacacccgcguccucaacgaacucaacuacgacaacgccgguaccaaccuauacaacgaacucgaaaugaacuacuacggcaaacaagaaaacugguacucacucaaaaaaaacuccaggucccuaggagaaaacgacgauggcaacaacgaagacaacgaaaaacuccgaaagccaaaacacaaaaaacuaaaacagcccgcagacggcaacccagacccaaacgcaaacccaaacguagacccaaacgcgaaccccaacguagacccaaacgcaaacccaaacguagacccaaacgcaaaccccaacgcaaacccaaacgcaaaccccaacgcaaaccccaacgcaaacccaaacgcaaacccaaacgcaaacccaaacgcaaacccaaacgcaaaccccaacgccaaccccaacgcaaacccaaacgcaaacccaaacgcaaacccaaacgcaaacccaaacgcaaaccccaacgccaacccaaacgcaaacccaaacguagacccaaacgcaaacccaaacgcaaacccaaacgcaaaccccaacgccaacccaaacgcaaacccaaacgcaaacccaaacgcaaacccaaacgcaaauccaaacgcuaacccaaacgcaaacccgaacgcaaaccccaaugcaaaccccaacgcaaacccaaacgccaacccaaacgcaaacccaaacgcgaacccaaacgcaaacccaaacgcaaacccaggcggaggcggauccgaacccuccgacaaacacauaaaagaauaccuaaacaaaauccaaaacucucucauaaaacccggaucagccaacaaaccaaaagacgaacuagacuacgccaaugacauagaaaaaaaaauaugcaagauggaaaaaugcagcuaaggacuagucccuguucccagagcccacuuuuuuuucuuuuuuugaaauaaaauagccugucuuucagaucucaaaggcucuuuucagagccaccaaaaaaaaaaaaaaaaaaaaaaaaaaaaaaaaaaaaaaaaaaaaaaaaaaaaaaaaaaaaaaaaaaaaaaaaaaaaaaaaaaaaaaaaaaaaaaaaaaaaa

SEQ ID NO: 8244 - RNA, 1250 nt, Artificial Sequence
  mRNA Design a-1 (hSL-A100) comprising derived and/or modified sequence from Pf(3D7)__XP_001351122.1__HsALB_Pf-CSP(19-325) (opt11)
aggagagucccgcagucggcguccagcggcucugcuuguucgugugugugucguugcaggccuuauucaagcuuaccaugaaauggguaaccuucaucucacuccuguuccuauucucauccgcauacucacucuuccaagaauaccaaugcuacggcucgucuucaaacacccgcguacucaacgaacucaacuacgacaacgccggaaccaaccucuacaacgaacucgaaaugaacuacuacggcaaacaagaaaacugguacucacucaaaaaaaacagccgaagccuaggcgaaaacgacgacggaaacaaugaagacaacgaaaaacuccgcaaacccaaacacaaaaaacucaaacaaccagcagacggaaaccccgacccgaacgcaaacccaaacguagacccaaacgcaaacccaaacguagacccaaacgcgaacccaaacguagaccccaacgcaaacccaaacgcaaacccaaacgcaaacccaaacgccaaccccaacgccaacccaaacgccaacccaaacgcaaacccgaacgcgaacccaaacgcaaaccccaacgcaaacccaaacgcaaacccaaacgcgaacccaaacgccaacccaaacgccaacccaaacgcaaacccaaacgccaacccaaacgcaaaccccaacguggaccccaacgcaaacccaaacgcaaacccaaacgccaaccccaacgcaaacccaaacgcaaacccuaacgcaaacccaaacgcaaaccccaacgcgaacccaaacgcaaacccaaacgcaaacccaaacgcaaaccccaacgcaaacccaaacgccaacccaaacgccaacccaaacgcgaauccaaacgcaaaccccaacgcaaacccaaacgcaaacccgaacaaaaacaaccaagggaacggacaaggacacaacaugccaaacgaccccaaccgcaacgucgacgaaaacgccaacgccaacuccgcaguaaaaaacaacaacaacgaagaacccuccgacaaacacauaaaagaauaccucaacaagauacaaaacuagggacuagucccuguucccagagcccacuuuuuuuucuuuuuuugaaauaaaauagccugucuuucagaucucaaaggcucuuuucagagccaccaaaaaaaaaaaaaaaaaaaaaaaaaaaaaaaaaaaaaaaaaaaaaaaaaaaaaaaaaaaaaaaaaaaaaaaaaaaaaaaaaaaaaaaaaaaaaaaaaaaaa

SEQ ID NO: 8245 - RNA, 1427 nt, Artificial Sequence
  mRNA Design a-1 (hSL-A100) comprising derived and/or modified sequence from Pf(3D7)__XP_001351122.1__HsALB_Pf-CSP(19-384) (opt11)
aggagagucccgcagucggcguccagcggcucugcuuguucgugugugugucguugcaggccuuauucaagcuuaccaugaaauggguaaccuucaucucacuacucuuccuauucucaagcgcguacucacucuuccaagaauaccaaugcuacggcucgagcucaaacacccgcguucucaacgaacuaaacuacgacaacgccggaaccaaccuauacaacgaacuugaaaugaacuacuacggcaaacaagaaaacugguacucgcucaaaaaaaacuccaggagccuaggcgaaaacgacgacggaaacaacgaagacaacgagaaacuaagaaaacccaaacacaaaaaacucaaacagcccgcggacggaaaccccgacccaaacgcaaaccccaacguagacccgaacgccaacccaaacguagacccaaacgcaaacccaaacguagaccccaacgcaaacccgaacgccaacccaaacgcaaacccaaaugcgaaccccaacgcgaacccaaacgcaaacccgaacgcaaaccccaacgccaacccaaacgcaaacccaaacgcaaaccccaacgcaaacccaaacgcgaacccaaacgcaaacccaaacgcgaacccgaacgcaaacccaaacgcaaacccgaacgcaaacccaaacguagacccaaacgccaacccaaacgcaaacccaaacgcaaaccccaacgcaaacccaaacgcaaacccgaacgcaaacccaaacgcaaacccaaacgcgaacccaaacgcaaaccccaacgcaaacccaaacgcaaacccuaacgcaaacccgaacgcaaacccaaacgccaacccaaacgcgaaccccaacgcaaacccaaacgccaacccaaacgccaacccgaacaaaaacaaccaaggaaacggacaaggacacaacaugccaaacgaccccaaccgaaacgucgacgaaaacgcaaacgccaacagugccgucaaaaacaacaacaaugaagaacccucagacaaacacauaaaagaauaccuaaacaaaauccagaacucgcucucaaccgaauggucacccugcagcgucaccugcggcaacggaauacaaguacgcaucaaaccaggcucggccaacaaaccaaaagacgaauuagacuacgcaaacgacaucgaaaaaaaaauaugcaaaauggaaaaaugcagcucagucuucaacguagucaauagcucauaaggacuagucccuguucccagagcccacuuuuuuuucuuuuuuugaaauaaaauagccugucuuucagaucucaaaggcucuuuucagagccaccaaaaaaaaaaaaaaaaaaaaaaaaaaaaaaaaaaaaaaaaaaaaaaaaaaaaaaaaaaaaaaaaaaaaaaaaaaaaaaaaaaaaaaaaaaaaaaaaaaaaa

SEQ ID NO: 8246 - RNA, 1565 nt, Artificial Sequence
  mRNA Design a-1 (hSL-A100) comprising derived and/or modified sequence from Pf(3D7)__XP_001351122.1__HsALB_Pf-CSP(19-384)_TM domain HA (opt11)
aggagagucccgcagucggcguccagcggcucugcuuguucgugugugugucguugcaggccuuauucaagcuuaccaugaagugggucaccuucaucucccuccuauuccucuucucuagcgcguacucacucuuccaagaauaccaaugcuacggauccagcucaaacacacgcguccucaaugaacugaacuacgauaacgccggaaccaaccucuacaacgaacucgaaaugaacuacuacggcaaacaagaaaacugguacucacuaaagaaaaauagcaggucccucggcgaaaacgacgacgggaacaacgaagauaacgaaaaacuacgcaaacccaagcacaagaaacuaaaacagccagcagacggaaacccagaccccaacgccaacccaaacgucgaccccaacgcaaacccaaacguagauccgaacgcaaacccaaacgucgauccaaacgcaaacccaaacgcaaacccaaacgcuaaccccaacgccaacccaaacgcaaacccgaacgcaaaccccaacgcgaacccgaacgcaaacccaaacgcaaacccaaacgccaacccaaacgcaaacccaaacgcaaacccaaacgccaacccaaacgcaaaccccaacgcgaaccccaacgcaaaccccaacgcaaacccaaacgucgacccaaacgcaaaccccaacgcaaaccccaacgcaaaccccaaugcaaacccaaacgcgaaccccaacgcaaacccaaacgcgaacccaaaugcaaaccccaacgccaaccccaacgccaacccgaacgcaaacccaaacgccaacccaaacgccaacccaaacgcaaaucccaacgccaacccaaacgcgaacccgaacgcaaacccaaacgcaaacccgaacaaaaacaaccaaggaaacggucaaggacacaacaugccaaacgaccccaaccgcaacgucgacgaaaacgccaaugccaacagcgccgucaaaaacaacaacaacgaagaacccucagacaaacacaucaaagaguaccuaaacaagauccaaaacucccucuccaccgaauggucccccugcagcguaaccugcggaaacggcauccaaguccgcauaaaaccaggcucagccaacaaaccaaaagaugaacucgacuacgcaaacgacauagaaaagaaaaucugcaaaauggaaaaaugcagcuccguauucaacgugguuaacuccucaaaacuagaauccacccgcaucuaccaaauacucgcaauauacagcacaguagccagcucacucguccuagucgucucccucggagccaucagcuucuggaugugcuccaacggaaguuuacaaugucgcauaugcauauaaggacuagucccuguucccagagcccacuuuuuuuucuuuuuuugaaauaaaauagccugucuuucagaucucaaaggcucuuuucagagccaccaaaaaaaaaaaaaaaaaaaaaaaaaaaaaaaaaaaaaaaaaaaaaaaaaaaaaaaaaaaaaaaaaaaaaaaaaaaaaaaaaaaaaaaaaaaaaaaaaaaaa

SEQ ID NO: 8247 - RNA, 1277 nt, Artificial Sequence
  mRNA Design a-1 (hSL-A100) comprising derived and/or modified sequence from Pf(3D7)__XP_001351122.1__HsALB_Pf-CSP(82-397) (opt11)
aggagagucccgcagucggcguccagcggcucugcuuguucgugugugugucguugcaggccuuauucaagcuuaccaugaaaugggucaccuucaucucacuccuguuccucuucucauccgccuacagcgacaacgaaaaacugcgcaaacccaaacacaagaaacucaaacaaccagccgacggcaaccccgaccccaacgccaacccaaacguagaccccaacgccaaccccaacguagacccaaacgccaacccaaacguggaccccaacgcaaacccaaacgccaacccaaacgccaauccaaacgccaacccaaacgcaaacccaaacgcaaaccccaacgccaacccuaacgccaaccccaacgcaaacccaaacgccaaccccaacgccaaccccaacgcaaaccccaacgcaaacccuaacgccaaccccaacgccaaccccaacgcaaacccaaacgccaaccccaacguagacccaaacgccaaccccaacgcaaaccccaacgccaacccaaacgcaaacccaaacgccaaccccaacgccaaccccaacgcaaacccaaacgcaaacccaaaugcaaaccccaacgccaaccccaacgccaaccccaacgcaaaccccaacgcaaaccccaacgcaaacccgaacgccaacccaaacgccaacccaaacgccaaccccaacgcaaaccccaacaaaaacaaccaaggcaacggacaaggacacaacaugcccaacgaccccaaccgcaacgucgacgaaaacgccaacgccaacuccgccgucaaaaacaacaacaacgaagaacccuccgacaaacacaucaaagaauaccucaacaaaauccaaaacucccucucaaccgaauggucacccugcuccguaaccugcggcaacggcauccaaguccgcaucaaacccggcucagccaacaaacccaaagacgaacucgacuacgccaaugacaucgaaaagaaaauaugcaaaauggaaaaaugcuccuccgucuucaacgucgucaacuccuccaucggccucaucaugguccucucguuccuauuccuaaacuaaggacuagucccuguucccagagcccacuuuuuuuucuuuuuuugaaauaaaauagccugucuuucagaucucaaaggcucuuuucagagccaccaaaaaaaaaaaaaaaaaaaaaaaaaaaaaaaaaaaaaaaaaaaaaaaaaaaaaaaaaaaaaaaaaaaaaaaaaaaaaaaaaaaaaaaaaaaaaaaaaaaaa

SEQ ID NO: 8248 - RNA, 629 nt, Artificial Sequence
  mRNA Design a-1 (hSL-A100) comprising derived and/or modified sequence from Pf(3D7)__XP_001351122.1__HsALB_Pf-CSP(93-192) (opt11)
aggagagucccgcagucggcguccagcggcucugcuuguucgugugugugucguugcaggccuuauucaagcuuaccaugaaauggguaaccuucaucucacuccuauuccuauucucaagcgcauacucaaaacuaaaacaacccgcagacggaaacccagacccaaacgcaaacccaaacguagacccaaacgcaaacccaaacguagacccaaacgcaaacccaaacguagacccaaacgcaaacccaaacgcaaacccaaacgcaaacccaaacgcaaacccaaacgcaaaccccaacgcaaacccaaacgcaaacccaaacgcaaacccaaacgcaaacccaaacgcaaacccaaacgcaaacccaaacgcaaacccaaacgcaaacccaaacgcaaacccaaacgccaacccaaacgcaaacccauaaggacuagucccuguucccagagcccacuuuuuuuucuuuuuuugaaauaaaauagccugucuuucagaucucaaaggcucuuuucagagccaccaaaaaaaaaaaaaaaaaaaaaaaaaaaaaaaaaaaaaaaaaaaaaaaaaaaaaaaaaaaaaaaaaaaaaaaaaaaaaaaaaaaaaaaaaaaaaaaaaaaaa

SEQ ID NO: 8249 - RNA, 869 nt, Artificial Sequence
  mRNA Design a-1 (hSL-A100) comprising derived and/or modified sequence from Pf(3D7)__XP_001351122.1__HsALB_Pf-CSP(93-272) (opt11)
aggagagucccgcagucggcguccagcggcucugcuuguucgugugugugucguugcaggccuuauucaagcuuaccaugaaaugggucaccuucaucucacuccuauuccuauucucauccgcauacucaaaacuaaaacaacccgccgacggaaacccagacccaaacgcaaacccaaacguagacccaaacgcaaacccaaacguagacccaaacgcaaacccaaacguagacccaaacgcaaacccaaacgccaacccaaacgcaaauccaaacgcaaacccaaacgcaaacccaaacgcaaacccaaacgcaaacccaaacgccaacccaaacgccaacccaaacgcaaacccaaacgcaaacccaaacgcaaacccaaacgcaaacccaaacgcaaacccaaacgccaaccccaacgcaaacccaaacgcaaaccccaacguagacccaaacgcaaacccaaacgccaaccccaacgcaaaccccaacgccaaccccaacgccaacccaaacgccaacccaaacgcaaacccaaacgcaaacccaaacgcaaacccaaacgcaaacccaaacgcaaacccaaacgcaaacccaaacgcaaacccaaacgcaaacccaaacgccaacccaaacgcaaacccaaacgcaaacccgaacgcaaacccauaaggacuagucccuguucccagagcccacuuuuuuuucuuuuuuugaaauaaaauagccugucuuucagaucucaaaggcucuuuucagagccaccaaaaaaaaaaaaaaaaaaaaaaaaaaaaaaaaaaaaaaaaaaaaaaaaaaaaaaaaaaaaaaaaaaaaaaaaaaaaaaaaaaaaaaaaaaaaaaaaaaaaa

SEQ ID NO: 8250 - RNA, 1244 nt, Artificial Sequence
  mRNA Design a-1 (hSL-A100) comprising derived and/or modified sequence from Pf(3D7)__XP_001351122.1__HsALB_Pf-CSP(93-397) (opt11)
aggagagucccgcagucggcguccagcggcucugcuuguucgugugugugucguugcaggccuuauucaagcuuaccaugaaaugggucacauucaucucacuccuauuccuauucucaagcgccuacuccaaacucaaacaacccgccgacggcaacccagacccaaacgccaaccccaacgucgacccaaacgccaacccaaacgucgacccaaacgcaaacccaaacgucgaccccaacgccaaccccaacgccaaccccaacgccaacccaaacgccaaucccaacgccaaccccaacgccaacccaaacgcaaaccccaacgccaauccaaacgccaaccccaacgcaaaccccaacgccaaccccaacgcaaacccaaacgcaaacccaaacgcaaaccccaacgccaaccccaacgcaaaccccaacgccaaccccaacgucgaccccaacgccaacccaaacgccaacccaaacgccaaccccaacgccaaccccaacgcaaacccaaacgcgaaccccaacgcaaaccccaacgccaacccgaacgccaacccgaacgcaaacccaaacgccaaccccaacgcaaaccccaacgcaaacccaaacgcgaaccccaacgccaacccaaacgccaacccaaacgcgaacccaaacgccaaccccaacaaaaacaaccaagggaacggacaaggccacaacaugcccaacgaccccaaccgcaacgucgacgaaaacgccaacgccaacuccgccgucaaaaacaacaacaacgaagaacccuccgacaaacacauaaaagaauaccuaaacaaaauccaaaacucacucucuacugaauggucccccugcucagucaccugcggcaacggcauacaaguccgcauaaaacccggcucggccaacaaaccaaaagacgaacuagacuacgcaaacgacaucgaaaaaaaaauaugcaaaauggaaaaaugcuccucagucuucaacguaguaaacuccuccaucggccucauaaugguccucuccuuccuauuccucaacuaaggacuagucccuguucccagagcccacuuuuuuuucuuuuuuugaaauaaaauagccugucuuucagaucucaaaggcucuuuucagagccaccaaaaaaaaaaaaaaaaaaaaaaaaaaaaaaaaaaaaaaaaaaaaaaaaaaaaaaaaaaaaaaaaaaaaaaaaaaaaaaaaaaaaaaaaaaaaaaaaaaaaa

SEQ ID NO: 8251 - RNA, 614 nt, Artificial Sequence
  mRNA Design a-1 (hSL-A100) comprising derived and/or modified sequence from Pf(3D7)__XP_001351122.1__HsALB_Pf-CSP(98-192) (opt11)
aggagagucccgcagucggcguccagcggcucugcuuguucgugugugugucguugcaggccuuauucaagcuuaccaugaaaugggucacauucauaagccuacucuuccucuucagcucagccuacuccgcagacggaaacccagacccaaacgcaaacccaaacguagacccaaacgcaaacccaaacguagacccaaacgcaaacccaaacguagacccaaacgcaaacccaaacgcaaacccaaacgcaaacccaaacgcaaacccaaacgcaaacccaaacgcaaacccaaacgcaaacccaaacgcaaacccaaacgcaaacccaaacgcaaaccccaacgcaaacccaaacgcaaacccaaacgcaaacccaaacgcaaacccaaacgcaaacccaaacgcaaacccauaaggacuagucccuguucccagagcccacuuuuuuuucuuuuuuugaaauaaaauagccugucuuucagaucucaaaggcucuuuucagagccaccaaaaaaaaaaaaaaaaaaaaaaaaaaaaaaaaaaaaaaaaaaaaaaaaaaaaaaaaaaaaaaaaaaaaaaaaaaaaaaaaaaaaaaaaaaaaaaaaaaaaa

SEQ ID NO: 8252 - RNA, 854 nt, Artificial Sequence
  mRNA Design a-1 (hSL-A100) comprising derived and/or modified sequence from Pf(3D7)__XP_001351122.1__HsALB_Pf-CSP(98-272) (opt11)
aggagagucccgcagucggcguccagcggcucugcuuguucgugugugugucguugcaggccuuauucaagcuuaccaugaaauggguaaccuucauaagccuacucuuccuauucucaucagccuacagcgcagacggaaacccagaccccaacgcaaacccaaacguagacccaaacgcaaacccaaacguagaccccaacgcaaacccaaacguagacccaaacgccaacccaaacgcaaacccaaacgcaaacccaaacgccaacccaaacgcaaacccaaacgccaacccaaacgcaaacccaaacgcaaacccaaacgcaaacccaaacgcaaacccaaacgcaaacccaaacgcaaacccaaacgccaacccaaacgcaaacccaaacgcaaacccaaacgcaaacccaaacgccaaccccaacguagacccaaacgccaaccccaacgcaaacccaaacgcaaacccaaacgcaaacccaaacgcaaacccaaacgcaaacccaaacgcaaacccaaacgcaaacccaaacgcaaacccgaacgccaacccaaacgcaaacccaaacgcaaacccaaacgcaaacccaaacgcaaacccaaacgcaaaccccaacgcaaacccaaacgcaaacccaaacgcaaacccauaaggacuagucccuguucccagagcccacuuuuuuuucuuuuuuugaaauaaaauagccugucuuucagaucucaaaggcucuuuucagagccaccaaaaaaaaaaaaaaaaaaaaaaaaaaaaaaaaaaaaaaaaaaaaaaaaaaaaaaaaaaaaaaaaaaaaaaaaaaaaaaaaaaaaaaaaaaaaaaaaaaaaa

SEQ ID NO: 8253 - RNA, 1160 nt, Artificial Sequence
  mRNA Design a-1 (hSL-A100) comprising derived and/or modified sequence from Pf(3D7)__XP_001351122.1__HsALB_Pf-CSP(98-374) (opt11)
aggagagucccgcagucggcguccagcggcucugcuuguucgugugugugucguugcaggccuuauucaagcuuaccaugaaauggguaaccuucauaucccuacucuuccuuuucuccucggccuacuccgcagacggaaacccagacccaaacgcaaaccccaacguagacccaaacgcaaacccaaauguagacccaaacgcaaacccaaacguggacccaaacgcgaaccccaacgcaaaccccaacgcaaacccaaacgccaacccaaacgcaaacccaaacgccaacccaaacgcaaaccccaacgccaaccccaacgccaacccaaacgcaaacccaaacgcaaaccccaacgcaaacccaaacgccaacccaaacgccaacccaaacgccaaccccaacgcaaacccaaacgccaacccaaacguagacccaaacgcaaacccaaacgcaaacccaaacgcaaaccccaacgcaaaccccaacgcaaacccaaacgcaaacccaaacgcaaacccaaacgcaaacccaaacgccaacccaaacgcgaaccccaacgccaacccaaacgcaaacccaaacgccaacccaaacgccaacccaaacgcaaaccccaacgcaaacccaaacgcaaacccaaacgccaacccgaacaaaaacaaccaaggcaacggccaaggacacaacaugccaaacgaccccaaccgcaacguagacgaaaacgccaacgcaaacuccgcagucaaaaacaacaacaacgaagaacccuccgacaaacacauaaaagaauaccuaaacaaaauccaaaacucgcucucaaccgaauggucccccugcuccgucaccugcggcaacggcauccaaguacgcaucaaaccaggcucagcaaacaaaccaaaagacgaacucgacuacgccaacgacauagaaaaaaaaauaugcaaaauggagaaaugcuaaggacuagucccuguucccagagcccacuuuuuuuucuuuuuuugaaauaaaauagccugucuuucagaucucaaaggcucuuuucagagccaccaaaaaaaaaaaaaaaaaaaaaaaaaaaaaaaaaaaaaaaaaaaaaaaaaaaaaaaaaaaaaaaaaaaaaaaaaaaaaaaaaaaaaaaaaaaaaaaaaaaaa

SEQ ID NO: 8254 - RNA, 1229 nt, Artificial Sequence
  mRNA Design a-1 (hSL-A100) comprising derived and/or modified sequence from Pf(3D7)__XP_001351122.1__HsALB_Pf-CSP(98-397) (opt11)
aggagagucccgcagucggcguccagcggcucugcuuguucgugugugugucguugcaggccuuauucaagcuuaccaugaaauggguaaccuucaucagccuacuauuccuauucagcuccgccuacagcgccgacggaaacccagacccaaacgccaaccccaacgucgacccaaacgccaaccccaacguagacccaaacgccaaccccaacgucgaccccaacgccaaccccaacgccaacccaaacgccaacccuaacgccaacccaaacgccaacccgaacgccaaccccaacgcgaacccaaacgccaacccaaacgcaaaccccaacgccaaccccaacgccaaccccaacgcaaaccccaacgcaaacccaaacgccaacccaaacgccaaccccaacgccaaccccaaugcaaacccaaacgucgaccccaacgccaacccaaacgccaaccccaacgccaaccccaacgccaaccccaacgcaaaccccaacgccaaccccaacgcgaaccccaacgccaaccccaacgccaacccaaacgccaaccccaacgccaaccccaacgccaaccccaacgcuaaccccaacgcaaacccaaacgccaacccaaacgccaacccaaacgccaaccccaacgccaacccaaacaaaaacaaccaaggcaacggacaaggacacaacaugccaaacgaccccaaccgcaacgucgacgaaaaugccaacgccaacuccgccgucaaaaacaacaacaacgaagaacccuccgacaaacacaucaaagaauaccuaaacaaaauacaaaacucucucucaaccgaauggucccccugcuccgucacaugcggcaacggcauccaaguccgcaucaaaccaggaucagccaauaaacccaaagacgaacucgacuacgccaacgacauagaaaaaaaaaucugcaaaauggaaaaaugcagcucagucuucaacgucgucaacuccucaaucggacuuauaaugguccuauccuuccucuuccuuaacuaaggacuagucccuguucccagagcccacuuuuuuuucuuuuuuugaaauaaaauagccugucuuucagaucucaaaggcucuuuucagagccaccaaaaaaaaaaaaaaaaaaaaaaaaaaaaaaaaaaaaaaaaaaaaaaaaaaaaaaaaaaaaaaaaaaaaaaaaaaaaaaaaaaaaaaaaaaaaaaaaaaaaa

SEQ ID NO: 8255 - RNA, 1556 nt, Artificial Sequence
  mRNA Design a-1 (hSL-A100) comprising derived and/or modified sequence from Pf(3D7)__XP_001351122.1__HsALB_Pf-CSP(199-377)_L(PVTN)_HBsAg (opt11)
aggagagucccgcagucggcguccagcggcucugcuuguucgugugugugucguugcaggccuuauucaagcuuaccaugaaaugggucacauucaucucgcuccucuuccuauucuccuccgccuacuccgacccuaacgccaaucccaacgccaaccccaacgccaaccccaacgccaaccccaacgccaaccccaaugcaaacccaaacgcaaaccccaacgccaaccccaacgcaaacccaaaugcaaaccccaacgcaaaccccaacgccaaccccaaugccaaccccaacgcuaaccccaacgccaauccaaacgccaaccccaacgcaaaccccaacgccaacccuaacaaaaauaaccaaggcaacggccaaggacacaacaugcccaacgaccccaaccgaaaugucgacgaaaacgcuaacgcuaacagcgccgucaaaaacaacaacaacgaagaacccuccgacaaacacauuaaagaauaccucaacaaaauccaaaacucccucuccaccgaauggucccccugcucuguaacuugcggcaacggcauccaaguccgcauaaaacccggaucagcaaacaaacccaaagacgaacucgacuacgcaaacgacauugagaagaaaaucugcaaaauggaaaaaugcucaucaguacccgucacuaacauggaaaacaucaccuccggcuuccucggcccccuccuaguccuacaagccgguuucuuccuucuuacacgcauccuaaccaucccacaaucccuagacuccugguggacaucuuuaaacuuccuuggaggauccccugucugccucggccaaaacucccaauccccaaccucuaaccacucucccacauccugcccucccauaugccccgguuaccgcuggaugugccuccgccgcuucaucaucuuccucuucauacuccucuuaugccucaucuuccuccucguacuacucgacuaccaagguaugcuacccguaugcccucucauccccggcuccaccacaaccaacaccggccccugcaaaacaugcaccacccccgcacagggcaauuccauguuccccuccugcuguugcaccaaacccacagacggcaacuguaccugcauccccauccccuccucuugggcauuugccaaauaccucugggaaugggccuccguccgauucucuuggcuuucacuccucguucccuucguacaaugguucgucggccuaucacccaccgucuggcucuccgccaucuggaugaugugguacuggggcccuucacuuuacuccauagucagccccuucauaccacuccuccccaucuucuucugccuauggguauacaucuaaggacuagucccuguucccagagcccacuuuuuuuucuuuuuuugaaauaaaauagccugucuuucagaucucaaaggcucuuuucagagccaccaaaaaaaaaaaaaaaaaaaaaaaaaaaaaaaaaaaaaaaaaaaaaaaaaaaaaaaaaaaaaaaaaaaaaaaaaaaaaaaaaaaaaaaaaaaaaaaaaaaaa

SEQ ID NO: 8256 - RNA, 1563 nt, Artificial Sequence
  mRNA Design a-3 (hSL-A100) comprising derived and/or modified sequence from Pf(3D7)__XP_001351122.1__Pf-CSP (wt)
aggagagggcgcuuggcuugcaaggacccugagcugcggcauugaagcacacccaacccaacucgacugaagucagccucacugaaccggaucugagaaucuucucucucugggcuugccagggcucuccgaaccuagcuagcauccucuucaauuccaacuagaaagcuuaccaugaugagaaaauuagcuauuuuaucuguuucuuccuuuuuauuuguugaggccuuauuccaggaauaccagugcuauggaaguucgucaaacacaaggguucuaaaugaauuaaauuaugauaaugcaggcacuaauuuauauaaugaauuagaaaugaauuauuaugggaaacaggaaaauugguauagucuuaaaaaaaauaguagaucacuuggagaaaaugaugauggaaauaacgaagacaacgagaaauuaaggaaaccaaaacauaaaaaauuaaagcaaccagcggaugguaauccugauccaaaugcaaacccaaauguagaucccaaugccaacccaaauguagauccaaaugcaaacccaaauguagauccaaaugcaaacccaaaugcaaacccaaaugcaaacccaaaugcaaacccaaaugcaaacccaaaugcaaacccaaaugcaaacccaaaugcaaacccaaaugcaaacccaaaugcaaacccaaaugcaaacccaaaugcaaacccaaaugcaaacccaaaugcaaaccccaaugcaaauccuaaugcaaacccaaaugcaaacccaaacguagauccuaaugcaaauccaaaugcaaacccaaacgcaaaccccaaugcaaauccuaaugcaaaccccaaugcaaauccuaaugcaaauccuaaugccaauccaaaugcaaauccaaaugcaaacccaaacgcaaaccccaaugcaaauccuaaugccaauccaaaugcaaauccaaaugcaaacccaaaugcaaacccaaaugcaaaccccaaugcaaauccuaauaaaaacaaucaagguaauggacaaggucacaauaugccaaaugacccaaaccgaaauguagaugaaaaugcuaaugccaacagugcuguaaaaaauaauaauaacgaagaaccaagugauaagcacauaaaagaauauuuaaacaaaauacaaaauucucuuucaacugaaugguccccauguaguguaacuuguggaaaugguauucaaguuagaauaaagccuggcucugcuaauaaaccuaaagacgaauuagauuaugcaaaugauauugaaaaaaaaauuuguaaaauggaaaaauguuccaguguguuuaaugucguaaauaguucaauaggauuaauaaugguauuauccuucuuguuccuuaauuagggacuagucccuguucccagagcccacuuuuuuuucuuuuuuugaaauaaaauagccugucuuucagaucucaaaggcucuuuucagagccaccaaaaaaaaaaaaaaaaaaaaaaaaaaaaaaaaaaaaaaaaaaaaaaaaaaaaaaaaaaaaaaaaaaaaaaaaaaaaaaaaaaaaaaaaaaaaaaaaaaaaa

SEQ ID NO: 8257 - RNA, 1494 nt, Artificial Sequence
  mRNA Design a-3 (hSL-A100) comprising derived and/or modified sequence from Pf(3D7)__XP_001351122.1__Pf-CSP(1-374) (wt)
aggagagggcgcuuggcuugcaaggacccugagcugcggcauugaagcacacccaacccaacucgacugaagucagccucacugaaccggaucugagaaucuucucucucugggcuugccagggcucuccgaaccuagcuagcauccucuucaauuccaacuagaaagcuuaccaugaugagaaaauuagcuauuuuaucuguuucuuccuuuuuauuuguugaggccuuauuccaggaauaccagugcuauggaaguucgucaaacacaaggguucuaaaugaauuaaauuaugauaaugcaggcacuaauuuauauaaugaauuagaaaugaauuauuaugggaaacaggaaaauugguauagucuuaaaaaaaauaguagaucacuuggagaaaaugaugauggaaauaacgaagacaacgagaaauuaaggaaaccaaaacauaaaaaauuaaagcaaccagcggaugguaauccugauccaaaugcaaacccaaauguagaucccaaugccaacccaaauguagauccaaaugcaaacccaaauguagauccaaaugcaaacccaaaugcaaacccaaaugcaaacccaaaugcaaacccaaaugcaaacccaaaugcaaacccaaaugcaaacccaaaugcaaacccaaaugcaaacccaaaugcaaacccaaaugcaaacccaaaugcaaacccaaaugcaaacccaaaugcaaaccccaaugcaaauccuaaugcaaacccaaaugcaaacccaaacguagauccuaaugcaaauccaaaugcaaacccaaacgcaaaccccaaugcaaauccuaaugcaaaccccaaugcaaauccuaaugcaaauccuaaugccaauccaaaugcaaauccaaaugcaaacccaaacgcaaaccccaaugcaaauccuaaugccaauccaaaugcaaauccaaaugcaaacccaaaugcaaacccaaaugcaaaccccaaugcaaauccuaauaaaaacaaucaagguaauggacaaggucacaauaugccaaaugacccaaaccgaaauguagaugaaaaugcuaaugccaacagugcuguaaaaaauaauaauaacgaagaaccaagugauaagcacauaaaagaauauuuaaacaaaauacaaaauucucuuucaacugaaugguccccauguaguguaacuuguggaaaugguauucaaguuagaauaaagccuggcucugcuaauaaaccuaaagacgaauuagauuaugcaaaugauauugaaaaaaaaauuuguaaaauggaaaaauguugaggacuagucccuguucccagagcccacuuuuuuuucuuuuuuugaaauaaaauagccugucuuucagaucucaaaggcucuuuucagagccaccaaaaaaaaaaaaaaaaaaaaaaaaaaaaaaaaaaaaaaaaaaaaaaaaaaaaaaaaaaaaaaaaaaaaaaaaaaaaaaaaaaaaaaaaaaaaaaaaaaaaa

SEQ ID NO: 8258 - RNA, 1347 nt, Artificial Sequence
  mRNA Design a-3 (hSL-A100) comprising derived and/or modified sequence from Pf(3D7)__XP_001351122.1__Pf-CSP(1-325) (wt)
aggagagggcgcuuggcuugcaaggacccugagcugcggcauugaagcacacccaacccaacucgacugaagucagccucacugaaccggaucugagaaucuucucucucugggcuugccagggcucuccgaaccuagcuagcauccucuucaauuccaacuagaaagcuuaccaugaugagaaaauuagcuauuuuaucuguuucuuccuuuuuauuuguugaggccuuauuccaggaauaccagugcuauggaaguucgucaaacacaaggguucuaaaugaauuaaauuaugauaaugcaggcacuaauuuauauaaugaauuagaaaugaauuauuaugggaaacaggaaaauugguauagucuuaaaaaaaauaguagaucacuuggagaaaaugaugauggaaauaacgaagacaacgagaaauuaaggaaaccaaaacauaaaaaauuaaagcaaccagcggaugguaauccugauccaaaugcaaacccaaauguagaucccaaugccaacccaaauguagauccaaaugcaaacccaaauguagauccaaaugcaaacccaaaugcaaacccaaaugcaaacccaaaugcaaacccaaaugcaaacccaaaugcaaacccaaaugcaaacccaaaugcaaacccaaaugcaaacccaaaugcaaacccaaaugcaaacccaaaugcaaacccaaaugcaaacccaaaugcaaaccccaaugcaaauccuaaugcaaacccaaaugcaaacccaaacguagauccuaaugcaaauccaaaugcaaacccaaacgcaaaccccaaugcaaauccuaaugcaaaccccaaugcaaauccuaaugcaaauccuaaugccaauccaaaugcaaauccaaaugcaaacccaaacgcaaaccccaaugcaaauccuaaugccaauccaaaugcaaauccaaaugcaaacccaaaugcaaacccaaaugcaaaccccaaugcaaauccuaauaaaaacaaucaagguaauggacaaggucacaauaugccaaaugacccaaaccgaaauguagaugaaaaugcuaaugccaacagugcuguaaaaaauaauaauaacgaagaaccaagugauaagcacauaaaagaauauuuaaacaaaauacaaaauugaggacuagucccuguucccagagcccacuuuuuuuucuuuuuuugaaauaaaauagccugucuuucagaucucaaaggcucuuuucagagccaccaaaaaaaaaaaaaaaaaaaaaaaaaaaaaaaaaaaaaaaaaaaaaaaaaaaaaaaaaaaaaaaaaaaaaaaaaaaaaaaaaaaaaaaaaaaaaaaaaaaaa

SEQ ID NO: 8259 - RNA, 1563 nt, Artificial Sequence
  mRNA Design a-3 (hSL-A100) comprising derived and/or modified sequence from Pf(3D7)__XP_001351122.1__Pf-CSP (opt1) R8983
aggagagggcgcuuggcuugcaaggacccugagcugcggcauugaagcacacccaacccaacucgacugaagucagccucacugaaccggaucugagaaucuucucucucugggcuugccagggcucuccgaaccuagcuagcauccucuucaauuccaacuagaaagcuuaccaugaugcgcaagcuggccauccucagcguguccagcuuccuguucgucgaggcccuguuccaggaguaccagugcuacggcuccagcuccaacacccgggugcucaacgagcugaacuacgacaacgcggggaccaaccuguacaacgagcucgagaugaacuacuacggcaagcaggagaacugguacagccugaagaagaacucccgcagccugggggagaacgacgacggcaacaacgaggacaacgagaagcuccggaagcccaagcacaagaagcugaagcagccggccgacgggaaccccgaccccaacgccaaccccaacguggacccgaacgccaaccccaacgucgaccccaacgccaaccccaacguggacccgaacgcgaaccccaacgccaaccccaacgccaaccccaacgccaacccgaacgcgaaccccaacgccaaccccaacgccaaccccaacgccaacccgaacgccaaccccaacgcgaaccccaacgccaaccccaacgccaacccgaacgccaaccccaacgccaaccccaacgcgaaccccaacgccaacccgaacgccaaccccaacguggaccccaacgccaaccccaacgccaacccgaacgcgaaccccaacgccaaccccaacgccaacccgaacgccaaccccaacgccaaccccaacgcgaaccccaacgccaacccgaacgccaaccccaacgccaaccccaacgcgaaccccaacgccaacccgaacgccaaccccaacgccaaccccaacgccaaccccaacgcgaacccgaacgccaaccccaacaagaacaaccagggcaacggccaggggcacaacaugcccaacgaccccaaccgcaacgucgacgagaacgccaacgccaacuccgccgugaagaacaacaacaacgaggagccgagcgacaagcacaucaaggaguaccugaacaagauccagaacucccucagcacggaguggucccccugcagcgugaccugcggcaacgggauccagguccggaucaagcccggcuccgcgaacaagcccaaggacgagcuggacuacgccaacgacaucgagaagaagaucugcaagauggagaagugcagcuccguguucaacguggucaacagcuccaucgggcugaucauggugcucagcuuccuguuccugaacugaggacuagucccuguucccagagcccacuuuuuuuucuuuuuuugaaauaaaauagccugucuuucagaucucaaaggcucuuuucagagccaccaaaaaaaaaaaaaaaaaaaaaaaaaaaaaaaaaaaaaaaaaaaaaaaaaaaaaaaaaaaaaaaaaaaaaaaaaaaaaaaaaaaaaaaaaaaaaaaaaaaaa

SEQ ID NO: 8260 - RNA, 1494 nt, Artificial Sequence
  mRNA Design a-3 (hSL-A100) comprising derived and/or modified sequence from Pf(3D7)__XP_001351122.1__Pf-CSP(1-374) (opt1)
aggagagggcgcuuggcuugcaaggacccugagcugcggcauugaagcacacccaacccaacucgacugaagucagccucacugaaccggaucugagaaucuucucucucugggcuugccagggcucuccgaaccuagcuagcauccucuucaauuccaacuagaaagcuuaccaugaugcgcaagcuggccauccucagcguguccagcuuccuguucgucgaggcccuguuccaggaguaccagugcuacggcuccagcuccaacacccgggugcucaacgagcugaacuacgacaacgcggggaccaaccuguacaacgagcucgagaugaacuacuacggcaagcaggagaacugguacagccugaagaagaacucccgcagccugggggagaacgacgacggcaacaacgaggacaacgagaagcuccggaagcccaagcacaagaagcugaagcagccggccgacgggaaccccgaccccaacgccaaccccaacguggacccgaacgccaaccccaacgucgaccccaacgccaaccccaacguggacccgaacgcgaaccccaacgccaaccccaacgccaaccccaacgccaacccgaacgcgaaccccaacgccaaccccaacgccaaccccaacgccaacccgaacgccaaccccaacgcgaaccccaacgccaaccccaacgccaacccgaacgccaaccccaacgccaaccccaacgcgaaccccaacgccaacccgaacgccaaccccaacguggaccccaacgccaaccccaacgccaacccgaacgcgaaccccaacgccaaccccaacgccaacccgaacgccaaccccaacgccaaccccaacgcgaaccccaacgccaacccgaacgccaaccccaacgccaaccccaacgcgaaccccaacgccaacccgaacgccaaccccaacgccaaccccaacgccaaccccaacgcgaacccgaacgccaaccccaacaagaacaaccagggcaacggccaggggcacaacaugcccaacgaccccaaccgcaacgucgacgagaacgccaacgccaacuccgccgugaagaacaacaacaacgaggagccgagcgacaagcacaucaaggaguaccugaacaagauccagaacucccucagcacggaguggucccccugcagcgugaccugcggcaacgggauccagguccggaucaagcccggcuccgcgaacaagcccaaggacgagcuggacuacgccaacgacaucgagaagaagaucugcaagauggagaagugcugaggacuagucccuguucccagagcccacuuuuuuuucuuuuuuugaaauaaaauagccugucuuucagaucucaaaggcucuuuucagagccaccaaaaaaaaaaaaaaaaaaaaaaaaaaaaaaaaaaaaaaaaaaaaaaaaaaaaaaaaaaaaaaaaaaaaaaaaaaaaaaaaaaaaaaaaaaaaaaaaaaaaa

SEQ ID NO: 8261 - RNA, 1347 nt, Artificial Sequence
  mRNA Design a-3 (hSL-A100) comprising derived and/or modified sequence from Pf(3D7)__XP_001351122.1__Pf-CSP(1-325) (opt1)
aggagagggcgcuuggcuugcaaggacccugagcugcggcauugaagcacacccaacccaacucgacugaagucagccucacugaaccggaucugagaaucuucucucucugggcuugccagggcucuccgaaccuagcuagcauccucuucaauuccaacuagaaagcuuaccaugaugcgcaagcuggccauccucagcguguccagcuuccuguucgucgaggcccuguuccaggaguaccagugcuacggcuccagcuccaacacccgggugcucaacgagcugaacuacgacaacgcggggaccaaccuguacaacgagcucgagaugaacuacuacggcaagcaggagaacugguacagccugaagaagaacucccgcagccugggggagaacgacgacggcaacaacgaggacaacgagaagcuccggaagcccaagcacaagaagcugaagcagccggccgacgggaaccccgaccccaacgccaaccccaacguggacccgaacgccaaccccaacgucgaccccaacgccaaccccaacguggacccgaacgcgaaccccaacgccaaccccaacgccaaccccaacgccaacccgaacgcgaaccccaacgccaaccccaacgccaaccccaacgccaacccgaacgccaaccccaacgcgaaccccaacgccaaccccaacgccaacccgaacgccaaccccaacgccaaccccaacgcgaaccccaacgccaacccgaacgccaaccccaacguggaccccaacgccaaccccaacgccaacccgaacgcgaaccccaacgccaaccccaacgccaacccgaacgccaaccccaacgccaaccccaacgcgaaccccaacgccaacccgaacgccaaccccaacgccaaccccaacgcgaaccccaacgccaacccgaacgccaaccccaacgccaaccccaacgccaaccccaacgcgaacccgaacgccaaccccaacaagaacaaccagggcaacggccaggggcacaacaugcccaacgaccccaaccgcaacgucgacgagaacgccaacgccaacuccgccgugaagaacaacaacaacgaggagccgagcgacaagcacaucaaggaguaccugaacaagauccagaacugaggacuagucccuguucccagagcccacuuuuuuuucuuuuuuugaaauaaaauagccugucuuucagaucucaaaggcucuuuucagagccaccaaaaaaaaaaaaaaaaaaaaaaaaaaaaaaaaaaaaaaaaaaaaaaaaaaaaaaaaaaaaaaaaaaaaaaaaaaaaaaaaaaaaaaaaaaaaaaaaaaaaa

SEQ ID NO: 8262 - RNA, 1563 nt, Artificial Sequence
  mRNA Design a-3 (hSL-A100) comprising derived and/or modified sequence from Pf(3D7)__XP_001351122.1__HsALB_Pf-CSP(19-397) (opt1) R8984
aggagagggcgcuuggcuugcaaggacccugagcugcggcauugaagcacacccaacccaacucgacugaagucagccucacugaaccggaucugagaaucuucucucucugggcuugccagggcucuccgaaccuagcuagcauccucuucaauuccaacuagaaagcuuaccaugaagugggugaccuucaucagccuccuguuccuguucuccagcgccuacucccuguuccaggaguaccagugcuacggcuccagcuccaacacccgggugcucaacgagcugaacuacgacaacgcggggaccaaccuguacaacgagcucgagaugaacuacuacggcaagcaggagaacugguacagccugaagaagaacucccgcagccugggggagaacgacgacggcaacaacgaggacaacgagaagcuccggaagcccaagcacaagaagcugaagcagccggccgacgggaaccccgaccccaacgccaaccccaacguggacccgaacgccaaccccaacgucgaccccaacgccaaccccaacguggacccgaacgcgaaccccaacgccaaccccaacgccaaccccaacgccaacccgaacgcgaaccccaacgccaaccccaacgccaaccccaacgccaacccgaacgccaaccccaacgcgaaccccaacgccaaccccaacgccaacccgaacgccaaccccaacgccaaccccaacgcgaaccccaacgccaacccgaacgccaaccccaacguggaccccaacgccaaccccaacgccaacccgaacgcgaaccccaacgccaaccccaacgccaacccgaacgccaaccccaacgccaaccccaacgcgaaccccaacgccaacccgaacgccaaccccaacgccaaccccaacgcgaaccccaacgccaacccgaacgccaaccccaacgccaaccccaacgccaaccccaacgcgaacccgaacgccaaccccaacaagaacaaccagggcaacggccaggggcacaacaugcccaacgaccccaaccgcaacgucgacgagaacgccaacgccaacuccgccgugaagaacaacaacaacgaggagccgagcgacaagcacaucaaggaguaccugaacaagauccagaacucccucagcacggaguggucccccugcagcgugaccugcggcaacgggauccagguccggaucaagcccggcuccgcgaacaagcccaaggacgagcuggacuacgccaacgacaucgagaagaagaucugcaagauggagaagugcagcuccguguucaacguggucaacagcuccaucgggcugaucauggugcucagcuuccuguuccugaacugaggacuagucccuguucccagagcccacuuuuuuuucuuuuuuugaaauaaaauagccugucuuucagaucucaaaggcucuuuucagagccaccaaaaaaaaaaaaaaaaaaaaaaaaaaaaaaaaaaaaaaaaaaaaaaaaaaaaaaaaaaaaaaaaaaaaaaaaaaaaaaaaaaaaaaaaaaaaaaaaaaaaa

SEQ ID NO: 8263 - RNA, 1581 nt, Artificial Sequence
  mRNA Design a-3 (hSL-A100) comprising derived and/or modified sequence from Pf(3D7)__XP_001351122.1__HsIns-iso1_Pf-CSP(19-397) (opt1)
aggagagggcgcuuggcuugcaaggacccugagcugcggcauugaagcacacccaacccaacucgacugaagucagccucacugaaccggaucugagaaucuucucucucugggcuugccagggcucuccgaaccuagcuagcauccucuucaauuccaacuagaaagcuuaccauggcccuguggaugcgccuccugccccugcucgcccugcuggcgcucuggggcccggaccccgccgccgcccuguuccaggaguaccagugcuacggcuccagcuccaacacccgggugcucaacgagcugaacuacgacaacgcggggaccaaccuguacaacgagcucgagaugaacuacuacggcaagcaggagaacugguacagccugaagaagaacucccgcagccugggggagaacgacgacggcaacaacgaggacaacgagaagcuccggaagcccaagcacaagaagcugaagcagccggccgacgggaaccccgaccccaacgccaaccccaacguggacccgaacgccaaccccaacgucgaccccaacgccaaccccaacguggacccgaacgcgaaccccaacgccaaccccaacgccaaccccaacgccaacccgaacgcgaaccccaacgccaaccccaacgccaaccccaacgccaacccgaacgccaaccccaacgcgaaccccaacgccaaccccaacgccaacccgaacgccaaccccaacgccaaccccaacgcgaaccccaacgccaacccgaacgccaaccccaacguggaccccaacgccaaccccaacgccaacccgaacgcgaaccccaacgccaaccccaacgccaacccgaacgccaaccccaacgccaaccccaacgcgaaccccaacgccaacccgaacgccaaccccaacgccaaccccaacgcgaaccccaacgccaacccgaacgccaaccccaacgccaaccccaacgccaaccccaacgcgaacccgaacgccaaccccaacaagaacaaccagggcaacggccaggggcacaacaugcccaacgaccccaaccgcaacgucgacgagaacgccaacgccaacuccgccgugaagaacaacaacaacgaggagccgagcgacaagcacaucaaggaguaccugaacaagauccagaacucccucagcacggaguggucccccugcagcgugaccugcggcaacgggauccagguccggaucaagcccggcuccgcgaacaagcccaaggacgagcuggacuacgccaacgacaucgagaagaagaucugcaagauggagaagugcagcuccguguucaacguggucaacagcuccaucgggcugaucauggugcucagcuuccuguuccugaacugaggacuagucccuguucccagagcccacuuuuuuuucuuuuuuugaaauaaaauagccugucuuucagaucucaaaggcucuuuucagagccaccaaaaaaaaaaaaaaaaaaaaaaaaaaaaaaaaaaaaaaaaaaaaaaaaaaaaaaaaaaaaaaaaaaaaaaaaaaaaaaaaaaaaaaaaaaaaaaaaaaaaa

SEQ ID NO: 8264 - RNA, 1560 nt, Artificial Sequence
  mRNA Design a-3 (hSL-A100) comprising derived and/or modified sequence from Pf(3D7)__XP_001351122.1__HsSPARC_Pf-CSP(19-397) (opt1)
aggagagggcgcuuggcuugcaaggacccugagcugcggcauugaagcacacccaacccaacucgacugaagucagccucacugaaccggaucugagaaucuucucucucugggcuugccagggcucuccgaaccuagcuagcauccucuucaauuccaacuagaaagcuuaccaugcgcgccuggaucuucuuccugcucugccuggccggccgggcccuggcccuguuccaggaguaccagugcuacggcuccagcuccaacacccgggugcucaacgagcugaacuacgacaacgcggggaccaaccuguacaacgagcucgagaugaacuacuacggcaagcaggagaacugguacagccugaagaagaacucccgcagccugggggagaacgacgacggcaacaacgaggacaacgagaagcuccggaagcccaagcacaagaagcugaagcagccggccgacgggaaccccgaccccaacgccaaccccaacguggacccgaacgccaaccccaacgucgaccccaacgccaaccccaacguggacccgaacgcgaaccccaacgccaaccccaacgccaaccccaacgccaacccgaacgcgaaccccaacgccaaccccaacgccaaccccaacgccaacccgaacgccaaccccaacgcgaaccccaacgccaaccccaacgccaacccgaacgccaaccccaacgccaaccccaacgcgaaccccaacgccaacccgaacgccaaccccaacguggaccccaacgccaaccccaacgccaacccgaacgcgaaccccaacgccaaccccaacgccaacccgaacgccaaccccaacgccaaccccaacgcgaaccccaacgccaacccgaacgccaaccccaacgccaaccccaacgcgaaccccaacgccaacccgaacgccaaccccaacgccaaccccaacgccaaccccaacgcgaacccgaacgccaaccccaacaagaacaaccagggcaacggccaggggcacaacaugcccaacgaccccaaccgcaacgucgacgagaacgccaacgccaacuccgccgugaagaacaacaacaacgaggagccgagcgacaagcacaucaaggaguaccugaacaagauccagaacucccucagcacggaguggucccccugcagcgugaccugcggcaacgggauccagguccggaucaagcccggcuccgcgaacaagcccaaggacgagcuggacuacgccaacgacaucgagaagaagaucugcaagauggagaagugcagcuccguguucaacguggucaacagcuccaucgggcugaucauggugcucagcuuccuguuccugaacugaggacuagucccuguucccagagcccacuuuuuuuucuuuuuuugaaauaaaauagccugucuuucagaucucaaaggcucuuuucagagccaccaaaaaaaaaaaaaaaaaaaaaaaaaaaaaaaaaaaaaaaaaaaaaaaaaaaaaaaaaaaaaaaaaaaaaaaaaaaaaaaaaaaaaaaaaaaaaaaaaaaaa

SEQ ID NO: 8265 - RNA, 1563 nt, Artificial Sequence
  mRNA Design a-3 (hSL-A100) comprising derived and/or modified sequence from Pf(3D7)__XP_001351122.1__IgE_Pf-CSP(19-397) (opt1)
aggagagggcgcuuggcuugcaaggacccugagcugcggcauugaagcacacccaacccaacucgacugaagucagccucacugaaccggaucugagaaucuucucucucugggcuugccagggcucuccgaaccuagcuagcauccucuucaauuccaacuagaaagcuuaccauggacuggaccuggauccuguuccucguggccgccgcgacccgcguccacagccuguuccaggaguaccagugcuacggcuccagcuccaacacccgggugcucaacgagcugaacuacgacaacgcggggaccaaccuguacaacgagcucgagaugaacuacuacggcaagcaggagaacugguacagccugaagaagaacucccgcagccugggggagaacgacgacggcaacaacgaggacaacgagaagcuccggaagcccaagcacaagaagcugaagcagccggccgacgggaaccccgaccccaacgccaaccccaacguggacccgaacgccaaccccaacgucgaccccaacgccaaccccaacguggacccgaacgcgaaccccaacgccaaccccaacgccaaccccaacgccaacccgaacgcgaaccccaacgccaaccccaacgccaaccccaacgccaacccgaacgccaaccccaacgcgaaccccaacgccaaccccaacgccaacccgaacgccaaccccaacgccaaccccaacgcgaaccccaacgccaacccgaacgccaaccccaacguggaccccaacgccaaccccaacgccaacccgaacgcgaaccccaacgccaaccccaacgccaacccgaacgccaaccccaacgccaaccccaacgcgaaccccaacgccaacccgaacgccaaccccaacgccaaccccaacgcgaaccccaacgccaacccgaacgccaaccccaacgccaaccccaacgccaaccccaacgcgaacccgaacgccaaccccaacaagaacaaccagggcaacggccaggggcacaacaugcccaacgaccccaaccgcaacgucgacgagaacgccaacgccaacuccgccgugaagaacaacaacaacgaggagccgagcgacaagcacaucaaggaguaccugaacaagauccagaacucccucagcacggaguggucccccugcagcgugaccugcggcaacgggauccagguccggaucaagcccggcuccgcgaacaagcccaaggacgagcuggacuacgccaacgacaucgagaagaagaucugcaagauggagaagugcagcuccguguucaacguggucaacagcuccaucgggcugaucauggugcucagcuuccuguuccugaacugaggacuagucccuguucccagagcccacuuuuuuuucuuuuuuugaaauaaaauagccugucuuucagaucucaaaggcucuuuucagagccaccaaaaaaaaaaaaaaaaaaaaaaaaaaaaaaaaaaaaaaaaaaaaaaaaaaaaaaaaaaaaaaaaaaaaaaaaaaaaaaaaaaaaaaaaaaaaaaaaaaaaa

SEQ ID NO: 8266 - RNA, 1728 nt, Artificial Sequence
  mRNA Design a-3 (hSL-A100) comprising derived and/or modified sequence from Pf(3D7)__XP_001351122.1__Pf-CSP_L(G4SG4)_TM domain HA (opt1)
aggagagggcgcuuggcuugcaaggacccugagcugcggcauugaagcacacccaacccaacucgacugaagucagccucacugaaccggaucugagaaucuucucucucugggcuugccagggcucuccgaaccuagcuagcauccucuucaauuccaacuagaaagcuuaccaugaugcgcaagcuggccauccucagcguguccagcuuccuguucgucgaggcccuguuccaggaguaccagugcuacggcuccagcuccaacacccgggugcucaacgagcugaacuacgacaacgcggggaccaaccuguacaacgagcucgagaugaacuacuacggcaagcaggagaacugguacagccugaagaagaacucccgcagccugggggagaacgacgacggcaacaacgaggacaacgagaagcuccggaagcccaagcacaagaagcugaagcagccggccgacgggaaccccgaccccaacgccaaccccaacguggacccgaacgccaaccccaacgucgaccccaacgccaaccccaacguggacccgaacgcgaaccccaacgccaaccccaacgccaaccccaacgccaacccgaacgcgaaccccaacgccaaccccaacgccaaccccaacgccaacccgaacgccaaccccaacgcgaaccccaacgccaaccccaacgccaacccgaacgccaaccccaacgccaaccccaacgcgaaccccaacgccaacccgaacgccaaccccaacguggaccccaacgccaaccccaacgccaacccgaacgcgaaccccaacgccaaccccaacgccaacccgaacgccaaccccaacgccaaccccaacgcgaaccccaacgccaacccgaacgccaaccccaacgccaaccccaacgcgaaccccaacgccaacccgaacgccaaccccaacgccaaccccaacgccaaccccaacgcgaacccgaacgccaaccccaacaagaacaaccagggcaacggccaggggcacaacaugcccaacgaccccaaccgcaacgucgacgagaacgccaacgccaacuccgccgugaagaacaacaacaacgaggagccgagcgacaagcacaucaaggaguaccugaacaagauccagaacucccucagcacggaguggucccccugcagcgugaccugcggcaacgggauccagguccggaucaagcccggcuccgcgaacaagcccaaggacgagcuggacuacgccaacgacaucgagaagaagaucugcaagauggagaagugcagcuccguguucaacguggucaacagcuccaucgggcugaucauggugcucagcuuccuguuccugaacggcgggggcgggagcggcgggggcggcaagcucgaguccacgcggaucuaccagauccuggcgaucuacagcaccgucgccagcucccuggugcucguggucagccugggggccaucuccuucuggaugugcagcaacggcucccugcagugccgcaucugcaucugaggacuagucccuguucccagagcccacuuuuuuuucuuuuuuugaaauaaaauagccugucuuucagaucucaaaggcucuuuucagagccaccaaaaaaaaaaaaaaaaaaaaaaaaaaaaaaaaaaaaaaaaaaaaaaaaaaaaaaaaaaaaaaaaaaaaaaaaaaaaaaaaaaaaaaaaaaaaaaaaaaaaa

SEQ ID NO: 8267 - RNA, 1602 nt, Artificial Sequence
  mRNA Design a-3 (hSL-A100) comprising derived and/or modified sequence from Pf(3D7)__XP_001351122.1__Pf-CSP(199-377)_L(PVTN)_HBsAg (opt1)
aggagagggcgcuuggcuugcaaggacccugagcugcggcauugaagcacacccaacccaacucgacugaagucagccucacugaaccggaucugagaaucuucucucucugggcuugccagggcucuccgaaccuagcuagcauccucuucaauuccaacuagaaagcuuaccauggaccccaacgccaaccccaacgccaacccgaacgcgaaccccaacgccaaccccaacgccaacccgaacgccaaccccaacgccaaccccaacgcgaaccccaacgccaacccgaacgccaaccccaacgccaaccccaacgcgaaccccaacgccaacccgaacgccaaccccaacgccaaccccaacgccaaccccaacgcgaacccgaacgccaaccccaacaagaacaaccagggcaacggccaggggcacaacaugcccaacgaccccaaccgcaacgucgacgagaacgccaacgccaacuccgccgugaagaacaacaacaacgaggagccgagcgacaagcacaucaaggaguaccugaacaagauccagaacucccucagcacggaguggucccccugcagcgugaccugcggcaacgggauccagguccggaucaagcccggcuccgcgaacaagcccaaggacgagcuggacuacgccaacgacaucgagaagaagaucugcaagauggagaagugcagcuccgugccggugacgaacauggagaacaucaccagcggcuuccuggggccccuccuggugcugcaggccggcuucuuccuccugacccgcauccugaccaucccgcagucccucgacagcugguggaccucccugaacuuccucgggggcagccccgucugccuggggcagaacucccagagccccaccuccaaccacagccccaccuccugcccgcccaucugccccggcuaccgguggaugugccugcgccgguucaucaucuuccuguucauccuccugcugugccucaucuuccugcuggugcuccuggacuaccagggcaugcugcccgugugcccgcucauccccgggagcacgaccaccaacaccggccccugcaagacgugcaccacccccgcccaggggaacuccauguucccgagcugcugcugcaccaagcccacggacggcaacugcacgugcauccccauccccuccagcugggcguucgccaaguaccugugggagugggccuccguccgcuucagcuggcugucccuccuggugccguucgugcagugguucgucgggcugagccccaccguguggcucuccgccaucuggaugaugugguacuggggccccagccuguacagcaucgugucccccuucaucccgcugcuccccaucuucuucugccugugggucuacaucugaggacuagucccuguucccagagcccacuuuuuuuucuuuuuuugaaauaaaauagccugucuuucagaucucaaaggcucuuuucagagccaccaaaaaaaaaaaaaaaaaaaaaaaaaaaaaaaaaaaaaaaaaaaaaaaaaaaaaaaaaaaaaaaaaaaaaaaaaaaaaaaaaaaaaaaaaaaaaaaaaaaaa

SEQ ID NO: 8268 - RNA, 1644 nt, Artificial Sequence
  mRNA Design a-3 (hSL-A100) comprising derived and/or modified sequence from Pf(3D7)__XP_001351122.1__Pf-CSP(199-387)_L(PVTN)_HBsAg (opt1)
aggagagggcgcuuggcuugcaaggacccugagcugcggcauugaagcacacccaacccaacucgacugaagucagccucacugaaccggaucugagaaucuucucucucugggcuugccagggcucuccgaaccuagcuagcauccucuucaauuccaacuagaaagcuuaccaugauggccccggaccccaacgccaaccccaacgccaacccgaacgcgaaccccaacgccaaccccaacgccaacccgaacgccaaccccaacgccaaccccaacgcgaaccccaacgccaacccgaacgccaaccccaacgccaaccccaacgcgaaccccaacgccaacccgaacgccaaccccaacgccaaccccaacgccaaccccaacgcgaacccgaacgccaaccccaacaagaacaaccagggcaacggccaggggcacaacaugcccaacgaccccaaccgcaacgucgacgagaacgccaacgccaacuccgccgugaagaacaacaacaacgaggagccgagcgacaagcacaucaaggaguaccugaacaagauccagaacucccucagcacggaguggucccccugcagcgugaccugcggcaacgggauccagguccggaucaagcccggcuccgcgaacaagcccaaggacgagcuggacuacgccaacgacaucgagaagaagaucugcaagauggagaagugcagcuccguguucaacguggucaacagcuccaucgggcuggggccggugacgaacauggagaacaucaccagcggcuuccuggggccccuccuggugcugcaggccggcuucuuccuccugacccgcauccugaccaucccgcagucccucgacagcugguggaccucccugaacuuccucgggggcagccccgucugccuggggcagaacucccagagccccaccuccaaccacagccccaccuccugcccgcccaucugccccggcuaccgguggaugugccugcgccgguucaucaucuuccuguucauccuccugcugugccucaucuuccugcuggugcuccuggacuaccagggcaugcugcccgugugcccgcucauccccgggagcacgaccaccaacaccggccccugcaagacgugcaccacccccgcccaggggaacuccauguucccgagcugcugcugcaccaagcccacggacggcaacugcacgugcauccccauccccuccagcugggcguucgccaaguaccugugggagugggccuccguccgcuucagcuggcugucccuccuggugccguucgugcagugguucgucgggcugagccccaccguguggcucuccgccaucuggaugaugugguacuggggccccagccuguacagcaucgugucccccuucaucccgcugcuccccaucuucuucugccugugggucuacaucugaggacuagucccuguucccagagcccacuuuuuuuucuuuuuuugaaauaaaauagccugucuuucagaucucaaaggcucuuuucagagccaccaaaaaaaaaaaaaaaaaaaaaaaaaaaaaaaaaaaaaaaaaaaaaaaaaaaaaaaaaaaaaaaaaaaaaaaaaaaaaaaaaaaaaaaaaaaaaaaaaaaaa

SEQ ID NO: 8269 - RNA, 828 nt, Artificial Sequence
  mRNA Design a-3 (hSL-A100) comprising derived and/or modified sequence from Pf(3D7)__XP_001351122.1__HsALB_Pf-CSP(19-152) (opt1)
aggagagggcgcuuggcuugcaaggacccugagcugcggcauugaagcacacccaacccaacucgacugaagucagccucacugaaccggaucugagaaucuucucucucugggcuugccagggcucuccgaaccuagcuagcauccucuucaauuccaacuagaaagcuuaccaugaagugggugaccuucaucagccuccuguuccuguucuccagcgccuacucccuguuccaggaguaccagugcuacggcuccagcuccaacacccgggugcucaacgagcugaacuacgacaacgcggggaccaaccuguacaacgagcucgagaugaacuacuacggcaagcaggagaacugguacagccugaagaagaacucccgcagccugggggagaacgacgacggcaacaacgaggacaacgagaagcuccggaagcccaagcacaagaagcugaagcagccggccgacgggaaccccgaccccaacgccaaccccaacguggacccgaacgccaaccccaacgucgaccccaacgccaaccccaacguggacccgaacgcgaaccccaacgccaaccccaacgccaaccccaacgccaacccgaacgcgaaccccaacgccaaccccugaggacuagucccuguucccagagcccacuuuuuuuucuuuuuuugaaauaaaauagccugucuuucagaucucaaaggcucuuuucagagccaccaaaaaaaaaaaaaaaaaaaaaaaaaaaaaaaaaaaaaaaaaaaaaaaaaaaaaaaaaaaaaaaaaaaaaaaaaaaaaaaaaaaaaaaaaaaaaaaaaaaaa

SEQ ID NO: 8270 - RNA, 948 nt, Artificial Sequence
  mRNA Design a-3 (hSL-A100) comprising derived and/or modified sequence from Pf(3D7)__XP_001351122.1__HsALB_Pf-CSP(19-192) (opt1)
aggagagggcgcuuggcuugcaaggacccugagcugcggcauugaagcacacccaacccaacucgacugaagucagccucacugaaccggaucugagaaucuucucucucugggcuugccagggcucuccgaaccuagcuagcauccucuucaauuccaacuagaaagcuuaccaugaagugggugaccuucaucagccuccuguuccuguucuccagcgccuacucccuguuccaggaguaccagugcuacggcuccagcuccaacacccgggugcucaacgagcugaacuacgacaacgcggggaccaaccuguacaacgagcucgagaugaacuacuacggcaagcaggagaacugguacagccugaagaagaacucccgcagccugggggagaacgacgacggcaacaacgaggacaacgagaagcuccggaagcccaagcacaagaagcugaagcagccggccgacgggaaccccgaccccaacgccaaccccaacguggacccgaacgccaaccccaacgucgaccccaacgccaaccccaacguggacccgaacgcgaaccccaacgccaaccccaacgccaaccccaacgccaacccgaacgcgaaccccaacgccaaccccaacgccaaccccaacgccaacccgaacgccaaccccaacgcgaaccccaacgccaaccccaacgccaacccgaacgccaaccccaacgccaaccccaacgcgaaccccaacgccaacccgugaggacuagucccuguucccagagcccacuuuuuuuucuuuuuuugaaauaaaauagccugucuuucagaucucaaaggcucuuuucagagccaccaaaaaaaaaaaaaaaaaaaaaaaaaaaaaaaaaaaaaaaaaaaaaaaaaaaaaaaaaaaaaaaaaaaaaaaaaaaaaaaaaaaaaaaaaaaaaaaaaaaaa

SEQ ID NO: 8271 - RNA, 1188 nt, Artificial Sequence
  mRNA Design a-3 (hSL-A100) comprising derived and/or modified sequence from Pf(3D7)__XP_001351122.1__HsALB_Pf-CSP(19-272) (opt1)
aggagagggcgcuuggcuugcaaggacccugagcugcggcauugaagcacacccaacccaacucgacugaagucagccucacugaaccggaucugagaaucuucucucucugggcuugccagggcucuccgaaccuagcuagcauccucuucaauuccaacuagaaagcuuaccaugaagugggugaccuucaucagccuccuguuccuguucuccagcgccuacucccuguuccaggaguaccagugcuacggcuccagcuccaacacccgggugcucaacgagcugaacuacgacaacgcggggaccaaccuguacaacgagcucgagaugaacuacuacggcaagcaggagaacugguacagccugaagaagaacucccgcagccugggggagaacgacgacggcaacaacgaggacaacgagaagcuccggaagcccaagcacaagaagcugaagcagccggccgacgggaaccccgaccccaacgccaaccccaacguggacccgaacgccaaccccaacgucgaccccaacgccaaccccaacguggacccgaacgcgaaccccaacgccaaccccaacgccaaccccaacgccaacccgaacgcgaaccccaacgccaaccccaacgccaaccccaacgccaacccgaacgccaaccccaacgcgaaccccaacgccaaccccaacgccaacccgaacgccaaccccaacgccaaccccaacgcgaaccccaacgccaacccgaacgccaaccccaacguggaccccaacgccaaccccaacgccaacccgaacgcgaaccccaacgccaaccccaacgccaacccgaacgccaaccccaacgccaaccccaacgcgaaccccaacgccaacccgaacgccaaccccaacgccaaccccaacgcgaaccccaacgccaacccgaacgccaaccccaacgccaaccccaacgccaaccccaacgcgaacccgaacgccaaccccugaggacuagucccuguucccagagcccacuuuuuuuucuuuuuuugaaauaaaauagccugucuuucagaucucaaaggcucuuuucagagccaccaaaaaaaaaaaaaaaaaaaaaaaaaaaaaaaaaaaaaaaaaaaaaaaaaaaaaaaaaaaaaaaaaaaaaaaaaaaaaaaaaaaaaaaaaaaaaaaaaaaaa

SEQ ID NO: 8272 - RNA, 1350 nt, Artificial Sequence
  mRNA Design a-3 (hSL-A100) comprising derived and/or modified sequence from Pf(3D7)__XP_001351122.1__HsALB_Pf-CSP(19-272)_L(AAY)_Pf-CSP(310-3 27)_L(AAY)_Pf-CSP(346-375) (opt1)
aggagagggcgcuuggcuugcaaggacccugagcugcggcauugaagcacacccaacccaacucgacugaagucagccucacugaaccggaucugagaaucuucucucucugggcuugccagggcucuccgaaccuagcuagcauccucuucaauuccaacuagaaagcuuaccaugaagugggugaccuucaucagccuccuguuccuguucuccagcgccuacucccuguuccaggaguaccagugcuacggcuccagcuccaacacccgggugcucaacgagcugaacuacgacaacgcggggaccaaccuguacaacgagcucgagaugaacuacuacggcaagcaggagaacugguacagccugaagaagaacucccgcagccugggggagaacgacgacggcaacaacgaggacaacgagaagcuccggaagcccaagcacaagaagcugaagcagccggccgacgggaaccccgaccccaacgccaaccccaacguggacccgaacgccaaccccaacgucgaccccaacgccaaccccaacguggacccgaacgcgaaccccaacgccaaccccaacgccaaccccaacgccaacccgaacgcgaaccccaacgccaaccccaacgccaaccccaacgccaacccgaacgccaaccccaacgcgaaccccaacgccaaccccaacgccaacccgaacgccaaccccaacgccaaccccaacgcgaaccccaacgccaacccgaacgccaaccccaacguggaccccaacgccaaccccaacgccaacccgaacgcgaaccccaacgccaaccccaacgccaacccgaacgccaaccccaacgccaaccccaacgcgaaccccaacgccaacccgaacgccaaccccaacgccaaccccaacgcgaaccccaacgccaacccgaacgccaaccccaacgccaaccccaacgccaaccccaacgcgaacccgaacgccaaccccgccgcguaugagccgagcgacaagcacaucaaggaguaccugaacaagauccagaacucccucgcggccuacaucaagcccggcuccgcgaacaagcccaaggacgagcuggacuacgccaacgacaucgagaagaagaucugcaagauggagaagugcagcugaggacuagucccuguucccagagcccacuuuuuuuucuuuuuuugaaauaaaauagccugucuuucagaucucaaaggcucuuuucagagccaccaaaaaaaaaaaaaaaaaaaaaaaaaaaaaaaaaaaaaaaaaaaaaaaaaaaaaaaaaaaaaaaaaaaaaaaaaaaaaaaaaaaaaaaaaaaaaaaaaaaaa

SEQ ID NO: 8273 - RNA, 1311 nt, Artificial Sequence
  mRNA Design a-3 (hSL-A100) comprising derived and/or modified sequence from Pf(3D7)__XP_001351122.1__HsALB_Pf-CSP(19-272)_L(AAY)_Pf-CSP(346-3 65)_L(AAY)_P2 (opt1)
aggagagggcgcuuggcuugcaaggacccugagcugcggcauugaagcacacccaacccaacucgacugaagucagccucacugaaccggaucugagaaucuucucucucugggcuugccagggcucuccgaaccuagcuagcauccucuucaauuccaacuagaaagcuuaccaugaagugggugaccuucaucagccuccuguuccuguucuccagcgccuacucccuguuccaggaguaccagugcuacggcuccagcuccaacacccgggugcucaacgagcugaacuacgacaacgcggggaccaaccuguacaacgagcucgagaugaacuacuacggcaagcaggagaacugguacagccugaagaagaacucccgcagccugggggagaacgacgacggcaacaacgaggacaacgagaagcuccggaagcccaagcacaagaagcugaagcagccggccgacgggaaccccgaccccaacgccaaccccaacguggacccgaacgccaaccccaacgucgaccccaacgccaaccccaacguggacccgaacgcgaaccccaacgccaaccccaacgccaaccccaacgccaacccgaacgcgaaccccaacgccaaccccaacgccaaccccaacgccaacccgaacgccaaccccaacgcgaaccccaacgccaaccccaacgccaacccgaacgccaaccccaacgccaaccccaacgcgaaccccaacgccaacccgaacgccaaccccaacguggaccccaacgccaaccccaacgccaacccgaacgcgaaccccaacgccaaccccaacgccaacccgaacgccaaccccaacgccaaccccaacgcgaaccccaacgccaacccgaacgccaaccccaacgccaaccccaacgcgaaccccaacgccaacccgaacgccaaccccaacgccaaccccaacgccaaccccaacgcgaacccgaacgccaaccccgccgcguauaucaagcccggcuccgcgaacaagcccaaggacgagcuggacuacgccaacgacaucgaggcggccuaccaguacaucaaggccaacagcaaguucaucggcaucaccgagcugugaggacuagucccuguucccagagcccacuuuuuuuucuuuuuuugaaauaaaauagccugucuuucagaucucaaaggcucuuuucagagccaccaaaaaaaaaaaaaaaaaaaaaaaaaaaaaaaaaaaaaaaaaaaaaaaaaaaaaaaaaaaaaaaaaaaaaaaaaaaaaaaaaaaaaaaaaaaaaaaaaaaaa

SEQ ID NO: 8274 - RNA, 1305 nt, Artificial Sequence
  mRNA Design a-3 (hSL-A100) comprising derived and/or modified sequence from Pf(3D7)__XP_001351122.1__HsALB_Pf-CSP(19-272)_L(AAY)_Pf-CSP(346-3 65)_L(AAY)_PADRE (opt1)
aggagagggcgcuuggcuugcaaggacccugagcugcggcauugaagcacacccaacccaacucgacugaagucagccucacugaaccggaucugagaaucuucucucucugggcuugccagggcucuccgaaccuagcuagcauccucuucaauuccaacuagaaagcuuaccaugaagugggugaccuucaucagccuccuguuccuguucuccagcgccuacucccuguuccaggaguaccagugcuacggcuccagcuccaacacccgggugcucaacgagcugaacuacgacaacgcggggaccaaccuguacaacgagcucgagaugaacuacuacggcaagcaggagaacugguacagccugaagaagaacucccgcagccugggggagaacgacgacggcaacaacgaggacaacgagaagcuccggaagcccaagcacaagaagcugaagcagccggccgacgggaaccccgaccccaacgccaaccccaacguggacccgaacgccaaccccaacgucgaccccaacgccaaccccaacguggacccgaacgcgaaccccaacgccaaccccaacgccaaccccaacgccaacccgaacgcgaaccccaacgccaaccccaacgccaaccccaacgccaacccgaacgccaaccccaacgcgaaccccaacgccaaccccaacgccaacccgaacgccaaccccaacgccaaccccaacgcgaaccccaacgccaacccgaacgccaaccccaacguggaccccaacgccaaccccaacgccaacccgaacgcgaaccccaacgccaaccccaacgccaacccgaacgccaaccccaacgccaaccccaacgcgaaccccaacgccaacccgaacgccaaccccaacgccaaccccaacgcgaaccccaacgccaacccgaacgccaaccccaacgccaaccccaacgccaaccccaacgcgaacccgaacgccaaccccgccgcguauaucaagcccggcuccgcgaacaagcccaaggacgagcuggacuacgccaacgacaucgaggcggccuacgccaaguucguggccgccuggacccugaaggcggccgccugaggacuagucccuguucccagagcccacuuuuuuuucuuuuuuugaaauaaaauagccugucuuucagaucucaaaggcucuuuucagagccaccaaaaaaaaaaaaaaaaaaaaaaaaaaaaaaaaaaaaaaaaaaaaaaaaaaaaaaaaaaaaaaaaaaaaaaaaaaaaaaaaaaaaaaaaaaaaaaaaaaaaa

SEQ ID NO: 8275 - RNA, 1362 nt, Artificial Sequence
  mRNA Design a-3 (hSL-A100) comprising derived and/or modified sequence from Pf(3D7)__XP_001351122.1__HsALB_Pf-CSP(19-272)_L(G4S)_Pf-CSP(310-3 27)_L(G4S)_Pf-CSP(346-375) (opt1)
aggagagggcgcuuggcuugcaaggacccugagcugcggcauugaagcacacccaacccaacucgacugaagucagccucacugaaccggaucugagaaucuucucucucugggcuugccagggcucuccgaaccuagcuagcauccucuucaauuccaacuagaaagcuuaccaugaagugggugaccuucaucagccuccuguuccuguucuccagcgccuacucccuguuccaggaguaccagugcuacggcuccagcuccaacacccgggugcucaacgagcugaacuacgacaacgcggggaccaaccuguacaacgagcucgagaugaacuacuacggcaagcaggagaacugguacagccugaagaagaacucccgcagccugggggagaacgacgacggcaacaacgaggacaacgagaagcuccggaagcccaagcacaagaagcugaagcagccggccgacgggaaccccgaccccaacgccaaccccaacguggacccgaacgccaaccccaacgucgaccccaacgccaaccccaacguggacccgaacgcgaaccccaacgccaaccccaacgccaaccccaacgccaacccgaacgcgaaccccaacgccaaccccaacgccaaccccaacgccaacccgaacgccaaccccaacgcgaaccccaacgccaaccccaacgccaacccgaacgccaaccccaacgccaaccccaacgcgaaccccaacgccaacccgaacgccaaccccaacguggaccccaacgccaaccccaacgccaacccgaacgcgaaccccaacgccaaccccaacgccaacccgaacgccaaccccaacgccaaccccaacgcgaaccccaacgccaacccgaacgccaaccccaacgccaaccccaacgcgaaccccaacgccaacccgaacgccaaccccaacgccaaccccaacgccaaccccaacgcgaacccgaacgccaaccccggaggcggaggaucugagccgagcgacaagcacaucaaggaguaccugaacaagauccagaacucccucggcggagguggaaguaucaagcccggcuccgcgaacaagcccaaggacgagcuggacuacgccaacgacaucgagaagaagaucugcaagauggagaagugcagcugaggacuagucccuguucccagagcccacuuuuuuuucuuuuuuugaaauaaaauagccugucuuucagaucucaaaggcucuuuucagagccaccaaaaaaaaaaaaaaaaaaaaaaaaaaaaaaaaaaaaaaaaaaaaaaaaaaaaaaaaaaaaaaaaaaaaaaaaaaaaaaaaaaaaaaaaaaaaaaaaaaaaa

SEQ ID NO: 8276 - RNA, 1347 nt, Artificial Sequence
  mRNA Design a-3 (hSL-A100) comprising derived and/or modified sequence from Pf(3D7)__XP_001351122.1__HsALB_Pf-CSP(19-272)_L(G4S)_Pf-CSP(310-3 27)_Pf-CSP(346-375) (opt1)
aggagagggcgcuuggcuugcaaggacccugagcugcggcauugaagcacacccaacccaacucgacugaagucagccucacugaaccggaucugagaaucuucucucucugggcuugccagggcucuccgaaccuagcuagcauccucuucaauuccaacuagaaagcuuaccaugaagugggugaccuucaucagccuccuguuccuguucuccagcgccuacucccuguuccaggaguaccagugcuacggcuccagcuccaacacccgggugcucaacgagcugaacuacgacaacgcggggaccaaccuguacaacgagcucgagaugaacuacuacggcaagcaggagaacugguacagccugaagaagaacucccgcagccugggggagaacgacgacggcaacaacgaggacaacgagaagcuccggaagcccaagcacaagaagcugaagcagccggccgacgggaaccccgaccccaacgccaaccccaacguggacccgaacgccaaccccaacgucgaccccaacgccaaccccaacguggacccgaacgcgaaccccaacgccaaccccaacgccaaccccaacgccaacccgaacgcgaaccccaacgccaaccccaacgccaaccccaacgccaacccgaacgccaaccccaacgcgaaccccaacgccaaccccaacgccaacccgaacgccaaccccaacgccaaccccaacgcgaaccccaacgccaacccgaacgccaaccccaacguggaccccaacgccaaccccaacgccaacccgaacgcgaaccccaacgccaaccccaacgccaacccgaacgccaaccccaacgccaaccccaacgcgaaccccaacgccaacccgaacgccaaccccaacgccaaccccaacgcgaaccccaacgccaacccgaacgccaaccccaacgccaaccccaacgccaaccccaacgcgaacccgaacgccaaccccggaggcggaggaucugagccgagcgacaagcacaucaaggaguaccugaacaagauccagaacucccucaucaagcccggcuccgcgaacaagcccaaggacgagcuggacuacgccaacgacaucgagaagaagaucugcaagauggagaagugcagcugaggacuagucccuguucccagagcccacuuuuuuuucuuuuuuugaaauaaaauagccugucuuucagaucucaaaggcucuuuucagagccaccaaaaaaaaaaaaaaaaaaaaaaaaaaaaaaaaaaaaaaaaaaaaaaaaaaaaaaaaaaaaaaaaaaaaaaaaaaaaaaaaaaaaaaaaaaaaaaaaaaaaa

SEQ ID NO: 8277 - RNA, 1347 nt, Artificial Sequence
  mRNA Design a-3 (hSL-A100) comprising derived and/or modified sequence from Pf(3D7)__XP_001351122.1__HsALB_Pf-CSP(19-325) (opt1)
aggagagggcgcuuggcuugcaaggacccugagcugcggcauugaagcacacccaacccaacucgacugaagucagccucacugaaccggaucugagaaucuucucucucugggcuugccagggcucuccgaaccuagcuagcauccucuucaauuccaacuagaaagcuuaccaugaagugggugaccuucaucagccuccuguuccuguucuccagcgccuacucccuguuccaggaguaccagugcuacggcuccagcuccaacacccgggugcucaacgagcugaacuacgacaacgcggggaccaaccuguacaacgagcucgagaugaacuacuacggcaagcaggagaacugguacagccugaagaagaacucccgcagccugggggagaacgacgacggcaacaacgaggacaacgagaagcuccggaagcccaagcacaagaagcugaagcagccggccgacgggaaccccgaccccaacgccaaccccaacguggacccgaacgccaaccccaacgucgaccccaacgccaaccccaacguggacccgaacgcgaaccccaacgccaaccccaacgccaaccccaacgccaacccgaacgcgaaccccaacgccaaccccaacgccaaccccaacgccaacccgaacgccaaccccaacgcgaaccccaacgccaaccccaacgccaacccgaacgccaaccccaacgccaaccccaacgcgaaccccaacgccaacccgaacgccaaccccaacguggaccccaacgccaaccccaacgccaacccgaacgcgaaccccaacgccaaccccaacgccaacccgaacgccaaccccaacgccaaccccaacgcgaaccccaacgccaacccgaacgccaaccccaacgccaaccccaacgcgaaccccaacgccaacccgaacgccaaccccaacgccaaccccaacgccaaccccaacgcgaacccgaacgccaaccccaacaagaacaaccagggcaacggccaggggcacaacaugcccaacgaccccaaccgcaacgucgacgagaacgccaacgccaacuccgccgugaagaacaacaacaacgaggagccgagcgacaagcacaucaaggaguaccugaacaagauccagaacugaggacuagucccuguucccagagcccacuuuuuuuucuuuuuuugaaauaaaauagccugucuuucagaucucaaaggcucuuuucagagccaccaaaaaaaaaaaaaaaaaaaaaaaaaaaaaaaaaaaaaaaaaaaaaaaaaaaaaaaaaaaaaaaaaaaaaaaaaaaaaaaaaaaaaaaaaaaaaaaaaaaaa

SEQ ID NO: 8278 - RNA, 1524 nt, Artificial Sequence
  mRNA Design a-3 (hSL-A100) comprising derived and/or modified sequence from Pf(3D7)__XP_001351122.1__HsALB_Pf-CSP(19-384) (opt1)
aggagagggcgcuuggcuugcaaggacccugagcugcggcauugaagcacacccaacccaacucgacugaagucagccucacugaaccggaucugagaaucuucucucucugggcuugccagggcucuccgaaccuagcuagcauccucuucaauuccaacuagaaagcuuaccaugaagugggugaccuucaucagccuccuguuccuguucuccagcgccuacucccuguuccaggaguaccagugcuacggcuccagcuccaacacccgggugcucaacgagcugaacuacgacaacgcggggaccaaccuguacaacgagcucgagaugaacuacuacggcaagcaggagaacugguacagccugaagaagaacucccgcagccugggggagaacgacgacggcaacaacgaggacaacgagaagcuccggaagcccaagcacaagaagcugaagcagccggccgacgggaaccccgaccccaacgccaaccccaacguggacccgaacgccaaccccaacgucgaccccaacgccaaccccaacguggacccgaacgcgaaccccaacgccaaccccaacgccaaccccaacgccaacccgaacgcgaaccccaacgccaaccccaacgccaaccccaacgccaacccgaacgccaaccccaacgcgaaccccaacgccaaccccaacgccaacccgaacgccaaccccaacgccaaccccaacgcgaaccccaacgccaacccgaacgccaaccccaacguggaccccaacgccaaccccaacgccaacccgaacgcgaaccccaacgccaaccccaacgccaacccgaacgccaaccccaacgccaaccccaacgcgaaccccaacgccaacccgaacgccaaccccaacgccaaccccaacgcgaaccccaacgccaacccgaacgccaaccccaacgccaaccccaacgccaaccccaacgcgaacccgaacgccaaccccaacaagaacaaccagggcaacggccaggggcacaacaugcccaacgaccccaaccgcaacgucgacgagaacgccaacgccaacuccgccgugaagaacaacaacaacgaggagccgagcgacaagcacaucaaggaguaccugaacaagauccagaacucccucagcacggaguggucccccugcagcgugaccugcggcaacgggauccagguccggaucaagcccggcuccgcgaacaagcccaaggacgagcuggacuacgccaacgacaucgagaagaagaucugcaagauggagaagugcagcuccguguucaacguggucaacagcuccugaggacuagucccuguucccagagcccacuuuuuuuucuuuuuuugaaauaaaauagccugucuuucagaucucaaaggcucuuuucagagccaccaaaaaaaaaaaaaaaaaaaaaaaaaaaaaaaaaaaaaaaaaaaaaaaaaaaaaaaaaaaaaaaaaaaaaaaaaaaaaaaaaaaaaaaaaaaaaaaaaaaaa

SEQ ID NO: 8279 - RNA, 1662 nt, Artificial Sequence
  mRNA Design a-3 (hSL-A100) comprising derived and/or modified sequence from Pf(3D7)__XP_001351122.1__HsALB_Pf-CSP(19-384)_TM domain HA (opt1)
aggagagggcgcuuggcuugcaaggacccugagcugcggcauugaagcacacccaacccaacucgacugaagucagccucacugaaccggaucugagaaucuucucucucugggcuugccagggcucuccgaaccuagcuagcauccucuucaauuccaacuagaaagcuuaccaugaagugggugaccuucaucagccuccuguuccuguucuccagcgccuacucccuguuccaggaguaccagugcuacggcuccagcuccaacacccgggugcucaacgagcugaacuacgacaacgcggggaccaaccuguacaacgagcucgagaugaacuacuacggcaagcaggagaacugguacagccugaagaagaacucccgcagccugggggagaacgacgacggcaacaacgaggacaacgagaagcuccggaagcccaagcacaagaagcugaagcagccggccgacgggaaccccgaccccaacgccaaccccaacguggacccgaacgccaaccccaacgucgaccccaacgccaaccccaacguggacccgaacgcgaaccccaacgccaaccccaacgccaaccccaacgccaacccgaacgcgaaccccaacgccaaccccaacgccaaccccaacgccaacccgaacgccaaccccaacgcgaaccccaacgccaaccccaacgccaacccgaacgccaaccccaacgccaaccccaacgcgaaccccaacgccaacccgaacgccaaccccaacguggaccccaacgccaaccccaacgccaacccgaacgcgaaccccaacgccaaccccaacgccaacccgaacgccaaccccaacgccaaccccaacgcgaaccccaacgccaacccgaacgccaaccccaacgccaaccccaacgcgaaccccaacgccaacccgaacgccaaccccaacgccaaccccaacgccaaccccaacgcgaacccgaacgccaaccccaacaagaacaaccagggcaacggccaggggcacaacaugcccaacgaccccaaccgcaacgucgacgagaacgccaacgccaacuccgccgugaagaacaacaacaacgaggagccgagcgacaagcacaucaaggaguaccugaacaagauccagaacucccucagcacggaguggucccccugcagcgugaccugcggcaacgggauccagguccggaucaagcccggcuccgcgaacaagcccaaggacgagcuggacuacgccaacgacaucgagaagaagaucugcaagauggagaagugcagcuccguguucaacguggucaacagcuccaagcucgaguccacgcggaucuaccagauccuggcgaucuacagcaccgucgccagcucccuggugcucguggucagccugggggccaucuccuucuggaugugcagcaacggcucccugcagugccgcaucugcaucugaggacuagucccuguucccagagcccacuuuuuuuucuuuuuuugaaauaaaauagccugucuuucagaucucaaaggcucuuuucagagccaccaaaaaaaaaaaaaaaaaaaaaaaaaaaaaaaaaaaaaaaaaaaaaaaaaaaaaaaaaaaaaaaaaaaaaaaaaaaaaaaaaaaaaaaaaaaaaaaaaaaaa

SEQ ID NO: 8280 - RNA, 1374 nt, Artificial Sequence
  mRNA Design a-3 (hSL-A100) comprising derived and/or modified sequence from Pf(3D7)__XP_001351122.1__HsALB_Pf-CSP(82-397) (opt1)
aggagagggcgcuuggcuugcaaggacccugagcugcggcauugaagcacacccaacccaacucgacugaagucagccucacugaaccggaucugagaaucuucucucucugggcuugccagggcucuccgaaccuagcuagcauccucuucaauuccaacuagaaagcuuaccaugaagugggugaccuucaucagccuccuguuccuguucuccagcgccuacuccgacaacgagaagcuccggaagcccaagcacaagaagcugaagcagccggccgacgggaaccccgaccccaacgccaaccccaacguggacccgaacgccaaccccaacgucgaccccaacgccaaccccaacguggacccgaacgcgaaccccaacgccaaccccaacgccaaccccaacgccaacccgaacgcgaaccccaacgccaaccccaacgccaaccccaacgccaacccgaacgccaaccccaacgcgaaccccaacgccaaccccaacgccaacccgaacgccaaccccaacgccaaccccaacgcgaaccccaacgccaacccgaacgccaaccccaacguggaccccaacgccaaccccaacgccaacccgaacgcgaaccccaacgccaaccccaacgccaacccgaacgccaaccccaacgccaaccccaacgcgaaccccaacgccaacccgaacgccaaccccaacgccaaccccaacgcgaaccccaacgccaacccgaacgccaaccccaacgccaaccccaacgccaaccccaacgcgaacccgaacgccaaccccaacaagaacaaccagggcaacggccaggggcacaacaugcccaacgaccccaaccgcaacgucgacgagaacgccaacgccaacuccgccgugaagaacaacaacaacgaggagccgagcgacaagcacaucaaggaguaccugaacaagauccagaacucccucagcacggaguggucccccugcagcgugaccugcggcaacgggauccagguccggaucaagcccggcuccgcgaacaagcccaaggacgagcuggacuacgccaacgacaucgagaagaagaucugcaagauggagaagugcagcuccguguucaacguggucaacagcuccaucgggcugaucauggugcucagcuuccuguuccugaacugaggacuagucccuguucccagagcccacuuuuuuuucuuuuuuugaaauaaaauagccugucuuucagaucucaaaggcucuuuucagagccaccaaaaaaaaaaaaaaaaaaaaaaaaaaaaaaaaaaaaaaaaaaaaaaaaaaaaaaaaaaaaaaaaaaaaaaaaaaaaaaaaaaaaaaaaaaaaaaaaaaaaa

SEQ ID NO: 8281 - RNA, 726 nt, Artificial Sequence
  mRNA Design a-3 (hSL-A100) comprising derived and/or modified sequence from Pf(3D7)__XP_001351122.1__HsALB_Pf-CSP(93-192) (opt1)
aggagagggcgcuuggcuugcaaggacccugagcugcggcauugaagcacacccaacccaacucgacugaagucagccucacugaaccggaucugagaaucuucucucucugggcuugccagggcucuccgaaccuagcuagcauccucuucaauuccaacuagaaagcuuaccaugaagugggugaccuucaucagccuccuguuccuguucuccagcgccuacuccaagcugaagcagccggccgacgggaaccccgaccccaacgccaaccccaacguggacccgaacgccaaccccaacgucgaccccaacgccaaccccaacguggacccgaacgcgaaccccaacgccaaccccaacgccaaccccaacgccaacccgaacgcgaaccccaacgccaaccccaacgccaaccccaacgccaacccgaacgccaaccccaacgcgaaccccaacgccaaccccaacgccaacccgaacgccaaccccaacgccaaccccaacgcgaaccccaacgccaacccgugaggacuagucccuguucccagagcccacuuuuuuuucuuuuuuugaaauaaaauagccugucuuucagaucucaaaggcucuuuucagagccaccaaaaaaaaaaaaaaaaaaaaaaaaaaaaaaaaaaaaaaaaaaaaaaaaaaaaaaaaaaaaaaaaaaaaaaaaaaaaaaaaaaaaaaaaaaaaaaaaaaaaa

SEQ ID NO: 8282 - RNA, 966 nt, Artificial Sequence
  mRNA Design a-3 (hSL-A100) comprising derived and/or modified sequence from Pf(3D7)__XP_001351122.1__HsALB_Pf-CSP(93-272) (opt1)
aggagagggcgcuuggcuugcaaggacccugagcugcggcauugaagcacacccaacccaacucgacugaagucagccucacugaaccggaucugagaaucuucucucucugggcuugccagggcucuccgaaccuagcuagcauccucuucaauuccaacuagaaagcuuaccaugaagugggugaccuucaucagccuccuguuccuguucuccagcgccuacuccaagcugaagcagccggccgacgggaaccccgaccccaacgccaaccccaacguggacccgaacgccaaccccaacgucgaccccaacgccaaccccaacguggacccgaacgcgaaccccaacgccaaccccaacgccaaccccaacgccaacccgaacgcgaaccccaacgccaaccccaacgccaaccccaacgccaacccgaacgccaaccccaacgcgaaccccaacgccaaccccaacgccaacccgaacgccaaccccaacgccaaccccaacgcgaaccccaacgccaacccgaacgccaaccccaacguggaccccaacgccaaccccaacgccaacccgaacgcgaaccccaacgccaaccccaacgccaacccgaacgccaaccccaacgccaaccccaacgcgaaccccaacgccaacccgaacgccaaccccaacgccaaccccaacgcgaaccccaacgccaacccgaacgccaaccccaacgccaaccccaacgccaaccccaacgcgaacccgaacgccaaccccugaggacuagucccuguucccagagcccacuuuuuuuucuuuuuuugaaauaaaauagccugucuuucagaucucaaaggcucuuuucagagccaccaaaaaaaaaaaaaaaaaaaaaaaaaaaaaaaaaaaaaaaaaaaaaaaaaaaaaaaaaaaaaaaaaaaaaaaaaaaaaaaaaaaaaaaaaaaaaaaaaaaaa

SEQ ID NO: 8283 - RNA, 1341 nt, Artificial Sequence
  mRNA Design a-3 (hSL-A100) comprising derived and/or modified sequence from Pf(3D7)__XP_001351122.1__HsALB_Pf-CSP(93-397) (opt1)
aggagagggcgcuuggcuugcaaggacccugagcugcggcauugaagcacacccaacccaacucgacugaagucagccucacugaaccggaucugagaaucuucucucucugggcuugccagggcucuccgaaccuagcuagcauccucuucaauuccaacuagaaagcuuaccaugaagugggugaccuucaucagccuccuguuccuguucuccagcgccuacuccaagcugaagcagccggccgacgggaaccccgaccccaacgccaaccccaacguggacccgaacgccaaccccaacgucgaccccaacgccaaccccaacguggacccgaacgcgaaccccaacgccaaccccaacgccaaccccaacgccaacccgaacgcgaaccccaacgccaaccccaacgccaaccccaacgccaacccgaacgccaaccccaacgcgaaccccaacgccaaccccaacgccaacccgaacgccaaccccaacgccaaccccaacgcgaaccccaacgccaacccgaacgccaaccccaacguggaccccaacgccaaccccaacgccaacccgaacgcgaaccccaacgccaaccccaacgccaacccgaacgccaaccccaacgccaaccccaacgcgaaccccaacgccaacccgaacgccaaccccaacgccaaccccaacgcgaaccccaacgccaacccgaacgccaaccccaacgccaaccccaacgccaaccccaacgcgaacccgaacgccaaccccaacaagaacaaccagggcaacggccaggggcacaacaugcccaacgaccccaaccgcaacgucgacgagaacgccaacgccaacuccgccgugaagaacaacaacaacgaggagccgagcgacaagcacaucaaggaguaccugaacaagauccagaacucccucagcacggaguggucccccugcagcgugaccugcggcaacgggauccagguccggaucaagcccggcuccgcgaacaagcccaaggacgagcuggacuacgccaacgacaucgagaagaagaucugcaagauggagaagugcagcuccguguucaacguggucaacagcuccaucgggcugaucauggugcucagcuuccuguuccugaacugaggacuagucccuguucccagagcccacuuuuuuuucuuuuuuugaaauaaaauagccugucuuucagaucucaaaggcucuuuucagagccaccaaaaaaaaaaaaaaaaaaaaaaaaaaaaaaaaaaaaaaaaaaaaaaaaaaaaaaaaaaaaaaaaaaaaaaaaaaaaaaaaaaaaaaaaaaaaaaaaaaaaa

SEQ ID NO: 8284 - RNA, 711 nt, Artificial Sequence
  mRNA Design a-3 (hSL-A100) comprising derived and/or modified sequence from Pf(3D7)__XP_001351122.1__HsALB_Pf-CSP(98-192) (opt1)
aggagagggcgcuuggcuugcaaggacccugagcugcggcauugaagcacacccaacccaacucgacugaagucagccucacugaaccggaucugagaaucuucucucucugggcuugccagggcucuccgaaccuagcuagcauccucuucaauuccaacuagaaagcuuaccaugaagugggugaccuucaucagccuccuguuccuguucuccagcgccuacuccgccgacgggaaccccgaccccaacgccaaccccaacguggacccgaacgccaaccccaacgucgaccccaacgccaaccccaacguggacccgaacgcgaaccccaacgccaaccccaacgccaaccccaacgccaacccgaacgcgaaccccaacgccaaccccaacgccaaccccaacgccaacccgaacgccaaccccaacgcgaaccccaacgccaaccccaacgccaacccgaacgccaaccccaacgccaaccccaacgcgaaccccaacgccaacccgugaggacuagucccuguucccagagcccacuuuuuuuucuuuuuuugaaauaaaauagccugucuuucagaucucaaaggcucuuuucagagccaccaaaaaaaaaaaaaaaaaaaaaaaaaaaaaaaaaaaaaaaaaaaaaaaaaaaaaaaaaaaaaaaaaaaaaaaaaaaaaaaaaaaaaaaaaaaaaaaaaaaaa

SEQ ID NO: 8285 - RNA, 951 nt, Artificial Sequence
  mRNA Design a-3 (hSL-A100) comprising derived and/or modified sequence from Pf(3D7)__XP_001351122.1__HsALB_Pf-CSP(98-272) (opt1)
aggagagggcgcuuggcuugcaaggacccugagcugcggcauugaagcacacccaacccaacucgacugaagucagccucacugaaccggaucugagaaucuucucucucugggcuugccagggcucuccgaaccuagcuagcauccucuucaauuccaacuagaaagcuuaccaugaagugggugaccuucaucagccuccuguuccuguucuccagcgccuacuccgccgacgggaaccccgaccccaacgccaaccccaacguggacccgaacgccaaccccaacgucgaccccaacgccaaccccaacguggacccgaacgcgaaccccaacgccaaccccaacgccaaccccaacgccaacccgaacgcgaaccccaacgccaaccccaacgccaaccccaacgccaacccgaacgccaaccccaacgcgaaccccaacgccaaccccaacgccaacccgaacgccaaccccaacgccaaccccaacgcgaaccccaacgccaacccgaacgccaaccccaacguggaccccaacgccaaccccaacgccaacccgaacgcgaaccccaacgccaaccccaacgccaacccgaacgccaaccccaacgccaaccccaacgcgaaccccaacgccaacccgaacgccaaccccaacgccaaccccaacgcgaaccccaacgccaacccgaacgccaaccccaacgccaaccccaacgccaaccccaacgcgaacccgaacgccaaccccugaggacuagucccuguucccagagcccacuuuuuuuucuuuuuuugaaauaaaauagccugucuuucagaucucaaaggcucuuuucagagccaccaaaaaaaaaaaaaaaaaaaaaaaaaaaaaaaaaaaaaaaaaaaaaaaaaaaaaaaaaaaaaaaaaaaaaaaaaaaaaaaaaaaaaaaaaaaaaaaaaaaaa

SEQ ID NO: 8286 - RNA, 1257 nt, Artificial Sequence
  mRNA Design a-3 (hSL-A100) comprising derived and/or modified sequence from Pf(3D7)__XP_001351122.1__HsALB_Pf-CSP(98-374) (opt1)
aggagagggcgcuuggcuugcaaggacccugagcugcggcauugaagcacacccaacccaacucgacugaagucagccucacugaaccggaucugagaaucuucucucucugggcuugccagggcucuccgaaccuagcuagcauccucuucaauuccaacuagaaagcuuaccaugaagugggugaccuucaucagccuccuguuccuguucuccagcgccuacuccgccgacgggaaccccgaccccaacgccaaccccaacguggacccgaacgccaaccccaacgucgaccccaacgccaaccccaacguggacccgaacgcgaaccccaacgccaaccccaacgccaaccccaacgccaacccgaacgcgaaccccaacgccaaccccaacgccaaccccaacgccaacccgaacgccaaccccaacgcgaaccccaacgccaaccccaacgccaacccgaacgccaaccccaacgccaaccccaacgcgaaccccaacgccaacccgaacgccaaccccaacguggaccccaacgccaaccccaacgccaacccgaacgcgaaccccaacgccaaccccaacgccaacccgaacgccaaccccaacgccaaccccaacgcgaaccccaacgccaacccgaacgccaaccccaacgccaaccccaacgcgaaccccaacgccaacccgaacgccaaccccaacgccaaccccaacgccaaccccaacgcgaacccgaacgccaaccccaacaagaacaaccagggcaacggccaggggcacaacaugcccaacgaccccaaccgcaacgucgacgagaacgccaacgccaacuccgccgugaagaacaacaacaacgaggagccgagcgacaagcacaucaaggaguaccugaacaagauccagaacucccucagcacggaguggucccccugcagcgugaccugcggcaacgggauccagguccggaucaagcccggcuccgcgaacaagcccaaggacgagcuggacuacgccaacgacaucgagaagaagaucugcaagauggagaagugcugaggacuagucccuguucccagagcccacuuuuuuuucuuuuuuugaaauaaaauagccugucuuucagaucucaaaggcucuuuucagagccaccaaaaaaaaaaaaaaaaaaaaaaaaaaaaaaaaaaaaaaaaaaaaaaaaaaaaaaaaaaaaaaaaaaaaaaaaaaaaaaaaaaaaaaaaaaaaaaaaaaaaa

SEQ ID NO: 8287 - RNA, 1326 nt, Artificial Sequence
  mRNA Design a-3 (hSL-A100) comprising derived and/or modified sequence from Pf(3D7)__XP_001351122.1__HsALB_Pf-CSP(98-397) (opt1)
aggagagggcgcuuggcuugcaaggacccugagcugcggcauugaagcacacccaacccaacucgacugaagucagccucacugaaccggaucugagaaucuucucucucugggcuugccagggcucuccgaaccuagcuagcauccucuucaauuccaacuagaaagcuuaccaugaagugggugaccuucaucagccuccuguuccuguucuccagcgccuacuccgccgacgggaaccccgaccccaacgccaaccccaacguggacccgaacgccaaccccaacgucgaccccaacgccaaccccaacguggacccgaacgcgaaccccaacgccaaccccaacgccaaccccaacgccaacccgaacgcgaaccccaacgccaaccccaacgccaaccccaacgccaacccgaacgccaaccccaacgcgaaccccaacgccaaccccaacgccaacccgaacgccaaccccaacgccaaccccaacgcgaaccccaacgccaacccgaacgccaaccccaacguggaccccaacgccaaccccaacgccaacccgaacgcgaaccccaacgccaaccccaacgccaacccgaacgccaaccccaacgccaaccccaacgcgaaccccaacgccaacccgaacgccaaccccaacgccaaccccaacgcgaaccccaacgccaacccgaacgccaaccccaacgccaaccccaacgccaaccccaacgcgaacccgaacgccaaccccaacaagaacaaccagggcaacggccaggggcacaacaugcccaacgaccccaaccgcaacgucgacgagaacgccaacgccaacuccgccgugaagaacaacaacaacgaggagccgagcgacaagcacaucaaggaguaccugaacaagauccagaacucccucagcacggaguggucccccugcagcgugaccugcggcaacgggauccagguccggaucaagcccggcuccgcgaacaagcccaaggacgagcuggacuacgccaacgacaucgagaagaagaucugcaagauggagaagugcagcuccguguucaacguggucaacagcuccaucgggcugaucauggugcucagcuuccuguuccugaacugaggacuagucccuguucccagagcccacuuuuuuuucuuuuuuugaaauaaaauagccugucuuucagaucucaaaggcucuuuucagagccaccaaaaaaaaaaaaaaaaaaaaaaaaaaaaaaaaaaaaaaaaaaaaaaaaaaaaaaaaaaaaaaaaaaaaaaaaaaaaaaaaaaaaaaaaaaaaaaaaaaaaa

SEQ ID NO: 8288 - RNA, 1653 nt, Artificial Sequence
  mRNA Design a-3 (hSL-A100) comprising derived and/or modified sequence from Pf(3D7)__XP_001351122.1__HsALB_Pf-CSP(199-377)_L(PVTN)_HBsAg (opt1)
aggagagggcgcuuggcuugcaaggacccugagcugcggcauugaagcacacccaacccaacucgacugaagucagccucacugaaccggaucugagaaucuucucucucugggcuugccagggcucuccgaaccuagcuagcauccucuucaauuccaacuagaaagcuuaccaugaaguggguaaccuuuauuucccuucuuuuucucuuuagcucggcuuauuccgaccccaacgccaaccccaacgccaacccgaacgcgaaccccaacgccaaccccaacgccaacccgaacgccaaccccaacgccaaccccaacgcgaaccccaacgccaacccgaacgccaaccccaacgccaaccccaacgcgaaccccaacgccaacccgaacgccaaccccaacgccaaccccaacgccaaccccaacgcgaacccgaacgccaaccccaacaagaacaaccagggcaacggccaggggcacaacaugcccaacgaccccaaccgcaacgucgacgagaacgccaacgccaacuccgccgugaagaacaacaacaacgaggagccgagcgacaagcacaucaaggaguaccugaacaagauccagaacucccucagcacggaguggucccccugcagcgugaccugcggcaacgggauccagguccggaucaagcccggcuccgcgaacaagcccaaggacgagcuggacuacgccaacgacaucgagaagaagaucugcaagauggagaagugcagcuccgugccggugacgaacauggagaacaucaccagcggcuuccuggggccccuccuggugcugcaggccggcuucuuccuccugacccgcauccugaccaucccgcagucccucgacagcugguggaccucccugaacuuccucgggggcagccccgucugccuggggcagaacucccagagccccaccuccaaccacagccccaccuccugcccgcccaucugccccggcuaccgguggaugugccugcgccgguucaucaucuuccuguucauccuccugcugugccucaucuuccugcuggugcuccuggacuaccagggcaugcugcccgugugcccgcucauccccgggagcacgaccaccaacaccggccccugcaagacgugcaccacccccgcccaggggaacuccauguucccgagcugcugcugcaccaagcccacggacggcaacugcacgugcauccccauccccuccagcugggcguucgccaaguaccugugggagugggccuccguccgcuucagcuggcugucccuccuggugccguucgugcagugguucgucgggcugagccccaccguguggcucuccgccaucuggaugaugugguacuggggccccagccuguacagcaucgugucccccuucaucccgcugcuccccaucuucuucugccugugggucuacaucugaggacuagucccuguucccagagcccacuuuuuuuucuuuuuuugaaauaaaauagccugucuuucagaucucaaaggcucuuuucagagccaccaaaaaaaaaaaaaaaaaaaaaaaaaaaaaaaaaaaaaaaaaaaaaaaaaaaaaaaaaaaaaaaaaaaaaaaaaaaaaaaaaaaaaaaaaaaaaaaaaaaaa

SEQ ID NO: 8289 - RNA, 1563 nt, Artificial Sequence; identical to SEQ ID NO: 8259
  mRNA Design a-3 (hSL-A100) comprising derived and/or modified sequence from Pf(3D7)__XP_001351122.1__Pf-CSP (opt1)

SEQ ID NO: 8290 - RNA, 1494 nt, Artificial Sequence; identical to SEQ ID NO: 8260
  mRNA Design a-3 (hSL-A100) comprising derived and/or modified sequence from Pf(3D7)__XP_001351122.1__Pf-CSP(1-374) (opt1)

SEQ ID NO: 8291 - RNA, 1347 nt, Artificial Sequence; identical to SEQ ID NO: 8261
  mRNA Design a-3 (hSL-A100) comprising derived and/or modified sequence from Pf(3D7)__XP_001351122.1__Pf-CSP(1-325) (opt1)

SEQ ID NO: 8292 - RNA, 1563 nt, Artificial Sequence
  mRNA Design a-3 (hSL-A100) comprising derived and/or modified sequence from Pf(3D7)__XP_001351122.1__HsALB_Pf-CSP(19-397) (opt1)
aggagagggcgcuuggcuugcaaggacccugagcugcggcauugaagcacacccaacccaacucgacugaagucagccucacugaaccggaucugagaaucuucucucucugggcuugccagggcucuccgaaccuagcuagcauccucuucaauuccaacuagaaagcuuaccaugaagugggugaccuucaucagccuccuguuccuguucuccagcgccuacucccuguuccaggaguaccagugcuacggcagcuccagcaacacccgcguccucaacgagcugaacuacgacaacgccgggacgaaccuguacaacgagcucgagaugaacuacuacggcaagcaggagaacugguacucccugaagaagaacagccggucccugggggagaacgacgacggcaacaacgaggacaacgagaagcuccgcaagcccaagcacaagaagcugaagcagccggcggacgggaaccccgaccccaacgccaaccccaacguggacccgaacgccaaccccaacguggaccccaacgccaaccccaacgucgacccgaacgccaaccccaacgcgaaccccaacgccaaccccaacgccaacccgaacgccaaccccaacgcgaaccccaacgccaaccccaacgccaacccgaacgccaaccccaacgccaaccccaacgcgaaccccaacgccaacccgaacgccaaccccaacgccaaccccaacgccaaccccaacgcgaacccgaacgccaaccccaacguggaccccaacgccaaccccaacgccaacccgaacgccaaccccaacgcgaaccccaacgccaacccgaacgccaaccccaacgccaaccccaacgccaaccccaacgcgaacccgaacgccaaccccaacgccaaccccaacgccaaccccaacgcgaacccgaacgccaaccccaacgccaaccccaacgccaaccccaacgccaacccgaacgcgaaccccaacaagaacaaccagggcaacggccaggggcacaacaugcccaacgaccccaaccggaacguggacgagaacgccaacgccaacagcgccgucaagaacaacaacaacgaggagccguccgacaagcacaucaaggaguaccugaacaagauccagaacagccucuccaccgaguggagccccugcuccgugaccugcggcaacgggauccaggugcgcaucaagcccggcagcgccaacaagcccaaggacgagcuggacuacgcgaacgacaucgagaagaagaucugcaagauggagaagugcuccagcgucuucaacguggugaacuccagcaucgggcugaucaugguccucagcuuccuguuccugaacugaggacuagucccuguucccagagcccacuuuuuuuucuuuuuuugaaauaaaauagccugucuuucagaucucaaaggcucuuuucagagccaccaaaaaaaaaaaaaaaaaaaaaaaaaaaaaaaaaaaaaaaaaaaaaaaaaaaaaaaaaaaaaaaaaaaaaaaaaaaaaaaaaaaaaaaaaaaaaaaaaaaaa

SEQ ID NO: 8293 - RNA, 1581 nt, Artificial Sequence
  mRNA Design a-3 (hSL-A100) comprising derived and/or modified sequence from Pf(3D7)__XP_001351122.1__HsIns-iso1_Pf-CSP(19-397) (opt1)
aggagagggcgcuuggcuugcaaggacccugagcugcggcauugaagcacacccaacccaacucgacugaagucagccucacugaaccggaucugagaaucuucucucucugggcuugccagggcucuccgaaccuagcuagcauccucuucaauuccaacuagaaagcuuaccauggcccuguggaugcgccuccugccccugcucgcccugcuggcgcucuggggcccggaccccgccgccgcccuguuccaggaguaccagugcuacgggagcuccagcaacacccgggugcugaacgagcucaacuacgacaacgccggcaccaaccuguacaacgagcuggagaugaacuacuacgggaagcaggagaacugguacucccucaagaagaacagccgcucccugggcgagaacgacgacgggaacaacgaggacaacgagaagcugcggaagcccaagcacaagaagcucaagcagcccgcggacggcaacccggaccccaacgccaaccccaacgucgaccccaacgccaacccgaacguggaccccaacgccaaccccaacguggaccccaacgcgaacccgaacgccaaccccaacgccaaccccaacgccaaccccaacgccaacccgaacgcgaaccccaacgccaaccccaacgccaaccccaacgccaacccgaacgccaaccccaacgcgaaccccaacgccaaccccaacgccaacccgaacgccaaccccaacgccaaccccaacgcgaaccccaacgccaacccgaacgucgaccccaacgccaaccccaacgccaacccgaacgccaaccccaacgcgaaccccaacgccaaccccaacgccaacccgaacgccaaccccaacgcgaaccccaacgccaaccccaacgccaacccgaacgccaaccccaacgccaaccccaacgcgaaccccaacgccaacccgaacgccaaccccaacgccaaccccaacgccaaccccaacgcgaacccgaacaagaacaaccagggcaacgggcagggccacaacaugcccaacgaccccaaccgcaacguggacgagaacgccaacgccaacagcgccgugaagaacaacaacaacgaggagcccuccgacaagcacaucaaggaguaccugaacaagauccagaacagccuguccacggaguggagcccgugcuccgugaccugcgggaacggcauccagguccggaucaagcccgggagcgccaacaagcccaaggacgagcucgacuacgcgaacgacaucgagaagaagaucugcaagauggagaagugcuccagcguguucaacgucgugaacuccagcaucggccugaucauggugcuguccuuccucuuccugaacugaggacuagucccuguucccagagcccacuuuuuuuucuuuuuuugaaauaaaauagccugucuuucagaucucaaaggcucuuuucagagccaccaaaaaaaaaaaaaaaaaaaaaaaaaaaaaaaaaaaaaaaaaaaaaaaaaaaaaaaaaaaaaaaaaaaaaaaaaaaaaaaaaaaaaaaaaaaaaaaaaaaaa

SEQ ID NO: 8294 - RNA, 1560 nt, Artificial Sequence
  mRNA Design a-3 (hSL-A100) comprising derived and/or modified sequence from Pf(3D7)__XP_001351122.1__HsSPARC_Pf-CSP(19-397) (opt1)
aggagagggcgcuuggcuugcaaggacccugagcugcggcauugaagcacacccaacccaacucgacugaagucagccucacugaaccggaucugagaaucuucucucucugggcuugccagggcucuccgaaccuagcuagcauccucuucaauuccaacuagaaagcuuaccaugcgcgccuggaucuucuuccugcucugccuggccggccgggcgcuggcccucuuccaggaguaccagugcuacgggagcuccagcaacacccgcgugcugaacgagcugaacuacgacaacgccggcaccaaccucuacaacgagcuggagaugaacuacuacgggaagcaggagaacugguacucccugaagaagaacagccggucccucggcgagaacgacgacgggaacaacgaggacaacgagaagcugcgcaagcccaagcacaagaagcugaagcagccggccgacggcaaccccgaccccaacgccaaccccaacgucgacccgaacgcgaaccccaacguggaccccaacgccaaccccaacguggacccgaacgccaaccccaacgccaaccccaacgcgaaccccaacgccaacccgaacgccaaccccaacgccaaccccaacgccaaccccaacgcgaacccgaacgccaaccccaacgccaaccccaacgccaaccccaacgccaacccgaacgcgaaccccaacgccaaccccaacgccaaccccaacgccaacccgaacgccaaccccaacgucgaccccaacgcgaaccccaacgccaacccgaacgccaaccccaacgccaaccccaacgccaacccgaacgcgaaccccaacgccaaccccaacgccaaccccaacgccaacccgaacgcgaaccccaacgccaaccccaacgccaaccccaacgccaacccgaacgccaaccccaacgcgaaccccaacgccaaccccaacgccaacccgaacgccaaccccaacaagaacaaccagggcaacgggcagggccacaacaugcccaacgaccccaaccggaacguggacgagaacgccaacgcgaacagcgccgugaagaacaacaacaacgaggagccguccgacaagcacaucaaggaguaccucaacaagauccagaacagccuguccacggaguggagccccugcuccgugaccugcgggaacggcauccagguccgcaucaagcccgggagcgccaacaagcccaaggacgagcuggacuacgccaacgacaucgagaagaagaucugcaagauggagaagugcuccagcguguucaacgucgugaacuccagcaucggccucaucauggugcuguccuuccuguuccucaacugaggacuagucccuguucccagagcccacuuuuuuuucuuuuuuugaaauaaaauagccugucuuucagaucucaaaggcucuuuucagagccaccaaaaaaaaaaaaaaaaaaaaaaaaaaaaaaaaaaaaaaaaaaaaaaaaaaaaaaaaaaaaaaaaaaaaaaaaaaaaaaaaaaaaaaaaaaaaaaaaaaaaa

SEQ ID NO: 8295 - RNA, 1563 nt, Artificial Sequence
  mRNA Design a-3 (hSL-A100) comprising derived and/or modified sequence from Pf(3D7)__XP_001351122.1__IgE_Pf-CSP(19-397) (opt1)
aggagagggcgcuuggcuugcaaggacccugagcugcggcauugaagcacacccaacccaacucgacugaagucagccucacugaaccggaucugagaaucuucucucucugggcuugccagggcucuccgaaccuagcuagcauccucuucaauuccaacuagaaagcuuaccauggacuggaccuggauccuguuccucguggccgccgcgacccgcguccacagccuguuccaggaguaccagugcuacggcuccagcuccaacacgcgggugcugaacgagcucaacuacgacaacgccgggaccaaccuguacaacgagcuggagaugaacuacuacggcaagcaggagaacugguacagccucaagaagaacucccgcagccugggggagaacgacgacggcaacaacgaggacaacgagaagcugcggaagcccaagcacaagaagcucaagcagccggccgacgggaaccccgaccccaacgccaaccccaacguggacccgaacgccaaccccaacgucgaccccaacgcgaaccccaacguggacccgaacgccaaccccaacgccaaccccaacgccaaccccaacgcgaacccgaacgccaaccccaacgccaaccccaacgccaaccccaacgccaacccgaacgcgaaccccaacgccaaccccaacgccaaccccaacgccaacccgaacgccaaccccaacgcgaaccccaacgccaaccccaacgccaacccgaacgccaaccccaacguggaccccaacgccaaccccaacgcgaacccgaacgccaaccccaacgccaaccccaacgccaacccgaacgccaaccccaacgcgaaccccaacgccaaccccaacgccaacccgaacgccaaccccaacgcgaaccccaacgccaaccccaacgccaacccgaacgccaaccccaacgccaaccccaacgcgaaccccaacgccaacccgaacgccaaccccaacaagaacaaccagggcaacggccaggggcacaacaugcccaacgaccccaaccgcaacgucgacgagaacgccaacgccaacuccgcggugaagaacaacaacaacgaggagccgagcgacaagcacaucaaggaguaccugaacaagauccagaacucccugagcaccgaguggucccccugcagcgugaccugcggcaacgggauccagguccggaucaagcccggcuccgccaacaagcccaaggacgagcucgacuacgccaacgacaucgagaagaagaucugcaagauggagaagugcagcuccguguucaacguggucaacagcuccaucgggcugaucauggugcugagcuuccucuuccugaacugaggacuagucccuguucccagagcccacuuuuuuuucuuuuuuugaaauaaaauagccugucuuucagaucucaaaggcucuuuucagagccaccaaaaaaaaaaaaaaaaaaaaaaaaaaaaaaaaaaaaaaaaaaaaaaaaaaaaaaaaaaaaaaaaaaaaaaaaaaaaaaaaaaaaaaaaaaaaaaaaaaaaa

SEQ ID NO: 8296 - RNA, 1728 nt, Artificial Sequence
  mRNA Design a-3 (hSL-A100) comprising derived and/or modified sequence from Pf(3D7)__XP_001351122.1__Pf-CSP_L(G4SG4)_TM domain HA (opt1)
aggagagggcgcuuggcuugcaaggacccugagcugcggcauugaagcacacccaacccaacucgacugaagucagccucacugaaccggaucugagaaucuucucucucugggcuugccagggcucuccgaaccuagcuagcauccucuucaauuccaacuagaaagcuuaccaugaugcgcaagcuggccauccucagcguguccagcuuccuguucgucgaggcccuguuccaggaguaccagugcuacggcuccagcuccaacacccgggugcucaacgagcugaacuacgacaacgcggggaccaaccuguacaacgagcucgagaugaacuacuacggcaagcaggagaacugguacagccugaagaagaacucccgcagccugggggagaacgacgacggcaacaacgaggacaacgagaagcuccggaagcccaagcacaagaagcugaagcagccggccgacgggaaccccgaccccaacgccaaccccaacguggacccgaacgccaaccccaacgucgaccccaacgccaaccccaacguggacccgaacgcgaaccccaacgccaaccccaacgccaaccccaacgccaacccgaacgcgaaccccaacgccaaccccaacgccaaccccaacgccaacccgaacgccaaccccaacgcgaaccccaacgccaaccccaacgccaacccgaacgccaaccccaacgccaaccccaacgcgaaccccaacgccaacccgaacgccaaccccaacguggaccccaacgccaaccccaacgccaacccgaacgcgaaccccaacgccaaccccaacgccaacccgaacgccaaccccaacgccaaccccaacgcgaaccccaacgccaacccgaacgccaaccccaacgccaaccccaacgcgaaccccaacgccaacccgaacgccaaccccaacgccaaccccaacgccaaccccaacgcgaacccgaacgccaaccccaacaagaacaaccagggcaacggccaggggcacaacaugcccaacgaccccaaccgcaacgucgacgagaacgccaacgccaacuccgccgugaagaacaacaacaacgaggagccgagcgacaagcacaucaaggaguaccugaacaagauccagaacucccucagcacggaguggucccccugcagcgugaccugcggcaacgggauccagguccggaucaagcccggcuccgcgaacaagcccaaggacgagcuggacuacgccaacgacaucgagaagaagaucugcaagauggagaagugcagcuccguguucaacguggucaacagcuccaucgggcugaucauggugcucagcuuccuguuccugaacggcggcgggggcagcgggggcggcgggaagcucgaguccacccgcaucuaccagauccuggccaucuacagcaccguggccuccagccugguccucguggugucccugggcgccaucagcuucuggaugugcuccaacgggagccugcagugccggaucugcaucugaggacuagucccuguucccagagcccacuuuuuuuucuuuuuuugaaauaaaauagccugucuuucagaucucaaaggcucuuuucagagccaccaaaaaaaaaaaaaaaaaaaaaaaaaaaaaaaaaaaaaaaaaaaaaaaaaaaaaaaaaaaaaaaaaaaaaaaaaaaaaaaaaaaaaaaaaaaaaaaaaaaaa

SEQ ID NO: 8297 - RNA, 1602 nt, Artificial Sequence
  mRNA Design a-3 (hSL-A100) comprising derived and/or modified sequence from Pf(3D7)__XP_001351122.1__Pf-CSP(199-377)_L(PVTN)_HBsAg (opt1)
aggagagggcgcuuggcuugcaaggacccugagcugcggcauugaagcacacccaacccaacucgacugaagucagccucacugaaccggaucugagaaucuucucucucugggcuugccagggcucuccgaaccuagcuagcauccucuucaauuccaacuagaaagcuuaccauggaccccaacgccaacccgaacgccaaccccaacgcgaaccccaacgccaaccccaacgccaacccgaacgccaaccccaacgccaaccccaacgcgaaccccaacgccaacccgaacgccaaccccaacgccaaccccaacgcgaaccccaacgccaacccgaacgccaaccccaacgccaaccccaacgccaaccccaacgcgaacccgaacgccaaccccaacaagaacaaccagggcaacgggcagggccacaacaugcccaacgaccccaaccgcaacguggacgagaacgccaacgccaacagcgccgucaagaacaacaacaacgaggagccguccgacaagcacaucaaggaguaccugaacaagauccagaacagccucuccaccgaguggagccccugcuccgugaccugcgggaacggcauccaggugcggaucaagcccgggagcgcgaacaagcccaaggacgagcuggacuacgccaacgacaucgagaagaagaucugcaagauggagaagugcuccagcgucccggugacgaacauggagaacaucaccuccggcuuccugggcccccuccuggugcugcaggccggguucuuccuccugacccgcauccugaccaucccccagagccucgacuccugguggacgagccugaacuuccugggcgggucccccgucugccucggccagaacagccaguccccgaccagcaaccacucccccaccagcugcccgcccaucugccccggguaccgguggaugugccugcgccgguucaucaucuuccuguucauccuccugcugugccucaucuuccugcuggugcuccuggacuaccagggcaugcugcccgugugcccccucaucccgggcuccaccacgaccaacaccgggcccugcaagaccugcacgacccccgcccagggcaacagcauguuccccagcugcugcugcaccaagccgaccgacgggaacugcacgugcauccccauccccuccagcugggccuucgcgaaguaccugugggagugggccuccguccgcuucagcuggcugucccuccuggugcccuucgugcagugguucgucggccugagcccgaccguguggcucuccgccaucuggaugaugugguacuggggccccagccuguacuccaucgugagccccuucaucccccugcucccgaucuucuucugccugugggucuacaucugaggacuagucccuguucccagagcccacuuuuuuuucuuuuuuugaaauaaaauagccugucuuucagaucucaaaggcucuuuucagagccaccaaaaaaaaaaaaaaaaaaaaaaaaaaaaaaaaaaaaaaaaaaaaaaaaaaaaaaaaaaaaaaaaaaaaaaaaaaaaaaaaaaaaaaaaaaaaaaaaaaaaa

SEQ ID NO: 8298 - RNA, 1644 nt, Artificial Sequence
  mRNA Design a-3 (hSL-A100) comprising derived and/or modified sequence from Pf(3D7)__XP_001351122.1__Pf-CSP(199-387)_L(PVTN)_HBsAg (opt1)
aggagagggcgcuuggcuugcaaggacccugagcugcggcauugaagcacacccaacccaacucgacugaagucagccucacugaaccggaucugagaaucuucucucucugggcuugccagggcucuccgaaccuagcuagcauccucuucaauuccaacuagaaagcuuaccaugauggcccccgacccgaacgccaaccccaacgcgaaccccaacgccaaccccaacgccaacccgaacgccaaccccaacgccaaccccaacgcgaaccccaacgccaacccgaacgccaaccccaacgccaaccccaacgcgaaccccaacgccaacccgaacgccaaccccaacgccaaccccaacgccaaccccaacgcgaacccgaacgccaaccccaacgccaaccccaacaagaacaaccagggcaacgggcagggccacaacaugcccaacgacccgaaccgcaacguggacgagaacgccaacgccaacagcgcggucaagaacaacaacaacgaggagcccuccgacaagcacaucaaggaguaccugaacaagauccagaacagccucuccaccgaguggagccccugcuccgugaccugcgggaacggcauccaggugcggaucaagcccgggagcgccaacaagccgaaggacgagcuggacuacgccaacgacaucgagaagaagaucugcaagauggagaagugcuccagcgucuucaacguggugaacuccagcaucggccugggccccgucacgaacauggagaacaucaccuccggguuccucggcccccugcuggugcuccaggccggguucuuccugcugacccgcauccucaccaucccccagagccuggacuccugguggacgagccugaacuuccucggcggguccccggugugccugggccagaacagccagucccccaccagcaaccacucccccaccagcugcccgcccaucugccccggcuaccgguggaugugccugcgccgguucaucaucuuccucuucauccugcugcucugccugaucuuccugcucguccugcuggacuaccaggggaugcuccccgugugcccgcugauccccggcagcaccacgaccaacaccgggcccugcaagaccugcacgacccccgcccagggcaacuccauguucccgagcugcugcugcaccaagcccaccgacggcaacugcacgugcauccccauccccuccagcugggcguucgccaaguaccugugggagugggccuccgugcgcuucagcuggcucucccugcuggucccguucgugcagugguucguggggcucagccccaccgucuggcuguccgccaucuggaugaugugguacuggggccccagccuguacuccaucgugagccccuucaucccgcuccugcccaucuucuucugccuguggguguacaucugaggacuagucccuguucccagagcccacuuuuuuuucuuuuuuugaaauaaaauagccugucuuucagaucucaaaggcucuuuucagagccaccaaaaaaaaaaaaaaaaaaaaaaaaaaaaaaaaaaaaaaaaaaaaaaaaaaaaaaaaaaaaaaaaaaaaaaaaaaaaaaaaaaaaaaaaaaaaaaaaaaaaa

SEQ ID NO: 8299 - RNA, 828 nt, Artificial Sequence
  mRNA Design a-3 (hSL-A100) comprising derived and/or modified sequence from Pf(3D7)__XP_001351122.1__HsALB_Pf-CSP(19-152) (opt1)
aggagagggcgcuuggcuugcaaggacccugagcugcggcauugaagcacacccaacccaacucgacugaagucagccucacugaaccggaucugagaaucuucucucucugggcuugccagggcucuccgaaccuagcuagcauccucuucaauuccaacuagaaagcuuaccaugaagugggugaccuucaucagccuccuguuccuguucuccagcgccuacucccuguuccaggaguaccagugcuacggcagcuccagcaacacccgcguccucaacgagcugaacuacgacaacgccgggacgaaccuguacaacgagcucgagaugaacuacuacggcaagcaggagaacugguacucccugaagaagaacagccggucccugggggagaacgacgacggcaacaacgaggacaacgagaagcuccgcaagcccaagcacaagaagcugaagcagccggcggacgggaaccccgaccccaacgccaaccccaacguggacccgaacgccaaccccaacguggaccccaacgccaaccccaacgucgacccgaacgccaaccccaacgcgaaccccaacgccaaccccaacgccaacccgaacgccaaccccaacgcgaaccccugaggacuagucccuguucccagagcccacuuuuuuuucuuuuuuugaaauaaaauagccugucuuucagaucucaaaggcucuuuucagagccaccaaaaaaaaaaaaaaaaaaaaaaaaaaaaaaaaaaaaaaaaaaaaaaaaaaaaaaaaaaaaaaaaaaaaaaaaaaaaaaaaaaaaaaaaaaaaaaaaaaaaa

SEQ ID NO: 8300 - RNA, 948 nt, Artificial Sequence
  mRNA Design a-3 (hSL-A100) comprising derived and/or modified sequence from Pf(3D7)__XP_001351122.1__HsALB_Pf-CSP(19-192) (opt1)
aggagagggcgcuuggcuugcaaggacccugagcugcggcauugaagcacacccaacccaacucgacugaagucagccucacugaaccggaucugagaaucuucucucucugggcuugccagggcucuccgaaccuagcuagcauccucuucaauuccaacuagaaagcuuaccaugaagugggugaccuucaucagccuccuguuccuguucuccagcgccuacucccuguuccaggaguaccagugcuacggcagcuccagcaacacccgcguccucaacgagcugaacuacgacaacgccgggacgaaccuguacaacgagcucgagaugaacuacuacggcaagcaggagaacugguacucccugaagaagaacagccggucccugggggagaacgacgacggcaacaacgaggacaacgagaagcuccgcaagcccaagcacaagaagcugaagcagccggcggacgggaaccccgaccccaacgccaaccccaacguggacccgaacgccaaccccaacguggaccccaacgccaaccccaacgucgacccgaacgccaaccccaacgcgaaccccaacgccaaccccaacgccaacccgaacgccaaccccaacgcgaaccccaacgccaaccccaacgccaacccgaacgccaaccccaacgccaaccccaacgcgaaccccaacgccaacccgaacgccaaccccaacgccaaccccaacgccaaccccaacgcgaacccgugaggacuagucccuguucccagagcccacuuuuuuuucuuuuuuugaaauaaaauagccugucuuucagaucucaaaggcucuuuucagagccaccaaaaaaaaaaaaaaaaaaaaaaaaaaaaaaaaaaaaaaaaaaaaaaaaaaaaaaaaaaaaaaaaaaaaaaaaaaaaaaaaaaaaaaaaaaaaaaaaaaaaa

SEQ ID NO: 8301 - RNA, 1188 nt, Artificial Sequence
  mRNA Design a-3 (hSL-A100) comprising derived and/or modified sequence from Pf(3D7)__XP_001351122.1__HsALB_Pf-CSP(19-272) (opt1)
aggagagggcgcuuggcuugcaaggacccugagcugcggcauugaagcacacccaacccaacucgacugaagucagccucacugaaccggaucugagaaucuucucucucugggcuugccagggcucuccgaaccuagcuagcauccucuucaauuccaacuagaaagcuuaccaugaagugggugaccuucaucagccuccuguuccuguucuccagcgccuacucccuguuccaggaguaccagugcuacggcagcuccagcaacacccgcguccucaacgagcugaacuacgacaacgccgggacgaaccuguacaacgagcucgagaugaacuacuacggcaagcaggagaacugguacucccugaagaagaacagccggucccugggggagaacgacgacggcaacaacgaggacaacgagaagcuccgcaagcccaagcacaagaagcugaagcagccggcggacgggaaccccgaccccaacgccaaccccaacguggacccgaacgccaaccccaacguggaccccaacgccaaccccaacgucgacccgaacgccaaccccaacgcgaaccccaacgccaaccccaacgccaacccgaacgccaaccccaacgcgaaccccaacgccaaccccaacgccaacccgaacgccaaccccaacgccaaccccaacgcgaaccccaacgccaacccgaacgccaaccccaacgccaaccccaacgccaaccccaacgcgaacccgaacgccaaccccaacguggaccccaacgccaaccccaacgccaacccgaacgccaaccccaacgcgaaccccaacgccaacccgaacgccaaccccaacgccaaccccaacgccaaccccaacgcgaacccgaacgccaaccccaacgccaaccccaacgccaaccccaacgcgaacccgaacgccaaccccaacgccaaccccaacgccaaccccaacgccaacccgaacgcgaaccccugaggacuagucccuguucccagagcccacuuuuuuuucuuuuuuugaaauaaaauagccugucuuucagaucucaaaggcucuuuucagagccaccaaaaaaaaaaaaaaaaaaaaaaaaaaaaaaaaaaaaaaaaaaaaaaaaaaaaaaaaaaaaaaaaaaaaaaaaaaaaaaaaaaaaaaaaaaaaaaaaaaaaa

SEQ ID NO: 8302 - RNA, 1350 nt, Artificial Sequence
  mRNA Design a-3 (hSL-A100) comprising derived and/or modified sequence from Pf(3D7)__XP_001351122.1__HsALB_Pf-CSP(19-272)_L(AAY)_Pf-CSP(310-3 27)_L(AAY)_Pf-CSP(346-375) (opt1)
aggagagggcgcuuggcuugcaaggacccugagcugcggcauugaagcacacccaacccaacucgacugaagucagccucacugaaccggaucugagaaucuucucucucugggcuugccagggcucuccgaaccuagcuagcauccucuucaauuccaacuagaaagcuuaccaugaagugggugaccuucaucagccuccuguuccuguucuccagcgccuacucccuguuccaggaguaccagugcuacggcagcuccagcaacacccgcguccucaacgagcugaacuacgacaacgccgggacgaaccuguacaacgagcucgagaugaacuacuacggcaagcaggagaacugguacucccugaagaagaacagccggucccugggggagaacgacgacggcaacaacgaggacaacgagaagcuccgcaagcccaagcacaagaagcugaagcagccggcggacgggaaccccgaccccaacgccaaccccaacguggacccgaacgccaaccccaacguggaccccaacgccaaccccaacgucgacccgaacgccaaccccaacgcgaaccccaacgccaaccccaacgccaacccgaacgccaaccccaacgcgaaccccaacgccaaccccaacgccaacccgaacgccaaccccaacgccaaccccaacgcgaaccccaacgccaacccgaacgccaaccccaacgccaaccccaacgccaaccccaacgcgaacccgaacgccaaccccaacguggaccccaacgccaaccccaacgccaacccgaacgccaaccccaacgcgaaccccaacgccaacccgaacgccaaccccaacgccaaccccaacgccaaccccaacgcgaacccgaacgccaaccccaacgccaaccccaacgccaaccccaacgcgaacccgaacgccaaccccaacgccaaccccaacgccaaccccaacgccaacccgaacgcgaaccccgccgccuacgagcccagcgacaagcacaucaaggaguaccugaacaagauccagaacucccucgccgccuacaucaagcccggcagcgcgaacaagccgaaggacgagcuggacuacgccaacgacaucgagaagaagaucugcaagauggagaagugcuccugaggacuagucccuguucccagagcccacuuuuuuuucuuuuuuugaaauaaaauagccugucuuucagaucucaaaggcucuuuucagagccaccaaaaaaaaaaaaaaaaaaaaaaaaaaaaaaaaaaaaaaaaaaaaaaaaaaaaaaaaaaaaaaaaaaaaaaaaaaaaaaaaaaaaaaaaaaaaaaaaaaaaa

SEQ ID NO: 8303 - RNA, 1311 nt, Artificial Sequence
  mRNA Design a-3 (hSL-A100) comprising derived and/or modified sequence from Pf(3D7)__XP_001351122.1__HsALB_Pf-CSP(19-272)_L(AAY)_Pf-CSP(346-3 65)_L(AAY)_P2 (opt1)
aggagagggcgcuuggcuugcaaggacccugagcugcggcauugaagcacacccaacccaacucgacugaagucagccucacugaaccggaucugagaaucuucucucucugggcuugccagggcucuccgaaccuagcuagcauccucuucaauuccaacuagaaagcuuaccaugaagugggugaccuucaucagccuccuguuccuguucuccagcgccuacucccuguuccaggaguaccagugcuacggcagcuccagcaacacccgcguccucaacgagcugaacuacgacaacgccgggacgaaccuguacaacgagcucgagaugaacuacuacggcaagcaggagaacugguacucccugaagaagaacagccggucccugggggagaacgacgacggcaacaacgaggacaacgagaagcuccgcaagcccaagcacaagaagcugaagcagccggcggacgggaaccccgaccccaacgccaaccccaacguggacccgaacgccaaccccaacguggaccccaacgccaaccccaacgucgacccgaacgccaaccccaacgcgaaccccaacgccaaccccaacgccaacccgaacgccaaccccaacgcgaaccccaacgccaaccccaacgccaacccgaacgccaaccccaacgccaaccccaacgcgaaccccaacgccaacccgaacgccaaccccaacgccaaccccaacgccaaccccaacgcgaacccgaacgccaaccccaacguggaccccaacgccaaccccaacgccaacccgaacgccaaccccaacgcgaaccccaacgccaacccgaacgccaaccccaacgccaaccccaacgccaaccccaacgcgaacccgaacgccaaccccaacgccaaccccaacgccaaccccaacgcgaacccgaacgccaaccccaacgccaaccccaacgccaaccccaacgccaacccgaacgcgaaccccgccgccuacaucaagcccggcagcgccaacaagcccaaggacgagcuggacuacgccaacgacaucgaggcggccuaccaguacaucaaggccaacuccaaguucaucggcaucaccgagcucugaggacuagucccuguucccagagcccacuuuuuuuucuuuuuuugaaauaaaauagccugucuuucagaucucaaaggcucuuuucagagccaccaaaaaaaaaaaaaaaaaaaaaaaaaaaaaaaaaaaaaaaaaaaaaaaaaaaaaaaaaaaaaaaaaaaaaaaaaaaaaaaaaaaaaaaaaaaaaaaaaaaaa

SEQ ID NO: 8304 - RNA, 1305 nt, Artificial Sequence
  mRNA Design a-3 (hSL-A100) comprising derived and/or modified sequence from Pf(3D7)__XP_001351122.1__HsALB_Pf-CSP(19-272)_L(AAY)_Pf-CSP(346-3 65)_L(AAY)_PADRE (opt1)
aggagagggcgcuuggcuugcaaggacccugagcugcggcauugaagcacacccaacccaacucgacugaagucagccucacugaaccggaucugagaaucuucucucucugggcuugccagggcucuccgaaccuagcuagcauccucuucaauuccaacuagaaagcuuaccaugaagugggugaccuucaucagccuccuguuccuguucuccagcgccuacucccuguuccaggaguaccagugcuacggcagcuccagcaacacccgcguccucaacgagcugaacuacgacaacgccgggacgaaccuguacaacgagcucgagaugaacuacuacggcaagcaggagaacugguacucccugaagaagaacagccggucccugggggagaacgacgacggcaacaacgaggacaacgagaagcuccgcaagcccaagcacaagaagcugaagcagccggcggacgggaaccccgaccccaacgccaaccccaacguggacccgaacgccaaccccaacguggaccccaacgccaaccccaacgucgacccgaacgccaaccccaacgcgaaccccaacgccaaccccaacgccaacccgaacgccaaccccaacgcgaaccccaacgccaaccccaacgccaacccgaacgccaaccccaacgccaaccccaacgcgaaccccaacgccaacccgaacgccaaccccaacgccaaccccaacgccaaccccaacgcgaacccgaacgccaaccccaacguggaccccaacgccaaccccaacgccaacccgaacgccaaccccaacgcgaaccccaacgccaacccgaacgccaaccccaacgccaaccccaacgccaaccccaacgcgaacccgaacgccaaccccaacgccaaccccaacgccaaccccaacgcgaacccgaacgccaaccccaacgccaaccccaacgccaaccccaacgccaacccgaacgcgaaccccgccgccuacaucaagcccggcagcgccaacaagcccaaggacgagcuggacuacgccaacgacaucgaggcggccuacgccaaguucguggccgccuggacccucaaggcggccgccugaggacuagucccuguucccagagcccacuuuuuuuucuuuuuuugaaauaaaauagccugucuuucagaucucaaaggcucuuuucagagccaccaaaaaaaaaaaaaaaaaaaaaaaaaaaaaaaaaaaaaaaaaaaaaaaaaaaaaaaaaaaaaaaaaaaaaaaaaaaaaaaaaaaaaaaaaaaaaaaaaaaaa

SEQ ID NO: 8305 - RNA, 1362 nt, Artificial Sequence
  mRNA Design a-3 (hSL-A100) comprising derived and/or modified sequence from Pf(3D7)__XP_001351122.1__HsALB_Pf-CSP(19-272)_L(G4S)_Pf-CSP(310-3 27)_L(G4S)_Pf-CSP(346-375) (opt1)
aggagagggcgcuuggcuugcaaggacccugagcugcggcauugaagcacacccaacccaacucgacugaagucagccucacugaaccggaucugagaaucuucucucucugggcuugccagggcucuccgaaccuagcuagcauccucuucaauuccaacuagaaagcuuaccaugaagugggugaccuucaucagccuccuguuccuguucuccagcgccuacucccuguuccaggaguaccagugcuacggcagcuccagcaacacccgcguccucaacgagcugaacuacgacaacgccgggacgaaccuguacaacgagcucgagaugaacuacuacggcaagcaggagaacugguacucccugaagaagaacagccggucccugggggagaacgacgacggcaacaacgaggacaacgagaagcuccgcaagcccaagcacaagaagcugaagcagccggcggacgggaaccccgaccccaacgccaaccccaacguggacccgaacgccaaccccaacguggaccccaacgccaaccccaacgucgacccgaacgccaaccccaacgcgaaccccaacgccaaccccaacgccaacccgaacgccaaccccaacgcgaaccccaacgccaaccccaacgccaacccgaacgccaaccccaacgccaaccccaacgcgaaccccaacgccaacccgaacgccaaccccaacgccaaccccaacgccaaccccaacgcgaacccgaacgccaaccccaacguggaccccaacgccaaccccaacgccaacccgaacgccaaccccaacgcgaaccccaacgccaacccgaacgccaaccccaacgccaaccccaacgccaaccccaacgcgaacccgaacgccaaccccaacgccaaccccaacgccaaccccaacgcgaacccgaacgccaaccccaacgccaaccccaacgccaaccccaacgccaacccgaacgcgaaccccggcggcgggggcagcgagcccuccgacaagcacaucaaggaguaccugaacaagauccagaacagccucgggggcgggggcuccaucaagcccggcagcgccaacaagccgaaggacgagcuggacuacgccaacgacaucgagaagaagaucugcaagauggagaagugcuccugaggacuagucccuguucccagagcccacuuuuuuuucuuuuuuugaaauaaaauagccugucuuucagaucucaaaggcucuuuucagagccaccaaaaaaaaaaaaaaaaaaaaaaaaaaaaaaaaaaaaaaaaaaaaaaaaaaaaaaaaaaaaaaaaaaaaaaaaaaaaaaaaaaaaaaaaaaaaaaaaaaaaa

SEQ ID NO: 8306 - RNA, 1347 nt, Artificial Sequence
  mRNA Design a-3 (hSL-A100) comprising derived and/or modified sequence from Pf(3D7)__XP_001351122.1__HsALB_Pf-CSP(19-272)_L(G4S)_Pf-CSP(310-3 27)_Pf-CSP(346-375) (opt1)
aggagagggcgcuuggcuugcaaggacccugagcugcggcauugaagcacacccaacccaacucgacugaagucagccucacugaaccggaucugagaaucuucucucucugggcuugccagggcucuccgaaccuagcuagcauccucuucaauuccaacuagaaagcuuaccaugaagugggugaccuucaucagccuccuguuccuguucuccagcgccuacucccuguuccaggaguaccagugcuacggcagcuccagcaacacccgcguccucaacgagcugaacuacgacaacgccgggacgaaccuguacaacgagcucgagaugaacuacuacggcaagcaggagaacugguacucccugaagaagaacagccggucccugggggagaacgacgacggcaacaacgaggacaacgagaagcuccgcaagcccaagcacaagaagcugaagcagccggcggacgggaaccccgaccccaacgccaaccccaacguggacccgaacgccaaccccaacguggaccccaacgccaaccccaacgucgacccgaacgccaaccccaacgcgaaccccaacgccaaccccaacgccaacccgaacgccaaccccaacgcgaaccccaacgccaaccccaacgccaacccgaacgccaaccccaacgccaaccccaacgcgaaccccaacgccaacccgaacgccaaccccaacgccaaccccaacgccaaccccaacgcgaacccgaacgccaaccccaacguggaccccaacgccaaccccaacgccaacccgaacgccaaccccaacgcgaaccccaacgccaacccgaacgccaaccccaacgccaaccccaacgccaaccccaacgcgaacccgaacgccaaccccaacgccaaccccaacgccaaccccaacgcgaacccgaacgccaaccccaacgccaaccccaacgccaaccccaacgccaacccgaacgcgaaccccggcggcgggggcagcgagcccuccgacaagcacaucaaggaguaccugaacaagauccagaacagccucaucaagcccggguccgccaacaagccgaaggacgagcuggacuacgccaacgacaucgagaagaagaucugcaagauggagaagugcagcugaggacuagucccuguucccagagcccacuuuuuuuucuuuuuuugaaauaaaauagccugucuuucagaucucaaaggcucuuuucagagccaccaaaaaaaaaaaaaaaaaaaaaaaaaaaaaaaaaaaaaaaaaaaaaaaaaaaaaaaaaaaaaaaaaaaaaaaaaaaaaaaaaaaaaaaaaaaaaaaaaaaaa

SEQ ID NO: 8307 - RNA, 1347 nt, Artificial Sequence
  mRNA Design a-3 (hSL-A100) comprising derived and/or modified sequence from Pf(3D7)__XP_001351122.1__HsALB_Pf-CSP(19-325) (opt1)
aggagagggcgcuuggcuugcaaggacccugagcugcggcauugaagcacacccaacccaacucgacugaagucagccucacugaaccggaucugagaaucuucucucucugggcuugccagggcucuccgaaccuagcuagcauccucuucaauuccaacuagaaagcuuaccaugaagugggugaccuucaucagccuccuguuccuguucuccagcgccuacucccuguuccaggaguaccagugcuacggcagcuccagcaacacccgcguccucaacgagcugaacuacgacaacgccgggacgaaccuguacaacgagcucgagaugaacuacuacggcaagcaggagaacugguacucccugaagaagaacagccggucccugggggagaacgacgacggcaacaacgaggacaacgagaagcuccgcaagcccaagcacaagaagcugaagcagccggcggacgggaaccccgaccccaacgccaaccccaacguggacccgaacgccaaccccaacguggaccccaacgccaaccccaacgucgacccgaacgccaaccccaacgcgaaccccaacgccaaccccaacgccaacccgaacgccaaccccaacgcgaaccccaacgccaaccccaacgccaacccgaacgccaaccccaacgccaaccccaacgcgaaccccaacgccaacccgaacgccaaccccaacgccaaccccaacgccaaccccaacgcgaacccgaacgccaaccccaacguggaccccaacgccaaccccaacgccaacccgaacgccaaccccaacgcgaaccccaacgccaacccgaacgccaaccccaacgccaaccccaacgccaaccccaacgcgaacccgaacgccaaccccaacgccaaccccaacgccaaccccaacgcgaacccgaacgccaaccccaacgccaaccccaacgccaaccccaacgccaacccgaacgcgaaccccaacaagaacaaccagggcaacggccaggggcacaacaugcccaacgaccccaaccggaacguggacgagaacgccaacgccaacagcgccgucaagaacaacaacaacgaggagccguccgacaagcacaucaaggaguaccugaacaagauccagaacugaggacuagucccuguucccagagcccacuuuuuuuucuuuuuuugaaauaaaauagccugucuuucagaucucaaaggcucuuuucagagccaccaaaaaaaaaaaaaaaaaaaaaaaaaaaaaaaaaaaaaaaaaaaaaaaaaaaaaaaaaaaaaaaaaaaaaaaaaaaaaaaaaaaaaaaaaaaaaaaaaaaaa

SEQ ID NO: 8308 - RNA, 1524 nt, Artificial Sequence
  mRNA Design a-3 (hSL-A100) comprising derived and/or modified sequence from Pf(3D7)__XP_001351122.1__HsALB_Pf-CSP(19-384) (opt1)
aggagagggcgcuuggcuugcaaggacccugagcugcggcauugaagcacacccaacccaacucgacugaagucagccucacugaaccggaucugagaaucuucucucucugggcuugccagggcucuccgaaccuagcuagcauccucuucaauuccaacuagaaagcuuaccaugaagugggugaccuucaucagccuccuguuccuguucuccagcgccuacucccuguuccaggaguaccagugcuacggcagcuccagcaacacccgcguccucaacgagcugaacuacgacaacgccgggacgaaccuguacaacgagcucgagaugaacuacuacggcaagcaggagaacugguacucccugaagaagaacagccggucccugggggagaacgacgacggcaacaacgaggacaacgagaagcuccgcaagcccaagcacaagaagcugaagcagccggcggacgggaaccccgaccccaacgccaaccccaacguggacccgaacgccaaccccaacguggaccccaacgccaaccccaacgucgacccgaacgccaaccccaacgcgaaccccaacgccaaccccaacgccaacccgaacgccaaccccaacgcgaaccccaacgccaaccccaacgccaacccgaacgccaaccccaacgccaaccccaacgcgaaccccaacgccaacccgaacgccaaccccaacgccaaccccaacgccaaccccaacgcgaacccgaacgccaaccccaacguggaccccaacgccaaccccaacgccaacccgaacgccaaccccaacgcgaaccccaacgccaacccgaacgccaaccccaacgccaaccccaacgccaaccccaacgcgaacccgaacgccaaccccaacgccaaccccaacgccaaccccaacgcgaacccgaacgccaaccccaacgccaaccccaacgccaaccccaacgccaacccgaacgcgaaccccaacaagaacaaccagggcaacggccaggggcacaacaugcccaacgaccccaaccggaacguggacgagaacgccaacgccaacagcgccgucaagaacaacaacaacgaggagccguccgacaagcacaucaaggaguaccugaacaagauccagaacagccucuccaccgaguggagccccugcuccgugaccugcggcaacgggauccaggugcgcaucaagcccggcagcgccaacaagcccaaggacgagcuggacuacgcgaacgacaucgagaagaagaucugcaagauggagaagugcuccagcgucuucaacguggugaacuccagcugaggacuagucccuguucccagagcccacuuuuuuuucuuuuuuugaaauaaaauagccugucuuucagaucucaaaggcucuuuucagagccaccaaaaaaaaaaaaaaaaaaaaaaaaaaaaaaaaaaaaaaaaaaaaaaaaaaaaaaaaaaaaaaaaaaaaaaaaaaaaaaaaaaaaaaaaaaaaaaaaaaaaa

SEQ ID NO: 8309 - RNA, 1662 nt, Artificial Sequence
  mRNA Design a-3 (hSL-A100) comprising derived and/or modified sequence from Pf(3D7)__XP_001351122.1__HsALB_Pf-CSP(19-384)_TM domain HA (opt1)
aggagagggcgcuuggcuugcaaggacccugagcugcggcauugaagcacacccaacccaacucgacugaagucagccucacugaaccggaucugagaaucuucucucucugggcuugccagggcucuccgaaccuagcuagcauccucuucaauuccaacuagaaagcuuaccaugaagugggugaccuucaucagccuccuguuccuguucuccagcgccuacucccuguuccaggaguaccagugcuacggcagcuccagcaacacccgcguccucaacgagcugaacuacgacaacgccgggacgaaccuguacaacgagcucgagaugaacuacuacggcaagcaggagaacugguacucccugaagaagaacagccggucccugggggagaacgacgacggcaacaacgaggacaacgagaagcuccgcaagcccaagcacaagaagcugaagcagccggcggacgggaaccccgaccccaacgccaaccccaacguggacccgaacgccaaccccaacguggaccccaacgccaaccccaacgucgacccgaacgccaaccccaacgcgaaccccaacgccaaccccaacgccaacccgaacgccaaccccaacgcgaaccccaacgccaaccccaacgccaacccgaacgccaaccccaacgccaaccccaacgcgaaccccaacgccaacccgaacgccaaccccaacgccaaccccaacgccaaccccaacgcgaacccgaacgccaaccccaacguggaccccaacgccaaccccaacgccaacccgaacgccaaccccaacgcgaaccccaacgccaacccgaacgccaaccccaacgccaaccccaacgccaaccccaacgcgaacccgaacgccaaccccaacgccaaccccaacgccaaccccaacgcgaacccgaacgccaaccccaacgccaaccccaacgccaaccccaacgccaacccgaacgcgaaccccaacaagaacaaccagggcaacggccaggggcacaacaugcccaacgaccccaaccggaacguggacgagaacgccaacgccaacagcgccgucaagaacaacaacaacgaggagccguccgacaagcacaucaaggaguaccugaacaagauccagaacagccucuccaccgaguggagccccugcuccgugaccugcggcaacgggauccaggugcgcaucaagcccggcagcgccaacaagcccaaggacgagcuggacuacgcgaacgacaucgagaagaagaucugcaagauggagaagugcuccagcgucuucaacguggugaacuccagcaagcuggagagcacccggaucuaccagauccucgccaucuacuccacggucgccagcucccuggugcugguggucagccucggggccaucuccuucuggaugugcagcaacggcucccugcagugccgcaucugcaucugaggacuagucccuguucccagagcccacuuuuuuuucuuuuuuugaaauaaaauagccugucuuucagaucucaaaggcucuuuucagagccaccaaaaaaaaaaaaaaaaaaaaaaaaaaaaaaaaaaaaaaaaaaaaaaaaaaaaaaaaaaaaaaaaaaaaaaaaaaaaaaaaaaaaaaaaaaaaaaaaaaaaa

SEQ ID NO: 8310 - RNA, 1374 nt, Artificial Sequence
  mRNA Design a-3 (hSL-A100) comprising derived and/or modified sequence from Pf(3D7)__XP_001351122.1__HsALB_Pf-CSP(82-397) (opt1)
aggagagggcgcuuggcuugcaaggacccugagcugcggcauugaagcacacccaacccaacucgacugaagucagccucacugaaccggaucugagaaucuucucucucugggcuugccagggcucuccgaaccuagcuagcauccucuucaauuccaacuagaaagcuuaccaugaagugggugaccuucaucagccuccuguuccuguucuccagcgccuacuccgacaacgagaagcugcgcaagcccaagcacaagaagcucaagcagccggccgacggcaaccccgaccccaacgcgaaccccaacgucgacccgaacgccaaccccaacguggaccccaacgccaaccccaacguggacccgaacgccaaccccaacgccaaccccaacgcgaaccccaacgccaacccgaacgccaaccccaacgccaaccccaacgcgaaccccaacgccaacccgaacgccaaccccaacgccaaccccaacgccaaccccaacgcgaacccgaacgccaaccccaacgccaaccccaacgccaaccccaacgccaacccgaacgcgaaccccaacgucgaccccaacgccaaccccaacgccaacccgaacgccaaccccaacgccaaccccaacgcgaacccgaacgccaaccccaacgccaaccccaacgccaaccccaacgccaacccgaacgcgaaccccaacgccaaccccaacgccaaccccaacgccaacccgaacgcgaaccccaacgccaaccccaacgccaaccccaacgccaacccgaacgccaaccccaacaagaacaaccaggggaacggccaggggcacaacaugcccaacgaccccaaccggaacguggacgagaacgcgaacgccaacagcgccgugaagaacaacaacaacgaggagccguccgacaagcacaucaaggaguaccugaacaagauccagaacagccuguccaccgaguggagccccugcuccgucacgugcggcaacgggauccaggugcgcaucaagcccggcagcgccaacaagcccaaggacgagcucgacuacgccaacgacaucgagaagaagaucugcaagauggagaagugcuccagcguguucaacgucgugaacuccagcaucggccugaucauggugcuguccuuccucuuccugaacugaggacuagucccuguucccagagcccacuuuuuuuucuuuuuuugaaauaaaauagccugucuuucagaucucaaaggcucuuuucagagccaccaaaaaaaaaaaaaaaaaaaaaaaaaaaaaaaaaaaaaaaaaaaaaaaaaaaaaaaaaaaaaaaaaaaaaaaaaaaaaaaaaaaaaaaaaaaaaaaaaaaaa

SEQ ID NO: 8311 - RNA, 726 nt, Artificial Sequence
  mRNA Design a-3 (hSL-A100) comprising derived and/or modified sequence from Pf(3D7)__XP_001351122.1__HsALB_Pf-CSP(93-192) (opt1)
aggagagggcgcuuggcuugcaaggacccugagcugcggcauugaagcacacccaacccaacucgacugaagucagccucacugaaccggaucugagaaucuucucucucugggcuugccagggcucuccgaaccuagcuagcauccucuucaauuccaacuagaaagcuuaccaugaagugggugaccuucaucagccuccuguuccuguucuccagcgccuacuccaagcugaagcagcccgccgacggcaacccggaccccaacgcgaaccccaacgucgaccccaacgccaacccgaacguggaccccaacgccaaccccaacguggaccccaacgccaacccgaacgccaaccccaacgcgaaccccaacgccaaccccaacgccaacccgaacgccaaccccaacgcgaaccccaacgccaaccccaacgccaacccgaacgccaaccccaacgccaaccccaacgcgaaccccaacgccaacccgaacgccaaccccaacgccaaccccaacgccaaccccugaggacuagucccuguucccagagcccacuuuuuuuucuuuuuuugaaauaaaauagccugucuuucagaucucaaaggcucuuuucagagccaccaaaaaaaaaaaaaaaaaaaaaaaaaaaaaaaaaaaaaaaaaaaaaaaaaaaaaaaaaaaaaaaaaaaaaaaaaaaaaaaaaaaaaaaaaaaaaaaaaaaaa

SEQ ID NO: 8312 - RNA, 966 nt, Artificial Sequence
  mRNA Design a-3 (hSL-A100) comprising derived and/or modified sequence from Pf(3D7)__XP_001351122.1__HsALB_Pf-CSP(93-272) (opt1)
aggagagggcgcuuggcuugcaaggacccugagcugcggcauugaagcacacccaacccaacucgacugaagucagccucacugaaccggaucugagaaucuucucucucugggcuugccagggcucuccgaaccuagcuagcauccucuucaauuccaacuagaaagcuuaccaugaagugggugaccuucaucagccuccuguuccuguucuccagcgccuacuccaagcugaagcagcccgccgacggcaacccggaccccaacgcgaaccccaacgucgaccccaacgccaacccgaacguggaccccaacgccaaccccaacguggaccccaacgccaacccgaacgccaaccccaacgcgaaccccaacgccaaccccaacgccaacccgaacgccaaccccaacgcgaaccccaacgccaaccccaacgccaacccgaacgccaaccccaacgccaaccccaacgcgaaccccaacgccaacccgaacgccaaccccaacgccaaccccaacgccaaccccaacgcgaacccgaacgucgaccccaacgccaaccccaacgccaaccccaacgccaacccgaacgccaaccccaacgcgaaccccaacgccaacccgaacgccaaccccaacgccaaccccaacgccaaccccaacgcgaacccgaacgccaaccccaacgccaaccccaacgccaaccccaacgcgaacccgaacgccaaccccaacgccaaccccaacgccaaccccaacgccaacccgugaggacuagucccuguucccagagcccacuuuuuuuucuuuuuuugaaauaaaauagccugucuuucagaucucaaaggcucuuuucagagccaccaaaaaaaaaaaaaaaaaaaaaaaaaaaaaaaaaaaaaaaaaaaaaaaaaaaaaaaaaaaaaaaaaaaaaaaaaaaaaaaaaaaaaaaaaaaaaaaaaaaaa

SEQ ID NO: 8313 - RNA, 1341 nt, Artificial Sequence
  mRNA Design a-3 (hSL-A100) comprising derived and/or modified sequence from Pf(3D7)__XP_001351122.1__HsALB_Pf-CSP(93-397) (opt1)
aggagagggcgcuuggcuugcaaggacccugagcugcggcauugaagcacacccaacccaacucgacugaagucagccucacugaaccggaucugagaaucuucucucucugggcuugccagggcucuccgaaccuagcuagcauccucuucaauuccaacuagaaagcuuaccaugaagugggugaccuucaucagccuccuguuccuguucuccagcgccuacuccaagcugaagcagcccgccgacggcaacccggaccccaacgcgaaccccaacgucgaccccaacgccaacccgaacguggaccccaacgccaaccccaacguggaccccaacgccaacccgaacgccaaccccaacgcgaaccccaacgccaaccccaacgccaacccgaacgccaaccccaacgcgaaccccaacgccaaccccaacgccaacccgaacgccaaccccaacgccaaccccaacgcgaaccccaacgccaacccgaacgccaaccccaacgccaaccccaacgccaaccccaacgcgaacccgaacgucgaccccaacgccaaccccaacgccaaccccaacgccaacccgaacgccaaccccaacgcgaaccccaacgccaacccgaacgccaaccccaacgccaaccccaacgccaaccccaacgcgaacccgaacgccaaccccaacgccaaccccaacgccaaccccaacgcgaacccgaacgccaaccccaacgccaaccccaacgccaaccccaacgccaacccgaacaagaacaaccaggggaacggccaggggcacaacaugcccaacgaccccaaccgcaacguggacgagaacgcgaacgccaacagcgccgugaagaacaacaacaacgaggagcccuccgacaagcacaucaaggaguaccucaacaagauccagaacagccuguccaccgaguggagcccgugcuccgucacgugcggcaacgggauccaggugcggaucaagcccggcagcgccaacaagcccaaggacgagcuggacuacgccaacgacaucgagaagaagaucugcaagauggagaagugcuccagcguguucaacgucgugaacuccagcaucggccucaucauggugcuguccuuccuguuccucaacugaggacuagucccuguucccagagcccacuuuuuuuucuuuuuuugaaauaaaauagccugucuuucagaucucaaaggcucuuuucagagccaccaaaaaaaaaaaaaaaaaaaaaaaaaaaaaaaaaaaaaaaaaaaaaaaaaaaaaaaaaaaaaaaaaaaaaaaaaaaaaaaaaaaaaaaaaaaaaaaaaaaaa

SEQ ID NO: 8314 - RNA, 711 nt, Artificial Sequence
  mRNA Design a-3 (hSL-A100) comprising derived and/or modified sequence from Pf(3D7)__XP_001351122.1__HsALB_Pf-CSP(98-192) (opt1)
aggagagggcgcuuggcuugcaaggacccugagcugcggcauugaagcacacccaacccaacucgacugaagucagccucacugaaccggaucugagaaucuucucucucugggcuugccagggcucuccgaaccuagcuagcauccucuucaauuccaacuagaaagcuuaccaugaagugggugaccuucaucagccuccuguuccuguucuccagcgccuacuccgccgacggcaaccccgacccgaacgcgaaccccaacgucgaccccaacgccaaccccaacguggacccgaacgccaaccccaacguggaccccaacgccaaccccaacgccaacccgaacgcgaaccccaacgccaaccccaacgccaaccccaacgccaacccgaacgcgaaccccaacgccaaccccaacgccaaccccaacgccaacccgaacgccaaccccaacgcgaaccccaacgccaaccccaacgccaacccgaacgccaaccccaacgccaaccccugaggacuagucccuguucccagagcccacuuuuuuuucuuuuuuugaaauaaaauagccugucuuucagaucucaaaggcucuuuucagagccaccaaaaaaaaaaaaaaaaaaaaaaaaaaaaaaaaaaaaaaaaaaaaaaaaaaaaaaaaaaaaaaaaaaaaaaaaaaaaaaaaaaaaaaaaaaaaaaaaaaaaa

SEQ ID NO: 8315 - RNA, 951 nt, Artificial Sequence
  mRNA Design a-3 (hSL-A100) comprising derived and/or modified sequence from Pf(3D7)__XP_001351122.1__HsALB_Pf-CSP(98-272) (opt1)
aggagagggcgcuuggcuugcaaggacccugagcugcggcauugaagcacacccaacccaacucgacugaagucagccucacugaaccggaucugagaaucuucucucucugggcuugccagggcucuccgaaccuagcuagcauccucuucaauuccaacuagaaagcuuaccaugaagugggugaccuucaucagccuccuguuccuguucuccagcgccuacuccgccgacggcaaccccgacccgaacgcgaaccccaacgucgaccccaacgccaaccccaacguggacccgaacgccaaccccaacguggaccccaacgccaaccccaacgccaacccgaacgcgaaccccaacgccaaccccaacgccaaccccaacgccaacccgaacgcgaaccccaacgccaaccccaacgccaaccccaacgccaacccgaacgccaaccccaacgcgaaccccaacgccaaccccaacgccaacccgaacgccaaccccaacgccaaccccaacgcgaaccccaacgucgacccgaacgccaaccccaacgccaaccccaacgccaaccccaacgccaacccgaacgcgaaccccaacgccaaccccaacgccaacccgaacgccaaccccaacgccaaccccaacgcgaaccccaacgccaacccgaacgccaaccccaacgccaaccccaacgcgaaccccaacgccaacccgaacgccaaccccaacgccaaccccaacgccaaccccugaggacuagucccuguucccagagcccacuuuuuuuucuuuuuuugaaauaaaauagccugucuuucagaucucaaaggcucuuuucagagccaccaaaaaaaaaaaaaaaaaaaaaaaaaaaaaaaaaaaaaaaaaaaaaaaaaaaaaaaaaaaaaaaaaaaaaaaaaaaaaaaaaaaaaaaaaaaaaaaaaaaaa

SEQ ID NO: 8316 - RNA, 1257 nt, Artificial Sequence
  mRNA Design a-3 (hSL-A100) comprising derived and/or modified sequence from Pf(3D7)__XP_001351122.1__HsALB_Pf-CSP(98-374) (opt1)
aggagagggcgcuuggcuugcaaggacccugagcugcggcauugaagcacacccaacccaacucgacugaagucagccucacugaaccggaucugagaaucuucucucucugggcuugccagggcucuccgaaccuagcuagcauccucuucaauuccaacuagaaagcuuaccaugaagugggugaccuucaucagccuccuguuccuguucuccagcgccuacuccgccgacggcaaccccgacccgaacgcgaaccccaacgucgaccccaacgccaaccccaacguggacccgaacgccaaccccaacguggaccccaacgccaaccccaacgccaacccgaacgcgaaccccaacgccaaccccaacgccaaccccaacgccaacccgaacgcgaaccccaacgccaaccccaacgccaaccccaacgccaacccgaacgccaaccccaacgcgaaccccaacgccaaccccaacgccaacccgaacgccaaccccaacgccaaccccaacgcgaaccccaacgucgacccgaacgccaaccccaacgccaaccccaacgccaaccccaacgccaacccgaacgcgaaccccaacgccaaccccaacgccaacccgaacgccaaccccaacgccaaccccaacgcgaaccccaacgccaacccgaacgccaaccccaacgccaaccccaacgcgaaccccaacgccaacccgaacgccaaccccaacgccaaccccaacgccaaccccaacaagaacaaccaggggaacggccaggggcacaacaugccgaacgaccccaaccgcaacguggacgagaacgcgaacgccaacagcgccgugaagaacaacaacaacgaggagcccuccgacaagcacaucaaggaguaccugaacaagauccagaacagccucuccaccgaguggagccccugcuccgucacgugcggcaacgggauccaggugcggaucaagccgggcagcgccaacaagcccaaggacgagcuggacuacgccaacgacaucgagaagaagaucugcaagauggagaagugcugaggacuagucccuguucccagagcccacuuuuuuuucuuuuuuugaaauaaaauagccugucuuucagaucucaaaggcucuuuucagagccaccaaaaaaaaaaaaaaaaaaaaaaaaaaaaaaaaaaaaaaaaaaaaaaaaaaaaaaaaaaaaaaaaaaaaaaaaaaaaaaaaaaaaaaaaaaaaaaaaaaaaa

SEQ ID NO: 8317 - RNA, 1326 nt, Artificial Sequence
  mRNA Design a-3 (hSL-A100) comprising derived and/or modified sequence from Pf(3D7)__XP_001351122.1__HsALB_Pf-CSP(98-397) (opt1)
aggagagggcgcuuggcuugcaaggacccugagcugcggcauugaagcacacccaacccaacucgacugaagucagccucacugaaccggaucugagaaucuucucucucugggcuugccagggcucuccgaaccuagcuagcauccucuucaauuccaacuagaaagcuuaccaugaagugggugaccuucaucagccuccuguuccuguucuccagcgccuacuccgccgacggcaaccccgacccgaacgcgaaccccaacgucgaccccaacgccaaccccaacguggacccgaacgccaaccccaacguggaccccaacgccaaccccaacgccaacccgaacgcgaaccccaacgccaaccccaacgccaaccccaacgccaacccgaacgcgaaccccaacgccaaccccaacgccaaccccaacgccaacccgaacgccaaccccaacgcgaaccccaacgccaaccccaacgccaacccgaacgccaaccccaacgccaaccccaacgcgaaccccaacgucgacccgaacgccaaccccaacgccaaccccaacgccaaccccaacgccaacccgaacgcgaaccccaacgccaaccccaacgccaacccgaacgccaaccccaacgccaaccccaacgcgaaccccaacgccaacccgaacgccaaccccaacgccaaccccaacgcgaaccccaacgccaacccgaacgccaaccccaacgccaaccccaacgccaaccccaacaagaacaaccaggggaacggccaggggcacaacaugccgaacgaccccaaccgcaacguggacgagaacgcgaacgccaacagcgccgugaagaacaacaacaacgaggagcccuccgacaagcacaucaaggaguaccugaacaagauccagaacagccucuccaccgaguggagccccugcuccgucacgugcggcaacgggauccaggugcggaucaagccgggcagcgccaacaagcccaaggacgagcuggacuacgccaacgacaucgagaagaagaucugcaagauggagaagugcuccagcguguucaacgucgugaacuccagcaucggccugaucauggugcucuccuuccuguuccugaacugaggacuagucccuguucccagagcccacuuuuuuuucuuuuuuugaaauaaaauagccugucuuucagaucucaaaggcucuuuucagagccaccaaaaaaaaaaaaaaaaaaaaaaaaaaaaaaaaaaaaaaaaaaaaaaaaaaaaaaaaaaaaaaaaaaaaaaaaaaaaaaaaaaaaaaaaaaaaaaaaaaaaa

SEQ ID NO: 8318 - RNA, 1653 nt, Artificial Sequence
  mRNA Design a-3 (hSL-A100) comprising derived and/or modified sequence from Pf(3D7)__XP_001351122.1__HsALB_Pf-CSP(199-377)_L(PVTN)_HBsAg (opt1)
aggagagggcgcuuggcuugcaaggacccugagcugcggcauugaagcacacccaacccaacucgacugaagucagccucacugaaccggaucugagaaucuucucucucugggcuugccagggcucuccgaaccuagcuagcauccucuucaauuccaacuagaaagcuuaccaugaagugggugaccuucaucagccuccuguuccuguucuccagcgccuacuccgaccccaacgccaacccgaacgcgaaccccaacgccaaccccaacgccaaccccaacgccaacccgaacgccaaccccaacgcgaaccccaacgccaaccccaacgccaacccgaacgccaaccccaacgcgaaccccaacgccaaccccaacgccaacccgaacgccaaccccaacgccaaccccaacgcgaaccccaacgccaacccgaacgccaaccccaacaagaacaaccagggcaacgggcagggccacaacaugcccaacgaccccaaccgcaacgucgacgagaacgccaacgccaacagcgcggugaagaacaacaacaacgaggagccguccgacaagcacaucaaggaguaccugaacaagauccagaacagccucuccaccgaguggagccccugcuccgugaccugcgggaacggcauccagguccggaucaagcccgggagcgccaacaagcccaaggacgagcuggacuacgccaacgacaucgagaagaagaucugcaagauggagaagugcuccagcgugccggugaccaacauggagaacaucaccuccggcuuccugggcccccuccugguccugcaggccggguucuuccuccugacccgcauccugacgaucccccagagccucgacuccugguggaccagccugaacuuccugggcgggucccccgugugccucggccagaacagccaguccccgaccagcaaccacagccccaccuccugcccgcccaucugccccggguaccgguggaugugccugcgccgguucaucaucuuccuguucauccuccugcugugccucaucuuccugcuggugcuccuggacuaccagggcaugcugcccgucugcccccucaucccgggcagcacgaccaccaacaccgggcccugcaagacgugcaccacccccgcccagggcaacuccauguuccccagcugcugcugcaccaagccgacggacgggaacugcacgugcauccccauccccuccagcugggcguucgccaaguaccugugggagugggccuccgugcgcuucagcuggcugucccuccuggugcccuucguccagugguucgugggccugagcccgaccguguggcucuccgccaucuggaugaugugguacuggggccccagccuguacuccaucgucagccccuucaucccccugcucccgaucuucuucugccuguggguguacaucugaggacuagucccuguucccagagcccacuuuuuuuucuuuuuuugaaauaaaauagccugucuuucagaucucaaaggcucuuuucagagccaccaaaaaaaaaaaaaaaaaaaaaaaaaaaaaaaaaaaaaaaaaaaaaaaaaaaaaaaaaaaaaaaaaaaaaaaaaaaaaaaaaaaaaaaaaaaaaaaaaaaaa

SEQ ID NO: 8319 - RNA, 1563 nt, Artificial Sequence
  mRNA Design a-3 (hSL-A100) comprising derived and/or modified sequence from Pf(3D7)__XP_001351122.1__Pf-CSP (opt2)
aggagagggcgcuuggcuugcaaggacccugagcugcggcauugaagcacacccaacccaacucgacugaagucagccucacugaaccggaucugagaaucuucucucucugggcuugccagggcucuccgaaccuagcuagcauccucuucaauuccaacuagaaagcuuaccaugaugcgcaagcucgccauccucuccgucuccuccuuccucuucgucgaggcccucuuccaggaguaccagugcuacggcuccuccuccaacacccgcguccucaacgagcucaacuacgacaacgccggcaccaaccucuacaacgagcucgagaugaacuacuacggcaagcaggagaacugguacucccucaagaagaacucccgcucccucggcgagaacgacgacggcaacaacgaggacaacgagaagcuccgcaagcccaagcacaagaagcucaagcagcccgccgacggcaaccccgaccccaacgccaaccccaacgucgaccccaacgccaaccccaacgucgaccccaacgccaaccccaacgucgaccccaacgccaaccccaacgccaaccccaacgccaaccccaacgccaaccccaacgccaaccccaacgccaaccccaacgccaaccccaacgccaaccccaacgccaaccccaacgccaaccccaacgccaaccccaacgccaaccccaacgccaaccccaacgccaaccccaacgccaaccccaacgccaaccccaacgccaaccccaacgucgaccccaacgccaaccccaacgccaaccccaacgccaaccccaacgccaaccccaacgccaaccccaacgccaaccccaacgccaaccccaacgccaaccccaacgccaaccccaacgccaaccccaacgccaaccccaacgccaaccccaacgccaaccccaacgccaaccccaacgccaaccccaacgccaaccccaacgccaaccccaacgccaaccccaacaagaacaaccagggcaacggccagggccacaacaugcccaacgaccccaaccgcaacgucgacgagaacgccaacgccaacuccgccgucaagaacaacaacaacgaggagcccuccgacaagcacaucaaggaguaccucaacaagauccagaacucccucuccaccgaguggucccccugcuccgucaccugcggcaacggcauccagguccgcaucaagcccggcuccgccaacaagcccaaggacgagcucgacuacgccaacgacaucgagaagaagaucugcaagauggagaagugcuccuccgucuucaacgucgucaacuccuccaucggccucaucaugguccucuccuuccucuuccucaacugaggacuagucccuguucccagagcccacuuuuuuuucuuuuuuugaaauaaaauagccugucuuucagaucucaaaggcucuuuucagagccaccaaaaaaaaaaaaaaaaaaaaaaaaaaaaaaaaaaaaaaaaaaaaaaaaaaaaaaaaaaaaaaaaaaaaaaaaaaaaaaaaaaaaaaaaaaaaaaaaaaaaa

SEQ ID NO: 8320 - RNA, 1494 nt, Artificial Sequence
  mRNA Design a-3 (hSL-A100) comprising derived and/or modified sequence from Pf(3D7)__XP_001351122.1__Pf-CSP(1-374) (opt2)
aggagagggcgcuuggcuugcaaggacccugagcugcggcauugaagcacacccaacccaacucgacugaagucagccucacugaaccggaucugagaaucuucucucucugggcuugccagggcucuccgaaccuagcuagcauccucuucaauuccaacuagaaagcuuaccaugaugcgcaagcucgccauccucuccgucuccuccuuccucuucgucgaggcccucuuccaggaguaccagugcuacggcuccuccuccaacacccgcguccucaacgagcucaacuacgacaacgccggcaccaaccucuacaacgagcucgagaugaacuacuacggcaagcaggagaacugguacucccucaagaagaacucccgcucccucggcgagaacgacgacggcaacaacgaggacaacgagaagcuccgcaagcccaagcacaagaagcucaagcagcccgccgacggcaaccccgaccccaacgccaaccccaacgucgaccccaacgccaaccccaacgucgaccccaacgccaaccccaacgucgaccccaacgccaaccccaacgccaaccccaacgccaaccccaacgccaaccccaacgccaaccccaacgccaaccccaacgccaaccccaacgccaaccccaacgccaaccccaacgccaaccccaacgccaaccccaacgccaaccccaacgccaaccccaacgccaaccccaacgccaaccccaacgccaaccccaacgccaaccccaacgucgaccccaacgccaaccccaacgccaaccccaacgccaaccccaacgccaaccccaacgccaaccccaacgccaaccccaacgccaaccccaacgccaaccccaacgccaaccccaacgccaaccccaacgccaaccccaacgccaaccccaacgccaaccccaacgccaaccccaacgccaaccccaacgccaaccccaacgccaaccccaacgccaaccccaacaagaacaaccagggcaacggccagggccacaacaugcccaacgaccccaaccgcaacgucgacgagaacgccaacgccaacuccgccgucaagaacaacaacaacgaggagcccuccgacaagcacaucaaggaguaccucaacaagauccagaacucccucuccaccgaguggucccccugcuccgucaccugcggcaacggcauccagguccgcaucaagcccggcuccgccaacaagcccaaggacgagcucgacuacgccaacgacaucgagaagaagaucugcaagauggagaagugcugaggacuagucccuguucccagagcccacuuuuuuuucuuuuuuugaaauaaaauagccugucuuucagaucucaaaggcucuuuucagagccaccaaaaaaaaaaaaaaaaaaaaaaaaaaaaaaaaaaaaaaaaaaaaaaaaaaaaaaaaaaaaaaaaaaaaaaaaaaaaaaaaaaaaaaaaaaaaaaaaaaaaa

SEQ ID NO: 8321 - RNA, 1347 nt, Artificial Sequence
  mRNA Design a-3 (hSL-A100) comprising derived and/or modified sequence from Pf(3D7)__XP_001351122.1__Pf-CSP(1-325) (opt2)
aggagagggcgcuuggcuugcaaggacccugagcugcggcauugaagcacacccaacccaacucgacugaagucagccucacugaaccggaucugagaaucuucucucucugggcuugccagggcucuccgaaccuagcuagcauccucuucaauuccaacuagaaagcuuaccaugaugcgcaagcucgccauccucuccgucuccuccuuccucuucgucgaggcccucuuccaggaguaccagugcuacggcuccuccuccaacacccgcguccucaacgagcucaacuacgacaacgccggcaccaaccucuacaacgagcucgagaugaacuacuacggcaagcaggagaacugguacucccucaagaagaacucccgcucccucggcgagaacgacgacggcaacaacgaggacaacgagaagcuccgcaagcccaagcacaagaagcucaagcagcccgccgacggcaaccccgaccccaacgccaaccccaacgucgaccccaacgccaaccccaacgucgaccccaacgccaaccccaacgucgaccccaacgccaaccccaacgccaaccccaacgccaaccccaacgccaaccccaacgccaaccccaacgccaaccccaacgccaaccccaacgccaaccccaacgccaaccccaacgccaaccccaacgccaaccccaacgccaaccccaacgccaaccccaacgccaaccccaacgccaaccccaacgccaaccccaacgccaaccccaacgucgaccccaacgccaaccccaacgccaaccccaacgccaaccccaacgccaaccccaacgccaaccccaacgccaaccccaacgccaaccccaacgccaaccccaacgccaaccccaacgccaaccccaacgccaaccccaacgccaaccccaacgccaaccccaacgccaaccccaacgccaaccccaacgccaaccccaacgccaaccccaacgccaaccccaacaagaacaaccagggcaacggccagggccacaacaugcccaacgaccccaaccgcaacgucgacgagaacgccaacgccaacuccgccgucaagaacaacaacaacgaggagcccuccgacaagcacaucaaggaguaccucaacaagauccagaacugaggacuagucccuguucccagagcccacuuuuuuuucuuuuuuugaaauaaaauagccugucuuucagaucucaaaggcucuuuucagagccaccaaaaaaaaaaaaaaaaaaaaaaaaaaaaaaaaaaaaaaaaaaaaaaaaaaaaaaaaaaaaaaaaaaaaaaaaaaaaaaaaaaaaaaaaaaaaaaaaaaaaa

SEQ ID NO: 8322 - RNA, 1563 nt, Artificial Sequence
  mRNA Design a-3 (hSL-A100) comprising derived and/or modified sequence from Pf(3D7)__XP_001351122.1__HsALB_Pf-CSP(19-397) (opt2)
aggagagggcgcuuggcuugcaaggacccugagcugcggcauugaagcacacccaacccaacucgacugaagucagccucacugaaccggaucugagaaucuucucucucugggcuugccagggcucuccgaaccuagcuagcauccucuucaauuccaacuagaaagcuuaccaugaagugggucaccuucaucucccuccucuuccucuucuccuccgccuacucccucuuccaggaguaccagugcuacggcuccuccuccaacacccgcguccucaacgagcucaacuacgacaacgccggcaccaaccucuacaacgagcucgagaugaacuacuacggcaagcaggagaacugguacucccucaagaagaacucccgcucccucggcgagaacgacgacggcaacaacgaggacaacgagaagcuccgcaagcccaagcacaagaagcucaagcagcccgccgacggcaaccccgaccccaacgccaaccccaacgucgaccccaacgccaaccccaacgucgaccccaacgccaaccccaacgucgaccccaacgccaaccccaacgccaaccccaacgccaaccccaacgccaaccccaacgccaaccccaacgccaaccccaacgccaaccccaacgccaaccccaacgccaaccccaacgccaaccccaacgccaaccccaacgccaaccccaacgccaaccccaacgccaaccccaacgccaaccccaacgccaaccccaacgccaaccccaacgucgaccccaacgccaaccccaacgccaaccccaacgccaaccccaacgccaaccccaacgccaaccccaacgccaaccccaacgccaaccccaacgccaaccccaacgccaaccccaacgccaaccccaacgccaaccccaacgccaaccccaacgccaaccccaacgccaaccccaacgccaaccccaacgccaaccccaacgccaaccccaacgccaaccccaacaagaacaaccagggcaacggccagggccacaacaugcccaacgaccccaaccgcaacgucgacgagaacgccaacgccaacuccgccgucaagaacaacaacaacgaggagcccuccgacaagcacaucaaggaguaccucaacaagauccagaacucccucuccaccgaguggucccccugcuccgucaccugcggcaacggcauccagguccgcaucaagcccggcuccgccaacaagcccaaggacgagcucgacuacgccaacgacaucgagaagaagaucugcaagauggagaagugcuccuccgucuucaacgucgucaacuccuccaucggccucaucaugguccucuccuuccucuuccucaacugaggacuagucccuguucccagagcccacuuuuuuuucuuuuuuugaaauaaaauagccugucuuucagaucucaaaggcucuuuucagagccaccaaaaaaaaaaaaaaaaaaaaaaaaaaaaaaaaaaaaaaaaaaaaaaaaaaaaaaaaaaaaaaaaaaaaaaaaaaaaaaaaaaaaaaaaaaaaaaaaaaaaa

SEQ ID NO: 8323 - RNA, 1581 nt, Artificial Sequence
  mRNA Design a-3 (hSL-A100) comprising derived and/or modified sequence from Pf(3D7)__XP_001351122.1__HsIns-iso1_Pf-CSP(19-397) (opt2)
aggagagggcgcuuggcuugcaaggacccugagcugcggcauugaagcacacccaacccaacucgacugaagucagccucacugaaccggaucugagaaucuucucucucugggcuugccagggcucuccgaaccuagcuagcauccucuucaauuccaacuagaaagcuuaccauggcccucuggaugcgccuccucccccuccucgcccuccucgcccucuggggccccgaccccgccgccgcccucuuccaggaguaccagugcuacggcuccuccuccaacacccgcguccucaacgagcucaacuacgacaacgccggcaccaaccucuacaacgagcucgagaugaacuacuacggcaagcaggagaacugguacucccucaagaagaacucccgcucccucggcgagaacgacgacggcaacaacgaggacaacgagaagcuccgcaagcccaagcacaagaagcucaagcagcccgccgacggcaaccccgaccccaacgccaaccccaacgucgaccccaacgccaaccccaacgucgaccccaacgccaaccccaacgucgaccccaacgccaaccccaacgccaaccccaacgccaaccccaacgccaaccccaacgccaaccccaacgccaaccccaacgccaaccccaacgccaaccccaacgccaaccccaacgccaaccccaacgccaaccccaacgccaaccccaacgccaaccccaacgccaaccccaacgccaaccccaacgccaaccccaacgccaaccccaacgucgaccccaacgccaaccccaacgccaaccccaacgccaaccccaacgccaaccccaacgccaaccccaacgccaaccccaacgccaaccccaacgccaaccccaacgccaaccccaacgccaaccccaacgccaaccccaacgccaaccccaacgccaaccccaacgccaaccccaacgccaaccccaacgccaaccccaacgccaaccccaacgccaaccccaacaagaacaaccagggcaacggccagggccacaacaugcccaacgaccccaaccgcaacgucgacgagaacgccaacgccaacuccgccgucaagaacaacaacaacgaggagcccuccgacaagcacaucaaggaguaccucaacaagauccagaacucccucuccaccgaguggucccccugcuccgucaccugcggcaacggcauccagguccgcaucaagcccggcuccgccaacaagcccaaggacgagcucgacuacgccaacgacaucgagaagaagaucugcaagauggagaagugcuccuccgucuucaacgucgucaacuccuccaucggccucaucaugguccucuccuuccucuuccucaacugaggacuagucccuguucccagagcccacuuuuuuuucuuuuuuugaaauaaaauagccugucuuucagaucucaaaggcucuuuucagagccaccaaaaaaaaaaaaaaaaaaaaaaaaaaaaaaaaaaaaaaaaaaaaaaaaaaaaaaaaaaaaaaaaaaaaaaaaaaaaaaaaaaaaaaaaaaaaaaaaaaaaa

SEQ ID NO: 8324 - RNA, 1560 nt, Artificial Sequence
  mRNA Design a-3 (hSL-A100) comprising derived and/or modified sequence from Pf(3D7)__XP_001351122.1__HsSPARC_Pf-CSP(19-397) (opt2)
aggagagggcgcuuggcuugcaaggacccugagcugcggcauugaagcacacccaacccaacucgacugaagucagccucacugaaccggaucugagaaucuucucucucugggcuugccagggcucuccgaaccuagcuagcauccucuucaauuccaacuagaaagcuuaccaugcgcgccuggaucuucuuccuccucugccucgccggccgcgcccucgcccucuuccaggaguaccagugcuacggcuccuccuccaacacccgcguccucaacgagcucaacuacgacaacgccggcaccaaccucuacaacgagcucgagaugaacuacuacggcaagcaggagaacugguacucccucaagaagaacucccgcucccucggcgagaacgacgacggcaacaacgaggacaacgagaagcuccgcaagcccaagcacaagaagcucaagcagcccgccgacggcaaccccgaccccaacgccaaccccaacgucgaccccaacgccaaccccaacgucgaccccaacgccaaccccaacgucgaccccaacgccaaccccaacgccaaccccaacgccaaccccaacgccaaccccaacgccaaccccaacgccaaccccaacgccaaccccaacgccaaccccaacgccaaccccaacgccaaccccaacgccaaccccaacgccaaccccaacgccaaccccaacgccaaccccaacgccaaccccaacgccaaccccaacgccaaccccaacgucgaccccaacgccaaccccaacgccaaccccaacgccaaccccaacgccaaccccaacgccaaccccaacgccaaccccaacgccaaccccaacgccaaccccaacgccaaccccaacgccaaccccaacgccaaccccaacgccaaccccaacgccaaccccaacgccaaccccaacgccaaccccaacgccaaccccaacgccaaccccaacgccaaccccaacaagaacaaccagggcaacggccagggccacaacaugcccaacgaccccaaccgcaacgucgacgagaacgccaacgccaacuccgccgucaagaacaacaacaacgaggagcccuccgacaagcacaucaaggaguaccucaacaagauccagaacucccucuccaccgaguggucccccugcuccgucaccugcggcaacggcauccagguccgcaucaagcccggcuccgccaacaagcccaaggacgagcucgacuacgccaacgacaucgagaagaagaucugcaagauggagaagugcuccuccgucuucaacgucgucaacuccuccaucggccucaucaugguccucuccuuccucuuccucaacugaggacuagucccuguucccagagcccacuuuuuuuucuuuuuuugaaauaaaauagccugucuuucagaucucaaaggcucuuuucagagccaccaaaaaaaaaaaaaaaaaaaaaaaaaaaaaaaaaaaaaaaaaaaaaaaaaaaaaaaaaaaaaaaaaaaaaaaaaaaaaaaaaaaaaaaaaaaaaaaaaaaaa

SEQ ID NO: 8325 - RNA, 1563 nt, Artificial Sequence
  mRNA Design a-3 (hSL-A100) comprising derived and/or modified sequence from Pf(3D7)__XP_001351122.1__IgE_Pf-CSP(19-397) (opt2)
aggagagggcgcuuggcuugcaaggacccugagcugcggcauugaagcacacccaacccaacucgacugaagucagccucacugaaccggaucugagaaucuucucucucugggcuugccagggcucuccgaaccuagcuagcauccucuucaauuccaacuagaaagcuuaccauggacuggaccuggauccucuuccucgucgccgccgccacccgcguccacucccucuuccaggaguaccagugcuacggcuccuccuccaacacccgcguccucaacgagcucaacuacgacaacgccggcaccaaccucuacaacgagcucgagaugaacuacuacggcaagcaggagaacugguacucccucaagaagaacucccgcucccucggcgagaacgacgacggcaacaacgaggacaacgagaagcuccgcaagcccaagcacaagaagcucaagcagcccgccgacggcaaccccgaccccaacgccaaccccaacgucgaccccaacgccaaccccaacgucgaccccaacgccaaccccaacgucgaccccaacgccaaccccaacgccaaccccaacgccaaccccaacgccaaccccaacgccaaccccaacgccaaccccaacgccaaccccaacgccaaccccaacgccaaccccaacgccaaccccaacgccaaccccaacgccaaccccaacgccaaccccaacgccaaccccaacgccaaccccaacgccaaccccaacgccaaccccaacgucgaccccaacgccaaccccaacgccaaccccaacgccaaccccaacgccaaccccaacgccaaccccaacgccaaccccaacgccaaccccaacgccaaccccaacgccaaccccaacgccaaccccaacgccaaccccaacgccaaccccaacgccaaccccaacgccaaccccaacgccaaccccaacgccaaccccaacgccaaccccaacgccaaccccaacaagaacaaccagggcaacggccagggccacaacaugcccaacgaccccaaccgcaacgucgacgagaacgccaacgccaacuccgccgucaagaacaacaacaacgaggagcccuccgacaagcacaucaaggaguaccucaacaagauccagaacucccucuccaccgaguggucccccugcuccgucaccugcggcaacggcauccagguccgcaucaagcccggcuccgccaacaagcccaaggacgagcucgacuacgccaacgacaucgagaagaagaucugcaagauggagaagugcuccuccgucuucaacgucgucaacuccuccaucggccucaucaugguccucuccuuccucuuccucaacugaggacuagucccuguucccagagcccacuuuuuuuucuuuuuuugaaauaaaauagccugucuuucagaucucaaaggcucuuuucagagccaccaaaaaaaaaaaaaaaaaaaaaaaaaaaaaaaaaaaaaaaaaaaaaaaaaaaaaaaaaaaaaaaaaaaaaaaaaaaaaaaaaaaaaaaaaaaaaaaaaaaaa

SEQ ID NO: 8326 - RNA, 1728 nt, Artificial Sequence
  mRNA Design a-3 (hSL-A100) comprising derived and/or modified sequence from Pf(3D7)__XP_001351122.1__Pf-CSP_L(G4SG4)_TM domain HA (opt2)
aggagagggcgcuuggcuugcaaggacccugagcugcggcauugaagcacacccaacccaacucgacugaagucagccucacugaaccggaucugagaaucuucucucucugggcuugccagggcucuccgaaccuagcuagcauccucuucaauuccaacuagaaagcuuaccaugaugcgcaagcucgccauccucuccgucuccuccuuccucuucgucgaggcccucuuccaggaguaccagugcuacggcuccuccuccaacacccgcguccucaacgagcucaacuacgacaacgccggcaccaaccucuacaacgagcucgagaugaacuacuacggcaagcaggagaacugguacucccucaagaagaacucccgcucccucggcgagaacgacgacggcaacaacgaggacaacgagaagcuccgcaagcccaagcacaagaagcucaagcagcccgccgacggcaaccccgaccccaacgccaaccccaacgucgaccccaacgccaaccccaacgucgaccccaacgccaaccccaacgucgaccccaacgccaaccccaacgccaaccccaacgccaaccccaacgccaaccccaacgccaaccccaacgccaaccccaacgccaaccccaacgccaaccccaacgccaaccccaacgccaaccccaacgccaaccccaacgccaaccccaacgccaaccccaacgccaaccccaacgccaaccccaacgccaaccccaacgccaaccccaacgucgaccccaacgccaaccccaacgccaaccccaacgccaaccccaacgccaaccccaacgccaaccccaacgccaaccccaacgccaaccccaacgccaaccccaacgccaaccccaacgccaaccccaacgccaaccccaacgccaaccccaacgccaaccccaacgccaaccccaacgccaaccccaacgccaaccccaacgccaaccccaacgccaaccccaacaagaacaaccagggcaacggccagggccacaacaugcccaacgaccccaaccgcaacgucgacgagaacgccaacgccaacuccgccgucaagaacaacaacaacgaggagcccuccgacaagcacaucaaggaguaccucaacaagauccagaacucccucuccaccgaguggucccccugcuccgucaccugcggcaacggcauccagguccgcaucaagcccggcuccgccaacaagcccaaggacgagcucgacuacgccaacgacaucgagaagaagaucugcaagauggagaagugcuccuccgucuucaacgucgucaacuccuccaucggccucaucaugguccucuccuuccucuuccucaacggcggcggcggcuccggcggcggcggcaagcucgaguccacccgcaucuaccagauccucgccaucuacuccaccgucgccuccucccucguccucgucgucucccucggcgccaucuccuucuggaugugcuccaacggcucccuccagugccgcaucugcaucugaggacuagucccuguucccagagcccacuuuuuuuucuuuuuuugaaauaaaauagccugucuuucagaucucaaaggcucuuuucagagccaccaaaaaaaaaaaaaaaaaaaaaaaaaaaaaaaaaaaaaaaaaaaaaaaaaaaaaaaaaaaaaaaaaaaaaaaaaaaaaaaaaaaaaaaaaaaaaaaaaaaaa

SEQ ID NO: 8327 - RNA, 1602 nt, Artificial Sequence
  mRNA Design a-3 (hSL-A100) comprising derived and/or modified sequence from Pf(3D7)__XP_001351122.1__Pf-CSP(199-377)_L(PVTN)_HBsAg (opt2)
aggagagggcgcuuggcuugcaaggacccugagcugcggcauugaagcacacccaacccaacucgacugaagucagccucacugaaccggaucugagaaucuucucucucugggcuugccagggcucuccgaaccuagcuagcauccucuucaauuccaacuagaaagcuuaccauggaccccaacgccaaccccaacgccaaccccaacgccaaccccaacgccaaccccaacgccaaccccaacgccaaccccaacgccaaccccaacgccaaccccaacgccaaccccaacgccaaccccaacgccaaccccaacgccaaccccaacgccaaccccaacgccaaccccaacgccaaccccaacgccaaccccaacgccaaccccaacgccaaccccaacaagaacaaccagggcaacggccagggccacaacaugcccaacgaccccaaccgcaacgucgacgagaacgccaacgccaacuccgccgucaagaacaacaacaacgaggagcccuccgacaagcacaucaaggaguaccucaacaagauccagaacucccucuccaccgaguggucccccugcuccgucaccugcggcaacggcauccagguccgcaucaagcccggcuccgccaacaagcccaaggacgagcucgacuacgccaacgacaucgagaagaagaucugcaagauggagaagugcuccuccguccccgucaccaacauggagaacaucaccuccggcuuccucggcccccuccucguccuccaggccggcuucuuccuccucacccgcauccucaccaucccccagucccucgacuccugguggaccucccucaacuuccucggcggcucccccgucugccucggccagaacucccagucccccaccuccaaccacucccccaccuccugcccccccaucugccccggcuaccgcuggaugugccuccgccgcuucaucaucuuccucuucauccuccuccucugccucaucuuccuccucguccuccucgacuaccagggcaugcuccccgucugcccccucauccccggcuccaccaccaccaacaccggccccugcaagaccugcaccacccccgcccagggcaacuccauguuccccuccugcugcugcaccaagcccaccgacggcaacugcaccugcauccccauccccuccuccugggccuucgccaaguaccucugggagugggccuccguccgcuucuccuggcucucccuccucguccccuucguccagugguucgucggccucucccccaccgucuggcucuccgccaucuggaugaugugguacuggggccccucccucuacuccaucgucucccccuucaucccccuccuccccaucuucuucugccucugggucuacaucugaggacuagucccuguucccagagcccacuuuuuuuucuuuuuuugaaauaaaauagccugucuuucagaucucaaaggcucuuuucagagccaccaaaaaaaaaaaaaaaaaaaaaaaaaaaaaaaaaaaaaaaaaaaaaaaaaaaaaaaaaaaaaaaaaaaaaaaaaaaaaaaaaaaaaaaaaaaaaaaaaaaaa

SEQ ID NO: 8328 - RNA, 1644 nt, Artificial Sequence
  mRNA Design a-3 (hSL-A100) comprising derived and/or modified sequence from Pf(3D7)__XP_001351122.1__Pf-CSP(199-387)_L(PVTN)_HBsAg (opt2)
aggagagggcgcuuggcuugcaaggacccugagcugcggcauugaagcacacccaacccaacucgacugaagucagccucacugaaccggaucugagaaucuucucucucugggcuugccagggcucuccgaaccuagcuagcauccucuucaauuccaacuagaaagcuuaccaugauggcccccgaccccaacgccaaccccaacgccaaccccaacgccaaccccaacgccaaccccaacgccaaccccaacgccaaccccaacgccaaccccaacgccaaccccaacgccaaccccaacgccaaccccaacgccaaccccaacgccaaccccaacgccaaccccaacgccaaccccaacgccaaccccaacgccaaccccaacgccaaccccaacgccaaccccaacaagaacaaccagggcaacggccagggccacaacaugcccaacgaccccaaccgcaacgucgacgagaacgccaacgccaacuccgccgucaagaacaacaacaacgaggagcccuccgacaagcacaucaaggaguaccucaacaagauccagaacucccucuccaccgaguggucccccugcuccgucaccugcggcaacggcauccagguccgcaucaagcccggcuccgccaacaagcccaaggacgagcucgacuacgccaacgacaucgagaagaagaucugcaagauggagaagugcuccuccgucuucaacgucgucaacuccuccaucggccucggccccgucaccaacauggagaacaucaccuccggcuuccucggcccccuccucguccuccaggccggcuucuuccuccucacccgcauccucaccaucccccagucccucgacuccugguggaccucccucaacuuccucggcggcucccccgucugccucggccagaacucccagucccccaccuccaaccacucccccaccuccugcccccccaucugccccggcuaccgcuggaugugccuccgccgcuucaucaucuuccucuucauccuccuccucugccucaucuuccuccucguccuccucgacuaccagggcaugcuccccgucugcccccucauccccggcuccaccaccaccaacaccggccccugcaagaccugcaccacccccgcccagggcaacuccauguuccccuccugcugcugcaccaagcccaccgacggcaacugcaccugcauccccauccccuccuccugggccuucgccaaguaccucugggagugggccuccguccgcuucuccuggcucucccuccucguccccuucguccagugguucgucggccucucccccaccgucuggcucuccgccaucuggaugaugugguacuggggccccucccucuacuccaucgucucccccuucaucccccuccuccccaucuucuucugccucugggucuacaucugaggacuagucccuguucccagagcccacuuuuuuuucuuuuuuugaaauaaaauagccugucuuucagaucucaaaggcucuuuucagagccaccaaaaaaaaaaaaaaaaaaaaaaaaaaaaaaaaaaaaaaaaaaaaaaaaaaaaaaaaaaaaaaaaaaaaaaaaaaaaaaaaaaaaaaaaaaaaaaaaaaaaa

SEQ ID NO: 8329 - RNA, 828 nt, Artificial Sequence
  mRNA Design a-3 (hSL-A100) comprising derived and/or modified sequence from Pf(3D7)__XP_001351122.1__HsALB_Pf-CSP(19-152) (opt2)
aggagagggcgcuuggcuugcaaggacccugagcugcggcauugaagcacacccaacccaacucgacugaagucagccucacugaaccggaucugagaaucuucucucucugggcuugccagggcucuccgaaccuagcuagcauccucuucaauuccaacuagaaagcuuaccaugaagugggucaccuucaucucccuccucuuccucuucuccuccgccuacucccucuuccaggaguaccagugcuacggcuccuccuccaacacccgcguccucaacgagcucaacuacgacaacgccggcaccaaccucuacaacgagcucgagaugaacuacuacggcaagcaggagaacugguacucccucaagaagaacucccgcucccucggcgagaacgacgacggcaacaacgaggacaacgagaagcuccgcaagcccaagcacaagaagcucaagcagcccgccgacggcaaccccgaccccaacgccaaccccaacgucgaccccaacgccaaccccaacgucgaccccaacgccaaccccaacgucgaccccaacgccaaccccaacgccaaccccaacgccaaccccaacgccaaccccaacgccaaccccaacgccaaccccugaggacuagucccuguucccagagcccacuuuuuuuucuuuuuuugaaauaaaauagccugucuuucagaucucaaaggcucuuuucagagccaccaaaaaaaaaaaaaaaaaaaaaaaaaaaaaaaaaaaaaaaaaaaaaaaaaaaaaaaaaaaaaaaaaaaaaaaaaaaaaaaaaaaaaaaaaaaaaaaaaaaaa

SEQ ID NO: 8330 - RNA, 948 nt, Artificial Sequence
  mRNA Design a-3 (hSL-A100) comprising derived and/or modified sequence from Pf(3D7)__XP_001351122.1__HsALB_Pf-CSP(19-192) (opt2)
aggagagggcgcuuggcuugcaaggacccugagcugcggcauugaagcacacccaacccaacucgacugaagucagccucacugaaccggaucugagaaucuucucucucugggcuugccagggcucuccgaaccuagcuagcauccucuucaauuccaacuagaaagcuuaccaugaagugggucaccuucaucucccuccucuuccucuucuccuccgccuacucccucuuccaggaguaccagugcuacggcuccuccuccaacacccgcguccucaacgagcucaacuacgacaacgccggcaccaaccucuacaacgagcucgagaugaacuacuacggcaagcaggagaacugguacucccucaagaagaacucccgcucccucggcgagaacgacgacggcaacaacgaggacaacgagaagcuccgcaagcccaagcacaagaagcucaagcagcccgccgacggcaaccccgaccccaacgccaaccccaacgucgaccccaacgccaaccccaacgucgaccccaacgccaaccccaacgucgaccccaacgccaaccccaacgccaaccccaacgccaaccccaacgccaaccccaacgccaaccccaacgccaaccccaacgccaaccccaacgccaaccccaacgccaaccccaacgccaaccccaacgccaaccccaacgccaaccccaacgccaaccccaacgccaaccccaacgccaaccccaacgccaaccccugaggacuagucccuguucccagagcccacuuuuuuuucuuuuuuugaaauaaaauagccugucuuucagaucucaaaggcucuuuucagagccaccaaaaaaaaaaaaaaaaaaaaaaaaaaaaaaaaaaaaaaaaaaaaaaaaaaaaaaaaaaaaaaaaaaaaaaaaaaaaaaaaaaaaaaaaaaaaaaaaaaaaa

SEQ ID NO: 8331 - RNA, 1188 nt, Artificial Sequence
  mRNA Design a-3 (hSL-A100) comprising derived and/or modified sequence from Pf(3D7)__XP_001351122.1__HsALB_Pf-CSP(19-272) (opt2)
aggagagggcgcuuggcuugcaaggacccugagcugcggcauugaagcacacccaacccaacucgacugaagucagccucacugaaccggaucugagaaucuucucucucugggcuugccagggcucuccgaaccuagcuagcauccucuucaauuccaacuagaaagcuuaccaugaagugggucaccuucaucucccuccucuuccucuucuccuccgccuacucccucuuccaggaguaccagugcuacggcuccuccuccaacacccgcguccucaacgagcucaacuacgacaacgccggcaccaaccucuacaacgagcucgagaugaacuacuacggcaagcaggagaacugguacucccucaagaagaacucccgcucccucggcgagaacgacgacggcaacaacgaggacaacgagaagcuccgcaagcccaagcacaagaagcucaagcagcccgccgacggcaaccccgaccccaacgccaaccccaacgucgaccccaacgccaaccccaacgucgaccccaacgccaaccccaacgucgaccccaacgccaaccccaacgccaaccccaacgccaaccccaacgccaaccccaacgccaaccccaacgccaaccccaacgccaaccccaacgccaaccccaacgccaaccccaacgccaaccccaacgccaaccccaacgccaaccccaacgccaaccccaacgccaaccccaacgccaaccccaacgccaaccccaacgccaaccccaacgucgaccccaacgccaaccccaacgccaaccccaacgccaaccccaacgccaaccccaacgccaaccccaacgccaaccccaacgccaaccccaacgccaaccccaacgccaaccccaacgccaaccccaacgccaaccccaacgccaaccccaacgccaaccccaacgccaaccccaacgccaaccccaacgccaaccccaacgccaaccccaacgccaaccccugaggacuagucccuguucccagagcccacuuuuuuuucuuuuuuugaaauaaaauagccugucuuucagaucucaaaggcucuuuucagagccaccaaaaaaaaaaaaaaaaaaaaaaaaaaaaaaaaaaaaaaaaaaaaaaaaaaaaaaaaaaaaaaaaaaaaaaaaaaaaaaaaaaaaaaaaaaaaaaaaaaaaa

SEQ ID NO: 8332 - RNA, 1350 nt, Artificial Sequence
  mRNA Design a-3 (hSL-A100) comprising derived and/or modified sequence from Pf(3D7)__XP_001351122.1__HsALB_Pf-CSP(19-272)_L(AAY)_Pf-CSP(310-3 27)_L(AAY)_Pf-CSP(346-375) (opt2)
aggagagggcgcuuggcuugcaaggacccugagcugcggcauugaagcacacccaacccaacucgacugaagucagccucacugaaccggaucugagaaucuucucucucugggcuugccagggcucuccgaaccuagcuagcauccucuucaauuccaacuagaaagcuuaccaugaagugggucaccuucaucucccuccucuuccucuucuccuccgccuacucccucuuccaggaguaccagugcuacggcuccuccuccaacacccgcguccucaacgagcucaacuacgacaacgccggcaccaaccucuacaacgagcucgagaugaacuacuacggcaagcaggagaacugguacucccucaagaagaacucccgcucccucggcgagaacgacgacggcaacaacgaggacaacgagaagcuccgcaagcccaagcacaagaagcucaagcagcccgccgacggcaaccccgaccccaacgccaaccccaacgucgaccccaacgccaaccccaacgucgaccccaacgccaaccccaacgucgaccccaacgccaaccccaacgccaaccccaacgccaaccccaacgccaaccccaacgccaaccccaacgccaaccccaacgccaaccccaacgccaaccccaacgccaaccccaacgccaaccccaacgccaaccccaacgccaaccccaacgccaaccccaacgccaaccccaacgccaaccccaacgccaaccccaacgccaaccccaacgucgaccccaacgccaaccccaacgccaaccccaacgccaaccccaacgccaaccccaacgccaaccccaacgccaaccccaacgccaaccccaacgccaaccccaacgccaaccccaacgccaaccccaacgccaaccccaacgccaaccccaacgccaaccccaacgccaaccccaacgccaaccccaacgccaaccccaacgccaaccccaacgccaaccccgccgccuacgagcccuccgacaagcacaucaaggaguaccucaacaagauccagaacucccucgccgccuacaucaagcccggcuccgccaacaagcccaaggacgagcucgacuacgccaacgacaucgagaagaagaucugcaagauggagaagugcuccugaggacuagucccuguucccagagcccacuuuuuuuucuuuuuuugaaauaaaauagccugucuuucagaucucaaaggcucuuuucagagccaccaaaaaaaaaaaaaaaaaaaaaaaaaaaaaaaaaaaaaaaaaaaaaaaaaaaaaaaaaaaaaaaaaaaaaaaaaaaaaaaaaaaaaaaaaaaaaaaaaaaaa

SEQ ID NO: 8333 - RNA, 1311 nt, Artificial Sequence
  mRNA Design a-3 (hSL-A100) comprising derived and/or modified sequence from Pf(3D7)__XP_001351122.1__HsALB_Pf-CSP(19-272)_L(AAY)_Pf-CSP(346-3 65)_L(AAY)_P2 (opt2)
aggagagggcgcuuggcuugcaaggacccugagcugcggcauugaagcacacccaacccaacucgacugaagucagccucacugaaccggaucugagaaucuucucucucugggcuugccagggcucuccgaaccuagcuagcauccucuucaauuccaacuagaaagcuuaccaugaagugggucaccuucaucucccuccucuuccucuucuccuccgccuacucccucuuccaggaguaccagugcuacggcuccuccuccaacacccgcguccucaacgagcucaacuacgacaacgccggcaccaaccucuacaacgagcucgagaugaacuacuacggcaagcaggagaacugguacucccucaagaagaacucccgcucccucggcgagaacgacgacggcaacaacgaggacaacgagaagcuccgcaagcccaagcacaagaagcucaagcagcccgccgacggcaaccccgaccccaacgccaaccccaacgucgaccccaacgccaaccccaacgucgaccccaacgccaaccccaacgucgaccccaacgccaaccccaacgccaaccccaacgccaaccccaacgccaaccccaacgccaaccccaacgccaaccccaacgccaaccccaacgccaaccccaacgccaaccccaacgccaaccccaacgccaaccccaacgccaaccccaacgccaaccccaacgccaaccccaacgccaaccccaacgccaaccccaacgccaaccccaacgucgaccccaacgccaaccccaacgccaaccccaacgccaaccccaacgccaaccccaacgccaaccccaacgccaaccccaacgccaaccccaacgccaaccccaacgccaaccccaacgccaaccccaacgccaaccccaacgccaaccccaacgccaaccccaacgccaaccccaacgccaaccccaacgccaaccccaacgccaaccccaacgccaaccccgccgccuacaucaagcccggcuccgccaacaagcccaaggacgagcucgacuacgccaacgacaucgaggccgccuaccaguacaucaaggccaacuccaaguucaucggcaucaccgagcucugaggacuagucccuguucccagagcccacuuuuuuuucuuuuuuugaaauaaaauagccugucuuucagaucucaaaggcucuuuucagagccaccaaaaaaaaaaaaaaaaaaaaaaaaaaaaaaaaaaaaaaaaaaaaaaaaaaaaaaaaaaaaaaaaaaaaaaaaaaaaaaaaaaaaaaaaaaaaaaaaaaaaa

SEQ ID NO: 8334 - RNA, 1305 nt, Artificial Sequence
  mRNA Design a-3 (hSL-A100) comprising derived and/or modified sequence from Pf(3D7)__XP_001351122.1__HsALB_Pf-CSP(19-272)_L(AAY)_Pf-CSP(346-3 65)_L(AAY)_PADRE (opt2)
aggagagggcgcuuggcuugcaaggacccugagcugcggcauugaagcacacccaacccaacucgacugaagucagccucacugaaccggaucugagaaucuucucucucugggcuugccagggcucuccgaaccuagcuagcauccucuucaauuccaacuagaaagcuuaccaugaagugggucaccuucaucucccuccucuuccucuucuccuccgccuacucccucuuccaggaguaccagugcuacggcuccuccuccaacacccgcguccucaacgagcucaacuacgacaacgccggcaccaaccucuacaacgagcucgagaugaacuacuacggcaagcaggagaacugguacucccucaagaagaacucccgcucccucggcgagaacgacgacggcaacaacgaggacaacgagaagcuccgcaagcccaagcacaagaagcucaagcagcccgccgacggcaaccccgaccccaacgccaaccccaacgucgaccccaacgccaaccccaacgucgaccccaacgccaaccccaacgucgaccccaacgccaaccccaacgccaaccccaacgccaaccccaacgccaaccccaacgccaaccccaacgccaaccccaacgccaaccccaacgccaaccccaacgccaaccccaacgccaaccccaacgccaaccccaacgccaaccccaacgccaaccccaacgccaaccccaacgccaaccccaacgccaaccccaacgccaaccccaacgucgaccccaacgccaaccccaacgccaaccccaacgccaaccccaacgccaaccccaacgccaaccccaacgccaaccccaacgccaaccccaacgccaaccccaacgccaaccccaacgccaaccccaacgccaaccccaacgccaaccccaacgccaaccccaacgccaaccccaacgccaaccccaacgccaaccccaacgccaaccccaacgccaaccccgccgccuacaucaagcccggcuccgccaacaagcccaaggacgagcucgacuacgccaacgacaucgaggccgccuacgccaaguucgucgccgccuggacccucaaggccgccgccugaggacuagucccuguucccagagcccacuuuuuuuucuuuuuuugaaauaaaauagccugucuuucagaucucaaaggcucuuuucagagccaccaaaaaaaaaaaaaaaaaaaaaaaaaaaaaaaaaaaaaaaaaaaaaaaaaaaaaaaaaaaaaaaaaaaaaaaaaaaaaaaaaaaaaaaaaaaaaaaaaaaaa

SEQ ID NO: 8335 - RNA, 1362 nt, Artificial Sequence
  mRNA Design a-3 (hSL-A100) comprising derived and/or modified sequence from Pf(3D7)__XP_001351122.1__HsALB_Pf-CSP(19-272)_L(G4S)_Pf-CSP(310-3 27)_L(G4S)_Pf-CSP(346-375) (opt2)
aggagagggcgcuuggcuugcaaggacccugagcugcggcauugaagcacacccaacccaacucgacugaagucagccucacugaaccggaucugagaaucuucucucucugggcuugccagggcucuccgaaccuagcuagcauccucuucaauuccaacuagaaagcuuaccaugaagugggucaccuucaucucccuccucuuccucuucuccuccgccuacucccucuuccaggaguaccagugcuacggcuccuccuccaacacccgcguccucaacgagcucaacuacgacaacgccggcaccaaccucuacaacgagcucgagaugaacuacuacggcaagcaggagaacugguacucccucaagaagaacucccgcucccucggcgagaacgacgacggcaacaacgaggacaacgagaagcuccgcaagcccaagcacaagaagcucaagcagcccgccgacggcaaccccgaccccaacgccaaccccaacgucgaccccaacgccaaccccaacgucgaccccaacgccaaccccaacgucgaccccaacgccaaccccaacgccaaccccaacgccaaccccaacgccaaccccaacgccaaccccaacgccaaccccaacgccaaccccaacgccaaccccaacgccaaccccaacgccaaccccaacgccaaccccaacgccaaccccaacgccaaccccaacgccaaccccaacgccaaccccaacgccaaccccaacgccaaccccaacgucgaccccaacgccaaccccaacgccaaccccaacgccaaccccaacgccaaccccaacgccaaccccaacgccaaccccaacgccaaccccaacgccaaccccaacgccaaccccaacgccaaccccaacgccaaccccaacgccaaccccaacgccaaccccaacgccaaccccaacgccaaccccaacgccaaccccaacgccaaccccaacgccaaccccggcggcggcggcuccgagcccuccgacaagcacaucaaggaguaccucaacaagauccagaacucccucggcggcggcggcuccaucaagcccggcuccgccaacaagcccaaggacgagcucgacuacgccaacgacaucgagaagaagaucugcaagauggagaagugcuccugaggacuagucccuguucccagagcccacuuuuuuuucuuuuuuugaaauaaaauagccugucuuucagaucucaaaggcucuuuucagagccaccaaaaaaaaaaaaaaaaaaaaaaaaaaaaaaaaaaaaaaaaaaaaaaaaaaaaaaaaaaaaaaaaaaaaaaaaaaaaaaaaaaaaaaaaaaaaaaaaaaaaa

SEQ ID NO: 8336 - RNA, 1347 nt, Artificial Sequence
  mRNA Design a-3 (hSL-A100) comprising derived and/or modified sequence from Pf(3D7)__XP_001351122.1__HsALB_Pf-CSP(19-272)_L(G4S)_Pf-CSP(310-3 27)_Pf-CSP(346-375) (opt2)
aggagagggcgcuuggcuugcaaggacccugagcugcggcauugaagcacacccaacccaacucgacugaagucagccucacugaaccggaucugagaaucuucucucucugggcuugccagggcucuccgaaccuagcuagcauccucuucaauuccaacuagaaagcuuaccaugaagugggucaccuucaucucccuccucuuccucuucuccuccgccuacucccucuuccaggaguaccagugcuacggcuccuccuccaacacccgcguccucaacgagcucaacuacgacaacgccggcaccaaccucuacaacgagcucgagaugaacuacuacggcaagcaggagaacugguacucccucaagaagaacucccgcucccucggcgagaacgacgacggcaacaacgaggacaacgagaagcuccgcaagcccaagcacaagaagcucaagcagcccgccgacggcaaccccgaccccaacgccaaccccaacgucgaccccaacgccaaccccaacgucgaccccaacgccaaccccaacgucgaccccaacgccaaccccaacgccaaccccaacgccaaccccaacgccaaccccaacgccaaccccaacgccaaccccaacgccaaccccaacgccaaccccaacgccaaccccaacgccaaccccaacgccaaccccaacgccaaccccaacgccaaccccaacgccaaccccaacgccaaccccaacgccaaccccaacgccaaccccaacgucgaccccaacgccaaccccaacgccaaccccaacgccaaccccaacgccaaccccaacgccaaccccaacgccaaccccaacgccaaccccaacgccaaccccaacgccaaccccaacgccaaccccaacgccaaccccaacgccaaccccaacgccaaccccaacgccaaccccaacgccaaccccaacgccaaccccaacgccaaccccaacgccaaccccggcggcggcggcuccgagcccuccgacaagcacaucaaggaguaccucaacaagauccagaacucccucaucaagcccggcuccgccaacaagcccaaggacgagcucgacuacgccaacgacaucgagaagaagaucugcaagauggagaagugcuccugaggacuagucccuguucccagagcccacuuuuuuuucuuuuuuugaaauaaaauagccugucuuucagaucucaaaggcucuuuucagagccaccaaaaaaaaaaaaaaaaaaaaaaaaaaaaaaaaaaaaaaaaaaaaaaaaaaaaaaaaaaaaaaaaaaaaaaaaaaaaaaaaaaaaaaaaaaaaaaaaaaaaa

SEQ ID NO: 8337 - RNA, 1347 nt, Artificial Sequence
  mRNA Design a-3 (hSL-A100) comprising derived and/or modified sequence from Pf(3D7)__XP_001351122.1__HsALB_Pf-CSP(19-325) (opt2)
aggagagggcgcuuggcuugcaaggacccugagcugcggcauugaagcacacccaacccaacucgacugaagucagccucacugaaccggaucugagaaucuucucucucugggcuugccagggcucuccgaaccuagcuagcauccucuucaauuccaacuagaaagcuuaccaugaagugggucaccuucaucucccuccucuuccucuucuccuccgccuacucccucuuccaggaguaccagugcuacggcuccuccuccaacacccgcguccucaacgagcucaacuacgacaacgccggcaccaaccucuacaacgagcucgagaugaacuacuacggcaagcaggagaacugguacucccucaagaagaacucccgcucccucggcgagaacgacgacggcaacaacgaggacaacgagaagcuccgcaagcccaagcacaagaagcucaagcagcccgccgacggcaaccccgaccccaacgccaaccccaacgucgaccccaacgccaaccccaacgucgaccccaacgccaaccccaacgucgaccccaacgccaaccccaacgccaaccccaacgccaaccccaacgccaaccccaacgccaaccccaacgccaaccccaacgccaaccccaacgccaaccccaacgccaaccccaacgccaaccccaacgccaaccccaacgccaaccccaacgccaaccccaacgccaaccccaacgccaaccccaacgccaaccccaacgccaaccccaacgucgaccccaacgccaaccccaacgccaaccccaacgccaaccccaacgccaaccccaacgccaaccccaacgccaaccccaacgccaaccccaacgccaaccccaacgccaaccccaacgccaaccccaacgccaaccccaacgccaaccccaacgccaaccccaacgccaaccccaacgccaaccccaacgccaaccccaacgccaaccccaacgccaaccccaacaagaacaaccagggcaacggccagggccacaacaugcccaacgaccccaaccgcaacgucgacgagaacgccaacgccaacuccgccgucaagaacaacaacaacgaggagcccuccgacaagcacaucaaggaguaccucaacaagauccagaacugaggacuagucccuguucccagagcccacuuuuuuuucuuuuuuugaaauaaaauagccugucuuucagaucucaaaggcucuuuucagagccaccaaaaaaaaaaaaaaaaaaaaaaaaaaaaaaaaaaaaaaaaaaaaaaaaaaaaaaaaaaaaaaaaaaaaaaaaaaaaaaaaaaaaaaaaaaaaaaaaaaaaa

SEQ ID NO: 8338 - RNA, 1524 nt, Artificial Sequence
  mRNA Design a-3 (hSL-A100) comprising derived and/or modified sequence from Pf(3D7)__XP_001351122.1__HsALB_Pf-CSP(19-384) (opt2)
aggagagggcgcuuggcuugcaaggacccugagcugcggcauugaagcacacccaacccaacucgacugaagucagccucacugaaccggaucugagaaucuucucucucugggcuugccagggcucuccgaaccuagcuagcauccucuucaauuccaacuagaaagcuuaccaugaagugggucaccuucaucucccuccucuuccucuucuccuccgccuacucccucuuccaggaguaccagugcuacggcuccuccuccaacacccgcguccucaacgagcucaacuacgacaacgccggcaccaaccucuacaacgagcucgagaugaacuacuacggcaagcaggagaacugguacucccucaagaagaacucccgcucccucggcgagaacgacgacggcaacaacgaggacaacgagaagcuccgcaagcccaagcacaagaagcucaagcagcccgccgacggcaaccccgaccccaacgccaaccccaacgucgaccccaacgccaaccccaacgucgaccccaacgccaaccccaacgucgaccccaacgccaaccccaacgccaaccccaacgccaaccccaacgccaaccccaacgccaaccccaacgccaaccccaacgccaaccccaacgccaaccccaacgccaaccccaacgccaaccccaacgccaaccccaacgccaaccccaacgccaaccccaacgccaaccccaacgccaaccccaacgccaaccccaacgccaaccccaacgucgaccccaacgccaaccccaacgccaaccccaacgccaaccccaacgccaaccccaacgccaaccccaacgccaaccccaacgccaaccccaacgccaaccccaacgccaaccccaacgccaaccccaacgccaaccccaacgccaaccccaacgccaaccccaacgccaaccccaacgccaaccccaacgccaaccccaacgccaaccccaacgccaaccccaacaagaacaaccagggcaacggccagggccacaacaugcccaacgaccccaaccgcaacgucgacgagaacgccaacgccaacuccgccgucaagaacaacaacaacgaggagcccuccgacaagcacaucaaggaguaccucaacaagauccagaacucccucuccaccgaguggucccccugcuccgucaccugcggcaacggcauccagguccgcaucaagcccggcuccgccaacaagcccaaggacgagcucgacuacgccaacgacaucgagaagaagaucugcaagauggagaagugcuccuccgucuucaacgucgucaacuccuccugaggacuagucccuguucccagagcccacuuuuuuuucuuuuuuugaaauaaaauagccugucuuucagaucucaaaggcucuuuucagagccaccaaaaaaaaaaaaaaaaaaaaaaaaaaaaaaaaaaaaaaaaaaaaaaaaaaaaaaaaaaaaaaaaaaaaaaaaaaaaaaaaaaaaaaaaaaaaaaaaaaaaa

SEQ ID NO: 8339 - RNA, 1662 nt, Artificial Sequence
  mRNA Design a-3 (hSL-A100) comprising derived and/or modified sequence from Pf(3D7)__XP_001351122.1__HsALB_Pf-CSP(19-384)_TM domain HA (opt2)
aggagagggcgcuuggcuugcaaggacccugagcugcggcauugaagcacacccaacccaacucgacugaagucagccucacugaaccggaucugagaaucuucucucucugggcuugccagggcucuccgaaccuagcuagcauccucuucaauuccaacuagaaagcuuaccaugaagugggucaccuucaucucccuccucuuccucuucuccuccgccuacucccucuuccaggaguaccagugcuacggcuccuccuccaacacccgcguccucaacgagcucaacuacgacaacgccggcaccaaccucuacaacgagcucgagaugaacuacuacggcaagcaggagaacugguacucccucaagaagaacucccgcucccucggcgagaacgacgacggcaacaacgaggacaacgagaagcuccgcaagcccaagcacaagaagcucaagcagcccgccgacggcaaccccgaccccaacgccaaccccaacgucgaccccaacgccaaccccaacgucgaccccaacgccaaccccaacgucgaccccaacgccaaccccaacgccaaccccaacgccaaccccaacgccaaccccaacgccaaccccaacgccaaccccaacgccaaccccaacgccaaccccaacgccaaccccaacgccaaccccaacgccaaccccaacgccaaccccaacgccaaccccaacgccaaccccaacgccaaccccaacgccaaccccaacgccaaccccaacgucgaccccaacgccaaccccaacgccaaccccaacgccaaccccaacgccaaccccaacgccaaccccaacgccaaccccaacgccaaccccaacgccaaccccaacgccaaccccaacgccaaccccaacgccaaccccaacgccaaccccaacgccaaccccaacgccaaccccaacgccaaccccaacgccaaccccaacgccaaccccaacgccaaccccaacaagaacaaccagggcaacggccagggccacaacaugcccaacgaccccaaccgcaacgucgacgagaacgccaacgccaacuccgccgucaagaacaacaacaacgaggagcccuccgacaagcacaucaaggaguaccucaacaagauccagaacucccucuccaccgaguggucccccugcuccgucaccugcggcaacggcauccagguccgcaucaagcccggcuccgccaacaagcccaaggacgagcucgacuacgccaacgacaucgagaagaagaucugcaagauggagaagugcuccuccgucuucaacgucgucaacuccuccaagcucgaguccacccgcaucuaccagauccucgccaucuacuccaccgucgccuccucccucguccucgucgucucccucggcgccaucuccuucuggaugugcuccaacggcucccuccagugccgcaucugcaucugaggacuagucccuguucccagagcccacuuuuuuuucuuuuuuugaaauaaaauagccugucuuucagaucucaaaggcucuuuucagagccaccaaaaaaaaaaaaaaaaaaaaaaaaaaaaaaaaaaaaaaaaaaaaaaaaaaaaaaaaaaaaaaaaaaaaaaaaaaaaaaaaaaaaaaaaaaaaaaaaaaaaa

SEQ ID NO: 8340 - RNA, 1374 nt, Artificial Sequence
  mRNA Design a-3 (hSL-A100) comprising derived and/or modified sequence from Pf(3D7)__XP_001351122.1__HsALB_Pf-CSP(82-397) (opt2)
aggagagggcgcuuggcuugcaaggacccugagcugcggcauugaagcacacccaacccaacucgacugaagucagccucacugaaccggaucugagaaucuucucucucugggcuugccagggcucuccgaaccuagcuagcauccucuucaauuccaacuagaaagcuuaccaugaagugggucaccuucaucucccuccucuuccucuucuccuccgccuacuccgacaacgagaagcuccgcaagcccaagcacaagaagcucaagcagcccgccgacggcaaccccgaccccaacgccaaccccaacgucgaccccaacgccaaccccaacgucgaccccaacgccaaccccaacgucgaccccaacgccaaccccaacgccaaccccaacgccaaccccaacgccaaccccaacgccaaccccaacgccaaccccaacgccaaccccaacgccaaccccaacgccaaccccaacgccaaccccaacgccaaccccaacgccaaccccaacgccaaccccaacgccaaccccaacgccaaccccaacgccaaccccaacgccaaccccaacgucgaccccaacgccaaccccaacgccaaccccaacgccaaccccaacgccaaccccaacgccaaccccaacgccaaccccaacgccaaccccaacgccaaccccaacgccaaccccaacgccaaccccaacgccaaccccaacgccaaccccaacgccaaccccaacgccaaccccaacgccaaccccaacgccaaccccaacgccaaccccaacgccaaccccaacaagaacaaccagggcaacggccagggccacaacaugcccaacgaccccaaccgcaacgucgacgagaacgccaacgccaacuccgccgucaagaacaacaacaacgaggagcccuccgacaagcacaucaaggaguaccucaacaagauccagaacucccucuccaccgaguggucccccugcuccgucaccugcggcaacggcauccagguccgcaucaagcccggcuccgccaacaagcccaaggacgagcucgacuacgccaacgacaucgagaagaagaucugcaagauggagaagugcuccuccgucuucaacgucgucaacuccuccaucggccucaucaugguccucuccuuccucuuccucaacugaggacuagucccuguucccagagcccacuuuuuuuucuuuuuuugaaauaaaauagccugucuuucagaucucaaaggcucuuuucagagccaccaaaaaaaaaaaaaaaaaaaaaaaaaaaaaaaaaaaaaaaaaaaaaaaaaaaaaaaaaaaaaaaaaaaaaaaaaaaaaaaaaaaaaaaaaaaaaaaaaaaaa

SEQ ID NO: 8341 - RNA, 726 nt, Artificial Sequence
  mRNA Design a-3 (hSL-A100) comprising derived and/or modified sequence from Pf(3D7)__XP_001351122.1__HsALB_Pf-CSP(93-192) (opt2)
aggagagggcgcuuggcuugcaaggacccugagcugcggcauugaagcacacccaacccaacucgacugaagucagccucacugaaccggaucugagaaucuucucucucugggcuugccagggcucuccgaaccuagcuagcauccucuucaauuccaacuagaaagcuuaccaugaagugggucaccuucaucucccuccucuuccucuucuccuccgccuacuccaagcucaagcagcccgccgacggcaaccccgaccccaacgccaaccccaacgucgaccccaacgccaaccccaacgucgaccccaacgccaaccccaacgucgaccccaacgccaaccccaacgccaaccccaacgccaaccccaacgccaaccccaacgccaaccccaacgccaaccccaacgccaaccccaacgccaaccccaacgccaaccccaacgccaaccccaacgccaaccccaacgccaaccccaacgccaaccccaacgccaaccccaacgccaaccccaacgccaaccccugaggacuagucccuguucccagagcccacuuuuuuuucuuuuuuugaaauaaaauagccugucuuucagaucucaaaggcucuuuucagagccaccaaaaaaaaaaaaaaaaaaaaaaaaaaaaaaaaaaaaaaaaaaaaaaaaaaaaaaaaaaaaaaaaaaaaaaaaaaaaaaaaaaaaaaaaaaaaaaaaaaaaa

SEQ ID NO: 8342 - RNA, 966 nt, Artificial Sequence
  mRNA Design a-3 (hSL-A100) comprising derived and/or modified sequence from Pf(3D7)__XP_001351122.1__HsALB_Pf-CSP(93-272) (opt2)
aggagagggcgcuuggcuugcaaggacccugagcugcggcauugaagcacacccaacccaacucgacugaagucagccucacugaaccggaucugagaaucuucucucucugggcuugccagggcucuccgaaccuagcuagcauccucuucaauuccaacuagaaagcuuaccaugaagugggucaccuucaucucccuccucuuccucuucuccuccgccuacuccaagcucaagcagcccgccgacggcaaccccgaccccaacgccaaccccaacgucgaccccaacgccaaccccaacgucgaccccaacgccaaccccaacgucgaccccaacgccaaccccaacgccaaccccaacgccaaccccaacgccaaccccaacgccaaccccaacgccaaccccaacgccaaccccaacgccaaccccaacgccaaccccaacgccaaccccaacgccaaccccaacgccaaccccaacgccaaccccaacgccaaccccaacgccaaccccaacgccaaccccaacgccaaccccaacgucgaccccaacgccaaccccaacgccaaccccaacgccaaccccaacgccaaccccaacgccaaccccaacgccaaccccaacgccaaccccaacgccaaccccaacgccaaccccaacgccaaccccaacgccaaccccaacgccaaccccaacgccaaccccaacgccaaccccaacgccaaccccaacgccaaccccaacgccaaccccaacgccaaccccugaggacuagucccuguucccagagcccacuuuuuuuucuuuuuuugaaauaaaauagccugucuuucagaucucaaaggcucuuuucagagccaccaaaaaaaaaaaaaaaaaaaaaaaaaaaaaaaaaaaaaaaaaaaaaaaaaaaaaaaaaaaaaaaaaaaaaaaaaaaaaaaaaaaaaaaaaaaaaaaaaaaaa

SEQ ID NO: 8343 - RNA, 1341 nt, Artificial Sequence
  mRNA Design a-3 (hSL-A100) comprising derived and/or modified sequence from Pf(3D7)__XP_001351122.1__HsALB_Pf-CSP(93-397) (opt2)
aggagagggcgcuuggcuugcaaggacccugagcugcggcauugaagcacacccaacccaacucgacugaagucagccucacugaaccggaucugagaaucuucucucucugggcuugccagggcucuccgaaccuagcuagcauccucuucaauuccaacuagaaagcuuaccaugaagugggucaccuucaucucccuccucuuccucuucuccuccgccuacuccaagcucaagcagcccgccgacggcaaccccgaccccaacgccaaccccaacgucgaccccaacgccaaccccaacgucgaccccaacgccaaccccaacgucgaccccaacgccaaccccaacgccaaccccaacgccaaccccaacgccaaccccaacgccaaccccaacgccaaccccaacgccaaccccaacgccaaccccaacgccaaccccaacgccaaccccaacgccaaccccaacgccaaccccaacgccaaccccaacgccaaccccaacgccaaccccaacgccaaccccaacgccaaccccaacgucgaccccaacgccaaccccaacgccaaccccaacgccaaccccaacgccaaccccaacgccaaccccaacgccaaccccaacgccaaccccaacgccaaccccaacgccaaccccaacgccaaccccaacgccaaccccaacgccaaccccaacgccaaccccaacgccaaccccaacgccaaccccaacgccaaccccaacgccaaccccaacgccaaccccaacaagaacaaccagggcaacggccagggccacaacaugcccaacgaccccaaccgcaacgucgacgagaacgccaacgccaacuccgccgucaagaacaacaacaacgaggagcccuccgacaagcacaucaaggaguaccucaacaagauccagaacucccucuccaccgaguggucccccugcuccgucaccugcggcaacggcauccagguccgcaucaagcccggcuccgccaacaagcccaaggacgagcucgacuacgccaacgacaucgagaagaagaucugcaagauggagaagugcuccuccgucuucaacgucgucaacuccuccaucggccucaucaugguccucuccuuccucuuccucaacugaggacuagucccuguucccagagcccacuuuuuuuucuuuuuuugaaauaaaauagccugucuuucagaucucaaaggcucuuuucagagccaccaaaaaaaaaaaaaaaaaaaaaaaaaaaaaaaaaaaaaaaaaaaaaaaaaaaaaaaaaaaaaaaaaaaaaaaaaaaaaaaaaaaaaaaaaaaaaaaaaaaaa

SEQ ID NO: 8344 - RNA, 711 nt, Artificial Sequence
  mRNA Design a-3 (hSL-A100) comprising derived and/or modified sequence from Pf(3D7)__XP_001351122.1__HsALB_Pf-CSP(98-192) (opt2)
aggagagggcgcuuggcuugcaaggacccugagcugcggcauugaagcacacccaacccaacucgacugaagucagccucacugaaccggaucugagaaucuucucucucugggcuugccagggcucuccgaaccuagcuagcauccucuucaauuccaacuagaaagcuuaccaugaagugggucaccuucaucucccuccucuuccucuucuccuccgccuacuccgccgacggcaaccccgaccccaacgccaaccccaacgucgaccccaacgccaaccccaacgucgaccccaacgccaaccccaacgucgaccccaacgccaaccccaacgccaaccccaacgccaaccccaacgccaaccccaacgccaaccccaacgccaaccccaacgccaaccccaacgccaaccccaacgccaaccccaacgccaaccccaacgccaaccccaacgccaaccccaacgccaaccccaacgccaaccccaacgccaaccccaacgccaaccccugaggacuagucccuguucccagagcccacuuuuuuuucuuuuuuugaaauaaaauagccugucuuucagaucucaaaggcucuuuucagagccaccaaaaaaaaaaaaaaaaaaaaaaaaaaaaaaaaaaaaaaaaaaaaaaaaaaaaaaaaaaaaaaaaaaaaaaaaaaaaaaaaaaaaaaaaaaaaaaaaaaaaa

SEQ ID NO: 8345 - RNA, 951 nt, Artificial Sequence
  mRNA Design a-3 (hSL-A100) comprising derived and/or modified sequence from Pf(3D7)__XP_001351122.1__HsALB_Pf-CSP(98-272) (opt2)
aggagagggcgcuuggcuugcaaggacccugagcugcggcauugaagcacacccaacccaacucgacugaagucagccucacugaaccggaucugagaaucuucucucucugggcuugccagggcucuccgaaccuagcuagcauccucuucaauuccaacuagaaagcuuaccaugaagugggucaccuucaucucccuccucuuccucuucuccuccgccuacuccgccgacggcaaccccgaccccaacgccaaccccaacgucgaccccaacgccaaccccaacgucgaccccaacgccaaccccaacgucgaccccaacgccaaccccaacgccaaccccaacgccaaccccaacgccaaccccaacgccaaccccaacgccaaccccaacgccaaccccaacgccaaccccaacgccaaccccaacgccaaccccaacgccaaccccaacgccaaccccaacgccaaccccaacgccaaccccaacgccaaccccaacgccaaccccaacgccaaccccaacgucgaccccaacgccaaccccaacgccaaccccaacgccaaccccaacgccaaccccaacgccaaccccaacgccaaccccaacgccaaccccaacgccaaccccaacgccaaccccaacgccaaccccaacgccaaccccaacgccaaccccaacgccaaccccaacgccaaccccaacgccaaccccaacgccaaccccaacgccaaccccaacgccaaccccugaggacuagucccuguucccagagcccacuuuuuuuucuuuuuuugaaauaaaauagccugucuuucagaucucaaaggcucuuuucagagccaccaaaaaaaaaaaaaaaaaaaaaaaaaaaaaaaaaaaaaaaaaaaaaaaaaaaaaaaaaaaaaaaaaaaaaaaaaaaaaaaaaaaaaaaaaaaaaaaaaaaaa

SEQ ID NO: 8346 - RNA, 1257 nt, Artificial Sequence
  mRNA Design a-3 (hSL-A100) comprising derived and/or modified sequence from Pf(3D7)__XP_001351122.1__HsALB_Pf-CSP(98-374) (opt2)
aggagagggcgcuuggcuugcaaggacccugagcugcggcauugaagcacacccaacccaacucgacugaagucagccucacugaaccggaucugagaaucuucucucucugggcuugccagggcucuccgaaccuagcuagcauccucuucaauuccaacuagaaagcuuaccaugaagugggucaccuucaucucccuccucuuccucuucuccuccgccuacuccgccgacggcaaccccgaccccaacgccaaccccaacgucgaccccaacgccaaccccaacgucgaccccaacgccaaccccaacgucgaccccaacgccaaccccaacgccaaccccaacgccaaccccaacgccaaccccaacgccaaccccaacgccaaccccaacgccaaccccaacgccaaccccaacgccaaccccaacgccaaccccaacgccaaccccaacgccaaccccaacgccaaccccaacgccaaccccaacgccaaccccaacgccaaccccaacgccaaccccaacgucgaccccaacgccaaccccaacgccaaccccaacgccaaccccaacgccaaccccaacgccaaccccaacgccaaccccaacgccaaccccaacgccaaccccaacgccaaccccaacgccaaccccaacgccaaccccaacgccaaccccaacgccaaccccaacgccaaccccaacgccaaccccaacgccaaccccaacgccaaccccaacgccaaccccaacaagaacaaccagggcaacggccagggccacaacaugcccaacgaccccaaccgcaacgucgacgagaacgccaacgccaacuccgccgucaagaacaacaacaacgaggagcccuccgacaagcacaucaaggaguaccucaacaagauccagaacucccucuccaccgaguggucccccugcuccgucaccugcggcaacggcauccagguccgcaucaagcccggcuccgccaacaagcccaaggacgagcucgacuacgccaacgacaucgagaagaagaucugcaagauggagaagugcugaggacuagucccuguucccagagcccacuuuuuuuucuuuuuuugaaauaaaauagccugucuuucagaucucaaaggcucuuuucagagccaccaaaaaaaaaaaaaaaaaaaaaaaaaaaaaaaaaaaaaaaaaaaaaaaaaaaaaaaaaaaaaaaaaaaaaaaaaaaaaaaaaaaaaaaaaaaaaaaaaaaaa

SEQ ID NO: 8347 - RNA, 1326 nt, Artificial Sequence
  mRNA Design a-3 (hSL-A100) comprising derived and/or modified sequence from Pf(3D7)__XP_001351122.1__HsALB_Pf-CSP(98-397) (opt2)
aggagagggcgcuuggcuugcaaggacccugagcugcggcauugaagcacacccaacccaacucgacugaagucagccucacugaaccggaucugagaaucuucucucucugggcuugccagggcucuccgaaccuagcuagcauccucuucaauuccaacuagaaagcuuaccaugaagugggucaccuucaucucccuccucuuccucuucuccuccgccuacuccgccgacggcaaccccgaccccaacgccaaccccaacgucgaccccaacgccaaccccaacgucgaccccaacgccaaccccaacgucgaccccaacgccaaccccaacgccaaccccaacgccaaccccaacgccaaccccaacgccaaccccaacgccaaccccaacgccaaccccaacgccaaccccaacgccaaccccaacgccaaccccaacgccaaccccaacgccaaccccaacgccaaccccaacgccaaccccaacgccaaccccaacgccaaccccaacgccaaccccaacgucgaccccaacgccaaccccaacgccaaccccaacgccaaccccaacgccaaccccaacgccaaccccaacgccaaccccaacgccaaccccaacgccaaccccaacgccaaccccaacgccaaccccaacgccaaccccaacgccaaccccaacgccaaccccaacgccaaccccaacgccaaccccaacgccaaccccaacgccaaccccaacgccaaccccaacaagaacaaccagggcaacggccagggccacaacaugcccaacgaccccaaccgcaacgucgacgagaacgccaacgccaacuccgccgucaagaacaacaacaacgaggagcccuccgacaagcacaucaaggaguaccucaacaagauccagaacucccucuccaccgaguggucccccugcuccgucaccugcggcaacggcauccagguccgcaucaagcccggcuccgccaacaagcccaaggacgagcucgacuacgccaacgacaucgagaagaagaucugcaagauggagaagugcuccuccgucuucaacgucgucaacuccuccaucggccucaucaugguccucuccuuccucuuccucaacugaggacuagucccuguucccagagcccacuuuuuuuucuuuuuuugaaauaaaauagccugucuuucagaucucaaaggcucuuuucagagccaccaaaaaaaaaaaaaaaaaaaaaaaaaaaaaaaaaaaaaaaaaaaaaaaaaaaaaaaaaaaaaaaaaaaaaaaaaaaaaaaaaaaaaaaaaaaaaaaaaaaaa

SEQ ID NO: 8348 - RNA, 1653 nt, Artificial Sequence
  mRNA Design a-3 (hSL-A100) comprising derived and/or modified sequence from Pf(3D7)__XP_001351122.1__HsALB_Pf-CSP(199-377)_L(PVTN)_HBsAg (opt2)
aggagagggcgcuuggcuugcaaggacccugagcugcggcauugaagcacacccaacccaacucgacugaagucagccucacugaaccggaucugagaaucuucucucucugggcuugccagggcucuccgaaccuagcuagcauccucuucaauuccaacuagaaagcuuaccaugaagugggucaccuucaucucccuccucuuccucuucuccuccgccuacuccgaccccaacgccaaccccaacgccaaccccaacgccaaccccaacgccaaccccaacgccaaccccaacgccaaccccaacgccaaccccaacgccaaccccaacgccaaccccaacgccaaccccaacgccaaccccaacgccaaccccaacgccaaccccaacgccaaccccaacgccaaccccaacgccaaccccaacgccaaccccaacgccaaccccaacaagaacaaccagggcaacggccagggccacaacaugcccaacgaccccaaccgcaacgucgacgagaacgccaacgccaacuccgccgucaagaacaacaacaacgaggagcccuccgacaagcacaucaaggaguaccucaacaagauccagaacucccucuccaccgaguggucccccugcuccgucaccugcggcaacggcauccagguccgcaucaagcccggcuccgccaacaagcccaaggacgagcucgacuacgccaacgacaucgagaagaagaucugcaagauggagaagugcuccuccguccccgucaccaacauggagaacaucaccuccggcuuccucggcccccuccucguccuccaggccggcuucuuccuccucacccgcauccucaccaucccccagucccucgacuccugguggaccucccucaacuuccucggcggcucccccgucugccucggccagaacucccagucccccaccuccaaccacucccccaccuccugcccccccaucugccccggcuaccgcuggaugugccuccgccgcuucaucaucuuccucuucauccuccuccucugccucaucuuccuccucguccuccucgacuaccagggcaugcuccccgucugcccccucauccccggcuccaccaccaccaacaccggccccugcaagaccugcaccacccccgcccagggcaacuccauguuccccuccugcugcugcaccaagcccaccgacggcaacugcaccugcauccccauccccuccuccugggccuucgccaaguaccucugggagugggccuccguccgcuucuccuggcucucccuccucguccccuucguccagugguucgucggccucucccccaccgucuggcucuccgccaucuggaugaugugguacuggggccccucccucuacuccaucgucucccccuucaucccccuccuccccaucuucuucugccucugggucuacaucugaggacuagucccuguucccagagcccacuuuuuuuucuuuuuuugaaauaaaauagccugucuuucagaucucaaaggcucuuuucagagccaccaaaaaaaaaaaaaaaaaaaaaaaaaaaaaaaaaaaaaaaaaaaaaaaaaaaaaaaaaaaaaaaaaaaaaaaaaaaaaaaaaaaaaaaaaaaaaaaaaaaaa

SEQ ID NO: 8349 - RNA, 1563 nt, Artificial Sequence
  mRNA Design a-3 (hSL-A100) comprising derived and/or modified sequence from Pf(3D7)__XP_001351122.1__Pf-CSP (opt3)
aggagagggcgcuuggcuugcaaggacccugagcugcggcauugaagcacacccaacccaacucgacugaagucagccucacugaaccggaucugagaaucuucucucucugggcuugccagggcucuccgaaccuagcuagcauccucuucaauuccaacuagaaagcuuaccaugaugagaaagcuggccauccucagcguguccucuuuccuuuuugucgaggcucuguuccaggaauaccaaugcuauggcucaaguagcaacaccaggguuuugaaugaguuaaacuacgacaaugcagggacaaaccuguauaaugaacuagagaugaacuacuauggaaaacaggaaaauugguacucccucaagaaaaacucucggucgcugggugagaaugaugacggcaacaaugaggauaacgaaaaacuucgcaagcccaagcacaagaaacugaagcagccugccgacgggaauccagauccgaacgcgaaucccaacguggacccuaacgcuaauccaaacguagaucccaaugccaacccuaauguggacccaaacgcaaaucccaacgccaauccuaacgcuaauccaaacgcaaauccgaacgccaaucccaacgcuaacccuaaugccaacccaaaugcgaaccccaaugcaaacccuaaugccaacccaaaugcuaaccccaaugccaacccgaaugcaaacccuaaugcuaaccccaacgccaauccaaacgcgaauccuaacgccaaucccaacgucgauccaaaugcaaaccccaaugcuaacccuaaugccaacccaaaugcuaacccgaaugccaaccccaacgcaaauccuaacgccaauccaaacgcuaaucccaacgcgaauccuaacgcaaauccaaacgccaaucccaacgcuaauccgaacgccaauccuaacgcaaauccaaacgccaaccccaaugcuaacccuaaugccaaccccaaugcaaacccaaauaaaaacaaucagggaaacggccaaggucauaauaugccuaacgaccccaaucgaaacguggaugagaaugcgaacgcuaacucagccguuaagaauaacaauaacgaggaaccaagcgacaaacacauuaaggaguauuugaauaagauacagaacagucucuccacugaauggucuccguguagcgugacgugcgggaauggaauccagguccguauuaaaccuggcuccgcaaacaagcccaaagaugagcuggacuacgccaaugacaucgaaaagaaaauuuguaagauggagaaaugcucaaguguguuuaacguaguuaauagcucuaucggccugauaauggugcucuccuucuuauuucugaacugaggacuagucccuguucccagagcccacuuuuuuuucuuuuuuugaaauaaaauagccugucuuucagaucucaaaggcucuuuucagagccaccaaaaaaaaaaaaaaaaaaaaaaaaaaaaaaaaaaaaaaaaaaaaaaaaaaaaaaaaaaaaaaaaaaaaaaaaaaaaaaaaaaaaaaaaaaaaaaaaaaaaa

SEQ ID NO: 8350 - RNA, 1494 nt, Artificial Sequence
  mRNA Design a-3 (hSL-A100) comprising derived and/or modified sequence from Pf(3D7)__XP_001351122.1__Pf-CSP(1-374) (opt3)
aggagagggcgcuuggcuugcaaggacccugagcugcggcauugaagcacacccaacccaacucgacugaagucagccucacugaaccggaucugagaaucuucucucucugggcuugccagggcucuccgaaccuagcuagcauccucuucaauuccaacuagaaagcuuaccaugaugagaaagcuggccauccucagcguguccucuuuccuuuuugucgaggcucuguuccaggaauaccaaugcuauggcucaaguagcaacaccaggguuuugaaugaguuaaacuacgacaaugcagggacaaaccuguauaaugaacuagagaugaacuacuauggaaaacaggaaaauugguacucccucaagaaaaacucucggucgcugggugagaaugaugacggcaacaaugaggauaacgaaaaacuucgcaagcccaagcacaagaaacugaagcagccugccgacgggaauccagauccgaacgcgaaucccaacguggacccuaacgcuaauccaaacguagaucccaaugccaacccuaauguggacccaaacgcaaaucccaacgccaauccuaacgcuaauccaaacgcaaauccgaacgccaaucccaacgcuaacccuaaugccaacccaaaugcgaaccccaaugcaaacccuaaugccaacccaaaugcuaaccccaaugccaacccgaaugcaaacccuaaugcuaaccccaacgccaauccaaacgcgaauccuaacgccaaucccaacgucgauccaaaugcaaaccccaaugcuaacccuaaugccaacccaaaugcuaacccgaaugccaaccccaacgcaaauccuaacgccaauccaaacgcuaaucccaacgcgaauccuaacgcaaauccaaacgccaaucccaacgcuaauccgaacgccaauccuaacgcaaauccaaacgccaaccccaaugcuaacccuaaugccaaccccaaugcaaacccaaauaaaaacaaucagggaaacggccaaggucauaauaugccuaacgaccccaaucgaaacguggaugagaaugcgaacgcuaacucagccguuaagaauaacaauaacgaggaaccaagcgacaaacacauuaaggaguauuugaauaagauacagaacagucucuccacugaauggucuccguguagcgugacgugcgggaauggaauccagguccguauuaaaccuggcuccgcaaacaagcccaaagaugagcuggacuacgccaaugacaucgaaaagaaaauuuguaagauggagaaaugcugaggacuagucccuguucccagagcccacuuuuuuuucuuuuuuugaaauaaaauagccugucuuucagaucucaaaggcucuuuucagagccaccaaaaaaaaaaaaaaaaaaaaaaaaaaaaaaaaaaaaaaaaaaaaaaaaaaaaaaaaaaaaaaaaaaaaaaaaaaaaaaaaaaaaaaaaaaaaaaaaaaaaa

SEQ ID NO: 8351 - RNA, 1347 nt, Artificial Sequence
  mRNA Design a-3 (hSL-A100) comprising derived and/or modified sequence from Pf(3D7)__XP_001351122.1__Pf-CSP(1-325) (opt3)
aggagagggcgcuuggcuugcaaggacccugagcugcggcauugaagcacacccaacccaacucgacugaagucagccucacugaaccggaucugagaaucuucucucucugggcuugccagggcucuccgaaccuagcuagcauccucuucaauuccaacuagaaagcuuaccaugaugagaaagcuggccauccucagcguguccucuuuccuuuuugucgaggcucuguuccaggaauaccaaugcuauggcucaaguagcaacaccaggguuuugaaugaguuaaacuacgacaaugcagggacaaaccuguauaaugaacuagagaugaacuacuauggaaaacaggaaaauugguacucccucaagaaaaacucucggucgcugggugagaaugaugacggcaacaaugaggauaacgaaaaacuucgcaagcccaagcacaagaaacugaagcagccugccgacgggaauccagauccgaacgcgaaucccaacguggacccuaacgcuaauccaaacguagaucccaaugccaacccuaauguggacccaaacgcaaaucccaacgccaauccuaacgcuaauccaaacgcaaauccgaacgccaaucccaacgcuaacccuaaugccaacccaaaugcgaaccccaaugcaaacccuaaugccaacccaaaugcuaaccccaaugccaacccgaaugcaaacccuaaugcuaaccccaacgccaauccaaacgcgaauccuaacgccaaucccaacgucgauccaaaugcaaaccccaaugcuaacccuaaugccaacccaaaugcuaacccgaaugccaaccccaacgcaaauccuaacgccaauccaaacgcuaaucccaacgcgaauccuaacgcaaauccaaacgccaaucccaacgcuaauccgaacgccaauccuaacgcaaauccaaacgccaaccccaaugcuaacccuaaugccaaccccaaugcaaacccaaauaaaaacaaucagggaaacggccaaggucauaauaugccuaacgaccccaaucgaaacguggaugagaaugcgaacgcuaacucagccguuaagaauaacaauaacgaggaaccaagcgacaaacacauuaaggaguauuugaauaagauacagaacugaggacuagucccuguucccagagcccacuuuuuuuucuuuuuuugaaauaaaauagccugucuuucagaucucaaaggcucuuuucagagccaccaaaaaaaaaaaaaaaaaaaaaaaaaaaaaaaaaaaaaaaaaaaaaaaaaaaaaaaaaaaaaaaaaaaaaaaaaaaaaaaaaaaaaaaaaaaaaaaaaaaaa

SEQ ID NO: 8352 - RNA, 1563 nt, Artificial Sequence
  mRNA Design a-3 (hSL-A100) comprising derived and/or modified sequence from Pf(3D7)__XP_001351122.1__HsALB_Pf-CSP(19-397) (opt3)
aggagagggcgcuuggcuugcaaggacccugagcugcggcauugaagcacacccaacccaacucgacugaagucagccucacugaaccggaucugagaaucuucucucucugggcuugccagggcucuccgaaccuagcuagcauccucuucaauuccaacuagaaagcuuaccaugaagugggugaccuucaucagccugcucuuucuuuucuccucugccuacucacuguuucaggaguaucaaugcuacggcaguagcuccaacacaagagucuugaaugaauuaaacuaugacaaugcugggacuaaccuguacaaugagcuagaaaugaacuauuacggaaaacaggagaauugguauucucucaagaaaaacucgaggucacugggugaaaaugaugacggcaacaaugaggauaacgagaaacuucggaagcccaagcacaagaaacugaagcagccugcagacgggaauccagauccgaacgccaaucccaacguugacccuaacgcgaauccaaacguggaucccaaugcuaacccuaauguagacccaaacgccaaucccaacgcaaauccuaacgccaauccaaacgcuaauccgaacgcaaaucccaacgccaacccuaaugcuaacccaaaugccaaccccaaugcgaacccuaaugcaaacccaaaugccaaccccaaugcuaacccgaaugccaacccuaaugcaaaccccaacgcuaauccaaacgccaauccuaacgcgaaucccaacguggauccaaaugccaaccccaaugcaaacccuaaugcuaacccaaaugccaacccgaaugcuaaccccaacgccaauccuaacgcaaauccaaacgccaaucccaacgcuaauccuaacgcgaauccaaacgcaaaucccaacgccaauccgaacgcuaauccuaacgccaauccaaacgcaaaccccaaugccaacccuaaugcuaaccccaaugccaacccaaauaaaaacaaucagggaaacggccaaggucauaauaugccuaacgaccccaaucgcaacgucgaugaaaaugcaaacgcgaacagcgcugugaagaauaacaauaacgaggaaccaagugacaaacacauuaaggaguacuugaauaagauacagaacucccucucuacggaguggagcccguguuccguuaccugcgggaauggaauccaggugcgaauuaaaccuggcucagccaacaagcccaaagaugaacuggacuacgcaaaugacaucgagaagaaaauuuguaagauggaaaaaugcaguagcgucuucaacgugguaaauucuuccaucggccugauaaugguucucucauuuuuauuccugaacugaggacuagucccuguucccagagcccacuuuuuuuucuuuuuuugaaauaaaauagccugucuuucagaucucaaaggcucuuuucagagccaccaaaaaaaaaaaaaaaaaaaaaaaaaaaaaaaaaaaaaaaaaaaaaaaaaaaaaaaaaaaaaaaaaaaaaaaaaaaaaaaaaaaaaaaaaaaaaaaaaaaaa

SEQ ID NO: 8353 - RNA, 1581 nt, Artificial Sequence
  mRNA Design a-3 (hSL-A100) comprising derived and/or modified sequence from Pf(3D7)__XP_001351122.1__HsIns-iso1_Pf-CSP(19-397) (opt3)
aggagagggcgcuuggcuugcaaggacccugagcugcggcauugaagcacacccaacccaacucgacugaagucagccucacugaaccggaucugagaaucuucucucucugggcuugccagggcucuccgaaccuagcuagcauccucuucaauuccaacuagaaagcuuaccauggcccuguggaugagacuccuuccccuguuggcuuuacuggcacuauggggcccugacccagccgcggcucucuuccaggaguaccaaugcuaugggagcuccucuaacaccagggugcugaaugaacuuaacuacgauaaugccggaacaaaccuguauaaugaguuggaaaugaacuacuaugguaagcaggagaauugguacucacucaaaaagaacagucggagccugggcgaaaaugacgaugggaacaaugaggacaacgagaaacugcgcaagccgaaacacaagaagcucaaacagcccgcagauggaaauccugacccaaacgccaaucccaacgucgauccuaacgcuaauccaaacguugaccccaaugcaaacccuaauguggauccaaacgccaauccgaacgcuaaucccaacgccaauccuaacgcgaauccaaacgcaaaucccaacgccaacccuaaugcuaacccaaaugccaaccccaaugcaaacccgaaugcuaacccuaaugccaaccccaaugcgaacccaaaugccaacccuaaugcaaaccccaacgcuaauccaaacgccaaucccaacgcuaauccuaacguagacccaaaugccaacccgaaugcaaaccccaaugccaacccuaaugcuaacccaaaugcgaaccccaacgcaaauccuaacgccaauccaaacgcuaaucccaacgccaauccgaacgcaaauccuaacgccaauccaaacgcuaaucccaacgccaauccuaacgcaaaucccaacgcgaacccaaaugcuaacccuaaugccaaccccaaugcaaacccaaauaagaacaaucagggcaacggucaagggcauaauaugccgaacgauccuaaucgaaacguggacgaaaaugccaacgcuaacuccgccgucaaaaauaacaauaacgaggaacccucugauaagcacaucaaagaguauuuaaauaagauucagaacucgcugucaacugaguggagcccauguagugugacgugcggaaauggcauacagguucguaucaagcccggcuccgcaaacaaaccuaaggacgaacuugacuacgcuaaugauauugagaaaaagaucuguaaaauggaaaagugcucuagcguguuuaacgucguaaauuccucaauuggguugaucauggugcugaguuuccuauuucucaacugaggacuagucccuguucccagagcccacuuuuuuuucuuuuuuugaaauaaaauagccugucuuucagaucucaaaggcucuuuucagagccaccaaaaaaaaaaaaaaaaaaaaaaaaaaaaaaaaaaaaaaaaaaaaaaaaaaaaaaaaaaaaaaaaaaaaaaaaaaaaaaaaaaaaaaaaaaaaaaaaaaaaa

SEQ ID NO: 8354 - RNA, 1560 nt, Artificial Sequence
  mRNA Design a-3 (hSL-A100) comprising derived and/or modified sequence from Pf(3D7)__XP_001351122.1__HsSPARC_Pf-CSP(19-397) (opt3)
aggagagggcgcuuggcuugcaaggacccugagcugcggcauugaagcacacccaacccaacucgacugaagucagccucacugaaccggaucugagaaucuucucucucugggcuugccagggcucuccgaaccuagcuagcauccucuucaauuccaacuagaaagcuuaccaugagagccuggaucuucuuucugcucugccuugcuggcagggcacuggccuuguuccaggaguaccaauguuaugggagcuccucuaacacccggguguuaaaugaacugaacuacgacaaugcgggaacaaaccuauauaaugagcucgaaaugaacuacuaugguaagcaggagaauugguacucacugaaaaagaacagucgcagccuuggcgaaaaugaugacgggaacaaugaggauaacgagaaacugcgaaagcccaaacacaagaaguugaaacagccugcugacggaaauccagauccgaacgccaaucccaacgucgacccuaacgcaaauccaaacguugaucccaaugccaacccuaauguggacccaaacgcuaaucccaacgcaaauccuaacgccaauccaaacgcuaauccgaacgccaaucccaacgcgaacccuaaugcaaacccaaaugccaaccccaaugcuaacccuaaugccaacccaaaugcaaaccccaaugcuaacccgaaugccaacccuaaugcgaaccccaacgccaauccaaacgcaaauccuaacgcuaaucccaacguagauccaaaugccaaccccaaugcuaacccuaaugccaacccaaaugcaaacccgaaugccaaccccaacgcuaauccuaacgcgaauccaaacgcaaaucccaacgccaauccuaacgcuaauccaaacgccaaucccaacgcaaauccgaacgccaauccuaacgcuaauccaaacgccaaccccaaugcaaacccuaaugcgaaccccaaugcuaacccaaauaagaacaaucagggcaacggucaagggcauaauaugccuaacgaccccaaucguaacguggaugaaaaugccaacgcaaacuccgccgucaaaaauaacaauaacgaggaaccaucugacaagcacauuaaagaguaucucaauaagauacagaacucgcugucaacugaguggagcccgugcagugugacguguggaaauggcauccagguuagaauuaagccuggcuccgcuaacaaacccaaggaugaacuggacuacgccaaugacaucgagaaaaagauuugcaaaauggaaaaguguucuagcguguuuaacgucguaaauuccucaaucgggcucauaaugguguuaaguuuccuguuucuuaacugaggacuagucccuguucccagagcccacuuuuuuuucuuuuuuugaaauaaaauagccugucuuucagaucucaaaggcucuuuucagagccaccaaaaaaaaaaaaaaaaaaaaaaaaaaaaaaaaaaaaaaaaaaaaaaaaaaaaaaaaaaaaaaaaaaaaaaaaaaaaaaaaaaaaaaaaaaaaaaaaaaaaa

SEQ ID NO: 8355 - RNA, 1563 nt, Artificial Sequence
  mRNA Design a-3 (hSL-A100) comprising derived and/or modified sequence from Pf(3D7)__XP_001351122.1__IgE_Pf-CSP(19-397) (opt3)
aggagagggcgcuuggcuugcaaggacccugagcugcggcauugaagcacacccaacccaacucgacugaagucagccucacugaaccggaucugagaaucuucucucucugggcuugccagggcucuccgaaccuagcuagcauccucuucaauuccaacuagaaagcuuaccauggacuggaccuggauccuguuccucguggccgcugcaacaagaguccacagccuuuuucaggaguaccaaugcuauggcuccucuucaaacacuaggguucugaaugaauugaacuacgauaaugccgggacgaacuuauauaaugagcuggaaaugaacuacuauggaaagcaggagaauugguacagucuaaagaagaacagccggucccucggugaaaaugacgauggcaacaaugaggacaacgagaaacugcgcaagcccaaacauaagaaacuuaaacagccugcggaugggaauccagacccgaacgcuaaucccaacguggauccuaacgccaauccaaacguagaccccaaugcaaacccuaauguggauccaaacgccaaucccaacgcuaauccuaacgcaaauccaaacgccaauccgaacgcuaaucccaacgccaacccuaaugcgaacccaaaugcaaaccccaaugccaacccuaaugcuaacccaaaugccaaccccaaugcaaacccgaaugcuaacccuaaugccaaccccaacgcgaauccaaacgccaauccuaacgcaaaucccaacgucgacccaaaugcuaaccccaaugccaacccuaaugcuaacccaaaugccaacccgaaugcaaaccccaacgccaauccuaacgcuaauccaaacgcgaaucccaacgcaaauccuaacgccaauccaaacgcuaaucccaacgccaauccgaacgcaaauccuaacgccaauccaaacgcuaaccccaaugccaacccuaaugcaaaccccaaugcgaacccaaauaagaacaaucagggaaacggccaaggucacaauaugccuaacgaucccaaucgaaacguggacgaaaaugcuaacgccaacucugcaguuaaaaauaacaauaacgaggaaccaucggauaagcauauuaaagaguaucugaauaagauacagaacucauugagcaccgaguggaguccguguuccgugacaugcgggaauggaauccagguccguauuaagccuggcucugccaacaaacccaaggacgaacucgacuacgcuaaugauaucgagaaaaagauuuguaaaauggaaaagugcagcuccguguucaacguaguuaauucaaguaucggccugauaauggugcugagcuuucucuucuuaaacugaggacuagucccuguucccagagcccacuuuuuuuucuuuuuuugaaauaaaauagccugucuuucagaucucaaaggcucuuuucagagccaccaaaaaaaaaaaaaaaaaaaaaaaaaaaaaaaaaaaaaaaaaaaaaaaaaaaaaaaaaaaaaaaaaaaaaaaaaaaaaaaaaaaaaaaaaaaaaaaaaaaaa

SEQ ID NO: 8356 - RNA, 1728 nt, Artificial Sequence
  mRNA Design a-3 (hSL-A100) comprising derived and/or modified sequence from Pf(3D7)__XP_001351122.1__Pf-CSP_L(G4SG4)_TM domain HA (opt3)
aggagagggcgcuuggcuugcaaggacccugagcugcggcauugaagcacacccaacccaacucgacugaagucagccucacugaaccggaucugagaaucuucucucucugggcuugccagggcucuccgaaccuagcuagcauccucuucaauuccaacuagaaagcuuaccaugaugagaaagcuggccauccucagcguguccucuuuccuuuuugucgaggcucuguuccaggaauaccaaugcuauggcucaaguagcaacaccaggguuuugaaugaguuaaacuacgacaaugcagggacaaaccuguauaaugaacuagagaugaacuacuauggaaagcaggaaaauugguacucccucaagaaaaacucucggucgcugggugagaaugaugacggcaacaaugaggauaacgaaaaacuucgcaagcccaagcacaagaaacugaagcagccugccgacgggaauccagauccgaacgcgaaucccaacguggacccuaacgcuaauccaaacguagaucccaaugccaacccuaauguggacccaaacgcaaaucccaacgccaauccuaacgcuaauccaaacgcaaauccgaacgccaaucccaacgcuaacccuaaugccaacccaaaugcgaaccccaaugcaaacccuaaugccaacccaaaugcuaaccccaaugccaacccgaaugcaaacccuaaugcuaaccccaacgccaauccaaacgcgaauccuaacgccaaucccaacgucgauccaaaugcaaaccccaaugcuaacccuaaugccaacccaaaugcuaacccgaaugccaaccccaacgcaaauccuaacgccaauccaaacgcuaaucccaacgcgaauccuaacgcaaauccaaacgccaaucccaacgcuaauccgaacgccaauccuaacgcaaauccaaacgccaaccccaaugcuaacccuaaugccaaccccaaugcaaacccaaauaaaaacaaucagggaaacggccaaggucauaauaugccuaacgaccccaaucgaaacguggaugagaaugcgaacgcuaacucagccguuaagaauaacaauaacgaggaaccaagcgacaaacacauuaaggaguauuugaauaagauacagaacagucucuccacugaauggucuccguguagcgugacgugcgggaauggaauccagguccguauuaaaccuggcuccgcaaacaagcccaaagaugagcuggacuacgccaaugacaucgaaaagaaaauuuguaagauggagaaaugcucaaguguguuuaacguaguuaauagcucuaucggccugauaauggugcucuccuucuuauuucugaacgggggagguggcucagggggaggcgguaaacuugaaagcaccagaaucuaccagauuuuggcuaucuauaguacagucgccucuucccuggugcuaguggucagccucggggcaauuucguucuggauguguucuaauggaucccugcaaugcaggaucuguauaugaggacuagucccuguucccagagcccacuuuuuuuucuuuuuuugaaauaaaauagccugucuuucagaucucaaaggcucuuuucagagccaccaaaaaaaaaaaaaaaaaaaaaaaaaaaaaaaaaaaaaaaaaaaaaaaaaaaaaaaaaaaaaaaaaaaaaaaaaaaaaaaaaaaaaaaaaaaaaaaaaaaaa

SEQ ID NO: 8357 - RNA, 1602 nt, Artificial Sequence
  mRNA Design a-3 (hSL-A100) comprising derived and/or modified sequence from Pf(3D7)__XP_001351122.1__Pf-CSP(199-377)_L(PVTN)_HBsAg (opt3)
aggagagggcgcuuggcuugcaaggacccugagcugcggcauugaagcacacccaacccaacucgacugaagucagccucacugaaccggaucugagaaucuucucucucugggcuugccagggcucuccgaaccuagcuagcauccucuucaauuccaacuagaaagcuuaccauggaccccaacgccaauccuaacgcuaauccaaacgcaaauccgaacgccaaucccaacgcgaauccuaacgcuaauccaaacgccaaucccaacgcaaauccuaacgccaacccaaaugcuaaccccaaugcaaacccuaaugccaacccaaaugcuaacccgaaugccaaccccaaugcgaacccuaaugcaaacccaaaugccaaccccaacgcuaauccuaacaagaauaaccagggcaaugggcaaggacacaacaugccaaaugaucccaacagaaauguggacgagaacgccaaugcaaacagcgcugucaaaaauaacaauaacgaggaaccguccgauaagcauaucaaagaauaccugaacaagauucaaaauucucucucaaccgaguggaguccuugcagcguuacaugugguaacggcauacaggugaggaucaaacccggguccgccaauaagccaaaggacgaacuugauuaugcgaacgacauugagaaaaagaucugcaaaauggagaaguguucuucgguaccugugacuaauauggaaaacauuacgucaggauuccugggccccuuguuaguccugcaggccggguuuuuccuacucacccggauccugacaauaccacagagccuugauaguugguggacuucccugaauuuucucgguggaucucccgugugcuugggccagaacagccaguccccuaccucaaaucacaguccaacaagcuguccgcccaucugcccuggcuaccgcuggaugugucugcgacguuucauuaucuuucuguucauucucuuacugugccuuaucuuuuugcugguucuacucgacuaucaggggaugcugccaguguguccccuuauaccuggaucuaccacuacaaacaccgguccaugcaaaacguguacuacccccgcacaaggcaauuccauguucccgucaugcugcuguacaaagccuacugaugggaacugcaccuguauuccaauccccagcaguugggcuuuugccaaguaccugugggagugggcuucugucagauucuccugguugagccuccuggugccuuuuguacagugguucguuggauuaucgcccacaguguggcugucugccauuuggaugaugugguauuggggcccaucccucuacucaaucgucaguccuuuuaucccccuucugccaauuuucuucugcuuguggguguauauaugaggacuagucccuguucccagagcccacuuuuuuuucuuuuuuugaaauaaaauagccugucuuucagaucucaaaggcucuuuucagagccaccaaaaaaaaaaaaaaaaaaaaaaaaaaaaaaaaaaaaaaaaaaaaaaaaaaaaaaaaaaaaaaaaaaaaaaaaaaaaaaaaaaaaaaaaaaaaaaaaaaaaa

SEQ ID NO: 8358 - RNA, 1644 nt, Artificial Sequence
  mRNA Design a-3 (hSL-A100) comprising derived and/or modified sequence from Pf(3D7)__XP_001351122.1__Pf-CSP(199-387)_L(PVTN)_HBsAg (opt3)
aggagagggcgcuuggcuugcaaggacccugagcugcggcauugaagcacacccaacccaacucgacugaagucagccucacugaaccggaucugagaaucuucucucucugggcuugccagggcucuccgaaccuagcuagcauccucuucaauuccaacuagaaagcuuaccaugauggcccccgacccuaacgcuaauccaaacgcaaauccgaacgccaaucccaacgcgaauccuaacgcuaauccaaacgccaaucccaacgcaaauccuaacgccaauccaaacgcuaaccccaaugcaaacccuaaugccaacccaaaugcuaacccgaaugccaaccccaaugcgaacccuaaugcaaacccaaaugccaaccccaaugcuaacccuaacgccaauccaaacaagaauaaccagggcaaugggcaaggacacaacaugcccaaugauccgaacagaaauguggacgagaacgcaaaugcuaacagcgccgucaaaaauaacaauaacgaggaaccuuccgauaagcauaucaaagaauaccugaacaagauucaaaauucucucucaaccgaguggagucccugcagcguuacaugugguaacggcauacaggugaggaucaaaccaggguccgcgaauaagccuaaggacgaacuugauuaugccaacgacauugagaaaaagaucugcaaaauggagaaguguucuucgguauucaauguggucaacucaagcauuggacugggccccgugacuaauauggaaaacaucacgaguggguuuuuggguccauuacugguucuacaggcaggauucuuucuccugacccggauacuuacaaucccccagucccuggauucuugguggacuagcuugaauuuccucggcggcuccccugugugccuggggcagaacucacagaguccaaccagcaaucacucuccgacauccugucccccuauuugcccaggauaccgcuggaugugucugcgacguuuuaucauuuuccucuuuaucuuacugcuuugcuugauauuccugcuaguccuccuggacuaucaggguaugcuucccguguguccucugauuccaggcucaaccacuacaaacaccgggcccugcaaaacguguacuaccccggcucaaggaaauagcauguuuccuaguugcugcuguacaaagccaacugauggcaacugcaccuguauccccauuccuucuuccugggccuucgcuaaguacuugugggagugggccagcguaagauuuucguggcucucucuguuaguucccuucgugcagugguuugucggucuguccccaacaguguggcucucagcaaucuggaugaugugguauugggggccuagucuuuacagcaucgugucccccuucauuccacuguugccgauauucuuuugccuaugggucuauaucugaggacuagucccuguucccagagcccacuuuuuuuucuuuuuuugaaauaaaauagccugucuuucagaucucaaaggcucuuuucagagccaccaaaaaaaaaaaaaaaaaaaaaaaaaaaaaaaaaaaaaaaaaaaaaaaaaaaaaaaaaaaaaaaaaaaaaaaaaaaaaaaaaaaaaaaaaaaaaaaaaaaaa

SEQ ID NO: 8359 - RNA, 828 nt, Artificial Sequence
  mRNA Design a-3 (hSL-A100) comprising derived and/or modified sequence from Pf(3D7)__XP_001351122.1__HsALB_Pf-CSP(19-152) (opt3)
aggagagggcgcuuggcuugcaaggacccugagcugcggcauugaagcacacccaacccaacucgacugaagucagccucacugaaccggaucugagaaucuucucucucugggcuugccagggcucuccgaaccuagcuagcauccucuucaauuccaacuagaaagcuuaccaugaagugggugaccuucaucagccugcucuuucuuuucuccucugccuacucacuguuucaggaguaucaaugcuacggcaguagcuccaacacaagagucuugaaugaauuaaacuaugacaaugcugggacuaaccuguacaaugagcuagaaaugaacuauuacggaaaacaggagaauugguauucucucaagaaaaacucgaggucacugggugaaaaugaugacggcaacaaugaggauaacgagaaacuucggaagcccaagcacaagaaacugaagcagccugcagacgggaauccagauccgaacgccaaucccaacguugacccuaacgcgaauccaaacguggaucccaaugcuaacccuaauguagacccaaacgccaaucccaacgcaaauccuaacgccaauccaaacgcuaauccgaacgcaaaucccaacgccaacccuugaggacuagucccuguucccagagcccacuuuuuuuucuuuuuuugaaauaaaauagccugucuuucagaucucaaaggcucuuuucagagccaccaaaaaaaaaaaaaaaaaaaaaaaaaaaaaaaaaaaaaaaaaaaaaaaaaaaaaaaaaaaaaaaaaaaaaaaaaaaaaaaaaaaaaaaaaaaaaaaaaaaaa

SEQ ID NO: 8360 - RNA, 948 nt, Artificial Sequence
  mRNA Design a-3 (hSL-A100) comprising derived and/or modified sequence from Pf(3D7)__XP_001351122.1__HsALB_Pf-CSP(19-192) (opt3)
aggagagggcgcuuggcuugcaaggacccugagcugcggcauugaagcacacccaacccaacucgacugaagucagccucacugaaccggaucugagaaucuucucucucugggcuugccagggcucuccgaaccuagcuagcauccucuucaauuccaacuagaaagcuuaccaugaagugggugaccuucaucagccugcucuuucuuuucuccucugccuacucacuguuucaggaguaucaaugcuacggcaguagcuccaacacaagagucuugaaugaauuaaacuaugacaaugcugggacuaaccuguacaaugagcuagaaaugaacuauuacggaaaacaggagaauugguauucucucaagaaaaacucgaggucacugggugaaaaugaugacggcaacaaugaggauaacgagaaacuucggaagcccaagcacaagaaacugaagcagccugcagacgggaauccagauccgaacgccaaucccaacguugacccuaacgcgaauccaaacguggaucccaaugcuaacccuaauguagacccaaacgccaaucccaacgcaaauccuaacgccaauccaaacgcuaauccgaacgcaaaucccaacgccaacccuaaugcuaacccaaaugccaaccccaaugcgaacccuaaugcaaacccaaaugccaaccccaaugcuaacccgaaugccaacccuaaugcaaaccccaacgcuaauccaaacgccaauccuugaggacuagucccuguucccagagcccacuuuuuuuucuuuuuuugaaauaaaauagccugucuuucagaucucaaaggcucuuuucagagccaccaaaaaaaaaaaaaaaaaaaaaaaaaaaaaaaaaaaaaaaaaaaaaaaaaaaaaaaaaaaaaaaaaaaaaaaaaaaaaaaaaaaaaaaaaaaaaaaaaaaaa

SEQ ID NO: 8361 - RNA, 1188 nt, Artificial Sequence
  mRNA Design a-3 (hSL-A100) comprising derived and/or modified sequence from Pf(3D7)__XP_001351122.1__HsALB_Pf-CSP(19-272) (opt3)
aggagagggcgcuuggcuugcaaggacccugagcugcggcauugaagcacacccaacccaacucgacugaagucagccucacugaaccggaucugagaaucuucucucucugggcuugccagggcucuccgaaccuagcuagcauccucuucaauuccaacuagaaagcuuaccaugaagugggugaccuucaucagccugcucuuucuuuucuccucugccuacucacuguuucaggaguaucaaugcuacggcaguagcuccaacacaagagucuugaaugaauuaaacuaugacaaugcugggacuaaccuguacaaugagcuagaaaugaacuauuacggaaaacaggagaauugguauucucucaagaaaaacucgaggucacugggugaaaaugaugacggcaacaaugaggauaacgagaaacuucggaagcccaagcacaagaaacugaagcagccugcagacgggaauccagauccgaacgccaaucccaacguugacccuaacgcgaauccaaacguggaucccaaugcuaacccuaauguagacccaaacgccaaucccaacgcaaauccuaacgccaauccaaacgcuaauccgaacgcaaaucccaacgccaacccuaaugcuaacccaaaugccaaccccaaugcgaacccuaaugcaaacccaaaugccaaccccaaugcuaacccgaaugccaacccuaaugcaaaccccaacgcuaauccaaacgccaauccuaacgcgaaucccaacguggauccaaaugccaaccccaaugcaaacccuaaugcuaacccaaaugccaacccgaaugcuaaccccaacgccaauccuaacgcaaauccaaacgccaaucccaacgcuaauccuaacgcgaauccaaacgcaaaucccaacgccaauccgaacgcuaauccuaacgccaauccaaacgcaaaccccaaugccaacccuaaugcuaaccccaaugccaacccaugaggacuagucccuguucccagagcccacuuuuuuuucuuuuuuugaaauaaaauagccugucuuucagaucucaaaggcucuuuucagagccaccaaaaaaaaaaaaaaaaaaaaaaaaaaaaaaaaaaaaaaaaaaaaaaaaaaaaaaaaaaaaaaaaaaaaaaaaaaaaaaaaaaaaaaaaaaaaaaaaaaaaa

SEQ ID NO: 8362 - RNA, 1350 nt, Artificial Sequence
  mRNA Design a-3 (hSL-A100) comprising derived and/or modified sequence from Pf(3D7)__XP_001351122.1__HsALB_Pf-CSP(19-272)_L(AAY)_Pf-CSP(310-3 27)_L(AAY)_Pf-CSP(346-375) (opt3)
aggagagggcgcuuggcuugcaaggacccugagcugcggcauugaagcacacccaacccaacucgacugaagucagccucacugaaccggaucugagaaucuucucucucugggcuugccagggcucuccgaaccuagcuagcauccucuucaauuccaacuagaaagcuuaccaugaagugggugaccuucaucagccugcucuuucuuuucuccucugccuacucacuguuucaggaguaucaaugcuacggcaguagcuccaacacaagagucuugaaugaauuaaacuaugacaaugcugggacuaaccuguacaaugagcuagaaaugaacuauuacggaaaacaggagaauugguauucucucaagaaaaacucgaggucacugggugaaaaugaugacggcaacaaugaggauaacgagaaacuucggaagcccaagcacaagaaacugaagcagccugcagacgggaauccagauccgaacgccaaucccaacguugacccuaacgcgaauccaaacguggaucccaaugcuaacccuaauguagacccaaacgccaaucccaacgcaaauccuaacgccaauccaaacgcuaauccgaacgcaaaucccaacgccaacccuaaugcuaacccaaaugccaaccccaaugcgaacccuaaugcaaacccaaaugccaaccccaaugcuaacccgaaugccaacccuaaugcaaaccccaacgcuaauccaaacgccaauccuaacgcgaaucccaacguggauccaaaugccaaccccaaugcaaacccuaaugcuaacccaaaugccaacccgaaugcuaaccccaacgccaauccuaacgcaaauccaaacgccaaucccaacgcuaauccuaacgcgaauccaaacgcaaaucccaacgccaauccgaacgcuaauccuaacgccaauccaaacgcaaaccccaaugccaacccuaaugcuaaccccaaugccaacccagcagcguacgaaccuagcgacaaacauauuaaggaguacuugaauaaaauacagaacagucucgcugccuauaucaagcccggauccgcaaauaagccaaaagaugaacuggacuacgccaacgauauugagaagaaaaucuguaagauggagaaaugcucuugaggacuagucccuguucccagagcccacuuuuuuuucuuuuuuugaaauaaaauagccugucuuucagaucucaaaggcucuuuucagagccaccaaaaaaaaaaaaaaaaaaaaaaaaaaaaaaaaaaaaaaaaaaaaaaaaaaaaaaaaaaaaaaaaaaaaaaaaaaaaaaaaaaaaaaaaaaaaaaaaaaaaa

SEQ ID NO: 8363 - RNA, 1311 nt, Artificial Sequence
  mRNA Design a-3 (hSL-A100) comprising derived and/or modified sequence from Pf(3D7)__XP_001351122.1__HsALB_Pf-CSP(19-272)_L(AAY)_Pf-CSP(346-3 65)_L(AAY)_P2 (opt3)
aggagagggcgcuuggcuugcaaggacccugagcugcggcauugaagcacacccaacccaacucgacugaagucagccucacugaaccggaucugagaaucuucucucucugggcuugccagggcucuccgaaccuagcuagcauccucuucaauuccaacuagaaagcuuaccaugaagugggugaccuucaucagccugcucuuucuuuucuccucugccuacucacuguuucaggaguaucaaugcuacggcaguagcuccaacacaagagucuugaaugaauuaaacuaugacaaugcugggacuaaccuguacaaugagcuagaaaugaacuauuacggaaaacaggagaauugguauucucucaagaaaaacucgaggucacugggugaaaaugaugacggcaacaaugaggauaacgagaaacuucggaagcccaagcacaagaaacugaagcagccugcagacgggaauccagauccgaacgccaaucccaacguugacccuaacgcgaauccaaacguggaucccaaugcuaacccuaauguagacccaaacgccaaucccaacgcaaauccuaacgccaauccaaacgcuaauccgaacgcaaaucccaacgccaacccuaaugcuaacccaaaugccaaccccaaugcgaacccuaaugcaaacccaaaugccaaccccaaugcuaacccgaaugccaacccuaaugcaaaccccaacgcuaauccaaacgccaauccuaacgcgaaucccaacguggauccaaaugccaaccccaaugcaaacccuaaugcuaacccaaaugccaacccgaaugcuaaccccaacgccaauccuaacgcaaauccaaacgccaaucccaacgcuaauccuaacgcgaauccaaacgcaaaucccaacgccaauccgaacgcuaauccuaacgccaauccaaacgcaaaccccaaugccaacccuaaugcuaaccccaaugccaacccagcagcguacauuaaaccuggaagcgcuaauaagcccaaagacgaauuggauuacgccaacgacauagaggcagccuaucaguacaucaaggcuaauaguaaguucauuggcaucacggaacucugaggacuagucccuguucccagagcccacuuuuuuuucuuuuuuugaaauaaaauagccugucuuucagaucucaaaggcucuuuucagagccaccaaaaaaaaaaaaaaaaaaaaaaaaaaaaaaaaaaaaaaaaaaaaaaaaaaaaaaaaaaaaaaaaaaaaaaaaaaaaaaaaaaaaaaaaaaaaaaaaaaaaa

SEQ ID NO: 8364 - RNA, 1305 nt, Artificial Sequence
  mRNA Design a-3 (hSL-A100) comprising derived and/or modified sequence from Pf(3D7)__XP_001351122.1__HsALB_Pf-CSP(19-272)_L(AAY)_Pf-CSP(346-3 65)_L(AAY)_PADRE (opt3)
aggagagggcgcuuggcuugcaaggacccugagcugcggcauugaagcacacccaacccaacucgacugaagucagccucacugaaccggaucugagaaucuucucucucugggcuugccagggcucuccgaaccuagcuagcauccucuucaauuccaacuagaaagcuuaccaugaagugggugaccuucaucagccugcucuuucuuuucuccucugccuacucacuguuucaggaguaucaaugcuacggcaguagcuccaacacaagagucuugaaugaauuaaacuaugacaaugcugggacuaaccuguacaaugagcuagaaaugaacuauuacggaaaacaggagaauugguauucucucaagaaaaacucgaggucacugggugaaaaugaugacggcaacaaugaggauaacgagaaacuucggaagcccaagcacaagaaacugaagcagccugcagacgggaauccagauccgaacgccaaucccaacguugacccuaacgcgaauccaaacguggaucccaaugcuaacccuaauguagacccaaacgccaaucccaacgcaaauccuaacgccaauccaaacgcuaauccgaacgcaaaucccaacgccaacccuaaugcuaacccaaaugccaaccccaaugcgaacccuaaugcaaacccaaaugccaaccccaaugcuaacccgaaugccaacccuaaugcaaaccccaacgcuaauccaaacgccaauccuaacgcgaaucccaacguggauccaaaugccaaccccaaugcaaacccuaaugcuaacccaaaugccaacccgaaugcuaaccccaacgccaauccuaacgcaaauccaaacgccaaucccaacgcuaauccuaacgcgaauccaaacgcaaaucccaacgccaauccgaacgcuaauccuaacgccaauccaaacgcaaaccccaaugccaacccuaaugcuaaccccaaugccaacccagcagcguacauuaaaccuggaagcgcuaauaagcccaaagacgaauuggauuacgccaacgacauagaggcagccuaugcuaaguucgucgccgcauggacgcucaaggcugccgcgugaggacuagucccuguucccagagcccacuuuuuuuucuuuuuuugaaauaaaauagccugucuuucagaucucaaaggcucuuuucagagccaccaaaaaaaaaaaaaaaaaaaaaaaaaaaaaaaaaaaaaaaaaaaaaaaaaaaaaaaaaaaaaaaaaaaaaaaaaaaaaaaaaaaaaaaaaaaaaaaaaaaaa

SEQ ID NO: 8365 - RNA, 1362 nt, Artificial Sequence
  mRNA Design a-3 (hSL-A100) comprising derived and/or modified sequence from Pf(3D7)__XP_001351122.1__HsALB_Pf-CSP(19-272)_L(G4S)_Pf-CSP(310-3 27)_L(G4S)_Pf-CSP(346-375) (opt3)
aggagagggcgcuuggcuugcaaggacccugagcugcggcauugaagcacacccaacccaacucgacugaagucagccucacugaaccggaucugagaaucuucucucucugggcuugccagggcucuccgaaccuagcuagcauccucuucaauuccaacuagaaagcuuaccaugaagugggugaccuucaucagccugcucuuucuuuucuccucugccuacucacuguuucaggaguaucaaugcuacggcaguagcuccaacacaagagucuugaaugaauuaaacuaugacaaugcugggacuaaccuguacaaugagcuagaaaugaacuauuacggaaaacaggagaauugguauucucucaagaaaaacucgaggucacugggugaaaaugaugacggcaacaaugaggauaacgagaaacuucggaagcccaagcacaagaaacugaagcagccugcagacgggaauccagauccgaacgccaaucccaacguugacccuaacgcgaauccaaacguggaucccaaugcuaacccuaauguagacccaaacgccaaucccaacgcaaauccuaacgccaauccaaacgcuaauccgaacgcaaaucccaacgccaacccuaaugcuaacccaaaugccaaccccaaugcgaacccuaaugcaaacccaaaugccaaccccaaugcuaacccgaaugccaacccuaaugcaaaccccaacgcuaauccaaacgccaauccuaacgcgaaucccaacguggauccaaaugccaaccccaaugcaaacccuaaugcuaacccaaaugccaacccgaaugcuaaccccaacgccaauccuaacgcaaauccaaacgccaaucccaacgcuaauccuaacgcgaauccaaacgcaaaucccaacgccaauccgaacgcuaauccuaacgccaauccaaacgcaaaccccaaugccaacccuaaugcuaaccccaaugccaacccaggaggcggugggagcgaaccuagugacaaacauauuaaggaguacuugaauaaaauacagaacucccucggaggcggcgggucuaucaagcccggaagcgcaaauaagccaaaagaugaacuggacuacgcgaacgauauugagaagaaaaucuguaagauggagaaaugcuccugaggacuagucccuguucccagagcccacuuuuuuuucuuuuuuugaaauaaaauagccugucuuucagaucucaaaggcucuuuucagagccaccaaaaaaaaaaaaaaaaaaaaaaaaaaaaaaaaaaaaaaaaaaaaaaaaaaaaaaaaaaaaaaaaaaaaaaaaaaaaaaaaaaaaaaaaaaaaaaaaaaaaa

SEQ ID NO: 8366 - RNA, 1347 nt, Artificial Sequence
  mRNA Design a-3 (hSL-A100) comprising derived and/or modified sequence from Pf(3D7)__XP_001351122.1__HsALB_Pf-CSP(19-272)_L(G4S)_Pf-CSP(310-3 27)_Pf-CSP(346-375) (opt3)
aggagagggcgcuuggcuugcaaggacccugagcugcggcauugaagcacacccaacccaacucgacugaagucagccucacugaaccggaucugagaaucuucucucucugggcuugccagggcucuccgaaccuagcuagcauccucuucaauuccaacuagaaagcuuaccaugaagugggugaccuucaucagccugcucuuucuuuucuccucugccuacucacuguuucaggaguaucaaugcuacggcaguagcuccaacacaagagucuugaaugaauuaaacuaugacaaugcugggacuaaccuguacaaugagcuagaaaugaacuauuacggaaaacaggagaauugguauucucucaagaaaaacucgaggucacugggugaaaaugaugacggcaacaaugaggauaacgagaaacuucggaagcccaagcacaagaaacugaagcagccugcagacgggaauccagauccgaacgccaaucccaacguugacccuaacgcgaauccaaacguggaucccaaugcuaacccuaauguagacccaaacgccaaucccaacgcaaauccuaacgccaauccaaacgcuaauccgaacgcaaaucccaacgccaacccuaaugcuaacccaaaugccaaccccaaugcgaacccuaaugcaaacccaaaugccaaccccaaugcuaacccgaaugccaacccuaaugcaaaccccaacgcuaauccaaacgccaauccuaacgcgaaucccaacguggauccaaaugccaaccccaaugcaaacccuaaugcuaacccaaaugccaacccgaaugcuaaccccaacgccaauccuaacgcaaauccaaacgccaaucccaacgcuaauccuaacgcgaauccaaacgcaaaucccaacgccaauccgaacgcuaauccuaacgccaauccaaacgcaaaccccaaugccaacccuaaugcuaaccccaaugccaacccaggaggcggugggagcgaaccuagugacaaacauauuaaggaguacuugaauaaaauacagaacucccucaucaagcccggaucugcaaauaagccaaaagaugaacuggacuacgcgaacgauauugagaagaaaaucuguaagauggagaaaugcagcugaggacuagucccuguucccagagcccacuuuuuuuucuuuuuuugaaauaaaauagccugucuuucagaucucaaaggcucuuuucagagccaccaaaaaaaaaaaaaaaaaaaaaaaaaaaaaaaaaaaaaaaaaaaaaaaaaaaaaaaaaaaaaaaaaaaaaaaaaaaaaaaaaaaaaaaaaaaaaaaaaaaaa

SEQ ID NO: 8367 - RNA, 1347 nt, Artificial Sequence
  mRNA Design a-3 (hSL-A100) comprising derived and/or modified sequence from Pf(3D7)__XP_001351122.1__HsALB_Pf-CSP(19-325) (opt3)
aggagagggcgcuuggcuugcaaggacccugagcugcggcauugaagcacacccaacccaacucgacugaagucagccucacugaaccggaucugagaaucuucucucucugggcuugccagggcucuccgaaccuagcuagcauccucuucaauuccaacuagaaagcuuaccaugaagugggugaccuucaucagccugcucuuucuuuucuccucugccuacucacuguuucaggaguaucaaugcuacggcaguagcuccaacacaagagucuugaaugaauuaaacuaugacaaugcugggacuaaccuguacaaugagcuagaaaugaacuauuacggaaaacaggagaauugguauucucucaagaaaaacucgaggucacugggugaaaaugaugacggcaacaaugaggauaacgagaaacuucggaagcccaagcacaagaaacugaagcagccugcagacgggaauccagauccgaacgccaaucccaacguugacccuaacgcgaauccaaacguggaucccaaugcuaacccuaauguagacccaaacgccaaucccaacgcaaauccuaacgccaauccaaacgcuaauccgaacgcaaaucccaacgccaacccuaaugcuaacccaaaugccaaccccaaugcgaacccuaaugcaaacccaaaugccaaccccaaugcuaacccgaaugccaacccuaaugcaaaccccaacgcuaauccaaacgccaauccuaacgcgaaucccaacguggauccaaaugccaaccccaaugcaaacccuaaugcuaacccaaaugccaacccgaaugcuaaccccaacgccaauccuaacgcaaauccaaacgccaaucccaacgcuaauccuaacgcgaauccaaacgcaaaucccaacgccaauccgaacgcuaauccuaacgccaauccaaacgcaaaccccaaugccaacccuaaugcuaaccccaaugccaacccaaauaaaaacaaucagggaaacggccaaggucauaauaugccuaacgaccccaaucgcaacgucgaugaaaaugcaaacgcgaacagcgcugugaagaauaacaauaacgaggaaccaagugacaaacacauuaaggaguacuugaauaagauacagaacugaggacuagucccuguucccagagcccacuuuuuuuucuuuuuuugaaauaaaauagccugucuuucagaucucaaaggcucuuuucagagccaccaaaaaaaaaaaaaaaaaaaaaaaaaaaaaaaaaaaaaaaaaaaaaaaaaaaaaaaaaaaaaaaaaaaaaaaaaaaaaaaaaaaaaaaaaaaaaaaaaaaaa

SEQ ID NO: 8368 - RNA, 1524 nt, Artificial Sequence
  mRNA Design a-3 (hSL-A100) comprising derived and/or modified sequence from Pf(3D7)__XP_001351122.1__HsALB_Pf-CSP(19-384) (opt3)
aggagagggcgcuuggcuugcaaggacccugagcugcggcauugaagcacacccaacccaacucgacugaagucagccucacugaaccggaucugagaaucuucucucucugggcuugccagggcucuccgaaccuagcuagcauccucuucaauuccaacuagaaagcuuaccaugaagugggugaccuucaucagccugcucuuucuuuucuccucugccuacucacuguuucaggaguaucaaugcuacggcaguagcuccaacacaagagucuugaaugaauuaaacuaugacaaugcugggacuaaccuguacaaugagcuagaaaugaacuauuacggaaaacaggagaauugguauucucucaagaaaaacucgaggucacugggugaaaaugaugacggcaacaaugaggauaacgagaaacuucggaagcccaagcacaagaaacugaagcagccugcagacgggaauccagauccgaacgccaaucccaacguugacccuaacgcgaauccaaacguggaucccaaugcuaacccuaauguagacccaaacgccaaucccaacgcaaauccuaacgccaauccaaacgcuaauccgaacgcaaaucccaacgccaacccuaaugcuaacccaaaugccaaccccaaugcgaacccuaaugcaaacccaaaugccaaccccaaugcuaacccgaaugccaacccuaaugcaaaccccaacgcuaauccaaacgccaauccuaacgcgaaucccaacguggauccaaaugccaaccccaaugcaaacccuaaugcuaacccaaaugccaacccgaaugcuaaccccaacgccaauccuaacgcaaauccaaacgccaaucccaacgcuaauccuaacgcgaauccaaacgcaaaucccaacgccaauccgaacgcuaauccuaacgccaauccaaacgcaaaccccaaugccaacccuaaugcuaaccccaaugccaacccaaauaaaaacaaucagggaaacggccaaggucauaauaugccuaacgaccccaaucgcaacgucgaugaaaaugcaaacgcgaacagcgcugugaagaauaacaauaacgaggaaccaagugacaaacacauuaaggaguacuugaauaagauacagaacucccucucuacggaguggagcccguguuccguuaccugcgggaauggaauccaggugcgaauuaaaccuggcucagccaacaagcccaaagaugaacuggacuacgcaaaugacaucgagaagaaaauuuguaagauggaaaaaugcaguagcgucuucaacgugguaaauucuuccugaggacuagucccuguucccagagcccacuuuuuuuucuuuuuuugaaauaaaauagccugucuuucagaucucaaaggcucuuuucagagccaccaaaaaaaaaaaaaaaaaaaaaaaaaaaaaaaaaaaaaaaaaaaaaaaaaaaaaaaaaaaaaaaaaaaaaaaaaaaaaaaaaaaaaaaaaaaaaaaaaaaaa

SEQ ID NO: 8369 - RNA, 1662 nt, Artificial Sequence
  mRNA Design a-3 (hSL-A100) comprising derived and/or modified sequence from Pf(3D7)__XP_001351122.1__HsALB_Pf-CSP(19-384)_TM domain HA (opt3)
aggagagggcgcuuggcuugcaaggacccugagcugcggcauugaagcacacccaacccaacucgacugaagucagccucacugaaccggaucugagaaucuucucucucugggcuugccagggcucuccgaaccuagcuagcauccucuucaauuccaacuagaaagcuuaccaugaagugggugaccuucaucagccugcucuuucuuuucuccucugccuacucacuguuucaggaguaucaaugcuacggcaguagcuccaacacaagagucuugaaugaauuaaacuaugacaaugcugggacuaaccuguacaaugagcuagaaaugaacuauuacggaaaacaggagaauugguauucucucaagaaaaacucgaggucacugggugaaaaugaugacggcaacaaugaggauaacgagaaacuucggaagcccaagcacaagaaacugaagcagccugcagacgggaauccagauccgaacgccaaucccaacguugacccuaacgcgaauccaaacguggaucccaaugcuaacccuaauguagacccaaacgccaaucccaacgcaaauccuaacgccaauccaaacgcuaauccgaacgcaaaucccaacgccaacccuaaugcuaacccaaaugccaaccccaaugcgaacccuaaugcaaacccaaaugccaaccccaaugcuaacccgaaugccaacccuaaugcaaaccccaacgcuaauccaaacgccaauccuaacgcgaaucccaacguggauccaaaugccaaccccaaugcaaacccuaaugcuaacccaaaugccaacccgaaugcuaaccccaacgccaauccuaacgcaaauccaaacgccaaucccaacgcuaauccuaacgcgaauccaaacgcaaaucccaacgccaauccgaacgcuaauccuaacgccaauccaaacgcaaaccccaaugccaacccuaaugcuaaccccaaugccaacccaaauaaaaacaaucagggaaacggccaaggucauaauaugccuaacgaccccaaucgcaacgucgaugaaaaugcaaacgcgaacagcgcugugaagaauaacaauaacgaggaaccaagugacaaacacauuaaggaguacuugaauaagauacagaacucccucucuacggaguggagcccguguuccguuaccugcgggaauggaauccaggugcgaauuaaaccuggcucagccaacaagcccaaagaugaacuggacuacgcaaaugacaucgagaagaaaauuuguaagauggaaaaaugcaguagcgucuucaacgugguaaauucuuccaagcuggagucaacacguaucuaucagauacucgccaucuacagcacuguugcuaguucuuuagugcuggucgugucccuuggcgccauuagcuuuuggauguguucgaacgggucuuugcaaugcagaaucuguauuugaggacuagucccuguucccagagcccacuuuuuuuucuuuuuuugaaauaaaauagccugucuuucagaucucaaaggcucuuuucagagccaccaaaaaaaaaaaaaaaaaaaaaaaaaaaaaaaaaaaaaaaaaaaaaaaaaaaaaaaaaaaaaaaaaaaaaaaaaaaaaaaaaaaaaaaaaaaaaaaaaaaaa

SEQ ID NO: 8370 - RNA, 1374 nt, Artificial Sequence
  mRNA Design a-3 (hSL-A100) comprising derived and/or modified sequence from Pf(3D7)__XP_001351122.1__HsALB_Pf-CSP(82-397) (opt3)
aggagagggcgcuuggcuugcaaggacccugagcugcggcauugaagcacacccaacccaacucgacugaagucagccucacugaaccggaucugagaaucuucucucucugggcuugccagggcucuccgaaccuagcuagcauccucuucaauuccaacuagaaagcuuaccaugaagugggugaccuucaucagccugcucuuucuuuucuccucugccuacucagacaacgagaaacugagaaagcccaaacacaagaaauugaagcagccugcugauggcaauccagacccgaacgcaaaucccaacgucgauccuaaugccaacccaaauguugaccccaacgcgaauccuaacguggauccaaaugcuaaccccaaugccaacccuaaugcaaacccaaacgccaauccgaacgcuaaucccaacgcaaauccuaacgccaauccaaacgcuaaucccaacgccaauccuaacgcgaauccaaacgcaaaucccaacgccaacccgaaugcuaacccuaaugccaaccccaaugcaaacccaaaugcuaacccuaaugccaaccccaauguagacccaaacgcgaaucccaacgccaauccuaacgcaaacccaaaugcuaacccgaaugccaaccccaaugcuaacccuaaugccaacccaaaugcaaaccccaaugccaacccuaaugcuaacccaaaugcgaaccccaacgcaaauccgaacgccaauccuaacgcuaauccaaacgccaaucccaacgcaaauccuaacgccaaucccaacgcuaauccaaacaagaauaaccaggggaauggacagggucauaacaugccuaacgaucccaauaggaacguggacgaaaaugccaacgcaaauagugcggucaaaaacaauaacaaugaggaaccaagcgauaagcacauuaaagaguauuuaaacaagauacaaaauucccugucuacagaauggucgccgugcucagugacuuguggcaacgggauccagguucggauuaaaccuggaagcgcuaauaagcccaaggacgagcuagauuacgccaacgacaucgagaaaaagauuugcaaaauggaaaaguguaguuccguguuuaaugucgugaacucuagcaucggccucauaaugguacuguccuuccuuuuucugaacugaggacuagucccuguucccagagcccacuuuuuuuucuuuuuuugaaauaaaauagccugucuuucagaucucaaaggcucuuuucagagccaccaaaaaaaaaaaaaaaaaaaaaaaaaaaaaaaaaaaaaaaaaaaaaaaaaaaaaaaaaaaaaaaaaaaaaaaaaaaaaaaaaaaaaaaaaaaaaaaaaaaaa

SEQ ID NO: 8371 - RNA, 726 nt, Artificial Sequence
  mRNA Design a-3 (hSL-A100) comprising derived and/or modified sequence from Pf(3D7)__XP_001351122.1__HsALB_Pf-CSP(93-192) (opt3)
aggagagggcgcuuggcuugcaaggacccugagcugcggcauugaagcacacccaacccaacucgacugaagucagccucacugaaccggaucugagaaucuucucucucugggcuugccagggcucuccgaaccuagcuagcauccucuucaauuccaacuagaaagcuuaccaugaagugggugaccuucaucagccugcucuuucuuuucuccucugccuacucaaaacugaagcagcccgcugacggcaacccugauccaaaugcaaacccgaaugucgaccccaacgccaauccuaacguugauccaaaugcgaaccccaauguggacccuaacgcuaauccaaacgccaaucccaacgcaaauccuaacgccaacccaaaugcuaacccgaaugcaaaccccaaugccaacccuaaugcuaacccaaaugccaaccccaaugcgaacccuaaugcaaacccaaaugccaaccccaacgcuaauccgaacgccaauccuaacgcaaaucccaacgcuaauccaugaggacuagucccuguucccagagcccacuuuuuuuucuuuuuuugaaauaaaauagccugucuuucagaucucaaaggcucuuuucagagccaccaaaaaaaaaaaaaaaaaaaaaaaaaaaaaaaaaaaaaaaaaaaaaaaaaaaaaaaaaaaaaaaaaaaaaaaaaaaaaaaaaaaaaaaaaaaaaaaaaaaaa

SEQ ID NO: 8372 - RNA, 966 nt, Artificial Sequence
  mRNA Design a-3 (hSL-A100) comprising derived and/or modified sequence from Pf(3D7)__XP_001351122.1__HsALB_Pf-CSP(93-272) (opt3)
aggagagggcgcuuggcuugcaaggacccugagcugcggcauugaagcacacccaacccaacucgacugaagucagccucacugaaccggaucugagaaucuucucucucugggcuugccagggcucuccgaaccuagcuagcauccucuucaauuccaacuagaaagcuuaccaugaagugggugaccuucaucagccugcucuuucuuuucuccucugccuacucaaaacugaagcagcccgcugacggcaacccugauccaaaugcaaacccgaaugucgaccccaacgccaauccuaacguugauccaaaugcgaaccccaauguggacccuaacgcuaauccaaacgccaaucccaacgcaaauccuaacgccaacccaaaugcuaacccgaaugcaaaccccaaugccaacccuaaugcuaacccaaaugccaaccccaaugcgaacccuaaugcaaacccaaaugccaaccccaacgcuaauccgaacgccaauccuaacgcaaaucccaacgcuaauccaaacgccaauccuaacguagaucccaaugcgaacccaaaugccaaccccaaugcaaacccuaacgcuaauccaaacgccaauccgaacgcuaaucccaacgccaauccuaacgcaaauccaaacgccaaucccaacgcuaauccuaacgcgaauccaaacgcaaaccccaaugccaacccgaaugcuaacccuaaugccaacccaaaugcaaaccccaaugccaacccuaaugcuaaccccugaggacuagucccuguucccagagcccacuuuuuuuucuuuuuuugaaauaaaauagccugucuuucagaucucaaaggcucuuuucagagccaccaaaaaaaaaaaaaaaaaaaaaaaaaaaaaaaaaaaaaaaaaaaaaaaaaaaaaaaaaaaaaaaaaaaaaaaaaaaaaaaaaaaaaaaaaaaaaaaaaaaaa

SEQ ID NO: 8373 - RNA, 1341 nt, Artificial Sequence
  mRNA Design a-3 (hSL-A100) comprising derived and/or modified sequence from Pf(3D7)__XP_001351122.1__HsALB_Pf-CSP(93-397) (opt3)
aggagagggcgcuuggcuugcaaggacccugagcugcggcauugaagcacacccaacccaacucgacugaagucagccucacugaaccggaucugagaaucuucucucucugggcuugccagggcucuccgaaccuagcuagcauccucuucaauuccaacuagaaagcuuaccaugaagugggugaccuucaucagccugcucuuucuuuucuccucugccuacucaaaacugaagcagcccgcugacggcaacccugauccaaaugcaaacccgaaugucgaccccaacgccaauccuaacguugauccaaaugcgaaccccaauguggacccuaacgcuaauccaaacgccaaucccaacgcaaauccuaacgccaacccaaaugcuaacccgaaugcaaaccccaaugccaacccuaaugcuaacccaaaugccaaccccaaugcgaacccuaaugcaaacccaaaugccaaccccaacgcuaauccgaacgccaauccuaacgcaaaucccaacgcuaauccaaacgccaauccuaacguagaucccaaugcgaacccaaaugccaaccccaaugcaaacccuaacgcuaauccaaacgccaauccgaacgcuaaucccaacgccaauccuaacgcaaauccaaacgccaaucccaacgcuaauccuaacgcgaauccaaacgcaaaccccaaugccaacccgaaugcuaacccuaaugccaacccaaaugcaaaccccaaugccaacccuaaugcuaaccccaauaaaaacaaucaagggaacggacagggucacaauaugccaaacgacccuaacagaaauguggaugagaacgccaaugcaaacagugcggucaagaauaacaauaacgaggaacccagcgacaaacauauuaaggaauauuugaauaagauacagaacuccuuaucuacagaguggucgccaugcucagugacuuguggcaaugggauccagguuaggauuaaaccgggaagcgcuaacaagccuaaagaugaacuggacuacgccaaugauaucgagaagaaaauuugcaagauggagaaguguaguuccguguuuaacgucguaaauucuagcaucggccuaauaauggugcucuccuuccuguuucuuaacugaggacuagucccuguucccagagcccacuuuuuuuucuuuuuuugaaauaaaauagccugucuuucagaucucaaaggcucuuuucagagccaccaaaaaaaaaaaaaaaaaaaaaaaaaaaaaaaaaaaaaaaaaaaaaaaaaaaaaaaaaaaaaaaaaaaaaaaaaaaaaaaaaaaaaaaaaaaaaaaaaaaaa

SEQ ID NO: 8374 - RNA, 711 nt, Artificial Sequence
  mRNA Design a-3 (hSL-A100) comprising derived and/or modified sequence from Pf(3D7)__XP_001351122.1__HsALB_Pf-CSP(98-192) (opt3)
aggagagggcgcuuggcuugcaaggacccugagcugcggcauugaagcacacccaacccaacucgacugaagucagccucacugaaccggaucugagaaucuucucucucugggcuugccagggcucuccgaaccuagcuagcauccucuucaauuccaacuagaaagcuuaccaugaagugggugaccuucaucagccugcucuuucuuuucuccucugccuacucagcugacggcaaccccgauccuaaugcaaacccaaaugucgacccgaacgccaaucccaacguugauccuaaugcgaacccaaauguggaccccaacgcuaauccuaacgccaauccaaacgcaaaucccaacgccaacccuaaugcuaacccaaaugcaaacccgaaugccaaccccaaugcuaacccuaaugccaacccaaaugcgaaccccaaugcaaacccuaaugccaacccaaacgcuaaucccaacgccaauccgaacgcaaauccuaacgcuaaucccugaggacuagucccuguucccagagcccacuuuuuuuucuuuuuuugaaauaaaauagccugucuuucagaucucaaaggcucuuuucagagccaccaaaaaaaaaaaaaaaaaaaaaaaaaaaaaaaaaaaaaaaaaaaaaaaaaaaaaaaaaaaaaaaaaaaaaaaaaaaaaaaaaaaaaaaaaaaaaaaaaaaaa

SEQ ID NO: 8375 - RNA, 951 nt, Artificial Sequence
  mRNA Design a-3 (hSL-A100) comprising derived and/or modified sequence from Pf(3D7)__XP_001351122.1__HsALB_Pf-CSP(98-272) (opt3)
aggagagggcgcuuggcuugcaaggacccugagcugcggcauugaagcacacccaacccaacucgacugaagucagccucacugaaccggaucugagaaucuucucucucugggcuugccagggcucuccgaaccuagcuagcauccucuucaauuccaacuagaaagcuuaccaugaagugggugaccuucaucagccugcucuuucuuuucuccucugccuacucagcugacggcaaccccgauccuaaugcaaacccaaaugucgacccgaacgccaaucccaacguugauccuaaugcgaacccaaauguggaccccaacgcuaauccuaacgccaauccaaacgcaaaucccaacgccaacccuaaugcuaacccaaaugcaaacccgaaugccaaccccaaugcuaacccuaaugccaacccaaaugcgaaccccaaugcaaacccuaaugccaacccaaacgcuaaucccaacgccaauccgaacgcaaauccuaacgcuaaucccaacgccaauccaaacguagauccuaaugcgaaccccaaugccaacccaaaugcaaaccccaacgcuaauccuaacgccaauccaaacgcuaauccgaacgccaaucccaacgcaaauccuaacgccaauccaaacgcuaaucccaacgcgaauccuaacgcaaacccaaaugccaaccccaaugcuaacccgaaugccaacccuaaugcaaacccaaaugccaaccccaaugcuaacccuugaggacuagucccuguucccagagcccacuuuuuuuucuuuuuuugaaauaaaauagccugucuuucagaucucaaaggcucuuuucagagccaccaaaaaaaaaaaaaaaaaaaaaaaaaaaaaaaaaaaaaaaaaaaaaaaaaaaaaaaaaaaaaaaaaaaaaaaaaaaaaaaaaaaaaaaaaaaaaaaaaaaaa

SEQ ID NO: 8376 - RNA, 1257 nt, Artificial Sequence
  mRNA Design a-3 (hSL-A100) comprising derived and/or modified sequence from Pf(3D7)__XP_001351122.1__HsALB_Pf-CSP(98-374) (opt3)
aggagagggcgcuuggcuugcaaggacccugagcugcggcauugaagcacacccaacccaacucgacugaagucagccucacugaaccggaucugagaaucuucucucucugggcuugccagggcucuccgaaccuagcuagcauccucuucaauuccaacuagaaagcuuaccaugaagugggugaccuucaucagccugcucuuucuuuucuccucugccuacucagcugacggcaaccccgauccuaaugcaaacccaaaugucgacccgaacgccaaucccaacguugauccuaaugcgaacccaaauguggaccccaacgcuaauccuaacgccaauccaaacgcaaaucccaacgccaacccuaaugcuaacccaaaugcaaacccgaaugccaaccccaaugcuaacccuaaugccaacccaaaugcgaaccccaaugcaaacccuaaugccaacccaaacgcuaaucccaacgccaauccgaacgcaaauccuaacgcuaaucccaacgccaauccaaacguagauccuaaugcgaaccccaaugccaacccaaaugcaaaccccaacgcuaauccuaacgccaauccaaacgcuaauccgaacgccaaucccaacgcaaauccuaacgccaauccaaacgcuaaucccaacgcgaauccuaacgcaaacccaaaugccaaccccaaugcuaacccgaaugccaacccuaaugcaaacccaaaugccaaccccaaugcuaacccuaauaaaaacaaucaggggaacggacaaggucacaauaugcccaacgacccaaacagaaauguggaugagaacgccaaugcaaacagugcggucaagaauaacaauaacgaggaaccuagcgacaaacauauuaaggaauaucugaauaaaauacagaacuccuugucuacagaguggucgcccugcucagugacuuguggcaaugggauccagguuaggauuaagccaggaagcgcuaacaagccgaaagaugaauuagacuacgccaaugauaucgagaagaaaauuugcaagauggagaaauguugaggacuagucccuguucccagagcccacuuuuuuuucuuuuuuugaaauaaaauagccugucuuucagaucucaaaggcucuuuucagagccaccaaaaaaaaaaaaaaaaaaaaaaaaaaaaaaaaaaaaaaaaaaaaaaaaaaaaaaaaaaaaaaaaaaaaaaaaaaaaaaaaaaaaaaaaaaaaaaaaaaaaa

SEQ ID NO: 8377 - RNA, 1326 nt, Artificial Sequence
  mRNA Design a-3 (hSL-A100) comprising derived and/or modified sequence from Pf(3D7)__XP_001351122.1__HsALB_Pf-CSP(98-397) (opt3)
aggagagggcgcuuggcuugcaaggacccugagcugcggcauugaagcacacccaacccaacucgacugaagucagccucacugaaccggaucugagaaucuucucucucugggcuugccagggcucuccgaaccuagcuagcauccucuucaauuccaacuagaaagcuuaccaugaagugggugaccuucaucagccugcucuuucuuuucuccucugccuacucagcugacggcaaccccgauccuaaugcaaacccaaaugucgacccgaacgccaaucccaacguugauccuaaugcgaacccaaauguggaccccaacgcuaauccuaacgccaauccaaacgcaaaucccaacgccaacccuaaugcuaacccaaaugcaaacccgaaugccaaccccaaugcuaacccuaaugccaacccaaaugcgaaccccaaugcaaacccuaaugccaacccaaacgcuaaucccaacgccaauccgaacgcaaauccuaacgcuaaucccaacgccaauccaaacguagauccuaaugcgaaccccaaugccaacccaaaugcaaaccccaacgcuaauccuaacgccaauccaaacgcuaauccgaacgccaaucccaacgcaaauccuaacgccaauccaaacgcuaaucccaacgcgaauccuaacgcaaacccaaaugccaaccccaaugcuaacccgaaugccaacccuaaugcaaacccaaaugccaaccccaaugcuaacccuaauaaaaacaaucaggggaacggacaaggucacaauaugcccaacgacccaaacagaaauguggaugagaacgccaaugcaaacagugcggucaagaauaacaauaacgaggaaccuagcgacaaacauauuaaggaauaucugaauaaaauacagaacuccuugucuacagaguggucgcccugcucagugacuuguggcaaugggauccagguuaggauuaagccaggaagcgcuaacaagccgaaagaugaauuagacuacgccaaugauaucgagaagaaaauuugcaagauggagaaauguaguuccguguuuaacgucguaaauucuagcaucggccugauaauggugcuauccuuccucuuucugaacugaggacuagucccuguucccagagcccacuuuuuuuucuuuuuuugaaauaaaauagccugucuuucagaucucaaaggcucuuuucagagccaccaaaaaaaaaaaaaaaaaaaaaaaaaaaaaaaaaaaaaaaaaaaaaaaaaaaaaaaaaaaaaaaaaaaaaaaaaaaaaaaaaaaaaaaaaaaaaaaaaaaaa

SEQ ID NO: 8378 - RNA, 1653 nt, Artificial Sequence
  mRNA Design a-3 (hSL-A100) comprising derived and/or modified sequence from Pf(3D7)__XP_001351122.1__HsALB_Pf-CSP(199-377)_L(PVTN)_HBsAg (opt3)
aggagagggcgcuuggcuugcaaggacccugagcugcggcauugaagcacacccaacccaacucgacugaagucagccucacugaaccggaucugagaaucuucucucucugggcuugccagggcucuccgaaccuagcuagcauccucuucaauuccaacuagaaagcuuaccaugaagugggugaccuucaucagccugcucuuucuuuucuccucugccuacucagaccccaacgcuaauccuaacgcaaauccaaacgccaauccgaacgcgaaucccaacgcuaauccuaacgccaauccaaacgcaaaucccaacgccaauccuaacgcuaacccaaaugcaaaccccaaugccaacccuaaugcuaacccaaaugccaacccgaaugcgaaccccaaugcaaacccuaaugccaacccaaaugcuaaccccaacgccaauccuaacaaaaauaaccagggcaaugggcaaggacacaacaugccaaaugaucccaacagaaaugucgacgagaacgcaaaugcuaacagugccguuaagaauaacaauaacgaggaaccgagcgauaaacauauuaaggaauaucugaacaaaauacaaaauuccuugucuacagaguggucgccuugcucagugacuugugguaacggcauccagguaaggauuaagcccgggagcgcgaauaagccaaaagacgaauuagauuacgccaacgacaucgagaagaaaauuugcaagauggagaaauguaguuccgugccugucacgaauauggaaaacaucaccucuggauuucugggcccccuacucgugcugcaggcagguuucuuucuucugacacggauauugacuaucccacagagccucgauuccugguggaccucacugaauuuccucgggggaagucccguuugccugggccagaacagccagucuccuacauccaaucacucaccaaccagcuguccgcccauuugcccuggcuaucgcuggauguguuuacgacguuuuaucauuuuccuguuuauccuuuugcugugccuaauauuccuccuggugcuucuggacuaccaggggauguugccagucuguccccucauuccuggaaguacuacaaccaacacggguccaugcaagacuuguaccacacccgcucaaggcaauucuauguuuccguccugcugcuguacuaagccuaccgaugggaacugcacauguaucccaauucccagcucgugggccuucgcuaaauaucugugggagugggccucugugagauuuuccugguuaucacugcucguaccuuucguucagugguucgugggacuuagucccaccgucuggcugagcgcaaucuggaugaugugguacuggggcccauccuuguauucuaucgugagcccuuuuauuccccuacugccaauauucuuuugccucuggguguacaucugaggacuagucccuguucccagagcccacuuuuuuuucuuuuuuugaaauaaaauagccugucuuucagaucucaaaggcucuuuucagagccaccaaaaaaaaaaaaaaaaaaaaaaaaaaaaaaaaaaaaaaaaaaaaaaaaaaaaaaaaaaaaaaaaaaaaaaaaaaaaaaaaaaaaaaaaaaaaaaaaaaaaa

SEQ ID NO: 8379 - RNA, 1563 nt, Artificial Sequence
  mRNA Design a-3 (hSL-A100) comprising derived and/or modified sequence from Pf(3D7)__XP_001351122.1__Pf-CSP (opt4)
aggagagggcgcuuggcuugcaaggacccugagcugcggcauugaagcacacccaacccaacucgacugaagucagccucacugaaccggaucugagaaucuucucucucugggcuugccagggcucuccgaaccuagcuagcauccucuucaauuccaacuagaaagcuuaccaugaugagaaagcuggccauccugagcgugagcagcuuccuguucguggaggcccuguuccaggaguaccagugcuacggcagcagcagcaacaccagagugcugaacgagcugaacuacgacaacgccggcaccaaccuguacaacgagcuggagaugaacuacuacggcaagcaggagaacugguacagccugaagaagaacagcagaagccugggcgagaacgacgacggcaacaacgaggacaacgagaagcugagaaagcccaagcacaagaagcugaagcagcccgccgacggcaaccccgaccccaacgccaaccccaacguggaccccaacgccaaccccaacguggaccccaacgccaaccccaacguggaccccaacgccaaccccaacgccaaccccaacgccaaccccaacgccaaccccaacgccaaccccaacgccaaccccaacgccaaccccaacgccaaccccaacgccaaccccaacgccaaccccaacgccaaccccaacgccaaccccaacgccaaccccaacgccaaccccaacgccaaccccaacgccaaccccaacgccaaccccaacguggaccccaacgccaaccccaacgccaaccccaacgccaaccccaacgccaaccccaacgccaaccccaacgccaaccccaacgccaaccccaacgccaaccccaacgccaaccccaacgccaaccccaacgccaaccccaacgccaaccccaacgccaaccccaacgccaaccccaacgccaaccccaacgccaaccccaacgccaaccccaacgccaaccccaacaagaacaaccagggcaacggccagggccacaacaugcccaacgaccccaacagaaacguggacgagaacgccaacgccaacagcgccgugaagaacaacaacaacgaggagcccagcgacaagcacaucaaggaguaccugaacaagauccagaacagccugagcaccgaguggagccccugcagcgugaccugcggcaacggcauccaggugagaaucaagcccggcagcgccaacaagcccaaggacgagcuggacuacgccaacgacaucgagaagaagaucugcaagauggagaagugcagcagcguguucaacguggugaacagcagcaucggccugaucauggugcugagcuuccuguuccugaacugaggacuagucccuguucccagagcccacuuuuuuuucuuuuuuugaaauaaaauagccugucuuucagaucucaaaggcucuuuucagagccaccaaaaaaaaaaaaaaaaaaaaaaaaaaaaaaaaaaaaaaaaaaaaaaaaaaaaaaaaaaaaaaaaaaaaaaaaaaaaaaaaaaaaaaaaaaaaaaaaaaaaa

SEQ ID NO: 8380 - RNA, 1494 nt, Artificial Sequence
  mRNA Design a-3 (hSL-A100) comprising derived and/or modified sequence from Pf(3D7)__XP_001351122.1__Pf-CSP(1-374) (opt4)
aggagagggcgcuuggcuugcaaggacccugagcugcggcauugaagcacacccaacccaacucgacugaagucagccucacugaaccggaucugagaaucuucucucucugggcuugccagggcucuccgaaccuagcuagcauccucuucaauuccaacuagaaagcuuaccaugaugagaaagcuggccauccugagcgugagcagcuuccuguucguggaggcccuguuccaggaguaccagugcuacggcagcagcagcaacaccagagugcugaacgagcugaacuacgacaacgccggcaccaaccuguacaacgagcuggagaugaacuacuacggcaagcaggagaacugguacagccugaagaagaacagcagaagccugggcgagaacgacgacggcaacaacgaggacaacgagaagcugagaaagcccaagcacaagaagcugaagcagcccgccgacggcaaccccgaccccaacgccaaccccaacguggaccccaacgccaaccccaacguggaccccaacgccaaccccaacguggaccccaacgccaaccccaacgccaaccccaacgccaaccccaacgccaaccccaacgccaaccccaacgccaaccccaacgccaaccccaacgccaaccccaacgccaaccccaacgccaaccccaacgccaaccccaacgccaaccccaacgccaaccccaacgccaaccccaacgccaaccccaacgccaaccccaacgccaaccccaacguggaccccaacgccaaccccaacgccaaccccaacgccaaccccaacgccaaccccaacgccaaccccaacgccaaccccaacgccaaccccaacgccaaccccaacgccaaccccaacgccaaccccaacgccaaccccaacgccaaccccaacgccaaccccaacgccaaccccaacgccaaccccaacgccaaccccaacgccaaccccaacgccaaccccaacaagaacaaccagggcaacggccagggccacaacaugcccaacgaccccaacagaaacguggacgagaacgccaacgccaacagcgccgugaagaacaacaacaacgaggagcccagcgacaagcacaucaaggaguaccugaacaagauccagaacagccugagcaccgaguggagccccugcagcgugaccugcggcaacggcauccaggugagaaucaagcccggcagcgccaacaagcccaaggacgagcuggacuacgccaacgacaucgagaagaagaucugcaagauggagaagugcugaggacuagucccuguucccagagcccacuuuuuuuucuuuuuuugaaauaaaauagccugucuuucagaucucaaaggcucuuuucagagccaccaaaaaaaaaaaaaaaaaaaaaaaaaaaaaaaaaaaaaaaaaaaaaaaaaaaaaaaaaaaaaaaaaaaaaaaaaaaaaaaaaaaaaaaaaaaaaaaaaaaaa

SEQ ID NO: 8381 - RNA, 1347 nt, Artificial Sequence
  mRNA Design a-3 (hSL-A100) comprising derived and/or modified sequence from Pf(3D7)__XP_001351122.1__Pf-CSP(1-325) (opt4)
aggagagggcgcuuggcuugcaaggacccugagcugcggcauugaagcacacccaacccaacucgacugaagucagccucacugaaccggaucugagaaucuucucucucugggcuugccagggcucuccgaaccuagcuagcauccucuucaauuccaacuagaaagcuuaccaugaugagaaagcuggccauccugagcgugagcagcuuccuguucguggaggcccuguuccaggaguaccagugcuacggcagcagcagcaacaccagagugcugaacgagcugaacuacgacaacgccggcaccaaccuguacaacgagcuggagaugaacuacuacggcaagcaggagaacugguacagccugaagaagaacagcagaagccugggcgagaacgacgacggcaacaacgaggacaacgagaagcugagaaagcccaagcacaagaagcugaagcagcccgccgacggcaaccccgaccccaacgccaaccccaacguggaccccaacgccaaccccaacguggaccccaacgccaaccccaacguggaccccaacgccaaccccaacgccaaccccaacgccaaccccaacgccaaccccaacgccaaccccaacgccaaccccaacgccaaccccaacgccaaccccaacgccaaccccaacgccaaccccaacgccaaccccaacgccaaccccaacgccaaccccaacgccaaccccaacgccaaccccaacgccaaccccaacgccaaccccaacguggaccccaacgccaaccccaacgccaaccccaacgccaaccccaacgccaaccccaacgccaaccccaacgccaaccccaacgccaaccccaacgccaaccccaacgccaaccccaacgccaaccccaacgccaaccccaacgccaaccccaacgccaaccccaacgccaaccccaacgccaaccccaacgccaaccccaacgccaaccccaacgccaaccccaacaagaacaaccagggcaacggccagggccacaacaugcccaacgaccccaacagaaacguggacgagaacgccaacgccaacagcgccgugaagaacaacaacaacgaggagcccagcgacaagcacaucaaggaguaccugaacaagauccagaacugaggacuagucccuguucccagagcccacuuuuuuuucuuuuuuugaaauaaaauagccugucuuucagaucucaaaggcucuuuucagagccaccaaaaaaaaaaaaaaaaaaaaaaaaaaaaaaaaaaaaaaaaaaaaaaaaaaaaaaaaaaaaaaaaaaaaaaaaaaaaaaaaaaaaaaaaaaaaaaaaaaaaa

SEQ ID NO: 8382 - RNA, 1563 nt, Artificial Sequence
  mRNA Design a-3 (hSL-A100) comprising derived and/or modified sequence from Pf(3D7)__XP_001351122.1__HsALB_Pf-CSP(19-397) (opt4)
aggagagggcgcuuggcuugcaaggacccugagcugcggcauugaagcacacccaacccaacucgacugaagucagccucacugaaccggaucugagaaucuucucucucugggcuugccagggcucuccgaaccuagcuagcauccucuucaauuccaacuagaaagcuuaccaugaagugggugaccuucaucagccugcuguuccuguucagcagcgccuacagccuguuccaggaguaccagugcuacggcagcagcagcaacaccagagugcugaacgagcugaacuacgacaacgccggcaccaaccuguacaacgagcuggagaugaacuacuacggcaagcaggagaacugguacagccugaagaagaacagcagaagccugggcgagaacgacgacggcaacaacgaggacaacgagaagcugagaaagcccaagcacaagaagcugaagcagcccgccgacggcaaccccgaccccaacgccaaccccaacguggaccccaacgccaaccccaacguggaccccaacgccaaccccaacguggaccccaacgccaaccccaacgccaaccccaacgccaaccccaacgccaaccccaacgccaaccccaacgccaaccccaacgccaaccccaacgccaaccccaacgccaaccccaacgccaaccccaacgccaaccccaacgccaaccccaacgccaaccccaacgccaaccccaacgccaaccccaacgccaaccccaacgccaaccccaacguggaccccaacgccaaccccaacgccaaccccaacgccaaccccaacgccaaccccaacgccaaccccaacgccaaccccaacgccaaccccaacgccaaccccaacgccaaccccaacgccaaccccaacgccaaccccaacgccaaccccaacgccaaccccaacgccaaccccaacgccaaccccaacgccaaccccaacgccaaccccaacgccaaccccaacaagaacaaccagggcaacggccagggccacaacaugcccaacgaccccaacagaaacguggacgagaacgccaacgccaacagcgccgugaagaacaacaacaacgaggagcccagcgacaagcacaucaaggaguaccugaacaagauccagaacagccugagcaccgaguggagccccugcagcgugaccugcggcaacggcauccaggugagaaucaagcccggcagcgccaacaagcccaaggacgagcuggacuacgccaacgacaucgagaagaagaucugcaagauggagaagugcagcagcguguucaacguggugaacagcagcaucggccugaucauggugcugagcuuccuguuccugaacugaggacuagucccuguucccagagcccacuuuuuuuucuuuuuuugaaauaaaauagccugucuuucagaucucaaaggcucuuuucagagccaccaaaaaaaaaaaaaaaaaaaaaaaaaaaaaaaaaaaaaaaaaaaaaaaaaaaaaaaaaaaaaaaaaaaaaaaaaaaaaaaaaaaaaaaaaaaaaaaaaaaaa

SEQ ID NO: 8383 - RNA, 1581 nt, Artificial Sequence
  mRNA Design a-3 (hSL-A100) comprising derived and/or modified sequence from Pf(3D7)__XP_001351122.1__HsIns-iso1_Pf-CSP(19-397) (opt4)
aggagagggcgcuuggcuugcaaggacccugagcugcggcauugaagcacacccaacccaacucgacugaagucagccucacugaaccggaucugagaaucuucucucucugggcuugccagggcucuccgaaccuagcuagcauccucuucaauuccaacuagaaagcuuaccauggcccuguggaugagacugcugccccugcuggcccugcuggcccuguggggccccgaccccgccgccgcccuguuccaggaguaccagugcuacggcagcagcagcaacaccagagugcugaacgagcugaacuacgacaacgccggcaccaaccuguacaacgagcuggagaugaacuacuacggcaagcaggagaacugguacagccugaagaagaacagcagaagccugggcgagaacgacgacggcaacaacgaggacaacgagaagcugagaaagcccaagcacaagaagcugaagcagcccgccgacggcaaccccgaccccaacgccaaccccaacguggaccccaacgccaaccccaacguggaccccaacgccaaccccaacguggaccccaacgccaaccccaacgccaaccccaacgccaaccccaacgccaaccccaacgccaaccccaacgccaaccccaacgccaaccccaacgccaaccccaacgccaaccccaacgccaaccccaacgccaaccccaacgccaaccccaacgccaaccccaacgccaaccccaacgccaaccccaacgccaaccccaacgccaaccccaacguggaccccaacgccaaccccaacgccaaccccaacgccaaccccaacgccaaccccaacgccaaccccaacgccaaccccaacgccaaccccaacgccaaccccaacgccaaccccaacgccaaccccaacgccaaccccaacgccaaccccaacgccaaccccaacgccaaccccaacgccaaccccaacgccaaccccaacgccaaccccaacgccaaccccaacaagaacaaccagggcaacggccagggccacaacaugcccaacgaccccaacagaaacguggacgagaacgccaacgccaacagcgccgugaagaacaacaacaacgaggagcccagcgacaagcacaucaaggaguaccugaacaagauccagaacagccugagcaccgaguggagccccugcagcgugaccugcggcaacggcauccaggugagaaucaagcccggcagcgccaacaagcccaaggacgagcuggacuacgccaacgacaucgagaagaagaucugcaagauggagaagugcagcagcguguucaacguggugaacagcagcaucggccugaucauggugcugagcuuccuguuccugaacugaggacuagucccuguucccagagcccacuuuuuuuucuuuuuuugaaauaaaauagccugucuuucagaucucaaaggcucuuuucagagccaccaaaaaaaaaaaaaaaaaaaaaaaaaaaaaaaaaaaaaaaaaaaaaaaaaaaaaaaaaaaaaaaaaaaaaaaaaaaaaaaaaaaaaaaaaaaaaaaaaaaaa

SEQ ID NO: 8384 - RNA, 1560 nt, Artificial Sequence
  mRNA Design a-3 (hSL-A100) comprising derived and/or modified sequence from Pf(3D7)__XP_001351122.1__HsSPARC_Pf-CSP(19-397) (opt4)
aggagagggcgcuuggcuugcaaggacccugagcugcggcauugaagcacacccaacccaacucgacugaagucagccucacugaaccggaucugagaaucuucucucucugggcuugccagggcucuccgaaccuagcuagcauccucuucaauuccaacuagaaagcuuaccaugagagccuggaucuucuuccugcugugccuggccggcagagcccuggcccuguuccaggaguaccagugcuacggcagcagcagcaacaccagagugcugaacgagcugaacuacgacaacgccggcaccaaccuguacaacgagcuggagaugaacuacuacggcaagcaggagaacugguacagccugaagaagaacagcagaagccugggcgagaacgacgacggcaacaacgaggacaacgagaagcugagaaagcccaagcacaagaagcugaagcagcccgccgacggcaaccccgaccccaacgccaaccccaacguggaccccaacgccaaccccaacguggaccccaacgccaaccccaacguggaccccaacgccaaccccaacgccaaccccaacgccaaccccaacgccaaccccaacgccaaccccaacgccaaccccaacgccaaccccaacgccaaccccaacgccaaccccaacgccaaccccaacgccaaccccaacgccaaccccaacgccaaccccaacgccaaccccaacgccaaccccaacgccaaccccaacgccaaccccaacguggaccccaacgccaaccccaacgccaaccccaacgccaaccccaacgccaaccccaacgccaaccccaacgccaaccccaacgccaaccccaacgccaaccccaacgccaaccccaacgccaaccccaacgccaaccccaacgccaaccccaacgccaaccccaacgccaaccccaacgccaaccccaacgccaaccccaacgccaaccccaacgccaaccccaacaagaacaaccagggcaacggccagggccacaacaugcccaacgaccccaacagaaacguggacgagaacgccaacgccaacagcgccgugaagaacaacaacaacgaggagcccagcgacaagcacaucaaggaguaccugaacaagauccagaacagccugagcaccgaguggagccccugcagcgugaccugcggcaacggcauccaggugagaaucaagcccggcagcgccaacaagcccaaggacgagcuggacuacgccaacgacaucgagaagaagaucugcaagauggagaagugcagcagcguguucaacguggugaacagcagcaucggccugaucauggugcugagcuuccuguuccugaacugaggacuagucccuguucccagagcccacuuuuuuuucuuuuuuugaaauaaaauagccugucuuucagaucucaaaggcucuuuucagagccaccaaaaaaaaaaaaaaaaaaaaaaaaaaaaaaaaaaaaaaaaaaaaaaaaaaaaaaaaaaaaaaaaaaaaaaaaaaaaaaaaaaaaaaaaaaaaaaaaaaaaa

SEQ ID NO: 8385 - RNA, 1563 nt, Artificial Sequence
  mRNA Design a-3 (hSL-A100) comprising derived and/or modified sequence from Pf(3D7)__XP_001351122.1__IgE_Pf-CSP(19-397) (opt4)
aggagagggcgcuuggcuugcaaggacccugagcugcggcauugaagcacacccaacccaacucgacugaagucagccucacugaaccggaucugagaaucuucucucucugggcuugccagggcucuccgaaccuagcuagcauccucuucaauuccaacuagaaagcuuaccauggacuggaccuggauccuguuccugguggccgccgccaccagagugcacagccuguuccaggaguaccagugcuacggcagcagcagcaacaccagagugcugaacgagcugaacuacgacaacgccggcaccaaccuguacaacgagcuggagaugaacuacuacggcaagcaggagaacugguacagccugaagaagaacagcagaagccugggcgagaacgacgacggcaacaacgaggacaacgagaagcugagaaagcccaagcacaagaagcugaagcagcccgccgacggcaaccccgaccccaacgccaaccccaacguggaccccaacgccaaccccaacguggaccccaacgccaaccccaacguggaccccaacgccaaccccaacgccaaccccaacgccaaccccaacgccaaccccaacgccaaccccaacgccaaccccaacgccaaccccaacgccaaccccaacgccaaccccaacgccaaccccaacgccaaccccaacgccaaccccaacgccaaccccaacgccaaccccaacgccaaccccaacgccaaccccaacgccaaccccaacguggaccccaacgccaaccccaacgccaaccccaacgccaaccccaacgccaaccccaacgccaaccccaacgccaaccccaacgccaaccccaacgccaaccccaacgccaaccccaacgccaaccccaacgccaaccccaacgccaaccccaacgccaaccccaacgccaaccccaacgccaaccccaacgccaaccccaacgccaaccccaacgccaaccccaacaagaacaaccagggcaacggccagggccacaacaugcccaacgaccccaacagaaacguggacgagaacgccaacgccaacagcgccgugaagaacaacaacaacgaggagcccagcgacaagcacaucaaggaguaccugaacaagauccagaacagccugagcaccgaguggagccccugcagcgugaccugcggcaacggcauccaggugagaaucaagcccggcagcgccaacaagcccaaggacgagcuggacuacgccaacgacaucgagaagaagaucugcaagauggagaagugcagcagcguguucaacguggugaacagcagcaucggccugaucauggugcugagcuuccuguuccugaacugaggacuagucccuguucccagagcccacuuuuuuuucuuuuuuugaaauaaaauagccugucuuucagaucucaaaggcucuuuucagagccaccaaaaaaaaaaaaaaaaaaaaaaaaaaaaaaaaaaaaaaaaaaaaaaaaaaaaaaaaaaaaaaaaaaaaaaaaaaaaaaaaaaaaaaaaaaaaaaaaaaaaa

SEQ ID NO: 8386 - RNA, 1728 nt, Artificial Sequence
  mRNA Design a-3 (hSL-A100) comprising derived and/or modified sequence from Pf(3D7)__XP_001351122.1__Pf-CSP_L(G4SG4)_TM domain HA (opt4)
aggagagggcgcuuggcuugcaaggacccugagcugcggcauugaagcacacccaacccaacucgacugaagucagccucacugaaccggaucugagaaucuucucucucugggcuugccagggcucuccgaaccuagcuagcauccucuucaauuccaacuagaaagcuuaccaugaugagaaagcuggccauccugagcgugagcagcuuccuguucguggaggcccuguuccaggaguaccagugcuacggcagcagcagcaacaccagagugcugaacgagcugaacuacgacaacgccggcaccaaccuguacaacgagcuggagaugaacuacuacggcaagcaggagaacugguacagccugaagaagaacagcagaagccugggcgagaacgacgacggcaacaacgaggacaacgagaagcugagaaagcccaagcacaagaagcugaagcagcccgccgacggcaaccccgaccccaacgccaaccccaacguggaccccaacgccaaccccaacguggaccccaacgccaaccccaacguggaccccaacgccaaccccaacgccaaccccaacgccaaccccaacgccaaccccaacgccaaccccaacgccaaccccaacgccaaccccaacgccaaccccaacgccaaccccaacgccaaccccaacgccaaccccaacgccaaccccaacgccaaccccaacgccaaccccaacgccaaccccaacgccaaccccaacgccaaccccaacguggaccccaacgccaaccccaacgccaaccccaacgccaaccccaacgccaaccccaacgccaaccccaacgccaaccccaacgccaaccccaacgccaaccccaacgccaaccccaacgccaaccccaacgccaaccccaacgccaaccccaacgccaaccccaacgccaaccccaacgccaaccccaacgccaaccccaacgccaaccccaacgccaaccccaacaagaacaaccagggcaacggccagggccacaacaugcccaacgaccccaacagaaacguggacgagaacgccaacgccaacagcgccgugaagaacaacaacaacgaggagcccagcgacaagcacaucaaggaguaccugaacaagauccagaacagccugagcaccgaguggagccccugcagcgugaccugcggcaacggcauccaggugagaaucaagcccggcagcgccaacaagcccaaggacgagcuggacuacgccaacgacaucgagaagaagaucugcaagauggagaagugcagcagcguguucaacguggugaacagcagcaucggccugaucauggugcugagcuuccuguuccugaacggcggcggcggcagcggcggcggcggcaagcuggagagcaccagaaucuaccagauccuggccaucuacagcaccguggccagcagccuggugcugguggugagccugggcgccaucagcuucuggaugugcagcaacggcagccugcagugcagaaucugcaucugaggacuagucccuguucccagagcccacuuuuuuuucuuuuuuugaaauaaaauagccugucuuucagaucucaaaggcucuuuucagagccaccaaaaaaaaaaaaaaaaaaaaaaaaaaaaaaaaaaaaaaaaaaaaaaaaaaaaaaaaaaaaaaaaaaaaaaaaaaaaaaaaaaaaaaaaaaaaaaaaaaaaa

SEQ ID NO: 8387 - RNA, 1602 nt, Artificial Sequence
  mRNA Design a-3 (hSL-A100) comprising derived and/or modified sequence from Pf(3D7)__XP_001351122.1__Pf-CSP(199-377)_L(PVTN)_HBsAg (opt4)
aggagagggcgcuuggcuugcaaggacccugagcugcggcauugaagcacacccaacccaacucgacugaagucagccucacugaaccggaucugagaaucuucucucucugggcuugccagggcucuccgaaccuagcuagcauccucuucaauuccaacuagaaagcuuaccauggaccccaacgccaaccccaacgccaaccccaacgccaaccccaacgccaaccccaacgccaaccccaacgccaaccccaacgccaaccccaacgccaaccccaacgccaaccccaacgccaaccccaacgccaaccccaacgccaaccccaacgccaaccccaacgccaaccccaacgccaaccccaacgccaaccccaacgccaaccccaacgccaaccccaacaagaacaaccagggcaacggccagggccacaacaugcccaacgaccccaacagaaacguggacgagaacgccaacgccaacagcgccgugaagaacaacaacaacgaggagcccagcgacaagcacaucaaggaguaccugaacaagauccagaacagccugagcaccgaguggagccccugcagcgugaccugcggcaacggcauccaggugagaaucaagcccggcagcgccaacaagcccaaggacgagcuggacuacgccaacgacaucgagaagaagaucugcaagauggagaagugcagcagcgugcccgugaccaacauggagaacaucaccagcggcuuccugggcccccugcuggugcugcaggccggcuucuuccugcugaccagaauccugaccaucccccagagccuggacagcugguggaccagccugaacuuccugggcggcagccccgugugccugggccagaacagccagagccccaccagcaaccacagccccaccagcugcccccccaucugccccggcuacagauggaugugccugagaagauucaucaucuuccuguucauccugcugcugugccugaucuuccugcuggugcugcuggacuaccagggcaugcugcccgugugcccccugauccccggcagcaccaccaccaacaccggccccugcaagaccugcaccacccccgcccagggcaacagcauguuccccagcugcugcugcaccaagcccaccgacggcaacugcaccugcauccccauccccagcagcugggccuucgccaaguaccugugggagugggccagcgugagauucagcuggcugagccugcuggugcccuucgugcagugguucgugggccugagccccaccguguggcugagcgccaucuggaugaugugguacuggggccccagccuguacagcaucgugagccccuucaucccccugcugcccaucuucuucugccuguggguguacaucugaggacuagucccuguucccagagcccacuuuuuuuucuuuuuuugaaauaaaauagccugucuuucagaucucaaaggcucuuuucagagccaccaaaaaaaaaaaaaaaaaaaaaaaaaaaaaaaaaaaaaaaaaaaaaaaaaaaaaaaaaaaaaaaaaaaaaaaaaaaaaaaaaaaaaaaaaaaaaaaaaaaaa

SEQ ID NO: 8388 - RNA, 1644 nt, Artificial Sequence
  mRNA Design a-3 (hSL-A100) comprising derived and/or modified sequence from Pf(3D7)__XP_001351122.1__Pf-CSP(199-387)_L(PVTN)_HBsAg (opt4)
aggagagggcgcuuggcuugcaaggacccugagcugcggcauugaagcacacccaacccaacucgacugaagucagccucacugaaccggaucugagaaucuucucucucugggcuugccagggcucuccgaaccuagcuagcauccucuucaauuccaacuagaaagcuuaccaugauggcccccgaccccaacgccaaccccaacgccaaccccaacgccaaccccaacgccaaccccaacgccaaccccaacgccaaccccaacgccaaccccaacgccaaccccaacgccaaccccaacgccaaccccaacgccaaccccaacgccaaccccaacgccaaccccaacgccaaccccaacgccaaccccaacgccaaccccaacgccaaccccaacgccaaccccaacaagaacaaccagggcaacggccagggccacaacaugcccaacgaccccaacagaaacguggacgagaacgccaacgccaacagcgccgugaagaacaacaacaacgaggagcccagcgacaagcacaucaaggaguaccugaacaagauccagaacagccugagcaccgaguggagccccugcagcgugaccugcggcaacggcauccaggugagaaucaagcccggcagcgccaacaagcccaaggacgagcuggacuacgccaacgacaucgagaagaagaucugcaagauggagaagugcagcagcguguucaacguggugaacagcagcaucggccugggccccgugaccaacauggagaacaucaccagcggcuuccugggcccccugcuggugcugcaggccggcuucuuccugcugaccagaauccugaccaucccccagagccuggacagcugguggaccagccugaacuuccugggcggcagccccgugugccugggccagaacagccagagccccaccagcaaccacagccccaccagcugcccccccaucugccccggcuacagauggaugugccugagaagauucaucaucuuccuguucauccugcugcugugccugaucuuccugcuggugcugcuggacuaccagggcaugcugcccgugugcccccugauccccggcagcaccaccaccaacaccggccccugcaagaccugcaccacccccgcccagggcaacagcauguuccccagcugcugcugcaccaagcccaccgacggcaacugcaccugcauccccauccccagcagcugggccuucgccaaguaccugugggagugggccagcgugagauucagcuggcugagccugcuggugcccuucgugcagugguucgugggccugagccccaccguguggcugagcgccaucuggaugaugugguacuggggccccagccuguacagcaucgugagccccuucaucccccugcugcccaucuucuucugccuguggguguacaucugaggacuagucccuguucccagagcccacuuuuuuuucuuuuuuugaaauaaaauagccugucuuucagaucucaaaggcucuuuucagagccaccaaaaaaaaaaaaaaaaaaaaaaaaaaaaaaaaaaaaaaaaaaaaaaaaaaaaaaaaaaaaaaaaaaaaaaaaaaaaaaaaaaaaaaaaaaaaaaaaaaaaa

SEQ ID NO: 8389 - RNA, 828 nt, Artificial Sequence
  mRNA Design a-3 (hSL-A100) comprising derived and/or modified sequence from Pf(3D7)__XP_001351122.1__HsALB_Pf-CSP(19-152) (opt4)
aggagagggcgcuuggcuugcaaggacccugagcugcggcauugaagcacacccaacccaacucgacugaagucagccucacugaaccggaucugagaaucuucucucucugggcuugccagggcucuccgaaccuagcuagcauccucuucaauuccaacuagaaagcuuaccaugaagugggugaccuucaucagccugcuguuccuguucagcagcgccuacagccuguuccaggaguaccagugcuacggcagcagcagcaacaccagagugcugaacgagcugaacuacgacaacgccggcaccaaccuguacaacgagcuggagaugaacuacuacggcaagcaggagaacugguacagccugaagaagaacagcagaagccugggcgagaacgacgacggcaacaacgaggacaacgagaagcugagaaagcccaagcacaagaagcugaagcagcccgccgacggcaaccccgaccccaacgccaaccccaacguggaccccaacgccaaccccaacguggaccccaacgccaaccccaacguggaccccaacgccaaccccaacgccaaccccaacgccaaccccaacgccaaccccaacgccaaccccaacgccaaccccugaggacuagucccuguucccagagcccacuuuuuuuucuuuuuuugaaauaaaauagccugucuuucagaucucaaaggcucuuuucagagccaccaaaaaaaaaaaaaaaaaaaaaaaaaaaaaaaaaaaaaaaaaaaaaaaaaaaaaaaaaaaaaaaaaaaaaaaaaaaaaaaaaaaaaaaaaaaaaaaaaaaaa

SEQ ID NO: 8390 - RNA, 948 nt, Artificial Sequence
  mRNA Design a-3 (hSL-A100) comprising derived and/or modified sequence from Pf(3D7)__XP_001351122.1__HsALB_Pf-CSP(19-192) (opt4)
aggagagggcgcuuggcuugcaaggacccugagcugcggcauugaagcacacccaacccaacucgacugaagucagccucacugaaccggaucugagaaucuucucucucugggcuugccagggcucuccgaaccuagcuagcauccucuucaauuccaacuagaaagcuuaccaugaagugggugaccuucaucagccugcuguuccuguucagcagcgccuacagccuguuccaggaguaccagugcuacggcagcagcagcaacaccagagugcugaacgagcugaacuacgacaacgccggcaccaaccuguacaacgagcuggagaugaacuacuacggcaagcaggagaacugguacagccugaagaagaacagcagaagccugggcgagaacgacgacggcaacaacgaggacaacgagaagcugagaaagcccaagcacaagaagcugaagcagcccgccgacggcaaccccgaccccaacgccaaccccaacguggaccccaacgccaaccccaacguggaccccaacgccaaccccaacguggaccccaacgccaaccccaacgccaaccccaacgccaaccccaacgccaaccccaacgccaaccccaacgccaaccccaacgccaaccccaacgccaaccccaacgccaaccccaacgccaaccccaacgccaaccccaacgccaaccccaacgccaaccccaacgccaaccccaacgccaaccccaacgccaaccccugaggacuagucccuguucccagagcccacuuuuuuuucuuuuuuugaaauaaaauagccugucuuucagaucucaaaggcucuuuucagagccaccaaaaaaaaaaaaaaaaaaaaaaaaaaaaaaaaaaaaaaaaaaaaaaaaaaaaaaaaaaaaaaaaaaaaaaaaaaaaaaaaaaaaaaaaaaaaaaaaaaaaa

SEQ ID NO: 8391 - RNA, 1188 nt, Artificial Sequence
  mRNA Design a-3 (hSL-A100) comprising derived and/or modified sequence from Pf(3D7)__XP_001351122.1__HsALB_Pf-CSP(19-272) (opt4)
aggagagggcgcuuggcuugcaaggacccugagcugcggcauugaagcacacccaacccaacucgacugaagucagccucacugaaccggaucugagaaucuucucucucugggcuugccagggcucuccgaaccuagcuagcauccucuucaauuccaacuagaaagcuuaccaugaagugggugaccuucaucagccugcuguuccuguucagcagcgccuacagccuguuccaggaguaccagugcuacggcagcagcagcaacaccagagugcugaacgagcugaacuacgacaacgccggcaccaaccuguacaacgagcuggagaugaacuacuacggcaagcaggagaacugguacagccugaagaagaacagcagaagccugggcgagaacgacgacggcaacaacgaggacaacgagaagcugagaaagcccaagcacaagaagcugaagcagcccgccgacggcaaccccgaccccaacgccaaccccaacguggaccccaacgccaaccccaacguggaccccaacgccaaccccaacguggaccccaacgccaaccccaacgccaaccccaacgccaaccccaacgccaaccccaacgccaaccccaacgccaaccccaacgccaaccccaacgccaaccccaacgccaaccccaacgccaaccccaacgccaaccccaacgccaaccccaacgccaaccccaacgccaaccccaacgccaaccccaacgccaaccccaacgccaaccccaacguggaccccaacgccaaccccaacgccaaccccaacgccaaccccaacgccaaccccaacgccaaccccaacgccaaccccaacgccaaccccaacgccaaccccaacgccaaccccaacgccaaccccaacgccaaccccaacgccaaccccaacgccaaccccaacgccaaccccaacgccaaccccaacgccaaccccaacgccaaccccaacgccaaccccugaggacuagucccuguucccagagcccacuuuuuuuucuuuuuuugaaauaaaauagccugucuuucagaucucaaaggcucuuuucagagccaccaaaaaaaaaaaaaaaaaaaaaaaaaaaaaaaaaaaaaaaaaaaaaaaaaaaaaaaaaaaaaaaaaaaaaaaaaaaaaaaaaaaaaaaaaaaaaaaaaaaaa

SEQ ID NO: 8392 - RNA, 1350 nt, Artificial Sequence
  mRNA Design a-3 (hSL-A100) comprising derived and/or modified sequence from Pf(3D7)__XP_001351122.1__HsALB_Pf-CSP(19-272)_L(AAY)_Pf-CSP(310-3 27)_L(AAY)_Pf-CSP(346-375) (opt4)
aggagagggcgcuuggcuugcaaggacccugagcugcggcauugaagcacacccaacccaacucgacugaagucagccucacugaaccggaucugagaaucuucucucucugggcuugccagggcucuccgaaccuagcuagcauccucuucaauuccaacuagaaagcuuaccaugaagugggugaccuucaucagccugcuguuccuguucagcagcgccuacagccuguuccaggaguaccagugcuacggcagcagcagcaacaccagagugcugaacgagcugaacuacgacaacgccggcaccaaccuguacaacgagcuggagaugaacuacuacggcaagcaggagaacugguacagccugaagaagaacagcagaagccugggcgagaacgacgacggcaacaacgaggacaacgagaagcugagaaagcccaagcacaagaagcugaagcagcccgccgacggcaaccccgaccccaacgccaaccccaacguggaccccaacgccaaccccaacguggaccccaacgccaaccccaacguggaccccaacgccaaccccaacgccaaccccaacgccaaccccaacgccaaccccaacgccaaccccaacgccaaccccaacgccaaccccaacgccaaccccaacgccaaccccaacgccaaccccaacgccaaccccaacgccaaccccaacgccaaccccaacgccaaccccaacgccaaccccaacgccaaccccaacgccaaccccaacguggaccccaacgccaaccccaacgccaaccccaacgccaaccccaacgccaaccccaacgccaaccccaacgccaaccccaacgccaaccccaacgccaaccccaacgccaaccccaacgccaaccccaacgccaaccccaacgccaaccccaacgccaaccccaacgccaaccccaacgccaaccccaacgccaaccccaacgccaaccccaacgccaaccccgccgccuacgagcccagcgacaagcacaucaaggaguaccugaacaagauccagaacagccuggccgccuacaucaagcccggcagcgccaacaagcccaaggacgagcuggacuacgccaacgacaucgagaagaagaucugcaagauggagaagugcagcugaggacuagucccuguucccagagcccacuuuuuuuucuuuuuuugaaauaaaauagccugucuuucagaucucaaaggcucuuuucagagccaccaaaaaaaaaaaaaaaaaaaaaaaaaaaaaaaaaaaaaaaaaaaaaaaaaaaaaaaaaaaaaaaaaaaaaaaaaaaaaaaaaaaaaaaaaaaaaaaaaaaaa

SEQ ID NO: 8393 - RNA, 1311 nt, Artificial Sequence
  mRNA Design a-3 (hSL-A100) comprising derived and/or modified sequence from Pf(3D7)__XP_001351122.1__HsALB_Pf-CSP(19-272)_L(AAY)_Pf-CSP(346-3 65)_L(AAY)_P2 (opt4)
aggagagggcgcuuggcuugcaaggacccugagcugcggcauugaagcacacccaacccaacucgacugaagucagccucacugaaccggaucugagaaucuucucucucugggcuugccagggcucuccgaaccuagcuagcauccucuucaauuccaacuagaaagcuuaccaugaagugggugaccuucaucagccugcuguuccuguucagcagcgccuacagccuguuccaggaguaccagugcuacggcagcagcagcaacaccagagugcugaacgagcugaacuacgacaacgccggcaccaaccuguacaacgagcuggagaugaacuacuacggcaagcaggagaacugguacagccugaagaagaacagcagaagccugggcgagaacgacgacggcaacaacgaggacaacgagaagcugagaaagcccaagcacaagaagcugaagcagcccgccgacggcaaccccgaccccaacgccaaccccaacguggaccccaacgccaaccccaacguggaccccaacgccaaccccaacguggaccccaacgccaaccccaacgccaaccccaacgccaaccccaacgccaaccccaacgccaaccccaacgccaaccccaacgccaaccccaacgccaaccccaacgccaaccccaacgccaaccccaacgccaaccccaacgccaaccccaacgccaaccccaacgccaaccccaacgccaaccccaacgccaaccccaacgccaaccccaacguggaccccaacgccaaccccaacgccaaccccaacgccaaccccaacgccaaccccaacgccaaccccaacgccaaccccaacgccaaccccaacgccaaccccaacgccaaccccaacgccaaccccaacgccaaccccaacgccaaccccaacgccaaccccaacgccaaccccaacgccaaccccaacgccaaccccaacgccaaccccaacgccaaccccgccgccuacaucaagcccggcagcgccaacaagcccaaggacgagcuggacuacgccaacgacaucgaggccgccuaccaguacaucaaggccaacagcaaguucaucggcaucaccgagcugugaggacuagucccuguucccagagcccacuuuuuuuucuuuuuuugaaauaaaauagccugucuuucagaucucaaaggcucuuuucagagccaccaaaaaaaaaaaaaaaaaaaaaaaaaaaaaaaaaaaaaaaaaaaaaaaaaaaaaaaaaaaaaaaaaaaaaaaaaaaaaaaaaaaaaaaaaaaaaaaaaaaaa

SEQ ID NO: 8394 - RNA, 1305 nt, Artificial Sequence
  mRNA Design a-3 (hSL-A100) comprising derived and/or modified sequence from Pf(3D7)__XP_001351122.1__HsALB_Pf-CSP(19-272)_L(AAY)_Pf-CSP(346-3 65)_L(AAY)_PADRE (opt4)
aggagagggcgcuuggcuugcaaggacccugagcugcggcauugaagcacacccaacccaacucgacugaagucagccucacugaaccggaucugagaaucuucucucucugggcuugccagggcucuccgaaccuagcuagcauccucuucaauuccaacuagaaagcuuaccaugaagugggugaccuucaucagccugcuguuccuguucagcagcgccuacagccuguuccaggaguaccagugcuacggcagcagcagcaacaccagagugcugaacgagcugaacuacgacaacgccggcaccaaccuguacaacgagcuggagaugaacuacuacggcaagcaggagaacugguacagccugaagaagaacagcagaagccugggcgagaacgacgacggcaacaacgaggacaacgagaagcugagaaagcccaagcacaagaagcugaagcagcccgccgacggcaaccccgaccccaacgccaaccccaacguggaccccaacgccaaccccaacguggaccccaacgccaaccccaacguggaccccaacgccaaccccaacgccaaccccaacgccaaccccaacgccaaccccaacgccaaccccaacgccaaccccaacgccaaccccaacgccaaccccaacgccaaccccaacgccaaccccaacgccaaccccaacgccaaccccaacgccaaccccaacgccaaccccaacgccaaccccaacgccaaccccaacgccaaccccaacguggaccccaacgccaaccccaacgccaaccccaacgccaaccccaacgccaaccccaacgccaaccccaacgccaaccccaacgccaaccccaacgccaaccccaacgccaaccccaacgccaaccccaacgccaaccccaacgccaaccccaacgccaaccccaacgccaaccccaacgccaaccccaacgccaaccccaacgccaaccccaacgccaaccccgccgccuacaucaagcccggcagcgccaacaagcccaaggacgagcuggacuacgccaacgacaucgaggccgccuacgccaaguucguggccgccuggacccugaaggccgccgccugaggacuagucccuguucccagagcccacuuuuuuuucuuuuuuugaaauaaaauagccugucuuucagaucucaaaggcucuuuucagagccaccaaaaaaaaaaaaaaaaaaaaaaaaaaaaaaaaaaaaaaaaaaaaaaaaaaaaaaaaaaaaaaaaaaaaaaaaaaaaaaaaaaaaaaaaaaaaaaaaaaaaa

SEQ ID NO: 8395 - RNA, 1362 nt, Artificial Sequence
  mRNA Design a-3 (hSL-A100) comprising derived and/or modified sequence from Pf(3D7)__XP_001351122.1__HsALB_Pf-CSP(19-272)_L(G4S)_Pf-CSP(310-3 27)_L(G4S)_Pf-CSP(346-375) (opt4)
aggagagggcgcuuggcuugcaaggacccugagcugcggcauugaagcacacccaacccaacucgacugaagucagccucacugaaccggaucugagaaucuucucucucugggcuugccagggcucuccgaaccuagcuagcauccucuucaauuccaacuagaaagcuuaccaugaagugggugaccuucaucagccugcuguuccuguucagcagcgccuacagccuguuccaggaguaccagugcuacggcagcagcagcaacaccagagugcugaacgagcugaacuacgacaacgccggcaccaaccuguacaacgagcuggagaugaacuacuacggcaagcaggagaacugguacagccugaagaagaacagcagaagccugggcgagaacgacgacggcaacaacgaggacaacgagaagcugagaaagcccaagcacaagaagcugaagcagcccgccgacggcaaccccgaccccaacgccaaccccaacguggaccccaacgccaaccccaacguggaccccaacgccaaccccaacguggaccccaacgccaaccccaacgccaaccccaacgccaaccccaacgccaaccccaacgccaaccccaacgccaaccccaacgccaaccccaacgccaaccccaacgccaaccccaacgccaaccccaacgccaaccccaacgccaaccccaacgccaaccccaacgccaaccccaacgccaaccccaacgccaaccccaacgccaaccccaacguggaccccaacgccaaccccaacgccaaccccaacgccaaccccaacgccaaccccaacgccaaccccaacgccaaccccaacgccaaccccaacgccaaccccaacgccaaccccaacgccaaccccaacgccaaccccaacgccaaccccaacgccaaccccaacgccaaccccaacgccaaccccaacgccaaccccaacgccaaccccaacgccaaccccggcggcggcggcagcgagcccagcgacaagcacaucaaggaguaccugaacaagauccagaacagccugggcggcggcggcagcaucaagcccggcagcgccaacaagcccaaggacgagcuggacuacgccaacgacaucgagaagaagaucugcaagauggagaagugcagcugaggacuagucccuguucccagagcccacuuuuuuuucuuuuuuugaaauaaaauagccugucuuucagaucucaaaggcucuuuucagagccaccaaaaaaaaaaaaaaaaaaaaaaaaaaaaaaaaaaaaaaaaaaaaaaaaaaaaaaaaaaaaaaaaaaaaaaaaaaaaaaaaaaaaaaaaaaaaaaaaaaaaa

SEQ ID NO: 8396 - RNA, 1347 nt, Artificial Sequence
  mRNA Design a-3 (hSL-A100) comprising derived and/or modified sequence from Pf(3D7)__XP_001351122.1__HsALB_Pf-CSP(19-272)_L(G4S)_Pf-CSP(310-3 27)_Pf-CSP(346-375) (opt4)
aggagagggcgcuuggcuugcaaggacccugagcugcggcauugaagcacacccaacccaacucgacugaagucagccucacugaaccggaucugagaaucuucucucucugggcuugccagggcucuccgaaccuagcuagcauccucuucaauuccaacuagaaagcuuaccaugaagugggugaccuucaucagccugcuguuccuguucagcagcgccuacagccuguuccaggaguaccagugcuacggcagcagcagcaacaccagagugcugaacgagcugaacuacgacaacgccggcaccaaccuguacaacgagcuggagaugaacuacuacggcaagcaggagaacugguacagccugaagaagaacagcagaagccugggcgagaacgacgacggcaacaacgaggacaacgagaagcugagaaagcccaagcacaagaagcugaagcagcccgccgacggcaaccccgaccccaacgccaaccccaacguggaccccaacgccaaccccaacguggaccccaacgccaaccccaacguggaccccaacgccaaccccaacgccaaccccaacgccaaccccaacgccaaccccaacgccaaccccaacgccaaccccaacgccaaccccaacgccaaccccaacgccaaccccaacgccaaccccaacgccaaccccaacgccaaccccaacgccaaccccaacgccaaccccaacgccaaccccaacgccaaccccaacgccaaccccaacguggaccccaacgccaaccccaacgccaaccccaacgccaaccccaacgccaaccccaacgccaaccccaacgccaaccccaacgccaaccccaacgccaaccccaacgccaaccccaacgccaaccccaacgccaaccccaacgccaaccccaacgccaaccccaacgccaaccccaacgccaaccccaacgccaaccccaacgccaaccccaacgccaaccccggcggcggcggcagcgagcccagcgacaagcacaucaaggaguaccugaacaagauccagaacagccugaucaagcccggcagcgccaacaagcccaaggacgagcuggacuacgccaacgacaucgagaagaagaucugcaagauggagaagugcagcugaggacuagucccuguucccagagcccacuuuuuuuucuuuuuuugaaauaaaauagccugucuuucagaucucaaaggcucuuuucagagccaccaaaaaaaaaaaaaaaaaaaaaaaaaaaaaaaaaaaaaaaaaaaaaaaaaaaaaaaaaaaaaaaaaaaaaaaaaaaaaaaaaaaaaaaaaaaaaaaaaaaaa

SEQ ID NO: 8397 - RNA, 1347 nt, Artificial Sequence
  mRNA Design a-3 (hSL-A100) comprising derived and/or modified sequence from Pf(3D7)__XP_001351122.1__HsALB_Pf-CSP(19-325) (opt4)
aggagagggcgcuuggcuugcaaggacccugagcugcggcauugaagcacacccaacccaacucgacugaagucagccucacugaaccggaucugagaaucuucucucucugggcuugccagggcucuccgaaccuagcuagcauccucuucaauuccaacuagaaagcuuaccaugaagugggugaccuucaucagccugcuguuccuguucagcagcgccuacagccuguuccaggaguaccagugcuacggcagcagcagcaacaccagagugcugaacgagcugaacuacgacaacgccggcaccaaccuguacaacgagcuggagaugaacuacuacggcaagcaggagaacugguacagccugaagaagaacagcagaagccugggcgagaacgacgacggcaacaacgaggacaacgagaagcugagaaagcccaagcacaagaagcugaagcagcccgccgacggcaaccccgaccccaacgccaaccccaacguggaccccaacgccaaccccaacguggaccccaacgccaaccccaacguggaccccaacgccaaccccaacgccaaccccaacgccaaccccaacgccaaccccaacgccaaccccaacgccaaccccaacgccaaccccaacgccaaccccaacgccaaccccaacgccaaccccaacgccaaccccaacgccaaccccaacgccaaccccaacgccaaccccaacgccaaccccaacgccaaccccaacgccaaccccaacguggaccccaacgccaaccccaacgccaaccccaacgccaaccccaacgccaaccccaacgccaaccccaacgccaaccccaacgccaaccccaacgccaaccccaacgccaaccccaacgccaaccccaacgccaaccccaacgccaaccccaacgccaaccccaacgccaaccccaacgccaaccccaacgccaaccccaacgccaaccccaacgccaaccccaacaagaacaaccagggcaacggccagggccacaacaugcccaacgaccccaacagaaacguggacgagaacgccaacgccaacagcgccgugaagaacaacaacaacgaggagcccagcgacaagcacaucaaggaguaccugaacaagauccagaacugaggacuagucccuguucccagagcccacuuuuuuuucuuuuuuugaaauaaaauagccugucuuucagaucucaaaggcucuuuucagagccaccaaaaaaaaaaaaaaaaaaaaaaaaaaaaaaaaaaaaaaaaaaaaaaaaaaaaaaaaaaaaaaaaaaaaaaaaaaaaaaaaaaaaaaaaaaaaaaaaaaaaa

SEQ ID NO: 8398 - RNA, 1524 nt, Artificial Sequence
  mRNA Design a-3 (hSL-A100) comprising derived and/or modified sequence from Pf(3D7)__XP_001351122.1__HsALB_Pf-CSP(19-384) (opt4)
aggagagggcgcuuggcuugcaaggacccugagcugcggcauugaagcacacccaacccaacucgacugaagucagccucacugaaccggaucugagaaucuucucucucugggcuugccagggcucuccgaaccuagcuagcauccucuucaauuccaacuagaaagcuuaccaugaagugggugaccuucaucagccugcuguuccuguucagcagcgccuacagccuguuccaggaguaccagugcuacggcagcagcagcaacaccagagugcugaacgagcugaacuacgacaacgccggcaccaaccuguacaacgagcuggagaugaacuacuacggcaagcaggagaacugguacagccugaagaagaacagcagaagccugggcgagaacgacgacggcaacaacgaggacaacgagaagcugagaaagcccaagcacaagaagcugaagcagcccgccgacggcaaccccgaccccaacgccaaccccaacguggaccccaacgccaaccccaacguggaccccaacgccaaccccaacguggaccccaacgccaaccccaacgccaaccccaacgccaaccccaacgccaaccccaacgccaaccccaacgccaaccccaacgccaaccccaacgccaaccccaacgccaaccccaacgccaaccccaacgccaaccccaacgccaaccccaacgccaaccccaacgccaaccccaacgccaaccccaacgccaaccccaacgccaaccccaacguggaccccaacgccaaccccaacgccaaccccaacgccaaccccaacgccaaccccaacgccaaccccaacgccaaccccaacgccaaccccaacgccaaccccaacgccaaccccaacgccaaccccaacgccaaccccaacgccaaccccaacgccaaccccaacgccaaccccaacgccaaccccaacgccaaccccaacgccaaccccaacgccaaccccaacaagaacaaccagggcaacggccagggccacaacaugcccaacgaccccaacagaaacguggacgagaacgccaacgccaacagcgccgugaagaacaacaacaacgaggagcccagcgacaagcacaucaaggaguaccugaacaagauccagaacagccugagcaccgaguggagccccugcagcgugaccugcggcaacggcauccaggugagaaucaagcccggcagcgccaacaagcccaaggacgagcuggacuacgccaacgacaucgagaagaagaucugcaagauggagaagugcagcagcguguucaacguggugaacagcagcugaggacuagucccuguucccagagcccacuuuuuuuucuuuuuuugaaauaaaauagccugucuuucagaucucaaaggcucuuuucagagccaccaaaaaaaaaaaaaaaaaaaaaaaaaaaaaaaaaaaaaaaaaaaaaaaaaaaaaaaaaaaaaaaaaaaaaaaaaaaaaaaaaaaaaaaaaaaaaaaaaaaaa

SEQ ID NO: 8399 - RNA, 1662 nt, Artificial Sequence
  mRNA Design a-3 (hSL-A100) comprising derived and/or modified sequence from Pf(3D7)__XP_001351122.1__HsALB_Pf-CSP(19-384)_TM domain HA (opt4)
aggagagggcgcuuggcuugcaaggacccugagcugcggcauugaagcacacccaacccaacucgacugaagucagccucacugaaccggaucugagaaucuucucucucugggcuugccagggcucuccgaaccuagcuagcauccucuucaauuccaacuagaaagcuuaccaugaagugggugaccuucaucagccugcuguuccuguucagcagcgccuacagccuguuccaggaguaccagugcuacggcagcagcagcaacaccagagugcugaacgagcugaacuacgacaacgccggcaccaaccuguacaacgagcuggagaugaacuacuacggcaagcaggagaacugguacagccugaagaagaacagcagaagccugggcgagaacgacgacggcaacaacgaggacaacgagaagcugagaaagcccaagcacaagaagcugaagcagcccgccgacggcaaccccgaccccaacgccaaccccaacguggaccccaacgccaaccccaacguggaccccaacgccaaccccaacguggaccccaacgccaaccccaacgccaaccccaacgccaaccccaacgccaaccccaacgccaaccccaacgccaaccccaacgccaaccccaacgccaaccccaacgccaaccccaacgccaaccccaacgccaaccccaacgccaaccccaacgccaaccccaacgccaaccccaacgccaaccccaacgccaaccccaacgccaaccccaacguggaccccaacgccaaccccaacgccaaccccaacgccaaccccaacgccaaccccaacgccaaccccaacgccaaccccaacgccaaccccaacgccaaccccaacgccaaccccaacgccaaccccaacgccaaccccaacgccaaccccaacgccaaccccaacgccaaccccaacgccaaccccaacgccaaccccaacgccaaccccaacgccaaccccaacaagaacaaccagggcaacggccagggccacaacaugcccaacgaccccaacagaaacguggacgagaacgccaacgccaacagcgccgugaagaacaacaacaacgaggagcccagcgacaagcacaucaaggaguaccugaacaagauccagaacagccugagcaccgaguggagccccugcagcgugaccugcggcaacggcauccaggugagaaucaagcccggcagcgccaacaagcccaaggacgagcuggacuacgccaacgacaucgagaagaagaucugcaagauggagaagugcagcagcguguucaacguggugaacagcagcaagcuggagagcaccagaaucuaccagauccuggccaucuacagcaccguggccagcagccuggugcugguggugagccugggcgccaucagcuucuggaugugcagcaacggcagccugcagugcagaaucugcaucugaggacuagucccuguucccagagcccacuuuuuuuucuuuuuuugaaauaaaauagccugucuuucagaucucaaaggcucuuuucagagccaccaaaaaaaaaaaaaaaaaaaaaaaaaaaaaaaaaaaaaaaaaaaaaaaaaaaaaaaaaaaaaaaaaaaaaaaaaaaaaaaaaaaaaaaaaaaaaaaaaaaaa

SEQ ID NO: 8400 - RNA, 1374 nt, Artificial Sequence
  mRNA Design a-3 (hSL-A100) comprising derived and/or modified sequence from Pf(3D7)__XP_001351122.1__HsALB_Pf-CSP(82-397) (opt4)
aggagagggcgcuuggcuugcaaggacccugagcugcggcauugaagcacacccaacccaacucgacugaagucagccucacugaaccggaucugagaaucuucucucucugggcuugccagggcucuccgaaccuagcuagcauccucuucaauuccaacuagaaagcuuaccaugaagugggugaccuucaucagccugcuguuccuguucagcagcgccuacagcgacaacgagaagcugagaaagcccaagcacaagaagcugaagcagcccgccgacggcaaccccgaccccaacgccaaccccaacguggaccccaacgccaaccccaacguggaccccaacgccaaccccaacguggaccccaacgccaaccccaacgccaaccccaacgccaaccccaacgccaaccccaacgccaaccccaacgccaaccccaacgccaaccccaacgccaaccccaacgccaaccccaacgccaaccccaacgccaaccccaacgccaaccccaacgccaaccccaacgccaaccccaacgccaaccccaacgccaaccccaacgccaaccccaacguggaccccaacgccaaccccaacgccaaccccaacgccaaccccaacgccaaccccaacgccaaccccaacgccaaccccaacgccaaccccaacgccaaccccaacgccaaccccaacgccaaccccaacgccaaccccaacgccaaccccaacgccaaccccaacgccaaccccaacgccaaccccaacgccaaccccaacgccaaccccaacgccaaccccaacaagaacaaccagggcaacggccagggccacaacaugcccaacgaccccaacagaaacguggacgagaacgccaacgccaacagcgccgugaagaacaacaacaacgaggagcccagcgacaagcacaucaaggaguaccugaacaagauccagaacagccugagcaccgaguggagccccugcagcgugaccugcggcaacggcauccaggugagaaucaagcccggcagcgccaacaagcccaaggacgagcuggacuacgccaacgacaucgagaagaagaucugcaagauggagaagugcagcagcguguucaacguggugaacagcagcaucggccugaucauggugcugagcuuccuguuccugaacugaggacuagucccuguucccagagcccacuuuuuuuucuuuuuuugaaauaaaauagccugucuuucagaucucaaaggcucuuuucagagccaccaaaaaaaaaaaaaaaaaaaaaaaaaaaaaaaaaaaaaaaaaaaaaaaaaaaaaaaaaaaaaaaaaaaaaaaaaaaaaaaaaaaaaaaaaaaaaaaaaaaaa

SEQ ID NO: 8401 - RNA, 726 nt, Artificial Sequence
  mRNA Design a-3 (hSL-A100) comprising derived and/or modified sequence from Pf(3D7)__XP_001351122.1__HsALB_Pf-CSP(93-192) (opt4)
aggagagggcgcuuggcuugcaaggacccugagcugcggcauugaagcacacccaacccaacucgacugaagucagccucacugaaccggaucugagaaucuucucucucugggcuugccagggcucuccgaaccuagcuagcauccucuucaauuccaacuagaaagcuuaccaugaagugggugaccuucaucagccugcuguuccuguucagcagcgccuacagcaagcugaagcagcccgccgacggcaaccccgaccccaacgccaaccccaacguggaccccaacgccaaccccaacguggaccccaacgccaaccccaacguggaccccaacgccaaccccaacgccaaccccaacgccaaccccaacgccaaccccaacgccaaccccaacgccaaccccaacgccaaccccaacgccaaccccaacgccaaccccaacgccaaccccaacgccaaccccaacgccaaccccaacgccaaccccaacgccaaccccaacgccaaccccaacgccaaccccugaggacuagucccuguucccagagcccacuuuuuuuucuuuuuuugaaauaaaauagccugucuuucagaucucaaaggcucuuuucagagccaccaaaaaaaaaaaaaaaaaaaaaaaaaaaaaaaaaaaaaaaaaaaaaaaaaaaaaaaaaaaaaaaaaaaaaaaaaaaaaaaaaaaaaaaaaaaaaaaaaaaaa

SEQ ID NO: 8402 - RNA, 966 nt, Artificial Sequence
  mRNA Design a-3 (hSL-A100) comprising derived and/or modified sequence from Pf(3D7)__XP_001351122.1__HsALB_Pf-CSP(93-272) (opt4)
aggagagggcgcuuggcuugcaaggacccugagcugcggcauugaagcacacccaacccaacucgacugaagucagccucacugaaccggaucugagaaucuucucucucugggcuugccagggcucuccgaaccuagcuagcauccucuucaauuccaacuagaaagcuuaccaugaagugggugaccuucaucagccugcuguuccuguucagcagcgccuacagcaagcugaagcagcccgccgacggcaaccccgaccccaacgccaaccccaacguggaccccaacgccaaccccaacguggaccccaacgccaaccccaacguggaccccaacgccaaccccaacgccaaccccaacgccaaccccaacgccaaccccaacgccaaccccaacgccaaccccaacgccaaccccaacgccaaccccaacgccaaccccaacgccaaccccaacgccaaccccaacgccaaccccaacgccaaccccaacgccaaccccaacgccaaccccaacgccaaccccaacgccaaccccaacguggaccccaacgccaaccccaacgccaaccccaacgccaaccccaacgccaaccccaacgccaaccccaacgccaaccccaacgccaaccccaacgccaaccccaacgccaaccccaacgccaaccccaacgccaaccccaacgccaaccccaacgccaaccccaacgccaaccccaacgccaaccccaacgccaaccccaacgccaaccccaacgccaaccccugaggacuagucccuguucccagagcccacuuuuuuuucuuuuuuugaaauaaaauagccugucuuucagaucucaaaggcucuuuucagagccaccaaaaaaaaaaaaaaaaaaaaaaaaaaaaaaaaaaaaaaaaaaaaaaaaaaaaaaaaaaaaaaaaaaaaaaaaaaaaaaaaaaaaaaaaaaaaaaaaaaaaa

SEQ ID NO: 8403 - RNA, 1341 nt, Artificial Sequence
  mRNA Design a-3 (hSL-A100) comprising derived and/or modified sequence from Pf(3D7)__XP_001351122.1__HsALB_Pf-CSP(93-397) (opt4)
aggagagggcgcuuggcuugcaaggacccugagcugcggcauugaagcacacccaacccaacucgacugaagucagccucacugaaccggaucugagaaucuucucucucugggcuugccagggcucuccgaaccuagcuagcauccucuucaauuccaacuagaaagcuuaccaugaagugggugaccuucaucagccugcuguuccuguucagcagcgccuacagcaagcugaagcagcccgccgacggcaaccccgaccccaacgccaaccccaacguggaccccaacgccaaccccaacguggaccccaacgccaaccccaacguggaccccaacgccaaccccaacgccaaccccaacgccaaccccaacgccaaccccaacgccaaccccaacgccaaccccaacgccaaccccaacgccaaccccaacgccaaccccaacgccaaccccaacgccaaccccaacgccaaccccaacgccaaccccaacgccaaccccaacgccaaccccaacgccaaccccaacgccaaccccaacguggaccccaacgccaaccccaacgccaaccccaacgccaaccccaacgccaaccccaacgccaaccccaacgccaaccccaacgccaaccccaacgccaaccccaacgccaaccccaacgccaaccccaacgccaaccccaacgccaaccccaacgccaaccccaacgccaaccccaacgccaaccccaacgccaaccccaacgccaaccccaacgccaaccccaacaagaacaaccagggcaacggccagggccacaacaugcccaacgaccccaacagaaacguggacgagaacgccaacgccaacagcgccgugaagaacaacaacaacgaggagcccagcgacaagcacaucaaggaguaccugaacaagauccagaacagccugagcaccgaguggagccccugcagcgugaccugcggcaacggcauccaggugagaaucaagcccggcagcgccaacaagcccaaggacgagcuggacuacgccaacgacaucgagaagaagaucugcaagauggagaagugcagcagcguguucaacguggugaacagcagcaucggccugaucauggugcugagcuuccuguuccugaacugaggacuagucccuguucccagagcccacuuuuuuuucuuuuuuugaaauaaaauagccugucuuucagaucucaaaggcucuuuucagagccaccaaaaaaaaaaaaaaaaaaaaaaaaaaaaaaaaaaaaaaaaaaaaaaaaaaaaaaaaaaaaaaaaaaaaaaaaaaaaaaaaaaaaaaaaaaaaaaaaaaaaa

SEQ ID NO: 8404 - RNA, 711 nt, Artificial Sequence
  mRNA Design a-3 (hSL-A100) comprising derived and/or modified sequence from Pf(3D7)__XP_001351122.1__HsALB_Pf-CSP(98-192) (opt4)
aggagagggcgcuuggcuugcaaggacccugagcugcggcauugaagcacacccaacccaacucgacugaagucagccucacugaaccggaucugagaaucuucucucucugggcuugccagggcucuccgaaccuagcuagcauccucuucaauuccaacuagaaagcuuaccaugaagugggugaccuucaucagccugcuguuccuguucagcagcgccuacagcgccgacggcaaccccgaccccaacgccaaccccaacguggaccccaacgccaaccccaacguggaccccaacgccaaccccaacguggaccccaacgccaaccccaacgccaaccccaacgccaaccccaacgccaaccccaacgccaaccccaacgccaaccccaacgccaaccccaacgccaaccccaacgccaaccccaacgccaaccccaacgccaaccccaacgccaaccccaacgccaaccccaacgccaaccccaacgccaaccccaacgccaaccccugaggacuagucccuguucccagagcccacuuuuuuuucuuuuuuugaaauaaaauagccugucuuucagaucucaaaggcucuuuucagagccaccaaaaaaaaaaaaaaaaaaaaaaaaaaaaaaaaaaaaaaaaaaaaaaaaaaaaaaaaaaaaaaaaaaaaaaaaaaaaaaaaaaaaaaaaaaaaaaaaaaaaa

SEQ ID NO: 8405 - RNA, 951 nt, Artificial Sequence
  mRNA Design a-3 (hSL-A100) comprising derived and/or modified sequence from Pf(3D7)__XP_001351122.1__HsALB_Pf-CSP(98-272) (opt4)
aggagagggcgcuuggcuugcaaggacccugagcugcggcauugaagcacacccaacccaacucgacugaagucagccucacugaaccggaucugagaaucuucucucucugggcuugccagggcucuccgaaccuagcuagcauccucuucaauuccaacuagaaagcuuaccaugaagugggugaccuucaucagccugcuguuccuguucagcagcgccuacagcgccgacggcaaccccgaccccaacgccaaccccaacguggaccccaacgccaaccccaacguggaccccaacgccaaccccaacguggaccccaacgccaaccccaacgccaaccccaacgccaaccccaacgccaaccccaacgccaaccccaacgccaaccccaacgccaaccccaacgccaaccccaacgccaaccccaacgccaaccccaacgccaaccccaacgccaaccccaacgccaaccccaacgccaaccccaacgccaaccccaacgccaaccccaacgccaaccccaacguggaccccaacgccaaccccaacgccaaccccaacgccaaccccaacgccaaccccaacgccaaccccaacgccaaccccaacgccaaccccaacgccaaccccaacgccaaccccaacgccaaccccaacgccaaccccaacgccaaccccaacgccaaccccaacgccaaccccaacgccaaccccaacgccaaccccaacgccaaccccaacgccaaccccugaggacuagucccuguucccagagcccacuuuuuuuucuuuuuuugaaauaaaauagccugucuuucagaucucaaaggcucuuuucagagccaccaaaaaaaaaaaaaaaaaaaaaaaaaaaaaaaaaaaaaaaaaaaaaaaaaaaaaaaaaaaaaaaaaaaaaaaaaaaaaaaaaaaaaaaaaaaaaaaaaaaaa

SEQ ID NO: 8406 - RNA, 1257 nt, Artificial Sequence
  mRNA Design a-3 (hSL-A100) comprising derived and/or modified sequence from Pf(3D7)__XP_001351122.1__HsALB_Pf-CSP(98-374) (opt4)
aggagagggcgcuuggcuugcaaggacccugagcugcggcauugaagcacacccaacccaacucgacugaagucagccucacugaaccggaucugagaaucuucucucucugggcuugccagggcucuccgaaccuagcuagcauccucuucaauuccaacuagaaagcuuaccaugaagugggugaccuucaucagccugcuguuccuguucagcagcgccuacagcgccgacggcaaccccgaccccaacgccaaccccaacguggaccccaacgccaaccccaacguggaccccaacgccaaccccaacguggaccccaacgccaaccccaacgccaaccccaacgccaaccccaacgccaaccccaacgccaaccccaacgccaaccccaacgccaaccccaacgccaaccccaacgccaaccccaacgccaaccccaacgccaaccccaacgccaaccccaacgccaaccccaacgccaaccccaacgccaaccccaacgccaaccccaacgccaaccccaacguggaccccaacgccaaccccaacgccaaccccaacgccaaccccaacgccaaccccaacgccaaccccaacgccaaccccaacgccaaccccaacgccaaccccaacgccaaccccaacgccaaccccaacgccaaccccaacgccaaccccaacgccaaccccaacgccaaccccaacgccaaccccaacgccaaccccaacgccaaccccaacgccaaccccaacaagaacaaccagggcaacggccagggccacaacaugcccaacgaccccaacagaaacguggacgagaacgccaacgccaacagcgccgugaagaacaacaacaacgaggagcccagcgacaagcacaucaaggaguaccugaacaagauccagaacagccugagcaccgaguggagccccugcagcgugaccugcggcaacggcauccaggugagaaucaagcccggcagcgccaacaagcccaaggacgagcuggacuacgccaacgacaucgagaagaagaucugcaagauggagaagugcugaggacuagucccuguucccagagcccacuuuuuuuucuuuuuuugaaauaaaauagccugucuuucagaucucaaaggcucuuuucagagccaccaaaaaaaaaaaaaaaaaaaaaaaaaaaaaaaaaaaaaaaaaaaaaaaaaaaaaaaaaaaaaaaaaaaaaaaaaaaaaaaaaaaaaaaaaaaaaaaaaaaaa

SEQ ID NO: 8407 - RNA, 1326 nt, Artificial Sequence
  mRNA Design a-3 (hSL-A100) comprising derived and/or modified sequence from Pf(3D7)__XP_001351122.1__HsALB_Pf-CSP(98-397) (opt4)
aggagagggcgcuuggcuugcaaggacccugagcugcggcauugaagcacacccaacccaacucgacugaagucagccucacugaaccggaucugagaaucuucucucucugggcuugccagggcucuccgaaccuagcuagcauccucuucaauuccaacuagaaagcuuaccaugaagugggugaccuucaucagccugcuguuccuguucagcagcgccuacagcgccgacggcaaccccgaccccaacgccaaccccaacguggaccccaacgccaaccccaacguggaccccaacgccaaccccaacguggaccccaacgccaaccccaacgccaaccccaacgccaaccccaacgccaaccccaacgccaaccccaacgccaaccccaacgccaaccccaacgccaaccccaacgccaaccccaacgccaaccccaacgccaaccccaacgccaaccccaacgccaaccccaacgccaaccccaacgccaaccccaacgccaaccccaacgccaaccccaacguggaccccaacgccaaccccaacgccaaccccaacgccaaccccaacgccaaccccaacgccaaccccaacgccaaccccaacgccaaccccaacgccaaccccaacgccaaccccaacgccaaccccaacgccaaccccaacgccaaccccaacgccaaccccaacgccaaccccaacgccaaccccaacgccaaccccaacgccaaccccaacgccaaccccaacaagaacaaccagggcaacggccagggccacaacaugcccaacgaccccaacagaaacguggacgagaacgccaacgccaacagcgccgugaagaacaacaacaacgaggagcccagcgacaagcacaucaaggaguaccugaacaagauccagaacagccugagcaccgaguggagccccugcagcgugaccugcggcaacggcauccaggugagaaucaagcccggcagcgccaacaagcccaaggacgagcuggacuacgccaacgacaucgagaagaagaucugcaagauggagaagugcagcagcguguucaacguggugaacagcagcaucggccugaucauggugcugagcuuccuguuccugaacugaggacuagucccuguucccagagcccacuuuuuuuucuuuuuuugaaauaaaauagccugucuuucagaucucaaaggcucuuuucagagccaccaaaaaaaaaaaaaaaaaaaaaaaaaaaaaaaaaaaaaaaaaaaaaaaaaaaaaaaaaaaaaaaaaaaaaaaaaaaaaaaaaaaaaaaaaaaaaaaaaaaaa

SEQ ID NO: 8408 - RNA, 1653 nt, Artificial Sequence
  mRNA Design a-3 (hSL-A100) comprising derived and/or modified sequence from Pf(3D7)__XP_001351122.1__HsALB_Pf-CSP(199-377)_L(PVTN)_HBsAg (opt4)
aggagagggcgcuuggcuugcaaggacccugagcugcggcauugaagcacacccaacccaacucgacugaagucagccucacugaaccggaucugagaaucuucucucucugggcuugccagggcucuccgaaccuagcuagcauccucuucaauuccaacuagaaagcuuaccaugaagugggugaccuucaucagccugcuguuccuguucagcagcgccuacagcgaccccaacgccaaccccaacgccaaccccaacgccaaccccaacgccaaccccaacgccaaccccaacgccaaccccaacgccaaccccaacgccaaccccaacgccaaccccaacgccaaccccaacgccaaccccaacgccaaccccaacgccaaccccaacgccaaccccaacgccaaccccaacgccaaccccaacgccaaccccaacgccaaccccaacaagaacaaccagggcaacggccagggccacaacaugcccaacgaccccaacagaaacguggacgagaacgccaacgccaacagcgccgugaagaacaacaacaacgaggagcccagcgacaagcacaucaaggaguaccugaacaagauccagaacagccugagcaccgaguggagccccugcagcgugaccugcggcaacggcauccaggugagaaucaagcccggcagcgccaacaagcccaaggacgagcuggacuacgccaacgacaucgagaagaagaucugcaagauggagaagugcagcagcgugcccgugaccaacauggagaacaucaccagcggcuuccugggcccccugcuggugcugcaggccggcuucuuccugcugaccagaauccugaccaucccccagagccuggacagcugguggaccagccugaacuuccugggcggcagccccgugugccugggccagaacagccagagccccaccagcaaccacagccccaccagcugcccccccaucugccccggcuacagauggaugugccugagaagauucaucaucuuccuguucauccugcugcugugccugaucuuccugcuggugcugcuggacuaccagggcaugcugcccgugugcccccugauccccggcagcaccaccaccaacaccggccccugcaagaccugcaccacccccgcccagggcaacagcauguuccccagcugcugcugcaccaagcccaccgacggcaacugcaccugcauccccauccccagcagcugggccuucgccaaguaccugugggagugggccagcgugagauucagcuggcugagccugcuggugcccuucgugcagugguucgugggccugagccccaccguguggcugagcgccaucuggaugaugugguacuggggccccagccuguacagcaucgugagccccuucaucccccugcugcccaucuucuucugccuguggguguacaucugaggacuagucccuguucccagagcccacuuuuuuuucuuuuuuugaaauaaaauagccugucuuucagaucucaaaggcucuuuucagagccaccaaaaaaaaaaaaaaaaaaaaaaaaaaaaaaaaaaaaaaaaaaaaaaaaaaaaaaaaaaaaaaaaaaaaaaaaaaaaaaaaaaaaaaaaaaaaaaaaaaaaa

SEQ ID NO: 8409 - RNA, 1563 nt, Artificial Sequence
  mRNA Design a-3 (hSL-A100) comprising derived and/or modified sequence from Pf(3D7)__XP_001351122.1__Pf-CSP (opt5)
aggagagggcgcuuggcuugcaaggacccugagcugcggcauugaagcacacccaacccaacucgacugaagucagccucacugaaccggaucugagaaucuucucucucugggcuugccagggcucuccgaaccuagcuagcauccucuucaauuccaacuagaaagcuuaccaugaugagaaagcuggccauccucagcguguccucuuuccuguuugucgaggcucuuuuccaggaauaccaaugcuauggcagcuccucuaacacccggguucugaaugagcucaacuacgacaaugccgggacaaaccuguauaaugaacuugagaugaacuacuauggaaaacaggaaaauugguacagccugaagaaaaacucccgcucucucggcgagaaugaugacgggaacaaugaggauaacgaaaagcugagaaaacccaagcacaagaaacugaagcagccugcggacggaaauccggaucccaacgcuaauccuaacguggaccccaacgccaauccuaacguggaucccaaugccaacccuaaugucgacccgaacgcuaaucccaacgccaauccuaacgcuaaucccaacgccaauccuaacgcgaaucccaacgccaacccgaaugcuaacccuaaugccaaccccaaugcuaacccuaaugccaaccccaaugcgaaccccaaugccaacccuaaugcuaacccgaaugccaaccccaacgcuaauccuaacgccaaucccaacgccaauccuaacguggaucccaaugcuaacccgaaugcgaacccuaaugccaaccccaaugcuaacccuaaugccaaccccaacgccaauccuaacgcuaaucccaacgccaauccgaacgcgaauccuaacgcuaaucccaacgccaaucccaacgccaauccuaacgcuaauccgaacgccaaucccaacgcuaacccuaaugccaaccccaaugcgaacccuaaugccaaccccaauaaaaacaaucagggcaacgggcaaggacauaauaugccuaacgaccccaaucggaacguugaugagaaugcuaacgccaacagcgcugugaagaauaacaauaacgaggaaccguccgacaaacacauuaaggaguaucucaauaagauccagaacagccugucuacggaaugguccccuuguagcgugaccugcggcaauggcauucagguccgcaucaaacccgggucugccaacaagccuaaagaugagcuugacuacgcgaaugacauugaaaagaaaaucuguaagauggagaaaugcuccagcguuuuuaacguggucaauucuuccaucggacugauuauggugcucagcuuccuguuucuuaacugaggacuagucccuguucccagagcccacuuuuuuuucuuuuuuugaaauaaaauagccugucuuucagaucucaaaggcucuuuucagagccaccaaaaaaaaaaaaaaaaaaaaaaaaaaaaaaaaaaaaaaaaaaaaaaaaaaaaaaaaaaaaaaaaaaaaaaaaaaaaaaaaaaaaaaaaaaaaaaaaaaaaa

SEQ ID NO: 8410 - RNA, 1494 nt, Artificial Sequence
  mRNA Design a-3 (hSL-A100) comprising derived and/or modified sequence from Pf(3D7)__XP_001351122.1__Pf-CSP(1-374) (opt5)
aggagagggcgcuuggcuugcaaggacccugagcugcggcauugaagcacacccaacccaacucgacugaagucagccucacugaaccggaucugagaaucuucucucucugggcuugccagggcucuccgaaccuagcuagcauccucuucaauuccaacuagaaagcuuaccaugaugagaaagcuggccauccucagcguguccucuuuccuguuugucgaggcucuuuuccaggaauaccaaugcuauggcagcuccucuaacacccggguucugaaugagcucaacuacgacaaugccgggacaaaccuguauaaugaacuugagaugaacuacuauggaaaacaggaaaauugguacagccugaagaaaaacucccgcucucucggcgagaaugaugacgggaacaaugaggauaacgaaaagcugagaaaacccaagcacaagaaacugaagcagccugcggacggaaauccggaucccaacgcuaauccuaacguggaccccaacgccaauccuaacguggaucccaaugccaacccuaaugucgacccgaacgcuaaucccaacgccaauccuaacgcuaaucccaacgccaauccuaacgcgaaucccaacgccaacccgaaugcuaacccuaaugccaaccccaaugcuaacccuaaugccaaccccaaugcgaaccccaaugccaacccuaaugcuaacccgaaugccaaccccaacgcuaauccuaacgccaaucccaacgccaauccuaacguggaucccaaugcuaacccgaaugcgaacccuaaugccaaccccaaugcuaacccuaaugccaaccccaacgccaauccuaacgcuaaucccaacgccaauccgaacgcgaauccuaacgcuaaucccaacgccaaucccaacgccaauccuaacgcuaauccgaacgccaaucccaacgcuaacccuaaugccaaccccaaugcgaacccuaaugccaaccccaauaaaaacaaucagggcaacgggcaaggacauaauaugccuaacgaccccaaucggaacguugaugagaaugcuaacgccaacagcgcugugaagaauaacaauaacgaggaaccguccgacaaacacauuaaggaguaucucaauaagauccagaacagccugucuacggaaugguccccuuguagcgugaccugcggcaauggcauucagguccgcaucaaacccgggucugccaacaagccuaaagaugagcuugacuacgcgaaugacauugaaaagaaaaucuguaagauggagaaaugcugaggacuagucccuguucccagagcccacuuuuuuuucuuuuuuugaaauaaaauagccugucuuucagaucucaaaggcucuuuucagagccaccaaaaaaaaaaaaaaaaaaaaaaaaaaaaaaaaaaaaaaaaaaaaaaaaaaaaaaaaaaaaaaaaaaaaaaaaaaaaaaaaaaaaaaaaaaaaaaaaaaaaa

SEQ ID NO: 8411 - RNA, 1347 nt, Artificial Sequence
  mRNA Design a-3 (hSL-A100) comprising derived and/or modified sequence from Pf(3D7)__XP_001351122.1__Pf-CSP(1-325) (opt5)
aggagagggcgcuuggcuugcaaggacccugagcugcggcauugaagcacacccaacccaacucgacugaagucagccucacugaaccggaucugagaaucuucucucucugggcuugccagggcucuccgaaccuagcuagcauccucuucaauuccaacuagaaagcuuaccaugaugagaaagcuggccauccucagcguguccucuuuccuguuugucgaggcucuuuuccaggaauaccaaugcuauggcagcuccucuaacacccggguucugaaugagcucaacuacgacaaugccgggacaaaccuguauaaugaacuugagaugaacuacuauggaaaacaggaaaauugguacagccugaagaaaaacucccgcucucucggcgagaaugaugacgggaacaaugaggauaacgaaaagcugagaaaacccaagcacaagaaacugaagcagccugcggacggaaauccggaucccaacgcuaauccuaacguggaccccaacgccaauccuaacguggaucccaaugccaacccuaaugucgacccgaacgcuaaucccaacgccaauccuaacgcuaaucccaacgccaauccuaacgcgaaucccaacgccaacccgaaugcuaacccuaaugccaaccccaaugcuaacccuaaugccaaccccaaugcgaaccccaaugccaacccuaaugcuaacccgaaugccaaccccaacgcuaauccuaacgccaaucccaacgccaauccuaacguggaucccaaugcuaacccgaaugcgaacccuaaugccaaccccaaugcuaacccuaaugccaaccccaacgccaauccuaacgcuaaucccaacgccaauccgaacgcgaauccuaacgcuaaucccaacgccaaucccaacgccaauccuaacgcuaauccgaacgccaaucccaacgcuaacccuaaugccaaccccaaugcgaacccuaaugccaaccccaauaaaaacaaucagggcaacgggcaaggacauaauaugccuaacgaccccaaucggaacguugaugagaaugcuaacgccaacagcgcugugaagaauaacaauaacgaggaaccguccgacaaacacauuaaggaguaucucaauaagauccagaacugaggacuagucccuguucccagagcccacuuuuuuuucuuuuuuugaaauaaaauagccugucuuucagaucucaaaggcucuuuucagagccaccaaaaaaaaaaaaaaaaaaaaaaaaaaaaaaaaaaaaaaaaaaaaaaaaaaaaaaaaaaaaaaaaaaaaaaaaaaaaaaaaaaaaaaaaaaaaaaaaaaaaa

SEQ ID NO: 8412 - RNA, 1563 nt, Artificial Sequence
  mRNA Design a-3 (hSL-A100) comprising derived and/or modified sequence from Pf(3D7)__XP_001351122.1__HsALB_Pf-CSP(19-397) (opt5)
aggagagggcgcuuggcuugcaaggacccugagcugcggcauugaagcacacccaacccaacucgacugaagucagccucacugaaccggaucugagaaucuucucucucugggcuugccagggcucuccgaaccuagcuagcauccucuucaauuccaacuagaaagcuuaccaugaagugggugaccuucaucagccugcucuuucuguucuccucugccuacagccuuuuucaggaguaucaaugcuacggcuccucuagcaacacaagaguccugaaugaacucaacuaugacaaugcugggacgaaccuguacaaugagcuugaaaugaacuauuacggaaaacaggagaauugguauucccugaagaaaaacucucggagccucggcgaaaaugaugacgggaacaaugaggauaacgagaagcugcgcaaacccaagcacaagaaacugaagcagccugccgacggaaauccggaucccaacgcgaauccuaacguugaccccaacgcuaauccuaacguggaucccaaugccaacccuaauguggacccgaacgccaaucccaacgcuaauccuaacgccaaucccaacgcuaauccuaacgccaaucccaacgcgaacccgaaugccaacccuaaugcuaaccccaaugccaacccuaaugcuaaccccaaugccaaccccaaugcgaacccuaaugccaacccgaaugcuaaccccaacgccaauccuaacgcuaaucccaacgccaauccuaacgucgaucccaaugccaacccgaaugcuaacccuaaugcgaaccccaaugccaacccuaaugcuaaccccaacgccaauccuaacgccaaucccaacgcuaauccgaacgccaauccuaacgcgaaucccaacgcuaaucccaacgccaauccuaacgccaauccgaacgcuaaucccaacgccaacccuaaugcuaaccccaaugccaacccuaaugcgaaccccaauaaaaacaaucagggcaacgggcaaggacauaauaugccuaacgaccccaauagaaacguggaugaaaaugccaacgcuaacuccgccguuaagaauaacaauaacgaggaaccgagcgacaaacacauuaaggaguaccucaauaagauccagaacucucuguccaccgaguggagcccuuguucugugacaugcggcaauggcauucagguccggaucaaacccggguccgcuaacaagccuaaagaugaacuugacuacgccaaugacauugagaagaaaaucuguaagauggaaaaaugcagcucuguguucaacguugucaauuccagcaucggacugauuauggugcucuccuuucuguuccuuaacugaggacuagucccuguucccagagcccacuuuuuuuucuuuuuuugaaauaaaauagccugucuuucagaucucaaaggcucuuuucagagccaccaaaaaaaaaaaaaaaaaaaaaaaaaaaaaaaaaaaaaaaaaaaaaaaaaaaaaaaaaaaaaaaaaaaaaaaaaaaaaaaaaaaaaaaaaaaaaaaaaaaaa

SEQ ID NO: 8413 - RNA, 1581 nt, Artificial Sequence
  mRNA Design a-3 (hSL-A100) comprising derived and/or modified sequence from Pf(3D7)__XP_001351122.1__HsIns-iso1_Pf-CSP(19-397) (opt5)
aggagagggcgcuuggcuugcaaggacccugagcugcggcauugaagcacacccaacccaacucgacugaagucagccucacugaaccggaucugagaaucuucucucucugggcuugccagggcucuccgaaccuagcuagcauccucuucaauuccaacuagaaagcuuaccauggcccuguggaugagacuccugccccuucuggcucuccuggcccuuuggggcccugacccggcggcugcccuguuccaggaguaccaaugcuaugggagcuccucuaacacccgggugcucaaugaacugaacuacgauaaugccggaacaaaccuguauaaugagcucgaaaugaacuacuauggcaagcaggagaauugguacagccugaaaaagaacucccgcucucuuggggaaaaugacgauggaaacaaugaggacaacgagaaacugagaaagcccaaacacaagaagcucaaacagccugcugauggcaaucccgacccuaacgccaaucccaacgucgauccuaacgcuaauccgaacguugaccccaaugccaacccuaauguggaucccaacgcgaauccuaacgccaaucccaacgcuaauccgaacgccaauccuaacgcuaaucccaacgccaacccuaaugcgaaccccaaugccaaccccaaugcuaacccuaaugccaacccgaaugcuaaccccaaugccaacccuaaugccaaccccaaugcuaacccuaacgcgaaucccaacgccaauccgaacgcuaauccuaacguggaccccaaugccaacccuaaugccaaccccaaugcuaacccuaaugccaaccccaaugcgaacccgaacgcuaauccuaacgccaaucccaacgccaaucccaacgcuaauccuaacgccaauccgaacgcuaaucccaacgccaauccuaacgcgaaucccaacgccaauccuaacgcuaaccccaaugccaacccuaaugcuaaccccaaugccaacccgaauaagaacaaucaggggaacggacaaggccauaauaugccuaacgaucccaaucggaacgucgacgaaaaugcgaacgccaacagcgcugugaaaaauaacaauaacgaggaaccuuccgauaagcacaucaaagaguaucugaauaagauucagaacucucuuagcacggaguggucccccuguagcguuaccugcggcaaugggauccaggugcgcauuaagccgggaucugccaacaaaccuaaggacgaacuggacuacgcuaaugauaucgagaaaaagauuuguaaaauggaaaagugcuccagcgucuuuaacgugguuaauucuuccaucggccucaucauggugcugagcuuccuguuucucaacugaggacuagucccuguucccagagcccacuuuuuuuucuuuuuuugaaauaaaauagccugucuuucagaucucaaaggcucuuuucagagccaccaaaaaaaaaaaaaaaaaaaaaaaaaaaaaaaaaaaaaaaaaaaaaaaaaaaaaaaaaaaaaaaaaaaaaaaaaaaaaaaaaaaaaaaaaaaaaaaaaaaaa

SEQ ID NO: 8414 - RNA, 1560 nt, Artificial Sequence
  mRNA Design a-3 (hSL-A100) comprising derived and/or modified sequence from Pf(3D7)__XP_001351122.1__HsSPARC_Pf-CSP(19-397) (opt5)
aggagagggcgcuuggcuugcaaggacccugagcugcggcauugaagcacacccaacccaacucgacugaagucagccucacugaaccggaucugagaaucuucucucucugggcuugccagggcucuccgaaccuagcuagcauccucuucaauuccaacuagaaagcuuaccaugagagccuggaucuucuuucugcucugccuggcuggccgggcccuugcgcuguuccaggaguaccaauguuaugggagcuccucuaacacccgcgugcucaaugaacugaacuacgacaaugcuggaacaaaccuuuauaaugagcuggaaaugaacuacuauggcaagcaggagaauugguacagccucaaaaagaacuccagaucucugggggaaaaugaugacggaaacaaugaggauaacgagaaacugcggaagcccaaacacaagaagcucaaacagccugccgacggcaauccggaucccaacgccaauccuaacgucgaccccaacgcuaauccuaacguugaucccaaugccaacccuaauguggacccgaacgcuaaucccaacgccaauccuaacgcgaaucccaacgccaauccuaacgcuaaucccaacgccaacccgaaugcuaacccuaaugccaaccccaaugcgaacccuaaugccaaccccaaugcuaaccccaaugccaacccuaaugcuaacccgaaugccaaccccaacgccaauccuaacgcuaaucccaacgcgaauccuaacguggaucccaaugccaacccgaaugcuaacccuaaugccaaccccaaugccaacccuaaugcuaaccccaacgccaauccuaacgcgaaucccaacgcuaauccgaacgccaauccuaacgccaaucccaacgcuaaucccaacgccaauccuaacgcuaauccgaacgccaaucccaacgcgaacccuaaugccaaccccaaugcuaacccuaaugccaaccccaauaagaacaaucaggggaacggacaaggccauaauaugccuaacgaccccaaucgcaacgucgaugaaaaugcuaacgccaacagcgcggugaaaaauaacaauaacgaggaaccguccgacaagcacauuaaagaguaucugaauaagauccagaacucucuuagcacggagugguccccuugcagcguuaccuguggcaaugggauucaggugagaaucaagcccggaucugccaacaaaccuaaggaugaacuggacuacgcuaaugacauugagaaaaagaucugcaaaauggaaaaguguuccagcgucuuuaacgugguuaauucuuccaucggccucauuauggugcugagcuuccuuuuucugaacugaggacuagucccuguucccagagcccacuuuuuuuucuuuuuuugaaauaaaauagccugucuuucagaucucaaaggcucuuuucagagccaccaaaaaaaaaaaaaaaaaaaaaaaaaaaaaaaaaaaaaaaaaaaaaaaaaaaaaaaaaaaaaaaaaaaaaaaaaaaaaaaaaaaaaaaaaaaaaaaaaaaaa

SEQ ID NO: 8415 - RNA, 1563 nt, Artificial Sequence
  mRNA Design a-3 (hSL-A100) comprising derived and/or modified sequence from Pf(3D7)__XP_001351122.1__IgE_Pf-CSP(19-397) (opt5)
aggagagggcgcuuggcuugcaaggacccugagcugcggcauugaagcacacccaacccaacucgacugaagucagccucacugaaccggaucugagaaucuucucucucugggcuugccagggcucuccgaaccuagcuagcauccucuucaauuccaacuagaaagcuuaccauggacuggaccuggauccuguuccucguggccgcugccacaagaguccacagccuguuucaggaguaccaaugcuauggcuccucuagcaacacgcggguucuuaaugaacugaacuacgauaaugcggggaccaaccucuauaaugagcuggaaaugaacuacuauggaaagcaggagaauugguacucccuuaaaaagaacucucgcagccugggcgaaaaugacgaugggaacaaugaggacaacgagaaacucagaaagcccaaacauaagaagcugaaacagccugcugauggaaauccggaccccaacgccaauccuaacguggaucccaacgccaauccuaacguggaccccaaugcuaacccuaaugucgauccgaacgccaaucccaacgcuaauccuaacgccaaucccaacgcgaauccuaacgccaaucccaacgcuaacccgaaugccaacccuaaugcuaaccccaaugccaacccuaaugcgaaccccaaugccaaccccaaugcuaacccuaaugccaacccgaaugcuaaccccaacgccaauccuaacgccaaucccaacgcuaauccuaacguggaccccaaugcgaacccgaaugccaacccuaaugcuaaccccaaugccaacccuaaugccaaccccaacgcuaauccuaacgccaaucccaacgcgaauccgaacgcuaauccuaacgccaaucccaacgccaaucccaacgcuaauccuaacgccaauccgaacgcuaaucccaacgccaacccuaaugcgaaccccaaugccaacccuaaugcuaaccccaauaagaacaaucagggcaacgggcaaggacacaauaugccuaacgaucccaaucggaacguugacgaaaaugccaacgcuaacuccgccgugaaaaauaacaauaacgaggaaccgucugauaagcauauuaaagaguaucugaauaagauccagaacagccucuccacagaguggagcccuuguucugugaccugcggcaauggcauucagguccgcaucaagcccggguccgcgaacaaaccuaaggacgaacuggacuacgccaaugauauugagaaaaagaucuguaaaauggaaaagugcagcucuguuuucaacguggucaauuccagcaucggacuuauuauggugcugucuuuucucuuccugaacugaggacuagucccuguucccagagcccacuuuuuuuucuuuuuuugaaauaaaauagccugucuuucagaucucaaaggcucuuuucagagccaccaaaaaaaaaaaaaaaaaaaaaaaaaaaaaaaaaaaaaaaaaaaaaaaaaaaaaaaaaaaaaaaaaaaaaaaaaaaaaaaaaaaaaaaaaaaaaaaaaaaaa

SEQ ID NO: 8416 - RNA, 1728 nt, Artificial Sequence
  mRNA Design a-3 (hSL-A100) comprising derived and/or modified sequence from Pf(3D7)__XP_001351122.1__Pf-CSP_L(G4SG4)_TM domain HA (opt5)
aggagagggcgcuuggcuugcaaggacccugagcugcggcauugaagcacacccaacccaacucgacugaagucagccucacugaaccggaucugagaaucuucucucucugggcuugccagggcucuccgaaccuagcuagcauccucuucaauuccaacuagaaagcuuaccaugaugagaaagcuggccauccucagcguguccucuuuccuguuugucgaggcucuuuuccaggaauaccaaugcuauggcagcuccucuaacacccggguucugaaugagcucaacuacgacaaugccgggacaaaccuguauaaugaacuugagaugaacuacuauggaaaacaggaaaauugguacagccugaagaaaaacucccgcucucucggcgagaaugaugacgggaacaaugaggauaacgaaaagcugagaaaacccaagcacaagaaacugaagcagccugcggacggaaauccggaucccaacgcuaauccuaacguggaccccaacgccaauccuaacguggaucccaaugccaacccuaaugucgacccgaacgcuaaucccaacgccaauccuaacgcuaaucccaacgccaauccuaacgcgaaucccaacgccaacccgaaugcuaacccuaaugccaaccccaaugcuaacccuaaugccaaccccaaugcgaaccccaaugccaacccuaaugcuaacccgaaugccaaccccaacgcuaauccuaacgccaaucccaacgccaauccuaacguggaucccaaugcuaacccgaaugcgaacccuaaugccaaccccaaugcuaacccuaaugccaaccccaacgccaauccuaacgcuaaucccaacgccaauccgaacgcgaauccuaacgcuaaucccaacgccaaucccaacgccaauccuaacgcuaauccgaacgccaaucccaacgcuaacccuaaugccaaccccaaugcgaacccuaaugccaaccccaauaaaaacaaucagggcaacgggcaaggacauaauaugccuaacgaccccaaucggaacguugaugagaaugcuaacgccaacagcgcugugaagaauaacaauaacgaggaaccguccgacaaacacauuaaggaguaucucaauaagauccagaacagccugucuacggaaugguccccuuguagcgugaccugcggcaauggcauucagguccgcaucaaacccgggucugccaacaagccuaaagaugagcuugacuacgcgaaugacauugaaaagaaaaucuguaagauggagaaaugcuccagcguuuuuaacguggucaauucuuccaucggacugauuauggugcucagcuuccuguuucuuaacggcgggggaggcuccgggggaggcggcaagcuggaaucuacaagaaucuaccagauucucgccaucuauagcaccguggcuuccagccugguccugguugugucucucggggccauuuccuucuggauguguagcaauggaucucugcaaugccggaucuguauuugaggacuagucccuguucccagagcccacuuuuuuuucuuuuuuugaaauaaaauagccugucuuucagaucucaaaggcucuuuucagagccaccaaaaaaaaaaaaaaaaaaaaaaaaaaaaaaaaaaaaaaaaaaaaaaaaaaaaaaaaaaaaaaaaaaaaaaaaaaaaaaaaaaaaaaaaaaaaaaaaaaaaa

SEQ ID NO: 8417 - RNA, 1602 nt, Artificial Sequence
  mRNA Design a-3 (hSL-A100) comprising derived and/or modified sequence from Pf(3D7)__XP_001351122.1__Pf-CSP(199-377)_L(PVTN)_HBsAg (opt5)
aggagagggcgcuuggcuugcaaggacccugagcugcggcauugaagcacacccaacccaacucgacugaagucagccucacugaaccggaucugagaaucuucucucucugggcuugccagggcucuccgaaccuagcuagcauccucuucaauuccaacuagaaagcuuaccauggaccccaacgccaauccuaacgcuaauccgaacgccaaucccaacgcgaauccuaacgcuaaucccaacgccaauccuaacgccaaucccaacgcuaauccuaacgccaacccgaaugcuaaccccaaugccaacccuaaugcgaaccccaaugccaacccuaaugcuaaccccaaugccaacccgaaugcuaacccuaaugccaaccccaacgcgaauccuaacaagaauaaccagggcaaugggcaaggacacaacaugcccaaugaucccaacagaaauguggacgagaacgccaaugcuaacagcgccgucaaaaauaacaauaacgaggaaccuuccgauaagcauaucaaagaauaccugaacaagauucaaaauucucucagcaccgagugguccccgugcucuguuacauguggcaacgggauccaggugcggauuaaacccggaagcgcuaauaagccuaaggacgaacuggauuaugccaacgacaucgagaaaaagauuugcaaaauggagaaguguuccucugugcccgucacgaauauggaaaacaucaccagcggcuuccuugggccucugcucgugcugcaggccggauuuuuccuucugacacgcauccucaccauuccccagucccuggauagcugguggacaucucugaauuuucucggcggcuccccgguuugccuggggcagaacagccagucuccuaccuccaaucacagccccacaucuuguccucccaucugcccuggauacagauggaugugucuucggcgcuucauuaucuuucuguucauucuccugcuuugccugaucuuucuccuggugcugcucgacuaucagggcaugcugcccgucuguccgcuuauuccuggguccaccacgaccaacacaggacccugcaaaaccuguacaacccccgcucaaggcaauagcauguucccuuccugcugcuguacgaagccgacagaugggaacugcaccuguauccccaucccuucuagcugggcguuugccaaguaccugugggagugggcuuccgugagauucagcuggcucucucugcuuguucccuuugugcagugguucgucggacuguccccuacaguguggcucagcgccauuuggaugaugugguauuggggccccucucuguacagcaucguguccccuuuuauuccccugcucccgaucuucuucugccugugggucuauauuugaggacuagucccuguucccagagcccacuuuuuuuucuuuuuuugaaauaaaauagccugucuuucagaucucaaaggcucuuuucagagccaccaaaaaaaaaaaaaaaaaaaaaaaaaaaaaaaaaaaaaaaaaaaaaaaaaaaaaaaaaaaaaaaaaaaaaaaaaaaaaaaaaaaaaaaaaaaaaaaaaaaaa

SEQ ID NO: 8418 - RNA, 1644 nt, Artificial Sequence
  mRNA Design a-3 (hSL-A100) comprising derived and/or modified sequence from Pf(3D7)__XP_001351122.1__Pf-CSP(199-387)_L(PVTN)_HBsAg (opt5)
aggagagggcgcuuggcuugcaaggacccugagcugcggcauugaagcacacccaacccaacucgacugaagucagccucacugaaccggaucugagaaucuucucucucugggcuugccagggcucuccgaaccuagcuagcauccucuucaauuccaacuagaaagcuuaccaugauggcccccgacccuaacgcuaauccgaacgccaaucccaacgcgaauccuaacgcuaaucccaacgccaauccuaacgccaaucccaacgcuaauccuaacgccaauccgaacgcuaaccccaaugccaacccuaaugcgaaccccaaugccaacccuaaugcuaaccccaaugccaacccgaaugcuaacccuaaugccaaccccaaugcgaacccuaacgccaaucccaacaagaauaaccagggcaaugggcaaggacacaacaugcccaaugauccuaacagaaauguggacgagaacgcuaaugccaacagcgcugucaaaaauaacaauaacgaggaaccguccgauaagcauaucaaagaauaccugaacaagauucaaaauucucucagcaccgaguggucccccugcucuguuacauguggcaacgggauccaggugcggauuaaaccuggaagcgccaauaagcccaaggacgaacuggauuaugccaacgacaucgagaaaaagauuugcaaaauggagaaguguuccucuguguucaaugucgugaacagcuccaucggccuugggccuguuacgaauauggaaaacaucaccagcggauuucugggcccccuccuggugcuucaggcuggcuucuuucugcucacacgcauucugaccaucccgcagucucuggauuccugguggacaagccucaauuuccuugggggaucuccugucugccugggccagaacucccagagccccaccucuaaucacuccccuacaagcugucccccuauuugccccggguacagauggaugugucugcggcgcuuuaucauuuuccucuuuauccugcuucugugccucauuuuccugcuggugcuccuggacuaucagggaaugcuuccgguuuguccucugauccccggcuccaccacgaccaacacagggcccugcaaaaccuguacaaccccugcgcaaggaaauucuauguuuccgagcugcugcuguacgaagcccacagauggcaacugcaccuguaucccuauucccuccagcugggccuucgcuaaguaccucugggagugggccucugugagauuuuccuggcugagccuucuggucccuuucgugcagugguuugugggccucucucccacagucuggcugagcgccaucuggaugaugugguauugggggccuucccuguacucuauuguuagccccuucaucccgcuccugccuauuuucuuuugccuuuggguguauaucugaggacuagucccuguucccagagcccacuuuuuuuucuuuuuuugaaauaaaauagccugucuuucagaucucaaaggcucuuuucagagccaccaaaaaaaaaaaaaaaaaaaaaaaaaaaaaaaaaaaaaaaaaaaaaaaaaaaaaaaaaaaaaaaaaaaaaaaaaaaaaaaaaaaaaaaaaaaaaaaaaaaaa

SEQ ID NO: 8419 - RNA, 828 nt, Artificial Sequence
  mRNA Design a-3 (hSL-A100) comprising derived and/or modified sequence from Pf(3D7)__XP_001351122.1__HsALB_Pf-CSP(19-152) (opt5)
aggagagggcgcuuggcuugcaaggacccugagcugcggcauugaagcacacccaacccaacucgacugaagucagccucacugaaccggaucugagaaucuucucucucugggcuugccagggcucuccgaaccuagcuagcauccucuucaauuccaacuagaaagcuuaccaugaagugggugaccuucaucagccugcucuuucuguucuccucugccuacagccuuuuucaggaguaucaaugcuacggcuccucuagcaacacaagaguccugaaugaacucaacuaugacaaugcugggacgaaccuguacaaugagcuugaaaugaacuauuacggaaaacaggagaauugguauucccugaagaaaaacucucggagccucggcgaaaaugaugacgggaacaaugaggauaacgagaagcugcgcaaacccaagcacaagaaacugaagcagccugccgacggaaauccggaucccaacgcgaauccuaacguugaccccaacgcuaauccuaacguggaucccaaugccaacccuaauguggacccgaacgccaaucccaacgcuaauccuaacgccaaucccaacgcuaauccuaacgccaaucccaacgcgaacccgugaggacuagucccuguucccagagcccacuuuuuuuucuuuuuuugaaauaaaauagccugucuuucagaucucaaaggcucuuuucagagccaccaaaaaaaaaaaaaaaaaaaaaaaaaaaaaaaaaaaaaaaaaaaaaaaaaaaaaaaaaaaaaaaaaaaaaaaaaaaaaaaaaaaaaaaaaaaaaaaaaaaaa

SEQ ID NO: 8420 - RNA, 948 nt, Artificial Sequence
  mRNA Design a-3 (hSL-A100) comprising derived and/or modified sequence from Pf(3D7)__XP_001351122.1__HsALB_Pf-CSP(19-192) (opt5)
aggagagggcgcuuggcuugcaaggacccugagcugcggcauugaagcacacccaacccaacucgacugaagucagccucacugaaccggaucugagaaucuucucucucugggcuugccagggcucuccgaaccuagcuagcauccucuucaauuccaacuagaaagcuuaccaugaagugggugaccuucaucagccugcucuuucuguucuccucugccuacagccuuuuucaggaguaucaaugcuacggcuccucuagcaacacaagaguccugaaugaacucaacuaugacaaugcugggacgaaccuguacaaugagcuugaaaugaacuauuacggaaaacaggagaauugguauucccugaagaaaaacucucggagccucggcgaaaaugaugacgggaacaaugaggauaacgagaagcugcgcaaacccaagcacaagaaacugaagcagccugccgacggaaauccggaucccaacgcgaauccuaacguugaccccaacgcuaauccuaacguggaucccaaugccaacccuaauguggacccgaacgccaaucccaacgcuaauccuaacgccaaucccaacgcuaauccuaacgccaaucccaacgcgaacccgaaugccaacccuaaugcuaaccccaaugccaacccuaaugcuaaccccaaugccaaccccaaugcgaacccuaaugccaacccgaaugcuaaccccaacgccaauccuaacgcuaaucccugaggacuagucccuguucccagagcccacuuuuuuuucuuuuuuugaaauaaaauagccugucuuucagaucucaaaggcucuuuucagagccaccaaaaaaaaaaaaaaaaaaaaaaaaaaaaaaaaaaaaaaaaaaaaaaaaaaaaaaaaaaaaaaaaaaaaaaaaaaaaaaaaaaaaaaaaaaaaaaaaaaaaa

SEQ ID NO: 8421 - RNA, 1188 nt, Artificial Sequence
  mRNA Design a-3 (hSL-A100) comprising derived and/or modified sequence from Pf(3D7)__XP_001351122.1__HsALB_Pf-CSP(19-272) (opt5)
aggagagggcgcuuggcuugcaaggacccugagcugcggcauugaagcacacccaacccaacucgacugaagucagccucacugaaccggaucugagaaucuucucucucugggcuugccagggcucuccgaaccuagcuagcauccucuucaauuccaacuagaaagcuuaccaugaagugggugaccuucaucagccugcucuuucuguucuccucugccuacagccuuuuucaggaguaucaaugcuacggcuccucuagcaacacaagaguccugaaugaacucaacuaugacaaugcugggacgaaccuguacaaugagcuugaaaugaacuauuacggaaaacaggagaauugguauucccugaagaaaaacucucggagccucggcgaaaaugaugacgggaacaaugaggauaacgagaagcugcgcaaacccaagcacaagaaacugaagcagccugccgacggaaauccggaucccaacgcgaauccuaacguugaccccaacgcuaauccuaacguggaucccaaugccaacccuaauguggacccgaacgccaaucccaacgcuaauccuaacgccaaucccaacgcuaauccuaacgccaaucccaacgcgaacccgaaugccaacccuaaugcuaaccccaaugccaacccuaaugcuaaccccaaugccaaccccaaugcgaacccuaaugccaacccgaaugcuaaccccaacgccaauccuaacgcuaaucccaacgccaauccuaacgucgaucccaaugccaacccgaaugcuaacccuaaugcgaaccccaaugccaacccuaaugcuaaccccaacgccaauccuaacgccaaucccaacgcuaauccgaacgccaauccuaacgcgaaucccaacgcuaaucccaacgccaauccuaacgccaauccgaacgcuaaucccaacgccaacccuaaugcuaaccccaaugccaacccuaaugcgaaccccugaggacuagucccuguucccagagcccacuuuuuuuucuuuuuuugaaauaaaauagccugucuuucagaucucaaaggcucuuuucagagccaccaaaaaaaaaaaaaaaaaaaaaaaaaaaaaaaaaaaaaaaaaaaaaaaaaaaaaaaaaaaaaaaaaaaaaaaaaaaaaaaaaaaaaaaaaaaaaaaaaaaaa

SEQ ID NO: 8422 - RNA, 1350 nt, Artificial Sequence
  mRNA Design a-3 (hSL-A100) comprising derived and/or modified sequence from Pf(3D7)__XP_001351122.1__HsALB_Pf-CSP(19-272)_L(AAY)_Pf-CSP(310-3 27)_L(AAY)_Pf-CSP(346-375) (opt5)
aggagagggcgcuuggcuugcaaggacccugagcugcggcauugaagcacacccaacccaacucgacugaagucagccucacugaaccggaucugagaaucuucucucucugggcuugccagggcucuccgaaccuagcuagcauccucuucaauuccaacuagaaagcuuaccaugaagugggugaccuucaucagccugcucuuucuguucuccucugccuacagccuuuuucaggaguaucaaugcuacggcuccucuagcaacacaagaguccugaaugaacucaacuaugacaaugcugggacgaaccuguacaaugagcuugaaaugaacuauuacggaaaacaggagaauugguauucccugaagaaaaacucucggagccucggcgaaaaugaugacgggaacaaugaggauaacgagaagcugcgcaaacccaagcacaagaaacugaagcagccugccgacggaaauccggaucccaacgcgaauccuaacguugaccccaacgcuaauccuaacguggaucccaaugccaacccuaauguggacccgaacgccaaucccaacgcuaauccuaacgccaaucccaacgcuaauccuaacgccaaucccaacgcgaacccgaaugccaacccuaaugcuaaccccaaugccaacccuaaugcuaaccccaaugccaaccccaaugcgaacccuaaugccaacccgaaugcuaaccccaacgccaauccuaacgcuaaucccaacgccaauccuaacgucgaucccaaugccaacccgaaugcuaacccuaaugcgaaccccaaugccaacccuaaugcuaaccccaacgccaauccuaacgccaaucccaacgcuaauccgaacgccaauccuaacgcgaaucccaacgcuaaucccaacgccaauccuaacgccaauccgaacgcuaaucccaacgccaacccuaaugcuaaccccaaugccaacccuaaugcgaaccccgccgcuuacgaaccuuccgacaaacauauuaaggaguaccucaauaaaauccagaacagccuggccgcuuauauuaagcccggcucugccaauaagccgaaagaugaacuugacuacgcgaacgauaucgagaagaaaauuuguaagauggagaaaugcuccugaggacuagucccuguucccagagcccacuuuuuuuucuuuuuuugaaauaaaauagccugucuuucagaucucaaaggcucuuuucagagccaccaaaaaaaaaaaaaaaaaaaaaaaaaaaaaaaaaaaaaaaaaaaaaaaaaaaaaaaaaaaaaaaaaaaaaaaaaaaaaaaaaaaaaaaaaaaaaaaaaaaaa

SEQ ID NO: 8423 - RNA, 1311 nt, Artificial Sequence
  mRNA Design a-3 (hSL-A100) comprising derived and/or modified sequence from Pf(3D7)__XP_001351122.1__HsALB_Pf-CSP(19-272)_L(AAY)_Pf-CSP(346-3 65)_L(AAY)_P2 (opt5)
aggagagggcgcuuggcuugcaaggacccugagcugcggcauugaagcacacccaacccaacucgacugaagucagccucacugaaccggaucugagaaucuucucucucugggcuugccagggcucuccgaaccuagcuagcauccucuucaauuccaacuagaaagcuuaccaugaagugggugaccuucaucagccugcucuuucuguucuccucugccuacagccuuuuucaggaguaucaaugcuacggcuccucuagcaacacaagaguccugaaugaacucaacuaugacaaugcugggacgaaccuguacaaugagcuugaaaugaacuauuacggaaaacaggagaauugguauucccugaagaaaaacucucggagccucggcgaaaaugaugacgggaacaaugaggauaacgagaagcugcgcaaacccaagcacaagaaacugaagcagccugccgacggaaauccggaucccaacgcgaauccuaacguugaccccaacgcuaauccuaacguggaucccaaugccaacccuaauguggacccgaacgccaaucccaacgcuaauccuaacgccaaucccaacgcuaauccuaacgccaaucccaacgcgaacccgaaugccaacccuaaugcuaaccccaaugccaacccuaaugcuaaccccaaugccaaccccaaugcgaacccuaaugccaacccgaaugcuaaccccaacgccaauccuaacgcuaaucccaacgccaauccuaacgucgaucccaaugccaacccgaaugcuaacccuaaugcgaaccccaaugccaacccuaaugcuaaccccaacgccaauccuaacgccaaucccaacgcuaauccgaacgccaauccuaacgcgaaucccaacgcuaaucccaacgccaauccuaacgccaauccgaacgcuaaucccaacgccaacccuaaugcuaaccccaaugccaacccuaaugcgaaccccgccgcuuacauuaaaccuggcuccgccaauaagcccaaagacgaacucgauuacgcuaacgacaucgaggccgcguaucaguacauuaaggccaauagcaaguucaucgggauuaccgaacugugaggacuagucccuguucccagagcccacuuuuuuuucuuuuuuugaaauaaaauagccugucuuucagaucucaaaggcucuuuucagagccaccaaaaaaaaaaaaaaaaaaaaaaaaaaaaaaaaaaaaaaaaaaaaaaaaaaaaaaaaaaaaaaaaaaaaaaaaaaaaaaaaaaaaaaaaaaaaaaaaaaaaa

SEQ ID NO: 8424 - RNA, 1305 nt, Artificial Sequence
  mRNA Design a-3 (hSL-A100) comprising derived and/or modified sequence from Pf(3D7)__XP_001351122.1__HsALB_Pf-CSP(19-272)_L(AAY)_Pf-CSP(346-3 65)_L(AAY)_PADRE (opt5)
aggagagggcgcuuggcuugcaaggacccugagcugcggcauugaagcacacccaacccaacucgacugaagucagccucacugaaccggaucugagaaucuucucucucugggcuugccagggcucuccgaaccuagcuagcauccucuucaauuccaacuagaaagcuuaccaugaagugggugaccuucaucagccugcucuuucuguucuccucugccuacagccuuuuucaggaguaucaaugcuacggcuccucuagcaacacaagaguccugaaugaacucaacuaugacaaugcugggacgaaccuguacaaugagcuugaaaugaacuauuacggaaaacaggagaauugguauucccugaagaaaaacucucggagccucggcgaaaaugaugacgggaacaaugaggauaacgagaagcugcgcaaacccaagcacaagaaacugaagcagccugccgacggaaauccggaucccaacgcgaauccuaacguugaccccaacgcuaauccuaacguggaucccaaugccaacccuaauguggacccgaacgccaaucccaacgcuaauccuaacgccaaucccaacgcuaauccuaacgccaaucccaacgcgaacccgaaugccaacccuaaugcuaaccccaaugccaacccuaaugcuaaccccaaugccaaccccaaugcgaacccuaaugccaacccgaaugcuaaccccaacgccaauccuaacgcuaaucccaacgccaauccuaacgucgaucccaaugccaacccgaaugcuaacccuaaugcgaaccccaaugccaacccuaaugcuaaccccaacgccaauccuaacgccaaucccaacgcuaauccgaacgccaauccuaacgcgaaucccaacgcuaaucccaacgccaauccuaacgccaauccgaacgcuaaucccaacgccaacccuaaugcuaaccccaaugccaacccuaaugcgaaccccgccgcuuacauuaaaccuggcuccgccaauaagcccaaagacgaacucgauuacgcuaacgacaucgaggccgcguaugccaaguucguggcugccuggacccugaaggcugccgccugaggacuagucccuguucccagagcccacuuuuuuuucuuuuuuugaaauaaaauagccugucuuucagaucucaaaggcucuuuucagagccaccaaaaaaaaaaaaaaaaaaaaaaaaaaaaaaaaaaaaaaaaaaaaaaaaaaaaaaaaaaaaaaaaaaaaaaaaaaaaaaaaaaaaaaaaaaaaaaaaaaaaa

SEQ ID NO: 8425 - RNA, 1362 nt, Artificial Sequence
  mRNA Design a-3 (hSL-A100) comprising derived and/or modified sequence from Pf(3D7)__XP_001351122.1__HsALB_Pf-CSP(19-272)_L(G4S)_Pf-CSP(310-3 27)_L(G4S)_Pf-CSP(346-375) (opt5)
aggagagggcgcuuggcuugcaaggacccugagcugcggcauugaagcacacccaacccaacucgacugaagucagccucacugaaccggaucugagaaucuucucucucugggcuugccagggcucuccgaaccuagcuagcauccucuucaauuccaacuagaaagcuuaccaugaagugggugaccuucaucagccugcucuuucuguucuccucugccuacagccuuuuucaggaguaucaaugcuacggcuccucuagcaacacaagaguccugaaugaacucaacuaugacaaugcugggacgaaccuguacaaugagcuugaaaugaacuauuacggaaaacaggagaauugguauucccugaagaaaaacucucggagccucggcgaaaaugaugacgggaacaaugaggauaacgagaagcugcgcaaacccaagcacaagaaacugaagcagccugccgacggaaauccggaucccaacgcgaauccuaacguugaccccaacgcuaauccuaacguggaucccaaugccaacccuaauguggacccgaacgccaaucccaacgcuaauccuaacgccaaucccaacgcuaauccuaacgccaaucccaacgcgaacccgaaugccaacccuaaugcuaaccccaaugccaacccuaaugcuaaccccaaugccaaccccaaugcgaacccuaaugccaacccgaaugcuaaccccaacgccaauccuaacgcuaaucccaacgccaauccuaacgucgaucccaaugccaacccgaaugcuaacccuaaugcgaaccccaaugccaacccuaaugcuaaccccaacgccaauccuaacgccaaucccaacgcuaauccgaacgccaauccuaacgcgaaucccaacgcuaaucccaacgccaauccuaacgccaauccgaacgcuaaucccaacgccaacccuaaugcuaaccccaaugccaacccuaaugcgaaccccggcgggggaggcuccgaaccuagcgacaaacauauuaaggaguaccucaauaaaauccagaacucucugggcgggggaggcuccauuaagcccgggagcgccaauaagccgaaagaugaacuugacuacgcuaacgauaucgagaagaaaauuuguaagauggagaaaugcucuugaggacuagucccuguucccagagcccacuuuuuuuucuuuuuuugaaauaaaauagccugucuuucagaucucaaaggcucuuuucagagccaccaaaaaaaaaaaaaaaaaaaaaaaaaaaaaaaaaaaaaaaaaaaaaaaaaaaaaaaaaaaaaaaaaaaaaaaaaaaaaaaaaaaaaaaaaaaaaaaaaaaaa

SEQ ID NO: 8426 - RNA, 1347 nt, Artificial Sequence
  mRNA Design a-3 (hSL-A100) comprising derived and/or modified sequence from Pf(3D7)__XP_001351122.1__HsALB_Pf-CSP(19-272)_L(G4S)_Pf-CSP(310-3 27)_Pf-CSP(346-375) (opt5)
aggagagggcgcuuggcuugcaaggacccugagcugcggcauugaagcacacccaacccaacucgacugaagucagccucacugaaccggaucugagaaucuucucucucugggcuugccagggcucuccgaaccuagcuagcauccucuucaauuccaacuagaaagcuuaccaugaagugggugaccuucaucagccugcucuuucuguucuccucugccuacagccuuuuucaggaguaucaaugcuacggcuccucuagcaacacaagaguccugaaugaacucaacuaugacaaugcugggacgaaccuguacaaugagcuugaaaugaacuauuacggaaaacaggagaauugguauucccugaagaaaaacucucggagccucggcgaaaaugaugacgggaacaaugaggauaacgagaagcugcgcaaacccaagcacaagaaacugaagcagccugccgacggaaauccggaucccaacgcgaauccuaacguugaccccaacgcuaauccuaacguggaucccaaugccaacccuaauguggacccgaacgccaaucccaacgcuaauccuaacgccaaucccaacgcuaauccuaacgccaaucccaacgcgaacccgaaugccaacccuaaugcuaaccccaaugccaacccuaaugcuaaccccaaugccaaccccaaugcgaacccuaaugccaacccgaaugcuaaccccaacgccaauccuaacgcuaaucccaacgccaauccuaacgucgaucccaaugccaacccgaaugcuaacccuaaugcgaaccccaaugccaacccuaaugcuaaccccaacgccaauccuaacgccaaucccaacgcuaauccgaacgccaauccuaacgcgaaucccaacgcuaaucccaacgccaauccuaacgccaauccgaacgcuaaucccaacgccaacccuaaugcuaaccccaaugccaacccuaaugcgaaccccggcgggggaggcuccgaaccuagcgacaaacauauuaaggaguaccucaauaaaauccagaacucucugauuaagcccggcuccgccaauaagccgaaagaugaacuugacuacgcuaacgauaucgagaagaaaauuuguaagauggagaaaugcagcugaggacuagucccuguucccagagcccacuuuuuuuucuuuuuuugaaauaaaauagccugucuuucagaucucaaaggcucuuuucagagccaccaaaaaaaaaaaaaaaaaaaaaaaaaaaaaaaaaaaaaaaaaaaaaaaaaaaaaaaaaaaaaaaaaaaaaaaaaaaaaaaaaaaaaaaaaaaaaaaaaaaaa

SEQ ID NO: 8427 - RNA, 1347 nt, Artificial Sequence
  mRNA Design a-3 (hSL-A100) comprising derived and/or modified sequence from Pf(3D7)__XP_001351122.1__HsALB_Pf-CSP(19-325) (opt5)
aggagagggcgcuuggcuugcaaggacccugagcugcggcauugaagcacacccaacccaacucgacugaagucagccucacugaaccggaucugagaaucuucucucucugggcuugccagggcucuccgaaccuagcuagcauccucuucaauuccaacuagaaagcuuaccaugaagugggugaccuucaucagccugcucuuucuguucuccucugccuacagccuuuuucaggaguaucaaugcuacggcuccucuagcaacacaagaguccugaaugaacucaacuaugacaaugcugggacgaaccuguacaaugagcuugaaaugaacuauuacggaaaacaggagaauugguauucccugaagaaaaacucucggagccucggcgaaaaugaugacgggaacaaugaggauaacgagaagcugcgcaaacccaagcacaagaaacugaagcagccugccgacggaaauccggaucccaacgcgaauccuaacguugaccccaacgcuaauccuaacguggaucccaaugccaacccuaauguggacccgaacgccaaucccaacgcuaauccuaacgccaaucccaacgcuaauccuaacgccaaucccaacgcgaacccgaaugccaacccuaaugcuaaccccaaugccaacccuaaugcuaaccccaaugccaaccccaaugcgaacccuaaugccaacccgaaugcuaaccccaacgccaauccuaacgcuaaucccaacgccaauccuaacgucgaucccaaugccaacccgaaugcuaacccuaaugcgaaccccaaugccaacccuaaugcuaaccccaacgccaauccuaacgccaaucccaacgcuaauccgaacgccaauccuaacgcgaaucccaacgcuaaucccaacgccaauccuaacgccaauccgaacgcuaaucccaacgccaacccuaaugcuaaccccaaugccaacccuaaugcgaaccccaauaaaaacaaucagggcaacgggcaaggacauaauaugccuaacgaccccaauagaaacguggaugaaaaugccaacgcuaacuccgccguuaagaauaacaauaacgaggaaccgagcgacaaacacauuaaggaguaccucaauaagauccagaacugaggacuagucccuguucccagagcccacuuuuuuuucuuuuuuugaaauaaaauagccugucuuucagaucucaaaggcucuuuucagagccaccaaaaaaaaaaaaaaaaaaaaaaaaaaaaaaaaaaaaaaaaaaaaaaaaaaaaaaaaaaaaaaaaaaaaaaaaaaaaaaaaaaaaaaaaaaaaaaaaaaaaa

SEQ ID NO: 8428 - RNA, 1524 nt, Artificial Sequence
  mRNA Design a-3 (hSL-A100) comprising derived and/or modified sequence from Pf(3D7)__XP_001351122.1__HsALB_Pf-CSP(19-384) (opt5)
aggagagggcgcuuggcuugcaaggacccugagcugcggcauugaagcacacccaacccaacucgacugaagucagccucacugaaccggaucugagaaucuucucucucugggcuugccagggcucuccgaaccuagcuagcauccucuucaauuccaacuagaaagcuuaccaugaagugggugaccuucaucagccugcucuuucuguucuccucugccuacagccuuuuucaggaguaucaaugcuacggcuccucuagcaacacaagagugcugaaugaacucaacuaugacaaugcugggacgaaccuguacaaugagcuugaaaugaacuauuacggaaaacaggagaauugguauucccugaagaaaaacucucggagccucggcgaaaaugaugacgggaacaaugaggauaacgagaagcugcgcaaacccaagcacaagaaacugaagcagccugccgacggaaauccggaucccaacgcgaauccuaacguugaccccaacgcuaauccuaacguggaucccaaugccaacccuaauguggacccgaacgccaaucccaacgcuaauccuaacgccaaucccaacgcuaauccuaacgccaaucccaacgcgaacccgaaugccaacccuaaugcuaaccccaaugccaacccuaaugcuaaccccaaugccaaccccaaugcgaacccuaaugccaacccgaaugcuaaccccaacgccaauccuaacgcuaaucccaacgccaauccuaacgucgaucccaaugccaacccgaaugcuaacccuaaugcgaaccccaaugccaacccuaaugcuaaccccaacgccaauccuaacgccaaucccaacgcuaauccgaacgccaauccuaacgcgaaucccaacgcuaaucccaacgccaauccuaacgccaauccgaacgcuaaucccaacgccaacccuaaugcuaaccccaaugccaacccuaaugcgaaccccaauaaaaacaaucagggcaacgggcaaggacauaauaugccuaacgaccccaauagaaacguggaugaaaaugccaacgcuaacuccgccguuaagaauaacaauaacgaggaaccgagcgacaaacacauuaaggaguaccucaauaagauccagaacucucuguccaccgaguggagcccuuguucugugacaugcggcaauggcauucagguccggaucaaacccggguccgcuaacaagccuaaagaugaacuugacuacgccaaugacauugagaagaaaaucuguaagauggaaaaaugcagcucuguguucaacguugucaauuccagcugaggacuagucccuguucccagagcccacuuuuuuuucuuuuuuugaaauaaaauagccugucuuucagaucucaaaggcucuuuucagagccaccaaaaaaaaaaaaaaaaaaaaaaaaaaaaaaaaaaaaaaaaaaaaaaaaaaaaaaaaaaaaaaaaaaaaaaaaaaaaaaaaaaaaaaaaaaaaaaaaaaaaa

SEQ ID NO: 8429 - RNA, 1662 nt, Artificial Sequence
  mRNA Design a-3 (hSL-A100) comprising derived and/or modified sequence from Pf(3D7)__XP_001351122.1__HsALB_Pf-CSP(19-384)_TM domain HA (opt5)
aggagagggcgcuuggcuugcaaggacccugagcugcggcauugaagcacacccaacccaacucgacugaagucagccucacugaaccggaucugagaaucuucucucucugggcuugccagggcucuccgaaccuagcuagcauccucuucaauuccaacuagaaagcuuaccaugaagugggugaccuucaucagccugcucuuucuguucuccucugccuacagccuuuuucaggaguaucaaugcuacggcuccucuagcaacacaagaguccugaaugaacucaacuaugacaaugcugggacgaaccuguacaaugagcuugaaaugaacuauuacggaaaacaggagaauugguauucccugaagaaaaacucucggagccucggcgaaaaugaugacgggaacaaugaggauaacgagaagcugcgcaaacccaagcacaagaaacugaagcagccugccgacggaaauccggaucccaacgcgaauccuaacguugaccccaacgcuaauccuaacguggaucccaaugccaacccuaauguggacccgaacgccaaucccaacgcuaauccuaacgccaaucccaacgcuaauccuaacgccaaucccaacgcgaacccgaaugccaacccuaaugcuaaccccaaugccaacccuaaugcuaaccccaaugccaaccccaaugcgaacccuaaugccaacccgaaugcuaaccccaacgccaauccuaacgcuaaucccaacgccaauccuaacgucgaucccaaugccaacccgaaugcuaacccuaaugcgaaccccaaugccaacccuaaugcuaaccccaacgccaauccuaacgccaaucccaacgcuaauccgaacgccaauccuaacgcgaaucccaacgcuaaucccaacgccaauccuaacgccaauccgaacgcuaaucccaacgccaacccuaaugcuaaccccaaugccaacccuaaugcgaaccccaauaaaaacaaucagggcaacgggcaaggacauaauaugccuaacgaccccaauagaaacguggaugaaaaugccaacgcuaacuccgccguuaagaauaacaauaacgaggaaccgagcgacaaacacauuaaggaguaccucaauaagauccagaacucucuguccaccgaguggagcccuuguucugugacaugcggcaauggcauucagguccggaucaaacccggguccgcuaacaagccuaaagaugaacuugacuacgccaaugacauugagaagaaaaucuguaagauggaaaaaugcagcucuguguucaacguugucaauuccagcaagcuggaguccacccgcaucuaucagauucucgcgaucuacucuacaguggccagcucccuggugcuuguggucagccugggagcuauuucuuuuuggauguguuccaacggcagccuccaaugcagaaucuguauuugaggacuagucccuguucccagagcccacuuuuuuuucuuuuuuugaaauaaaauagccugucuuucagaucucaaaggcucuuuucagagccaccaaaaaaaaaaaaaaaaaaaaaaaaaaaaaaaaaaaaaaaaaaaaaaaaaaaaaaaaaaaaaaaaaaaaaaaaaaaaaaaaaaaaaaaaaaaaaaaaaaaaa

SEQ ID NO: 8430 - RNA, 1374 nt, Artificial Sequence
  mRNA Design a-3 (hSL-A100) comprising derived and/or modified sequence from Pf(3D7)__XP_001351122.1__HsALB_Pf-CSP(82-397) (opt5)
aggagagggcgcuuggcuugcaaggacccugagcugcggcauugaagcacacccaacccaacucgacugaagucagccucacugaaccggaucugagaaucuucucucucugggcuugccagggcucuccgaaccuagcuagcauccucuucaauuccaacuagaaagcuuaccaugaagugggugaccuucaucagccugcucuuucuguucuccucugccuacagcgacaacgagaaacuuagaaagcccaaacacaagaaacugaagcagccugcugauggcaauccggaccccaacgccaauccuaacgucgaucccaaugcgaacccuaauguugaccccaacgcuaauccuaacguggauccgaaugccaaccccaaugccaacccuaaugcuaaccccaacgccaauccuaacgcuaaucccaacgccaauccgaacgcgaauccuaacgccaaucccaacgcuaauccuaacgccaaucccaacgcuaaucccaacgccaacccuaaugcgaacccgaaugccaaccccaaugcuaacccuaaugccaaccccaaugcuaacccuaauguggaccccaacgccaauccgaacgccaauccuaacgcuaaccccaaugcgaacccuaaugccaaccccaaugcuaacccuaaugccaaccccaaugccaacccgaaugcuaacccuaaugccaaccccaaugcgaaccccaacgcuaauccuaacgccaauccgaacgccaaucccaacgcuaauccuaacgccaaucccaacgcuaauccuaacgccaaucccaacaagaauaaccaagggaauggacagggccauaacaugccuaacgaucccaaucggaacgucgacgaaaaugcgaacgccaauuccgcugugaaaaacaauaacaaugaggaaccgucugauaagcacauuaaagaguaucucaacaagauccagaauagccuguccacagaauggucuccuugcagcguuacgugugggaacggcauucaggugcgcaucaaacccggauccgccaauaagccuaaggacgagcuugauuacgcuaacgacauugagaaaaagaucugcaaaauggaaaaguguagcucugucuuuaaugugguuaacuccagcaucgggcugauuauggugcucucuuuccuguuucugaacugaggacuagucccuguucccagagcccacuuuuuuuucuuuuuuugaaauaaaauagccugucuuucagaucucaaaggcucuuuucagagccaccaaaaaaaaaaaaaaaaaaaaaaaaaaaaaaaaaaaaaaaaaaaaaaaaaaaaaaaaaaaaaaaaaaaaaaaaaaaaaaaaaaaaaaaaaaaaaaaaaaaaa

SEQ ID NO: 8431 - RNA, 726 nt, Artificial Sequence
  mRNA Design a-3 (hSL-A100) comprising derived and/or modified sequence from Pf(3D7)__XP_001351122.1__HsALB_Pf-CSP(93-192) (opt5)
aggagagggcgcuuggcuugcaaggacccugagcugcggcauugaagcacacccaacccaacucgacugaagucagccucacugaaccggaucugagaaucuucucucucugggcuugccagggcucuccgaaccuagcuagcauccucuucaauuccaacuagaaagcuuaccaugaagugggugaccuucaucagccugcucuuucuguucuccucugccuacagcaaacuuaagcagcccgcugacggcaacccugauccgaaugccaaccccaaugucgacccuaacgcgaaucccaacguugauccuaaugcuaaccccaauguggacccuaacgccaauccgaacgccaaucccaacgcuaauccuaacgccaaccccaaugcuaacccuaaugccaaccccaaugcgaacccgaaugccaacccuaaugcuaaccccaaugccaacccuaaugcuaaccccaaugccaaccccaacgcgaauccuaacgccaauccgaacgcuaaucccaacgccaauccuugaggacuagucccuguucccagagcccacuuuuuuuucuuuuuuugaaauaaaauagccugucuuucagaucucaaaggcucuuuucagagccaccaaaaaaaaaaaaaaaaaaaaaaaaaaaaaaaaaaaaaaaaaaaaaaaaaaaaaaaaaaaaaaaaaaaaaaaaaaaaaaaaaaaaaaaaaaaaaaaaaaaaa

SEQ ID NO: 8432 - RNA, 966 nt, Artificial Sequence
  mRNA Design a-3 (hSL-A100) comprising derived and/or modified sequence from Pf(3D7)__XP_001351122.1__HsALB_Pf-CSP(93-272) (opt5)
aggagagggcgcuuggcuugcaaggacccugagcugcggcauugaagcacacccaacccaacucgacugaagucagccucacugaaccggaucugagaaucuucucucucugggcuugccagggcucuccgaaccuagcuagcauccucuucaauuccaacuagaaagcuuaccaugaagugggugaccuucaucagccugcucuuucuguucuccucugccuacagcaaacuuaagcagcccgcugacggcaacccugauccgaaugccaaccccaaugucgacccuaacgcgaaucccaacguugauccuaaugcuaaccccaauguggacccuaacgccaauccgaacgccaaucccaacgcuaauccuaacgccaaccccaaugcuaacccuaaugccaaccccaaugcgaacccgaaugccaacccuaaugcuaaccccaaugccaacccuaaugcuaaccccaaugccaaccccaacgcgaauccuaacgccaauccgaacgcuaaucccaacgccaauccuaacgcuaaucccaacguggauccuaaugccaaccccaaugccaacccgaaugcuaacccuaacgcgaaucccaacgccaauccuaacgcuaaucccaacgccaauccuaacgccaaucccaacgcuaauccgaacgccaauccuaacgcgaaucccaacgcuaaccccaaugccaacccuaaugccaacccgaaugcuaaccccaaugccaacccuaaugcuaaccccaaugccaacccuugaggacuagucccuguucccagagcccacuuuuuuuucuuuuuuugaaauaaaauagccugucuuucagaucucaaaggcucuuuucagagccaccaaaaaaaaaaaaaaaaaaaaaaaaaaaaaaaaaaaaaaaaaaaaaaaaaaaaaaaaaaaaaaaaaaaaaaaaaaaaaaaaaaaaaaaaaaaaaaaaaaaaa

SEQ ID NO: 8433 - RNA, 1341 nt, Artificial Sequence
  mRNA Design a-3 (hSL-A100) comprising derived and/or modified sequence from Pf(3D7)__XP_001351122.1__HsALB_Pf-CSP(93-397) (opt5)
aggagagggcgcuuggcuugcaaggacccugagcugcggcauugaagcacacccaacccaacucgacugaagucagccucacugaaccggaucugagaaucuucucucucugggcuugccagggcucuccgaaccuagcuagcauccucuucaauuccaacuagaaagcuuaccaugaagugggugaccuucaucagccugcucuuucuguucuccucugccuacagcaaacuuaagcagcccgcugacggcaacccugauccgaaugccaaccccaaugucgacccuaacgcgaaucccaacguugauccuaaugcuaaccccaauguggacccuaacgccaauccgaacgccaaucccaacgcuaauccuaacgccaaccccaaugcuaacccuaaugccaaccccaaugcgaacccgaaugccaacccuaaugcuaaccccaaugccaacccuaaugcuaaccccaaugccaaccccaacgcgaauccuaacgccaauccgaacgcuaaucccaacgccaauccuaacgcuaaucccaacguggauccuaaugccaaccccaaugccaacccgaaugcuaacccuaacgcgaaucccaacgccaauccuaacgcuaaucccaacgccaauccuaacgccaaucccaacgcuaauccgaacgccaauccuaacgcgaaucccaacgcuaaccccaaugccaacccuaaugccaacccgaaugcuaaccccaaugccaacccuaaugcuaaccccaaugccaacccuaauaaaaacaaucaagggaacggacagggccacaauaugcccaacgacccuaacagaaaugucgaugagaacgcgaaugccaacuccgcugugaagaauaacaauaacgaggaacccucugacaaacauauuaaggaauaucugaauaagauccagaacagccucuccacagaguggucuccgugcagcguuacgugugggaauggcauucaggugcggaucaaaccuggauccgccaacaagcccaaagaugaacuggacuacgcuaaugauauugagaagaaaaucugcaagauggagaaguguagcucugucuuuaacgugguuaauuccagcaucgggcuuauuauggugcugucuuuccucuuucugaacugaggacuagucccuguucccagagcccacuuuuuuuucuuuuuuugaaauaaaauagccugucuuucagaucucaaaggcucuuuucagagccaccaaaaaaaaaaaaaaaaaaaaaaaaaaaaaaaaaaaaaaaaaaaaaaaaaaaaaaaaaaaaaaaaaaaaaaaaaaaaaaaaaaaaaaaaaaaaaaaaaaaaa

SEQ ID NO: 8434 - RNA, 711 nt, Artificial Sequence
  mRNA Design a-3 (hSL-A100) comprising derived and/or modified sequence from Pf(3D7)__XP_001351122.1__HsALB_Pf-CSP(98-192) (opt5)
aggagagggcgcuuggcuugcaaggacccugagcugcggcauugaagcacacccaacccaacucgacugaagucagccucacugaaccggaucugagaaucuucucucucugggcuugccagggcucuccgaaccuagcuagcauccucuucaauuccaacuagaaagcuuaccaugaagugggugaccuucaucagccugcucuuucuguucuccucugccuacagcgcugacggcaaccccgauccuaaugccaacccgaaugucgaccccaacgcgaauccuaacguugaucccaaugcuaacccuaauguggaccccaacgccaauccuaacgccaauccgaacgcuaaucccaacgccaacccuaaugcuaaccccaaugccaacccuaaugcgaaccccaaugccaacccgaaugcuaacccuaaugccaaccccaaugcuaacccuaaugccaaccccaacgcgaaucccaacgccaauccuaacgcuaauccgaacgccaaucccugaggacuagucccuguucccagagcccacuuuuuuuucuuuuuuugaaauaaaauagccugucuuucagaucucaaaggcucuuuucagagccaccaaaaaaaaaaaaaaaaaaaaaaaaaaaaaaaaaaaaaaaaaaaaaaaaaaaaaaaaaaaaaaaaaaaaaaaaaaaaaaaaaaaaaaaaaaaaaaaaaaaaa

SEQ ID NO: 8435 - RNA, 951 nt, Artificial Sequence
  mRNA Design a-3 (hSL-A100) comprising derived and/or modified sequence from Pf(3D7)__XP_001351122.1__HsALB_Pf-CSP(98-272) (opt5)
aggagagggcgcuuggcuugcaaggacccugagcugcggcauugaagcacacccaacccaacucgacugaagucagccucacugaaccggaucugagaaucuucucucucugggcuugccagggcucuccgaaccuagcuagcauccucuucaauuccaacuagaaagcuuaccaugaagugggugaccuucaucagccugcucuuucuguucuccucugccuacagcgcugacggcaaccccgauccuaaugccaacccgaaugucgaccccaacgcgaauccuaacguugaucccaaugcuaacccuaauguggaccccaacgccaauccuaacgccaauccgaacgcuaaucccaacgccaacccuaaugcuaaccccaaugccaacccuaaugcgaaccccaaugccaacccgaaugcuaacccuaaugccaaccccaaugcuaacccuaaugccaaccccaacgcgaaucccaacgccaauccuaacgcuaauccgaacgccaaucccaacgcuaauccuaacguggaucccaaugccaacccuaaugccaaccccaaugcuaacccgaacgcgaauccuaacgccaaucccaacgcuaauccuaacgccaaucccaacgccaauccuaacgcuaaucccaacgccaauccgaacgcgaauccuaacgcuaaccccaaugccaaccccaaugccaacccuaaugcuaacccgaaugccaaccccaaugcuaacccuaaugccaaccccugaggacuagucccuguucccagagcccacuuuuuuuucuuuuuuugaaauaaaauagccugucuuucagaucucaaaggcucuuuucagagccaccaaaaaaaaaaaaaaaaaaaaaaaaaaaaaaaaaaaaaaaaaaaaaaaaaaaaaaaaaaaaaaaaaaaaaaaaaaaaaaaaaaaaaaaaaaaaaaaaaaaaa

SEQ ID NO: 8436 - RNA, 1257 nt, Artificial Sequence
  mRNA Design a-3 (hSL-A100) comprising derived and/or modified sequence from Pf(3D7)__XP_001351122.1__HsALB_Pf-CSP(98-374) (opt5)
aggagagggcgcuuggcuugcaaggacccugagcugcggcauugaagcacacccaacccaacucgacugaagucagccucacugaaccggaucugagaaucuucucucucugggcuugccagggcucuccgaaccuagcuagcauccucuucaauuccaacuagaaagcuuaccaugaagugggugaccuucaucagccugcucuuucuguucuccucugccuacagcgcugacggcaaccccgauccuaaugccaacccgaaugucgaccccaacgcgaauccuaacguugaucccaaugcuaacccuaauguggaccccaacgccaauccuaacgccaauccgaacgcuaaucccaacgccaacccuaaugcuaaccccaaugccaacccuaaugcgaaccccaaugccaacccgaaugcuaacccuaaugccaaccccaaugcuaacccuaaugccaaccccaacgcgaaucccaacgccaauccuaacgcuaauccgaacgccaaucccaacgcuaauccuaacguggaucccaaugccaacccuaaugccaaccccaaugcuaacccgaacgcgaauccuaacgccaaucccaacgcuaauccuaacgccaaucccaacgccaauccuaacgcuaaucccaacgccaauccgaacgcgaauccuaacgcuaaccccaaugccaaccccaaugccaacccuaaugcuaacccgaaugccaaccccaaugcuaacccuaaugccaaccccaauaaaaacaaucaggggaacggacaaggccacaauaugccuaacgaccccaacagaaaugucgaugagaacgcgaaugccaacuccgcugugaagaauaacaauaacgaggaaccuucugacaaacauauuaaggaauaucuuaauaaaauccagaacagccuguccacagaguggucucccugcagcguuacgugugggaauggcauucaggugcggaucaagccgggauccgccaacaagccuaaagaugaacucgacuacgcuaaugauauugagaagaaaaucugcaagauggagaaauguugaggacuagucccuguucccagagcccacuuuuuuuucuuuuuuugaaauaaaauagccugucuuucagaucucaaaggcucuuuucagagccaccaaaaaaaaaaaaaaaaaaaaaaaaaaaaaaaaaaaaaaaaaaaaaaaaaaaaaaaaaaaaaaaaaaaaaaaaaaaaaaaaaaaaaaaaaaaaaaaaaaaaa

SEQ ID NO: 8437 - RNA, 1326 nt, Artificial Sequence
  mRNA Design a-3 (hSL-A100) comprising derived and/or modified sequence from Pf(3D7)__XP_001351122.1__HsALB_Pf-CSP(98-397) (opt5)
aggagagggcgcuuggcuugcaaggacccugagcugcggcauugaagcacacccaacccaacucgacugaagucagccucacugaaccggaucugagaaucuucucucucugggcuugccagggcucuccgaaccuagcuagcauccucuucaauuccaacuagaaagcuuaccaugaagugggugaccuucaucagccugcucuuucuguucuccucugccuacagcgcugacggcaaccccgauccuaaugccaacccgaaugucgaccccaacgcgaauccuaacguugaucccaaugcuaacccuaauguggaccccaacgccaauccuaacgccaauccgaacgcuaaucccaacgccaacccuaaugcuaaccccaaugccaacccuaaugcgaaccccaaugccaacccgaaugcuaacccuaaugccaaccccaaugcuaacccuaaugccaaccccaacgcgaaucccaacgccaauccuaacgcuaauccgaacgccaaucccaacgcuaauccuaacguggaucccaaugccaacccuaaugccaaccccaaugcuaacccgaacgcgaauccuaacgccaaucccaacgcuaauccuaacgccaaucccaacgccaauccuaacgcuaaucccaacgccaauccgaacgcgaauccuaacgcuaaccccaaugccaaccccaaugccaacccuaaugcuaacccgaaugccaaccccaaugcuaacccuaaugccaaccccaauaaaaacaaucaggggaacggacaaggccacaauaugccuaacgaccccaacagaaaugucgaugagaacgcgaaugccaacuccgcugugaagaauaacaauaacgaggaaccuucugacaaacauauuaaggaauaucuuaauaaaauccagaacagccuguccacagaguggucucccugcagcguuacgugugggaauggcauucaggugcggaucaagccgggauccgccaacaagccuaaagaugaacucgacuacgcuaaugauauugagaagaaaaucugcaagauggagaaauguagcucugucuuuaacgugguuaauuccagcaucgggcugauuauggugcuuucuuuccuguuucucaacugaggacuagucccuguucccagagcccacuuuuuuuucuuuuuuugaaauaaaauagccugucuuucagaucucaaaggcucuuuucagagccaccaaaaaaaaaaaaaaaaaaaaaaaaaaaaaaaaaaaaaaaaaaaaaaaaaaaaaaaaaaaaaaaaaaaaaaaaaaaaaaaaaaaaaaaaaaaaaaaaaaaaa

SEQ ID NO: 8438 - RNA, 1653 nt, Artificial Sequence
  mRNA Design a-3 (hSL-A100) comprising derived and/or modified sequence from Pf(3D7)__XP_001351122.1__HsALB_Pf-CSP(199-377)_L(PVTN)_HBsAg (opt5)
aggagagggcgcuuggcuugcaaggacccugagcugcggcauugaagcacacccaacccaacucgacugaagucagccucacugaaccggaucugagaaucuucucucucugggcuugccagggcucuccgaaccuagcuagcauccucuucaauuccaacuagaaagcuuaccaugaagugggugaccuucaucagccugcucuuucuguucuccucugccuacagcgaccccaacgcuaauccuaacgccaauccgaacgcgaaucccaacgcuaauccuaacgccaaucccaacgccaauccuaacgcuaaucccaacgccaauccuaacgcuaacccgaaugccaaccccaaugcgaacccuaaugccaaccccaaugcuaacccuaaugccaaccccaaugcuaacccgaaugccaacccuaaugcgaaccccaacgccaauccuaacaaaaauaaccagggcaaugggcaaggacacaacaugcccaaugaucccaacagaaaugucgacgagaacgcuaaugccaacuccgcuguuaagaauaacaauaacgaggaaccuucugauaaacauauuaaggaauaucuuaacaaaauccagaauagccuguccacagaguggucuccgugcagcgugacguguggcaacgggauucaggugcggaucaagcccggauccgccaauaagccuaaagacgaacucgauuacgccaacgacauugagaagaaaaucugcaagauggagaaauguagcucuguccccgugaccaauauggaaaacaucacauccggcuuucuggggccucuucugguucuccaggcuggauucuuucugcugacccgcauucucacaaucccccaaagccuggauucuugguggaccucccuuaauuuccugggcggcagcccggugugccucgggcagaacucucaguccccuacaagcaaucacucccccaccucuuguccucccauuugcccuggauauagauggaugugucugcggcgcuuuaucauuuuccuuuuuauccugcuccugugccugauuuuccuccugguccuucuggacuaccagggcaugcuccccguguguccgcugaucccugggagcacgaccacaaacaccggacccugcaagacauguaccacgcccgcgcaaggcaauuccauguuuccuagcugcugcuguacaaagccgaccgaugggaacugcacauguauccccauuccuucuuccugggccuucgcuaaauaucuuugggagugggccagcguuagauuuucuuggcugagccuccuggugcccuucguccagugguucgugggacuguccccuaccguguggcucucugccaucuggaugaugugguacuggggccccagccuguauuccauugucagcccuuuuaucccccuucugccgauuuucuuuugccucuggguuuacaucugaggacuagucccuguucccagagcccacuuuuuuuucuuuuuuugaaauaaaauagccugucuuucagaucucaaaggcucuuuucagagccaccaaaaaaaaaaaaaaaaaaaaaaaaaaaaaaaaaaaaaaaaaaaaaaaaaaaaaaaaaaaaaaaaaaaaaaaaaaaaaaaaaaaaaaaaaaaaaaaaaaaaa

SEQ ID NO: 8439 - RNA, 1563 nt, Artificial Sequence
  mRNA Design a-3 (hSL-A100) comprising derived and/or modified sequence from Pf(3D7)__XP_001351122.1__Pf-CSP (opt6)
aggagagggcgcuuggcuugcaaggacccugagcugcggcauugaagcacacccaacccaacucgacugaagucagccucacugaaccggaucugagaaucuucucucucugggcuugccagggcucuccgaaccuagcuagcauccucuucaauuccaacuagaaagcuuaccaugaugagaaaacuugcaauacuaagcguaucuucauuccuauucguagaagcacuauuccaagaauaucaaugcuauggaucaagcuccaacacaagaguacuuaacgaacuaaauuacgacaaugcaggaacaaaccuauacaaugaacuugaaaugaauuacuacggcaaacaagaaaacugguacucccuaaaaaaaaacucaaggucauuaggagaaaacgacgacggaaacaacgaagacaacgaaaaacuacgaaaacccaaacacaaaaaauuaaaacaaccagcagacggaaaccccgacccaaacgcaaacccaaacgucgacccaaacgcaaacccgaacguagacccaaacgcgaacccaaacguagacccaaacgcaaacccaaacgcaaacccaaacgcaaacccaaacgcaaacccaaaugcaaacccaaacgcaaacccaaacgccaauccaaacgccaacccaaacgcaaacccaaacgcaaacccaaacgcaaacccaaacgcaaaccccaacgcaaacccaaacgcuaacccaaacgcaaacccuaaugcaaacccuaacgcaaacccaaacgucgacccgaacgcaaacccaaaugcaaacccaaacgcaaacccaaacgcaaaccccaacgccaacccaaaugcaaacccaaaugcaaauccaaacgcaaacccaaacgcaaacccuaacgcaaacccaaacgcaaaccccaacgcaaacccaaacgcaaacccaaacgccaacccaaacgcaaaccccaaugcaaacccaaacgcaaacccaaacgcaaacccaaacaaaaacaaucaaggcaacggacaaggacacaacaugcccaacgacccaaaccgaaacgucgacgaaaacgccaacgcaaacagcgcaguaaaaaacaacaacaacgaagaacccucagacaaacacauaaaagaauacuuaaacaaaauacaaaacucacuaucuacagaauggucacccuguagcguaaccugcggcaacggaauacaaguaagaauaaaaccaggcucagcaaacaaaccaaaagaugaacuagacuacgccaaugauauagaaaaaaaaauauguaaaauggaaaaauguagcucagucuucaacguagucaacucaucaauaggacuaauaaugguacucuccuuccucuuccuaaauuaaggacuagucccuguucccagagcccacuuuuuuuucuuuuuuugaaauaaaauagccugucuuucagaucucaaaggcucuuuucagagccaccaaaaaaaaaaaaaaaaaaaaaaaaaaaaaaaaaaaaaaaaaaaaaaaaaaaaaaaaaaaaaaaaaaaaaaaaaaaaaaaaaaaaaaaaaaaaaaaaaaaaa

SEQ ID NO: 8440 - RNA, 1494 nt, Artificial Sequence
  mRNA Design a-3 (hSL-A100) comprising derived and/or modified sequence from Pf(3D7)__XP_001351122.1__Pf-CSP(1-374) (opt6)
aggagagggcgcuuggcuugcaaggacccugagcugcggcauugaagcacacccaacccaacucgacugaagucagccucacugaaccggaucugagaaucuucucucucugggcuugccagggcucuccgaaccuagcuagcauccucuucaauuccaacuagaaagcuuaccaugaugagaaaacuagcaauauuaagcguaagcucauuccuauucguugaagcauuauuccaagaauaccaaugcuacggcucaagcucaaacacaagaguauuaaacgaauuaaacuacgacaaugcaggaaccaaccucuacaacgaacuagaaaugaauuauuacggcaaacaagaaaacugguacucacucaaaaaaaacucacgaucccuaggagaaaacgaugacggaaacaaugaagauaacgaaaaauuaagaaaaccaaaacacaaaaaauuaaaacaaccugcagacggaaacccagacccaaacgcaaauccaaauguagacccaaacgcaaaccccaacguagacccaaaugcaaacccaaacguagacccaaacgcaaacccaaaugcaaacccaaacgcaaacccaaacgcaaacccaaacgcaaaccccaacgcaaacccaaacgcaaacccaaacgccaaccccaacgcaaacccaaacgcaaacccgaaugcaaacccaaacgcaaacccaaacgcaaacccaaacgcaaacccaaacgcaaacccaaacgcaaacccaaaugcaaacccaaacguggauccaaacgcaaauccaaacgcaaacccaaacgcaaacccaaacgcaaaccccaacgcaaauccaaacgcaaaccccaaugcaaauccaaacgcaaacccaaacgccaacccaaacgcaaacccgaacgccaauccaaacgcaaacccaaacgcaaacccaaacgcaaacccaaacgccaacccaaacgcaaacccaaacgcaaacccaaacgcaaaccccaacaaaaacaaccaaggaaacggacaaggacacaacaugccaaacgauccaaacagaaacgucgacgaaaacgccaacgcuaacagcgcaguaaaaaacaauaacaacgaagaaccaucagacaaacauauaaaagaauacuuaaacaaaauccaaaacucacuaucaacagaauggucccccuguuccguaacaugcggaaacggaauacaaguacgaaucaaaccaggaucagccaacaaaccgaaagacgaacuagacuaugccaacgauauagaaaaaaaaauaugcaaaauggaaaaaugcugaggacuagucccuguucccagagcccacuuuuuuuucuuuuuuugaaauaaaauagccugucuuucagaucucaaaggcucuuuucagagccaccaaaaaaaaaaaaaaaaaaaaaaaaaaaaaaaaaaaaaaaaaaaaaaaaaaaaaaaaaaaaaaaaaaaaaaaaaaaaaaaaaaaaaaaaaaaaaaaaaaaaa

SEQ ID NO: 8441 - RNA, 1347 nt, Artificial Sequence
  mRNA Design a-3 (hSL-A100) comprising derived and/or modified sequence from Pf(3D7)__XP_001351122.1__Pf-CSP(1-325) (opt6)
aggagagggcgcuuggcuugcaaggacccugagcugcggcauugaagcacacccaacccaacucgacugaagucagccucacugaaccggaucugagaaucuucucucucugggcuugccagggcucuccgaaccuagcuagcauccucuucaauuccaacuagaaagcuuaccaugaugcgaaaauuagcaauacuaagcguaagcucauucuuauucguagaagcacucuuccaagaauaccaaugcuacggaucaagcucaaacacaagaguccuaaacgaauuaaacuaugacaacgcaggaacaaaccuauacaacgaacuagaaaugaacuacuacggaaaacaagaaaacugguacucacucaaaaaaaacagcagaagucuaggagaaaacgacgacggaaacaacgaagacaacgaaaaacuacgaaaaccaaaacacaaaaaacuaaaacaaccagcagacgggaacccagacccaaacgcaaacccaaacguagauccaaacgcaaacccaaauguagacccuaacgcaaacccaaauguagacccaaacgcaaacccuaacgcaaacccaaaugcaaacccaaacgcaaauccaaacgcaaacccaaacgcaaacccaaacgcgaacccaaacgcaaacccaaacgcaaacccaaaugcaaaccccaacgcaaauccaaaugcaaacccaaaugcaaauccaaacgcaaacccaaacgcaaacccaaaugcaaauccaaacgcaaauccaaacguggauccaaacgcaaacccaaacgcaaacccaaacgcaaacccaaacgcaaacccaaacgcaaacccaaacgcaaauccaaacgccaauccaaacgcaaauccaaaugcaaacccaaacgcaaacccaaacgcaaacccaaacgcaaacccaaacgcaaacccaaacgcaaacccaaacgcaaacccaaacgcaaacccaaacgcaaacccaaacgcaaacccaaacaaaaacaaccaaggaaacggacaaggacacaacaugccaaacgacccaaacagaaacguagacgaaaacgccaacgcaaauagcgcagucaaaaacaacaauaacgaagaaccaucggacaaacacauaaaagaauacuuaaacaaaauacaaaacugaggacuagucccuguucccagagcccacuuuuuuuucuuuuuuugaaauaaaauagccugucuuucagaucucaaaggcucuuuucagagccaccaaaaaaaaaaaaaaaaaaaaaaaaaaaaaaaaaaaaaaaaaaaaaaaaaaaaaaaaaaaaaaaaaaaaaaaaaaaaaaaaaaaaaaaaaaaaaaaaaaaaa

SEQ ID NO: 8442 - RNA, 1563 nt, Artificial Sequence
  mRNA Design a-3 (hSL-A100) comprising derived and/or modified sequence from Pf(3D7)__XP_001351122.1__HsALB_Pf-CSP(19-397) (opt6)
aggagagggcgcuuggcuugcaaggacccugagcugcggcauugaagcacacccaacccaacucgacugaagucagccucacugaaccggaucugagaaucuucucucucugggcuugccagggcucuccgaaccuagcuagcauccucuucaauuccaacuagaaagcuuaccaugaaaugggucacauuuauuucacuacuauucuuauucucaagcgcauacucacuauuucaagaauaccaaugcuacggcucauccucaaauacacgaguacuaaaugaacucaacuacgacaacgcaggaaccaaucucuacaacgaauuagaaaugaacuacuacggcaaacaagaaaacugguauucacuaaaaaaaaacaguagaucacuaggagaaaaugacgacggaaacaaugaagacaacgaaaaacuaagaaaaccaaaacacaaaaaauuaaaacaaccagcagacggaaacccagacccaaacgcaaacccuaacguagaucccaaugccaacccaaauguagacccaaacgcaaaccccaacgucgauccaaacgcaaacccaaacgcaaacccaaacgcaaacccaaacgcaaacccaaacgcaaacccaaaugcaaaccccaacgcaaacccaaacgcuaacccaaacgcaaacccaaacgcaaacccaaacgcaaacccaaacgcaaacccaaacgccaacccaaacgccaacccaaacgcaaauccaaacgcaaacccaaaugccaauccaaacguugacccaaacgcaaacccaaacgcaaaccccaacgcaaacccaaacgcaaauccaaacgcgaaccccaacgcaaacccaaacgcaaacccaaaugcaaacccaaacgcuaacccaaaugcaaacccaaacgccaacccaaacgccaacccaaacgcaaaccccaacgcaaacccaaacgcaaacccaaacgccaauccaaacgcaaacccaaaugcaaacccaaacaaaaacaaccaaggaaacggacaaggacacaacaugccaaacgaccccaacagaaacguagaugaaaaugcaaaugcuaacucagccguaaaaaacaauaacaacgaagaaccaucagacaaacacauaaaagaauaccuaaauaaaauacaaaauuccuuaucaacagaaugguccccaugcucaguaacuugcgguaacggcauacaaguaagaauaaaaccaggaucagcaaacaaaccaaaagacgaauuagacuaugcaaacgacauagaaaaaaaaauauguaaaauggaaaaaugcagcucaguauucaacguaguaaauuccucaaucggacucaucaugguauuaucauuccuauuuuuaaauuaaggacuagucccuguucccagagcccacuuuuuuuucuuuuuuugaaauaaaauagccugucuuucagaucucaaaggcucuuuucagagccaccaaaaaaaaaaaaaaaaaaaaaaaaaaaaaaaaaaaaaaaaaaaaaaaaaaaaaaaaaaaaaaaaaaaaaaaaaaaaaaaaaaaaaaaaaaaaaaaaaaaaa

SEQ ID NO: 8443 - RNA, 1581 nt, Artificial Sequence
  mRNA Design a-3 (hSL-A100) comprising derived and/or modified sequence from Pf(3D7)__XP_001351122.1__HsIns-iso1_Pf-CSP(19-397) (opt6)
aggagagggcgcuuggcuugcaaggacccugagcugcggcauugaagcacacccaacccaacucgacugaagucagccucacugaaccggaucugagaaucuucucucucugggcuugccagggcucuccgaaccuagcuagcauccucuucaauuccaacuagaaagcuuaccauggcacuauggaugagacuacuaccacuacuagcacuccuagccuuauggggacccgauccagccgcagcacucuuccaagaauaccaaugcuauggaucauccuccaacacaagaguccuaaacgaauuaaauuacgacaacgcuggaacaaaccuauacaaugaacuagaaaugaauuauuacggaaaacaagaaaauugguacucacuaaaaaaaaacucuagaagccuaggagaaaacgacgacggaaacaacgaagauaacgaaaaacuaagaaaaccaaaacacaaaaaauuaaaacaacccgcagacggcaacccagacccaaaugcaaauccaaacguagacccaaacgcaaauccaaacguagacccaaacgcaaacccaaauguagacccaaacgcaaauccaaacgcaaacccaaaugcaaacccaaaugcaaacccaaacgcaaauccaaacgcaaaucccaacgccaacccaaacgcaaacccaaacgcaaauccaaacgcaaacccaaacgcaaacccaaacgcaaacccaaacgcaaacccaaaugcaaacccaaaugccaauccaaacgccaacccaaacgcaaacccaaacguagacccaaacgcaaacccaaacgccaacccaaacgcaaaccccaaugcaaacccaaacgcaaacccaaacgcaaaccccaacgcaaauccaaacgcaaacccaaacgcaaauccaaacgcaaauccaaacgccaacccaaacgcaaacccaaacgcaaauccaaacgcaaaccccaacgcaaacccaaacgccaacccaaaugcaaacccaaacgcaaaucccaauaaaaacaaccaaggaaacggacaaggacacaacaugccaaacgauccaaacagaaacguagacgaaaacgcaaacgcaaacucagcagucaaaaacaauaacaacgaagaaccaucagacaaacacauaaaagaauaccuaaacaaaauacaaaacucacuauccacagaauggucaccaugcucaguaaccugcggaaacggaauacaaguaagaauaaaaccaggaucagccaacaaaccaaaagacgaacuagacuaugcuaaugacauagaaaaaaaaauaugcaaaauggaaaaaugcuccucaguauucaacgucguaaacucuucaauaggacuaauaaugguacuauccuucuuauuucuaaacuaaggacuagucccuguucccagagcccacuuuuuuuucuuuuuuugaaauaaaauagccugucuuucagaucucaaaggcucuuuucagagccaccaaaaaaaaaaaaaaaaaaaaaaaaaaaaaaaaaaaaaaaaaaaaaaaaaaaaaaaaaaaaaaaaaaaaaaaaaaaaaaaaaaaaaaaaaaaaaaaaaaaaa

SEQ ID NO: 8444 - RNA, 1560 nt, Artificial Sequence
  mRNA Design a-3 (hSL-A100) comprising derived and/or modified sequence from Pf(3D7)__XP_001351122.1__HsSPARC_Pf-CSP(19-397) (opt6)
aggagagggcgcuuggcuugcaaggacccugagcugcggcauugaagcacacccaacccaacucgacugaagucagccucacugaaccggaucugagaaucuucucucucugggcuugccagggcucuccgaaccuagcuagcauccucuucaauuccaacuagaaagcuuaccaugcgcgcauggauauucuuccuccuaugucuagcaggucgagcacuugcacucuuccaagaauaccaauguuacggauccucaagcaacacacgaguacuaaacgaacuaaacuacgauaacgcaggaaccaacuuauacaacgaacuagaaaugaacuacuacggcaaacaagaaaacugguacucacucaaaaaaaacagcagaagccuaggagaaaaugacgacggaaacaacgaagauaacgaaaaauuacgaaaacccaaacacaaaaaauuaaaacaacccgcagauggaaauccagacccgaacgcaaacccaaacguagacccaaacgcaaacccaaacguugacccaaacgcaaacccaaacguagacccaaacgcaaacccuaacgccaacccaaacgcaaacccaaacgcaaacccaaaugcgaacccaaaugcaaacccaaacgccaacccaaaugcaaaccccaacgcaaauccaaacgcaaacccaaaugcaaacccaaacgcaaacccaaacgcaaacccaaacgcaaacccaaacgccaaccccaaugcaaacccaaacgcaaacccaaacgucgacccaaacgcaaacccaaacgcaaacccaaacgcaaauccaaacgcaaauccaaacgcaaacccuaacgcaaacccaaacgcaaacccaaaugcaaauccaaacgcaaacccaaacgcaaacccaaacgcaaauccaaacgcaaacccaaacgcaaacccaaacgcaaacccuaaugcaaacccaaaugcaaauccaaacgcaaacccaaaugcaaaccccaacaaaaacaaccaaggaaacggacaaggacacaauaugccaaacgacccaaacagaaacguagacgaaaacgcaaacgccaacagcgcaguaaaaaacaacaacaacgaagaaccaucagacaaacacauaaaagaauaccuaaacaaaauacaaaacucacuaucaacagaauggucucccugcuccguaacaugcggaaacggcauacaaguacgaauaaaaccuggaucagccaacaaaccaaaagacgaacuagacuaugcaaaugacauagaaaaaaaaauaugcaaaauggaaaaaugcaguucagucuucaacguagucaacagcucaauaggccuaauaaugguacucucauuccuauucuuaaacuaaggacuagucccuguucccagagcccacuuuuuuuucuuuuuuugaaauaaaauagccugucuuucagaucucaaaggcucuuuucagagccaccaaaaaaaaaaaaaaaaaaaaaaaaaaaaaaaaaaaaaaaaaaaaaaaaaaaaaaaaaaaaaaaaaaaaaaaaaaaaaaaaaaaaaaaaaaaaaaaaaaaaa

SEQ ID NO: 8445 - RNA, 1563 nt, Artificial Sequence
  mRNA Design a-3 (hSL-A100) comprising derived and/or modified sequence from Pf(3D7)__XP_001351122.1__IgE_Pf-CSP(19-397) (opt6)
aggagagggcgcuuggcuugcaaggacccugagcugcggcauugaagcacacccaacccaacucgacugaagucagccucacugaaccggaucugagaaucuucucucucugggcuugccagggcucuccgaaccuagcuagcauccucuucaauuccaacuagaaagcuuaccauggauuggacauggauucucuuccucguagcagcagccacaagaguacacucuuuauuucaagaauaccaaugcuacggaucaagcucaaacacacgcguacuaaacgaacuaaacuacgacaacgcaggaacaaacuuauacaacgaacuagaaaugaacuauuauggcaaacaagaaaacugguacucacuaaaaaaaaacuccagaagcuuaggagaaaacgacgacggaaacaacgaagacaacgaaaaacuacgcaaaccuaaacacaaaaaacuaaaacaaccugcagacggaaacccagacccaaacgcgaacccaaacguagauccaaacgcaaacccaaacguagaucccaacgcaaacccgaacguagacccuaacgcaaauccaaacgcaaaccccaacgcaaacccgaacgcaaacccaaacgcaaacccaaacgcaaacccaaacgcaaacccaaacgcaaacccaaacgccaacccaaacgcaaauccaaacgcuaacccaaaugcaaacccuaacgcaaacccaaacgccaacccaaacgcaaacccaaacgcaaacccaaacgcaaaucccaauguagacccaaacgcaaacccaaacgcaaacccaaacgcuaacccaaaugcaaacccaaacgcaaacccaaacgcaaacccaaacgcuaaccccaacgcaaacccgaacgcaaacccaaaugcaaacccaaacgcaaacccaaaugcaaacccaaacgcaaacccaaacgcaaaccccaaugccaacccaaacgcaaauccaaaugccaauccaaacgcaaacccaaacaaaaacaaccaaggaaauggacaaggacauaacaugccaaacgaccccaaccgaaauguagacgaaaacgccaacgcaaauagugcagucaaaaacaauaacaaugaagaacccucagauaaacauauaaaagaauacuuaaacaaaauacaaaacucacuaucaaccgaguggucuccuugcucaguaacauguggaaacggaauacaaguacgaauaaaaccaggaucagcaaacaaaccgaaagacgaacuagacuacgccaacgacauagaaaagaaaauauguaaaauggagaaauguaguucaguauucaacgugguaaacagcucaauaggccuaauaaugguacucucuuuccuauuccuaaacuaaggacuagucccuguucccagagcccacuuuuuuuucuuuuuuugaaauaaaauagccugucuuucagaucucaaaggcucuuuucagagccaccaaaaaaaaaaaaaaaaaaaaaaaaaaaaaaaaaaaaaaaaaaaaaaaaaaaaaaaaaaaaaaaaaaaaaaaaaaaaaaaaaaaaaaaaaaaaaaaaaaaaa

SEQ ID NO: 8446 - RNA, 1728 nt, Artificial Sequence
  mRNA Design a-3 (hSL-A100) comprising derived and/or modified sequence from Pf(3D7)__XP_001351122.1__Pf-CSP_L(G4SG4)_TM domain HA (opt6)
aggagagggcgcuuggcuugcaaggacccugagcugcggcauugaagcacacccaacccaacucgacugaagucagccucacugaaccggaucugagaaucuucucucucugggcuugccagggcucuccgaaccuagcuagcauccucuucaauuccaacuagaaagcuuaccaugaugcguaaacuagcaauacuaucugucaguucauucuuauucguagaagcacuauuccaagaauaccaauguuacggaucuucaucaaacacaagaguacucaacgaauuaaacuacgauaacgcuggaaccaauuuauacaacgaacuagaaaugaacuacuauggaaaacaagaaaacugguauucacuaaaaaaaaacagcagaaguuuaggagaaaaugacgacggaaacaaugaagacaaugaaaaauuacgaaaaccaaaacacaaaaaauuaaaacaacccgccgacggaaauccagacccaaacgcaaacccaaauguagacccaaacgcaaacccaaauguagaucccaacgcaaacccaaacguagaucccaaugcaaacccaaacgcaaacccaaaugcaaaccccaacgcaaacccaaaugcaaacccuaacgcaaacccgaacgcaaacccaaacgcaaaucccaaugcaaaccccaacgcaaauccaaaugcaaacccuaacgcaaauccgaacgcaaauccaaacgcaaacccaaacgcaaacccaaacgcaaacccaaacgcaaacccaaacgucgacccaaacgccaauccaaacgcaaaccccaaugcaaacccaaaugcaaacccaaacgcaaacccaaaugccaacccaaacgcaaacccaaacgcaaacccaaacgcaaacccaaacgcaaacccaaaugcaaacccaaaugcaaacccaaacgccaacccaaacgcaaacccaaacgcaaacccaaacgccaacccaaacgcaaacccuaacgcaaauccaaacaaaaacaaccaagggaacggacaaggacacaacaugccaaacgacccaaacagaaacguagacgaaaacgccaacgcaaacucagcugucaaaaacaauaacaacgaagaacccuccgauaaacacauaaaagaauaccuaaacaaaauccaaaacucccuuucuacagaauggucacccugcucaguaacaugcggcaacggcauacaaguuagaaucaaaccaggaucagcaaauaaaccaaaagacgaauuagacuaugccaacgacauagaaaaaaaaauauguaaaauggaaaaaugcucaucaguuuucaacguaguaaacagcucaaucggauuaauaaugguacuaucauucuuauuuuuaaacggaggaggaggcuccggcggagguggaaaacuagaaucaacuagaauauaccaaauauuagcaauauacucaacaguagcaucaucacucguauuaguaguaucgcuaggagcaauaaguuucuggaugugcucuaacggaagccuacaaugccgaauaugcauauaaggacuagucccuguucccagagcccacuuuuuuuucuuuuuuugaaauaaaauagccugucuuucagaucucaaaggcucuuuucagagccaccaaaaaaaaaaaaaaaaaaaaaaaaaaaaaaaaaaaaaaaaaaaaaaaaaaaaaaaaaaaaaaaaaaaaaaaaaaaaaaaaaaaaaaaaaaaaaaaaaaaaa

SEQ ID NO: 8447 - RNA, 1602 nt, Artificial Sequence
  mRNA Design a-3 (hSL-A100) comprising derived and/or modified sequence from Pf(3D7)__XP_001351122.1__Pf-CSP(199-377)_L(PVTN)_HBsAg (opt6)
aggagagggcgcuuggcuugcaaggacccugagcugcggcauugaagcacacccaacccaacucgacugaagucagccucacugaaccggaucugagaaucuucucucucugggcuugccagggcucuccgaaccuagcuagcauccucuucaauuccaacuagaaagcuuaccauggacccaaacgccaaccccaacgcaaacccaaaugcaaacccaaacgcuaaccccaacgcaaacccaaacgcuaacccuaacgcaaauccaaacgcaaaucccaacgcaaauccaaacgcaaacccaaacgcaaacccaaaugccaacccaaacgcaaacccuaacgcaaaucccaacgcaaauccaaaugcaaaccccaaugcaaacccaaacgcaaauccaaacaaaaauaaucaaggaaauggacaaggacauaacaugccaaacgacccuaaccgaaacgucgacgaaaaugcaaacgcaaacuccgcaguaaaaaacaacaacaacgaagaaccuuccgacaaacacauaaaagaauaccuaaacaaaauacaaaacucucuauccacugaauggucaccaugcucaguaaccugcggaaauggcauacaaguaagaauaaaaccaggaucugcaaauaaaccuaaagacgaacuagauuacgcaaaugacauagaaaaaaaaauaugcaaaauggaaaaaugcucaucagucccaguaacaaacauggaaaacaucacaucaggauucuuaggaccacuacucguauuacaagcaggauucuuucuuuuaacaagaauauuaacaauaccacaaucccuagacucaugguggacaucauuaaacuuccuagguggaucaccagucugccucggacaaaacucacaaucaccaacaucaaaccacucaccaacauccugcccaccaauuuguccaggauacagauggaugugccuacgaagauucauaauauucuuauuuauauuacuacuaugucucauauuuuuacucguacuauuagacuaucagggcauguuacccguauguccacuaauaccaggcucaaccaccacaaacacagguccaugcaaaaccugcaccacaccagcacaaggaaacuccauguuucccucauguugcugcaccaaacccaccgauggaaacugcaccugcauaccaaucccaucuucaugggcauucgcaaaauaucuaugggaaugggcauccguaagauuuucauggcuaucacuauuaguaccauucguacaaugguucguaggauuaucaccaacaguaugguuaucagcaauauggaugaugugguacuggggaccaucacuauacucaauaguauccccuuucauaccauuacucccaauauuuuucugccuuuggguauacauauaaggacuagucccuguucccagagcccacuuuuuuuucuuuuuuugaaauaaaauagccugucuuucagaucucaaaggcucuuuucagagccaccaaaaaaaaaaaaaaaaaaaaaaaaaaaaaaaaaaaaaaaaaaaaaaaaaaaaaaaaaaaaaaaaaaaaaaaaaaaaaaaaaaaaaaaaaaaaaaaaaaaaa

SEQ ID NO: 8448 - RNA, 1644 nt, Artificial Sequence
  mRNA Design a-3 (hSL-A100) comprising derived and/or modified sequence from Pf(3D7)__XP_001351122.1__Pf-CSP(199-387)_L(PVTN)_HBsAg (opt6)
aggagagggcgcuuggcuugcaaggacccugagcugcggcauugaagcacacccaacccaacucgacugaagucagccucacugaaccggaucugagaaucuucucucucugggcuugccagggcucuccgaaccuagcuagcauccucuucaauuccaacuagaaagcuuaccaugauggcaccagauccaaacgcaaacccaaacgcaaacccaaacgcaaauccaaaugcaaacccaaacgcaaaucccaaugcaaacccuaacgcaaacccaaacgccaacccaaaugccaacccaaacgcaaacccaaacgcaaauccaaacgcaaacccaaacgcuaacccaaaugcaaaccccaacgcaaauccaaacgcaaacccaaacgcaaauccaaacgcuaacccaaacaaaaauaaccaaggaaacggacaaggacacaauaugccaaaugacccaaauagaaacguagacgaaaacgcaaacgcaaauucagcagucaaaaacaauaacaacgaagaaccauccgauaaacacauaaaagaauacuuaaacaaaauccaaaacucacuaucaacugaauggucaccuuguucaguaacauguggcaacggaauacaaguaagaauaaaaccagguucagccaacaaaccuaaagacgaacuagacuacgcaaacgacauagaaaaaaaaaucugcaaaauggaaaaaugcucaucaguauuuaauguaguaaacucaucaauaggacuaggcccuguaacaaacauggaaaacauaaccucaggauucuuaggcccacuacuaguacuccaagcaggauucuuucuucuaacaagaauauuaaccauuccucaaucauuagacucaugguggacaucccuuaacuuucuaggaggaagccccguaugcuuaggacaaaacagccaauccccaacauccaaccacuccccaacaucaugccccccaauaugcccaggauacagauggaugugccuaagaagauucaucauauuccuauuuauucucuuacucugcuuaauauucuuacucguauuacucgacuaccaaggaauguuaccaguaugcccacuaauaccaggauccacaacaacaaacacgggaccaugcaaaacaugcacaacaccugcccaaggaaauuccauguucccaucaugcugcugcacaaaaccaaccgacggcaacugcacaugcauaccaauaccaucaagcugggccuucgcaaaauaccuaugggaaugggcaucagugagauucucauggcucucauuacuagucccauucguacaaugguuuguaggauuaucaccaacaguuuggcucagcgcaauauggaugaugugguacuggggccccucuuuauauucaauaguauccccauuuauaccacuacucccaauauucuucuguuuauggguauacauauaaggacuagucccuguucccagagcccacuuuuuuuucuuuuuuugaaauaaaauagccugucuuucagaucucaaaggcucuuuucagagccaccaaaaaaaaaaaaaaaaaaaaaaaaaaaaaaaaaaaaaaaaaaaaaaaaaaaaaaaaaaaaaaaaaaaaaaaaaaaaaaaaaaaaaaaaaaaaaaaaaaaaa

SEQ ID NO: 8449 - RNA, 828 nt, Artificial Sequence
  mRNA Design a-3 (hSL-A100) comprising derived and/or modified sequence from Pf(3D7)__XP_001351122.1__HsALB_Pf-CSP(19-152) (opt6)
aggagagggcgcuuggcuugcaaggacccugagcugcggcauugaagcacacccaacccaacucgacugaagucagccucacugaaccggaucugagaaucuucucucucugggcuugccagggcucuccgaaccuagcuagcauccucuucaauuccaacuagaaagcuuaccaugaaauggguaacauucauaucacuacuauuccuauucuccagcgcauacucacuauuccaagaauaccaaugcuacggaucaagcucaaacacacgaguacuaaacgaacuaaacuacgacaacgcaggaaccaaccuauacaacgaacuagaaaugaacuacuacggaaaacaagaaaacugguacucacuaaaaaaaaacagcagaucacuaggagaaaacgacgacggaaacaacgaagacaacgaaaaacuaagaaaaccaaaacacaaaaaacuaaaacaacccgcagacggaaacccagacccaaacgcaaacccaaacguagacccaaaugcaaacccaaacguagacccaaacgcaaacccaaacguagacccaaacgcaaacccaaacgcaaacccaaacgcaaacccaaacgcaaacccaaacgcaaacccaaacgcaaacccauaaggacuagucccuguucccagagcccacuuuuuuuucuuuuuuugaaauaaaauagccugucuuucagaucucaaaggcucuuuucagagccaccaaaaaaaaaaaaaaaaaaaaaaaaaaaaaaaaaaaaaaaaaaaaaaaaaaaaaaaaaaaaaaaaaaaaaaaaaaaaaaaaaaaaaaaaaaaaaaaaaaaaa

SEQ ID NO: 8450 - RNA, 948 nt, Artificial Sequence
  mRNA Design a-3 (hSL-A100) comprising derived and/or modified sequence from Pf(3D7)__XP_001351122.1__HsALB_Pf-CSP(19-192) (opt6)
aggagagggcgcuuggcuugcaaggacccugagcugcggcauugaagcacacccaacccaacucgacugaagucagccucacugaaccggaucugagaaucuucucucucugggcuugccagggcucuccgaaccuagcuagcauccucuucaauuccaacuagaaagcuuaccaugaaauggguaacauucaucucacuacuauucuuauucucaucagcauacucacuauuccaagaauaccaaugcuacggaucaucaucaaacacacgaguacucaacgaacuaaacuacgacaacgcaggaacaaaccuauacaacgaacuagaaaugaacuacuacggaaaacaagaaaacugguauucacuaaaaaaaaacucaagaucacuaggagaaaacgacgacggaaacaacgaagacaacgaaaaacuaagaaaaccaaaacacaaaaaacuaaaacaaccagcagacggaaacccagacccaaacgcaaacccaaacguagacccaaacgccaacccaaacguagacccaaacgcaaacccaaacguagacccaaacgcaaacccaaacgcaaacccaaacgcaaacccaaacgcaaacccaaacgcaaacccaaacgcaaacccaaacgcaaacccaaacgcaaacccaaacgcaaacccaaacgcaaacccaaacgcaaacccaaacgcaaauccaaacgcaaacccaaacgcaaacccaaacgcaaacccaaacgcaaaccccuaaggacuagucccuguucccagagcccacuuuuuuuucuuuuuuugaaauaaaauagccugucuuucagaucucaaaggcucuuuucagagccaccaaaaaaaaaaaaaaaaaaaaaaaaaaaaaaaaaaaaaaaaaaaaaaaaaaaaaaaaaaaaaaaaaaaaaaaaaaaaaaaaaaaaaaaaaaaaaaaaaaaaa

SEQ ID NO: 8451 - RNA, 1188 nt, Artificial Sequence
  mRNA Design a-3 (hSL-A100) comprising derived and/or modified sequence from Pf(3D7)__XP_001351122.1__HsALB_Pf-CSP(19-272) (opt6)
aggagagggcgcuuggcuugcaaggacccugagcugcggcauugaagcacacccaacccaacucgacugaagucagccucacugaaccggaucugagaaucuucucucucugggcuugccagggcucuccgaaccuagcuagcauccucuucaauuccaacuagaaagcuuaccaugaaauggguaacauucauaucacuacuauuccuauucucaagcgcauauucacuauuccaagaauaccaaugcuacggaucaagcucaaacacaagaguacuuaacgaacuaaacuacgacaacgcaggaacaaaccuauacaacgaacuugaaaugaacuacuacggaaaacaagaaaacugguacucacuaaaaaaaaauagcagaagcuuaggagaaaacgacgacggaaacaacgaagacaacgaaaaauuaagaaaaccuaaacacaaaaaacuaaaacaacccgcagacggaaacccagacccuaacgccaacccaaauguagacccaaacgcaaacccaaacguagacccaaacgcaaaccccaacguagacccaaacgcaaacccaaacgcaaacccaaacgcaaacccaaacgcaaaccccaacgcaaacccaaacgcaaacccaaacgcaaacccaaacgcaaacccaaacgcaaacccaaacgcaaacccaaacgcaaacccaaacgcaaacccaaacgcgaacccaaacgcaaacccaaacgcaaacccaaacgcaaacccaaacgcaaacccaaacguagacccaaaugcaaaccccaacgcaaacccaaacgcaaacccaaaugcaaaccccaacgcaaacccaaacgcaaacccaaacgcaaacccaaacgcaaacccaaaugcaaacccaaacgcaaacccaaacgccaacccaaacgcaaacccaaacgcaaacccaaacgcaaacccaaacgcaaacccgaacgcaaacccaaacgcaaacccaaacgcaaacccauaaggacuagucccuguucccagagcccacuuuuuuuucuuuuuuugaaauaaaauagccugucuuucagaucucaaaggcucuuuucagagccaccaaaaaaaaaaaaaaaaaaaaaaaaaaaaaaaaaaaaaaaaaaaaaaaaaaaaaaaaaaaaaaaaaaaaaaaaaaaaaaaaaaaaaaaaaaaaaaaaaaaaa

SEQ ID NO: 8452 - RNA, 1350 nt, Artificial Sequence
  mRNA Design a-3 (hSL-A100) comprising derived and/or modified sequence from Pf(3D7)__XP_001351122.1__HsALB_Pf-CSP(19-272)_L(AAY)_Pf-CSP(310-3 27)_L(AAY)_Pf-CSP(346-375) (opt6)
aggagagggcgcuuggcuugcaaggacccugagcugcggcauugaagcacacccaacccaacucgacugaagucagccucacugaaccggaucugagaaucuucucucucugggcuugccagggcucuccgaaccuagcuagcauccucuucaauuccaacuagaaagcuuaccaugaaauggguaacauuuauaucacuccuauuccuuuuuucgucagcauacucacuauuccaagaauaucaaugcuacggaucaagcuccaacacaagaguacuaaacgaacuaaacuacgacaacgcaggaacaaaccuauacaacgaacuagaaaugaacuacuacggaaaacaagaaaacugguacucacuaaaaaaaaacagccgaagcuuaggagaaaaugacgacggaaacaacgaagacaacgaaaaauuacgcaaacccaaacacaaaaaacugaaacaaccagcagacggaaacccagacccaaacgcaaacccaaacguagacccaaacgcaaacccaaacguagacccaaacgcaaacccaaacguagacccaaacgcaaacccaaacgcgaacccaaacgccaacccaaacgcaaacccaaacgcaaacccaaacgcaaacccaaacgcaaacccaaacgcaaacccaaacgccaacccgaacgcaaacccaaacgcaaacccaaacgcaaauccaaacgcaaacccaaacgcaaacccaaacgccaacccaaacgcaaacccaaacgcaaacccaaauguggacccaaacgcaaacccaaacgcaaacccaaacgcaaacccaaaugcaaacccaaacgcaaacccaaacgcaaacccaaacgcaaacccaaacgcaaacccaaaugcaaacccaaacgcaaauccaaacgcaaacccaaacgcaaacccaaacgcaaacccaaacgcaaacccuaacgcaaacccaaacgcaaacccaaacgccaaccccaaugcaaacccagcagcauacgaaccaucagacaaacacauaaaagaauaccuaaacaaaauacaaaacucacucgcagcauauauaaagccaggaagcgccaacaaaccaaaagacgaacuagauuacgcaaacgacauagaaaaaaaaaucuguaaaauggaaaaaugcucauaaggacuagucccuguucccagagcccacuuuuuuuucuuuuuuugaaauaaaauagccugucuuucagaucucaaaggcucuuuucagagccaccaaaaaaaaaaaaaaaaaaaaaaaaaaaaaaaaaaaaaaaaaaaaaaaaaaaaaaaaaaaaaaaaaaaaaaaaaaaaaaaaaaaaaaaaaaaaaaaaaaaaa

SEQ ID NO: 8453 - RNA, 1311 nt, Artificial Sequence
  mRNA Design a-3 (hSL-A100) comprising derived and/or modified sequence from Pf(3D7)__XP_001351122.1__HsALB_Pf-CSP(19-272)_L(AAY)_Pf-CSP(346-3 65)_L(AAY)_P2 (opt6)
aggagagggcgcuuggcuugcaaggacccugagcugcggcauugaagcacacccaacccaacucgacugaagucagccucacugaaccggaucugagaaucuucucucucugggcuugccagggcucuccgaaccuagcuagcauccucuucaauuccaacuagaaagcuuaccaugaaauggguaacauucauaucacuauuauuccuuuucucaucagcuuacucacuauuccaagaauaccaaugcuacggaucauccucaaacacaagaguacuaaacgaacuaaacuacgacaacgccggaaccaaccuauacaacgaacucgaaaugaacuacuacggaaaacaagaaaacugguacucacuaaaaaaaaacagccgaucccuaggagaaaacgacgacggaaauaacgaagacaaugaaaaauuaagaaaaccaaaacacaaaaaacuaaaacaaccagcagacggaaacccagacccaaacgcaaacccaaacguagauccaaacgcaaacccaaacguagacccaaacgcaaacccaaacguagacccaaacgcuaacccaaacgcaaacccaaacgcaaacccaaacgcaaacccaaacgcaaacccaaacgcaaacccgaacgcaaaccccaacgcaaacccaaacgcaaacccaaacgcaaaccccaacgcaaacccaaacgcaaacccgaacgcaaacccaaacgcaaacccaaacgcaaacccaaacgcaaacccaaacgcaaacccaaacguagacccaaacgccaacccaaacgcaaacccaaacgcaaacccaaacgcaaacccaaacgcaaacccaaacgcaaacccaaacgcaaacccaaacgcaaacccaaacgcaaacccaaacgcaaaccccaacgcaaacccaaaugcaaacccaaacgcaaacccaaaugcaaaccccaacgcaaacccaaaugccaauccaaacgcaaacccaaacgcaaacccagccgcauacauaaaaccaggauccgcaaacaaaccaaaagacgaacuagacuacgcaaacgacauagaagcagcauaccaauauauaaaagccaacuccaaauucauagguauaacagaacucuaaggacuagucccuguucccagagcccacuuuuuuuucuuuuuuugaaauaaaauagccugucuuucagaucucaaaggcucuuuucagagccaccaaaaaaaaaaaaaaaaaaaaaaaaaaaaaaaaaaaaaaaaaaaaaaaaaaaaaaaaaaaaaaaaaaaaaaaaaaaaaaaaaaaaaaaaaaaaaaaaaaaaa

SEQ ID NO: 8454 - RNA, 1305 nt, Artificial Sequence
  mRNA Design a-3 (hSL-A100) comprising derived and/or modified sequence from Pf(3D7)__XP_001351122.1__HsALB_Pf-CSP(19-272)_L(AAY)_Pf-CSP(346-3 65)_L(AAY)_PADRE (opt6)
aggagagggcgcuuggcuugcaaggacccugagcugcggcauugaagcacacccaacccaacucgacugaagucagccucacugaaccggaucugagaaucuucucucucugggcuugccagggcucuccgaaccuagcuagcauccucuucaauuccaacuagaaagcuuaccaugaaauggguaaccuucauaucacuacuauucuuauucucaucagcauacucacucuuccaagaauaccaaugcuacggcucaagcucaaacacaagaguacuaaacgaauuaaacuaugacaacgccggaacaaaccuauacaaugaauuagaaaugaacuacuacggcaaacaagaaaacugguacucacucaaaaaaaacuccagaaguuuaggagaaaaugacgacggaaacaaugaagacaaugaaaaauuacgaaaaccaaaacacaaaaaacuaaaacaacccgccgacggaaaccccgacccgaacgcaaacccaaacguagacccaaacgcaaacccaaacguagacccaaaugcaaacccaaacguagacccaaacgcaaacccaaacgcaaacccaaacgcaaauccaaacgcaaacccaaaugcaaacccaaaugcaaauccaaacgcaaaccccaacgcaaacccaaacgcaaacccaaaugcaaauccaaacgccaacccaaaugcaaacccaaacgcaaauccaaacgcaaacccaaacgcaaauccaaacgcaaacccaaaugcaaacccaaacguagauccaaacgcaaacccaaacgccaacccaaacgcaaacccgaacgcaaacccaaacgcaaacccaaacgccaacccaaacgccaacccaaacgccaacccaaacgcaaacccaaacgcaaacccaaacgcaaacccaaacgcaaacccaaaugcaaacccuaacgcaaacccaaacgcaaacccaaacgcaaacccaaacgccaacccaaacgcaaauccagcagcauacauaaaaccaggaucagcaaacaaaccaaaagaugaacuagacuacgcaaaugacaucgaagcagccuacgcuaaauucguagcagccuggacacuaaaagcagcagccuaaggacuagucccuguucccagagcccacuuuuuuuucuuuuuuugaaauaaaauagccugucuuucagaucucaaaggcucuuuucagagccaccaaaaaaaaaaaaaaaaaaaaaaaaaaaaaaaaaaaaaaaaaaaaaaaaaaaaaaaaaaaaaaaaaaaaaaaaaaaaaaaaaaaaaaaaaaaaaaaaaaaaa

SEQ ID NO: 8455 - RNA, 1362 nt, Artificial Sequence
  mRNA Design a-3 (hSL-A100) comprising derived and/or modified sequence from Pf(3D7)__XP_001351122.1__HsALB_Pf-CSP(19-272)_L(G4S)_Pf-CSP(310-3 27)_L(G4S)_Pf-CSP(346-375) (opt6)
aggagagggcgcuuggcuugcaaggacccugagcugcggcauugaagcacacccaacccaacucgacugaagucagccucacugaaccggaucugagaaucuucucucucugggcuugccagggcucuccgaaccuagcuagcauccucuucaauuccaacuagaaagcuuaccaugaaauggguaaccuucaucucacuacuauuccuauucucaagcgcauacucacucuuucaagaauaccaaugcuacggcucaagcucaaacacacgaguacuaaacgaacuaaacuacgacaacgcaggaacaaaccuauauaacgaacucgaaaugaacuacuacggcaaacaagaaaauugguacucacuaaaaaaaaacagcagaagcuuaggagaaaacgacgacggaaacaacgaagauaacgaaaaacuaagaaaaccaaaacacaaaaaacuaaaacaacccgcagacggaaacccagacccaaacgcaaauccaaauguagacccgaacgcaaacccaaacguagacccaaaugcgaacccaaacgucgacccaaacgcaaacccaaaugcaaacccaaaugcgaacccaaacgcaaacccaaacgcaaauccaaacgcaaauccaaaugcaaacccaaacgcgaauccaaacgcaaacccaaacgcaaacccaaacgcaaacccaaacgcaaacccaaacgcaaacccaaacgcaaacccgaacgcuaacccaaacgcaaacccaaacgcaaacccaaacguagauccaaacgcgaacccaaacgcaaacccaaaugcaaacccaaacgcaaacccaaacgcaaacccaaacgcaaacccaaacgcaaacccaaacgcaaacccaaacgcgaacccaaacgcaaauccaaaugcaaacccaaacgcaaacccaaacgcaaacccaaacgcaaacccaaaugcaaacccaaacgcaaacccaaaugcaaacccaaacgcaaacccaggaggaggaggaucagaacccucagacaaacacauaaaagaauaccuaaacaaaauacaaaacucacuaggaggaggaggaucgaucaaaccaggaagcgcaaacaaaccaaaagacgaacucgacuacgcaaacgauauagaaaaaaaaauaugcaaaauggaaaaaugcucguaaggacuagucccuguucccagagcccacuuuuuuuucuuuuuuugaaauaaaauagccugucuuucagaucucaaaggcucuuuucagagccaccaaaaaaaaaaaaaaaaaaaaaaaaaaaaaaaaaaaaaaaaaaaaaaaaaaaaaaaaaaaaaaaaaaaaaaaaaaaaaaaaaaaaaaaaaaaaaaaaaaaaa

SEQ ID NO: 8456 - RNA, 1347 nt, Artificial Sequence
  mRNA Design a-3 (hSL-A100) comprising derived and/or modified sequence from Pf(3D7)__XP_001351122.1__HsALB_Pf-CSP(19-272)_L(G4S)_Pf-CSP(310-3 27)_Pf-CSP(346-375) (opt6)
aggagagggcgcuuggcuugcaaggacccugagcugcggcauugaagcacacccaacccaacucgacugaagucagccucacugaaccggaucugagaaucuucucucucugggcuugccagggcucuccgaaccuagcuagcauccucuucaauuccaacuagaaagcuuaccaugaaauggguaacauucauaucacuccuauuccuauucuccucagcauacucccucuuccaagaauaccaaugcuacggcucaagcucaaacacacgaguacuaaacgaacuaaauuacgacaacgccggaacaaaccuauauaaugaacuagaaaugaauuacuacggaaaacaagaaaacugguacucacuuaaaaaaaacucaagaucauuaggagaaaacgacgacggcaacaacgaagacaacgaaaaacuaagaaaaccaaaacacaaaaaacuaaaacaacccgcagacggaaauccagauccaaacgcaaacccaaacguagacccaaacgcaaacccaaacguagacccaaacgcaaacccaaacgucgacccaaacgccaacccaaacgcaaacccaaacgcaaacccaaacgcaaacccaaacgccaacccaaacgcaaacccaaacgcaaacccaaacgcaaacccaaacgcaaacccaaacgcaaacccaaacgcaaacccgaacgcaaacccaaacgcaaauccuaacgcaaacccaaacgcaaacccaaacgcaaauccgaacgcaaacccaaacguagacccaaacgcaaacccaaacgcaaacccaaacgcaaacccaaacgcaaacccaaacgcaaacccuaacgcaaacccaaaugcaaacccaaacgcgaacccaaaugcaaacccaaaugcaaacccaaacgcaaacccaaacgcaaacccaaacgcaaauccaaacgcaaauccaaacgcaaacccaaacgcaaacccaaacgcaaacccaaacgccaacccaggaggagguggaagcgaaccauccgacaaacacauaaaagaauaccuaaacaaaauacaaaacucacuaauaaaacccggcucagcaaacaaaccaaaagacgaacuagacuacgccaacgacauagaaaaaaaaauauguaaaauggaaaaaugcucauaaggacuagucccuguucccagagcccacuuuuuuuucuuuuuuugaaauaaaauagccugucuuucagaucucaaaggcucuuuucagagccaccaaaaaaaaaaaaaaaaaaaaaaaaaaaaaaaaaaaaaaaaaaaaaaaaaaaaaaaaaaaaaaaaaaaaaaaaaaaaaaaaaaaaaaaaaaaaaaaaaaaaa

SEQ ID NO: 8457 - RNA, 1347 nt, Artificial Sequence
  mRNA Design a-3 (hSL-A100) comprising derived and/or modified sequence from Pf(3D7)__XP_001351122.1__HsALB_Pf-CSP(19-325) (opt6)
aggagagggcgcuuggcuugcaaggacccugagcugcggcauugaagcacacccaacccaacucgacugaagucagccucacugaaccggaucugagaaucuucucucucugggcuugccagggcucuccgaaccuagcuagcauccucuucaauuccaacuagaaagcuuaccaugaaauggguaacauucauaucacuccuauuccuauucucaagcgcauacucauuauuccaagaauaccaaugcuacggaucaucaucuaacacaagaguacucaacgaacuaaacuacgacaacgcaggaacuaaucucuacaacgaacuagaaaugaacuacuacggaaaacaagaaaacugguauucacuaaaaaaaaacagccgaucauuaggagaaaacgacgacggcaacaacgaagacaacgaaaaacuacgaaaaccaaaacacaaaaaauuaaaacagccagccgacggaaacccagacccaaacgcaaacccaaacguagacccaaacgcaaacccaaacguagacccaaacgcaaacccaaacguagacccaaacgcaaacccaaacgcaaacccaaacgcaaauccaaacgcaaacccaaacgccaacccaaacgcaaacccaaacgcaaaccccaacgcaaacccaaacgcaaacccaaacgcaaacccaaaugccaacccaaacgcaaacccaaacgcaaacccaaacgcaaacccaaacgcaaacccaaaugcaaacccaaacgcaaacccaaacguagacccaaacgcaaacccaaaugcaaacccaaacgcaaaccccaacgcaaacccaaacgcaaacccaaacgcaaacccaaacgcaaacccaaacgccaacccaaacgcaaacccaaacgcaaacccaaacgcaaacccaaacgcaaacccaaacgcaaauccaaacgcaaacccaaacgcaaacccaaacgcaaacccaaacgcaaacccaaacgcaaacccaaauaaaaacaaucaaggaaacggacaaggacacaacaugccaaacgauccaaaucgcaacguagacgaaaacgcaaacgcaaacagcgcagucaaaaacaacaacaacgaagaaccaucagacaaacacauaaaagaauaccuaaauaaaauacaaaacuagggacuagucccuguucccagagcccacuuuuuuuucuuuuuuugaaauaaaauagccugucuuucagaucucaaaggcucuuuucagagccaccaaaaaaaaaaaaaaaaaaaaaaaaaaaaaaaaaaaaaaaaaaaaaaaaaaaaaaaaaaaaaaaaaaaaaaaaaaaaaaaaaaaaaaaaaaaaaaaaaaaaa

SEQ ID NO: 8458 - RNA, 1524 nt, Artificial Sequence
  mRNA Design a-3 (hSL-A100) comprising derived and/or modified sequence from Pf(3D7)__XP_001351122.1__HsALB_Pf-CSP(19-384) (opt6)
aggagagggcgcuuggcuugcaaggacccugagcugcggcauugaagcacacccaacccaacucgacugaagucagccucacugaaccggaucugagaaucuucucucucugggcuugccagggcucuccgaaccuagcuagcauccucuucaauuccaacuagaaagcuuaccaugaaauggguaaccuuuauaucacucuuauuccuauuuucaucagcauacucacucuuccaagaauaucaaugcuacggaucaucaucaaacacaagaguccucaaugaauuaaacuaugacaaugcaggaaccaaccuauacaacgaauuagaaaugaacuacuacggcaaacaagaaaacugguacucacucaaaaaaaacucaagauccuuaggagaaaaugaugacggaaacaacgaagacaacgaaaaacuccgaaaaccaaaacacaaaaaacuaaaacaacccgccgacggaaacccagaccccaacgcaaacccaaauguagaccccaacgcaaacccaaacguagacccaaacgcaaacccaaacguagacccaaacgcaaauccaaacgccaacccaaacgcaaacccaaacgccaacccaaacgcaaacccaaacgcaaacccaaacgcaaacccaaacgcaaacccaaaugcaaacccaaaugcaaacccaaacgcaaacccaaacgcaaacccaaacgcaaacccaaacgcaaacccaaaugcaaacccaaacgcaaacccaaacgcaaacccaaacguagacccaaaugcaaacccaaacgcaaacccaaacgcaaauccaaaugcaaauccaaacgcaaauccaaacgcaaacccaaacgcaaacccaaacgcaaacccaaacgcaaauccaaaugcaaacccaaacgcaaacccaaacgcaaacccaaacgcuaacccaaacgccaauccaaacgcaaacccaaacgcaaacccuaaugcaaacccaaacgccaacccaaauaaaaauaaccaaggaaacggacaaggacacaacaugccaaacgacccaaacagaaacgucgaugaaaacgcaaacgcaaauuccgcagucaaaaacaacaacaacgaagaaccaucagacaaacacauaaaagaauaccucaacaaaauacaaaacucccuaucaacagaauggucacccugcuccguuacaugcgguaacggcauacaaguaagaauaaaaccaggaucagcuaacaaacccaaagacgaacuagacuacgccaacgacauagaaaaaaaaauaugcaaaauggaaaaaugcuccucaguauucaacguaguaaacucaucauaaggacuagucccuguucccagagcccacuuuuuuuucuuuuuuugaaauaaaauagccugucuuucagaucucaaaggcucuuuucagagccaccaaaaaaaaaaaaaaaaaaaaaaaaaaaaaaaaaaaaaaaaaaaaaaaaaaaaaaaaaaaaaaaaaaaaaaaaaaaaaaaaaaaaaaaaaaaaaaaaaaaaa

SEQ ID NO: 8459 - RNA, 1662 nt, Artificial Sequence
  mRNA Design a-3 (hSL-A100) comprising derived and/or modified sequence from Pf(3D7)__XP_001351122.1__HsALB_Pf-CSP(19-384)_TM domain HA (opt6)
aggagagggcgcuuggcuugcaaggacccugagcugcggcauugaagcacacccaacccaacucgacugaagucagccucacugaaccggaucugagaaucuucucucucugggcuugccagggcucuccgaaccuagcuagcauccucuucaauuccaacuagaaagcuuaccaugaaauggguaacauuuauaucacuacuuuuccuauucucaucagcauacucacucuuccaagaauaucaaugcuauggauccucaucaaacacaagaguacucaacgaauuaaacuacgauaaugccggaacaaaccuauauaacgaacuagaaaugaacuacuacggaaaacaagaaaauugguacucauuaaaaaaaaacuccagaucccuuggagaaaacgacgauggaaacaacgaagauaacgaaaaauuaagaaaaccaaaacacaaaaaauugaaacaaccagcagacgguaacccagacccaaacgccaacccaaacguagacccaaacgcgaauccaaacgucgacccaaacgcaaaucccaacguagacccaaaugcaaauccaaaugccaauccaaacgcaaacccaaacgcaaacccaaaugcaaacccaaacgccaacccaaacgcaaauccaaacgcaaacccaaacgcaaacccaaacgccaacccaaacgccaaccccaaugcaaacccaaaugcaaacccaaacgcaaacccaaacgcaaauccaaacgcaaacccaaacgccaacccaaacguagacccaaacgcaaauccaaacgcaaacccaaacgccaauccaaacgcaaacccaaacgccaacccaaaugcaaaucccaacgcaaacccaaacgcaaauccaaaugcaaaccccaacgcaaauccaaacgcaaacccaaacgcaaauccaaacgcaaauccaaaugcaaacccaaacgcaaacccuaaugcaaacccaaacgcaaacccaaacgccaacccaaacaaaaacaaccaaggaaacggacaaggucacaauaugccaaaugacccaaaccgaaacguagacgaaaacgcaaaugccaauagcgcaguaaaaaacaauaacaacgaagaaccuucagauaaacacauaaaagaauaccuaaacaaaauacaaaacucccuaucaacagaauggucaccuuguucagucacauguggaaacggaauacaaguaagaauaaaaccaggaucagcaaacaaaccaaaagacgaacuagauuacgcaaacgauauagaaaaaaaaauauguaaaauggaaaaaugcuccucagucuucaacguagucaacaguuccaaacuagaaucaaccagaaucuaccaaauacuagcaauauauuccacaguagcaagcucacucguauuaguagucucccuaggagcaauaucauucuggaugugcucaaacggaagcuuacaaugccgaauauguauauaaggacuagucccuguucccagagcccacuuuuuuuucuuuuuuugaaauaaaauagccugucuuucagaucucaaaggcucuuuucagagccaccaaaaaaaaaaaaaaaaaaaaaaaaaaaaaaaaaaaaaaaaaaaaaaaaaaaaaaaaaaaaaaaaaaaaaaaaaaaaaaaaaaaaaaaaaaaaaaaaaaaaa

SEQ ID NO: 8460 - RNA, 1374 nt, Artificial Sequence
  mRNA Design a-3 (hSL-A100) comprising derived and/or modified sequence from Pf(3D7)__XP_001351122.1__HsALB_Pf-CSP(82-397) (opt6)
aggagagggcgcuuggcuugcaaggacccugagcugcggcauugaagcacacccaacccaacucgacugaagucagccucacugaaccggaucugagaaucuucucucucugggcuugccagggcucuccgaaccuagcuagcauccucuucaauuccaacuagaaagcuuaccaugaaauggguaacauucauaucacuacuauuccucuucaguucagccuauagcgauaacgaaaaacuaagaaaaccaaaacacaaaaaacucaaacaaccagcagacggaaacccagacccaaacgcaaacccaaacguagacccaaacgcaaacccaaacguagacccaaacgcaaauccaaacguagacccaaaugcaaaccccaacgcaaacccaaacgcaaacccaaacgcaaacccaaacgcaaacccaaaugcgaacccaaaugcaaauccaaacgcaaacccaaacgcaaacccaaacgcaaacccaaacgcuaacccaaacgcaaacccaaacgcaaacccaaaugcaaacccaaacgcaaacccaaacgcaaaccccaacgcaaacccaaacguagacccaaacgcaaacccaaacgcaaacccaaacgcaaacccaaacgccaacccaaaugccaacccaaacgcaaacccaaaugcaaaccccaacgcaaacccaaacgccaacccaaacgcaaacccaaacgcaaacccaaacgcaaaccccaaugcaaacccaaacgcaaacccaaaugcaaauccaaacgcaaacccaaacgcaaacccaaacgcaaacccaaacaaaaacaaccaaggaaacggacaaggacacaacaugccaaacgacccaaaucgaaacgucgaugaaaacgccaacgcaaacucagcaguaaaaaacaacaacaacgaagaaccaucugacaaacacauaaaagaauaccuaaacaaaauacaaaacucauuauccaccgaauggucaccauguucaguaacaugcggcaacggaauacaagucagaauaaaaccaggcucagcaaauaaaccaaaagacgaacuagacuacgcaaacgacauagaaaaaaaaauaugcaaaauggaaaaauguucaucagucuucaacguaguaaacucaucaauaggacucauaaugguacuaucauuccuauucuuaaacuaaggacuagucccuguucccagagcccacuuuuuuuucuuuuuuugaaauaaaauagccugucuuucagaucucaaaggcucuuuucagagccaccaaaaaaaaaaaaaaaaaaaaaaaaaaaaaaaaaaaaaaaaaaaaaaaaaaaaaaaaaaaaaaaaaaaaaaaaaaaaaaaaaaaaaaaaaaaaaaaaaaaaa

SEQ ID NO: 8461 - RNA, 726 nt, Artificial Sequence
  mRNA Design a-3 (hSL-A100) comprising derived and/or modified sequence from Pf(3D7)__XP_001351122.1__HsALB_Pf-CSP(93-192) (opt6)
aggagagggcgcuuggcuugcaaggacccugagcugcggcauugaagcacacccaacccaacucgacugaagucagccucacugaaccggaucugagaaucuucucucucugggcuugccagggcucuccgaaccuagcuagcauccucuucaauuccaacuagaaagcuuaccaugaaauggguaacauucaucucacuacuauuccuauucucaagcgcauacucaaaacuaaaacaaccagcagacggaaacccagacccaaacgcaaacccaaacguagacccaaacgcaaacccaaacguagacccaaacgcaaacccaaacguagacccaaacgcaaacccaaacgcaaacccaaacgcaaacccaaacgcaaacccaaacgcaaacccaaacgcaaacccaaacgcaaacccaaacgcaaacccaaacgcaaacccaaacgcaaacccaaacgcaaacccaaacgcaaacccaaacgcaaacccaaacgcaaacccaaacgcaaacccaaacgcaaacccauaaggacuagucccuguucccagagcccacuuuuuuuucuuuuuuugaaauaaaauagccugucuuucagaucucaaaggcucuuuucagagccaccaaaaaaaaaaaaaaaaaaaaaaaaaaaaaaaaaaaaaaaaaaaaaaaaaaaaaaaaaaaaaaaaaaaaaaaaaaaaaaaaaaaaaaaaaaaaaaaaaaaaa

SEQ ID NO: 8462 - RNA, 966 nt, Artificial Sequence
  mRNA Design a-3 (hSL-A100) comprising derived and/or modified sequence from Pf(3D7)__XP_001351122.1__HsALB_Pf-CSP(93-272) (opt6)
aggagagggcgcuuggcuugcaaggacccugagcugcggcauugaagcacacccaacccaacucgacugaagucagccucacugaaccggaucugagaaucuucucucucugggcuugccagggcucuccgaaccuagcuagcauccucuucaauuccaacuagaaagcuuaccaugaaaugggucacauucauaucacuccuauuccuauucucaagcgcauacucaaaacuaaaacaaccagcagacggaaacccagacccaaacgcaaacccaaacguagacccaaacgcaaacccaaacguagacccaaacgcaaacccaaacguagacccaaacgcaaacccaaacgcaaacccaaacgccaacccaaacgcaaacccaaacgcaaacccaaacgcaaacccaaacgcaaacccaaacgcaaacccaaacgcaaacccaaacgcaaacccaaacgcaaacccaaacgcaaacccaaacgcaaauccaaacgcaaacccaaacgccaacccaaacgcaaacccaaacgcaaacccaaacguagacccaaacgcaaacccaaacgcaaacccaaacgcaaacccaaacgcaaacccaaacgcaaacccaaacgcaaacccaaacgcaaacccaaacgcaaacccaaacgcaaauccaaacgcaaacccaaacgcaaacccaaacgcaaacccaaacgcaaacccaaacgcaaacccaaacgcaaacccaaacgcaaacccaaacgcaaacccaaacgcaaacccauaaggacuagucccuguucccagagcccacuuuuuuuucuuuuuuugaaauaaaauagccugucuuucagaucucaaaggcucuuuucagagccaccaaaaaaaaaaaaaaaaaaaaaaaaaaaaaaaaaaaaaaaaaaaaaaaaaaaaaaaaaaaaaaaaaaaaaaaaaaaaaaaaaaaaaaaaaaaaaaaaaaaaa

SEQ ID NO: 8463 - RNA, 1341 nt, Artificial Sequence
  mRNA Design a-3 (hSL-A100) comprising derived and/or modified sequence from Pf(3D7)__XP_001351122.1__HsALB_Pf-CSP(93-397) (opt6)
aggagagggcgcuuggcuugcaaggacccugagcugcggcauugaagcacacccaacccaacucgacugaagucagccucacugaaccggaucugagaaucuucucucucugggcuugccagggcucuccgaaccuagcuagcauccucuucaauuccaacuagaaagcuuaccaugaaauggguaacauucauaucacuccuauuccuauucucaucagcauacucaaaacuaaaacaacccgcagacggaaacccagacccaaacgccaacccaaacguagacccaaacgcaaacccgaacguagacccaaacgcaaaccccaacguagacccaaacgcaaacccaaaugcaaacccaaacgcaaacccaaacgcaaacccaaacgcaaacccaaacgcaaacccaaacgcaaacccaaacgcaaacccaaacgcaaacccaaacgcgaaucccaacgcaaauccaaacgcaaacccaaacgcaaauccaaacgcaaacccgaacgcaaacccaaacgcaaacccaaacgcaaacccaaacguagauccaaacgcaaauccaaacgcaaacccaaacgcaaauccaaacgcaaacccaaacgcaaacccaaacgcaaaccccaacgcaaacccaaacgcaaacccaaacgcaaacccaaacgcaaauccaaacgccaacccaaacgcaaacccaaacgcaaacccaaacgcgaacccaaacgcgaacccaaacgcaaacccaaacgcaaacccaaacgcaaacccaaacaaaaacaaccaagggaacggacaaggacacaacaugccaaacgauccaaacagaaacguagacgaaaacgcaaacgcaaacucagcaguaaaaaacaacaacaacgaagaaccaucagacaaacacauaaaagaauaccuaaacaaaauacaaaacucacucucaacagaauggucaccaugcaguguaacaugcggaaauggaauacaaguacguauaaaaccaggaucagcaaacaaaccaaaagacgaauuagacuacgccaacgauauagaaaaaaaaauaugcaaaauggaaaaaugcagcucagucuucaacguagucaacagcucaauaggacuaauaaugguccucucauucuuauuucuaaacugaggacuagucccuguucccagagcccacuuuuuuuucuuuuuuugaaauaaaauagccugucuuucagaucucaaaggcucuuuucagagccaccaaaaaaaaaaaaaaaaaaaaaaaaaaaaaaaaaaaaaaaaaaaaaaaaaaaaaaaaaaaaaaaaaaaaaaaaaaaaaaaaaaaaaaaaaaaaaaaaaaaaa

SEQ ID NO: 8464 - RNA, 711 nt, Artificial Sequence
  mRNA Design a-3 (hSL-A100) comprising derived and/or modified sequence from Pf(3D7)__XP_001351122.1__HsALB_Pf-CSP(98-192) (opt6)
aggagagggcgcuuggcuugcaaggacccugagcugcggcauugaagcacacccaacccaacucgacugaagucagccucacugaaccggaucugagaaucuucucucucugggcuugccagggcucuccgaaccuagcuagcauccucuucaauuccaacuagaaagcuuaccaugaaauggguaacauucauaagccuacuauuccuauucagcucagcauacagcgcagacggaaacccagacccaaacgcaaacccaaacguagacccaaacgcaaacccaaacguagacccaaacgcaaacccaaacguagacccaaacgcaaacccaaacgcaaacccaaacgcaaacccaaacgcaaacccaaacgcaaacccaaacgcaaacccaaacgcaaacccaaacgcaaacccaaacgcaaacccaaacgcaaacccaaacgcaaacccaaacgcaaacccaaacgcaaacccaaacgcaaacccaaacgcaaacccaaacgcaaacccauaaggacuagucccuguucccagagcccacuuuuuuuucuuuuuuugaaauaaaauagccugucuuucagaucucaaaggcucuuuucagagccaccaaaaaaaaaaaaaaaaaaaaaaaaaaaaaaaaaaaaaaaaaaaaaaaaaaaaaaaaaaaaaaaaaaaaaaaaaaaaaaaaaaaaaaaaaaaaaaaaaaaaa

SEQ ID NO: 8465 - RNA, 951 nt, Artificial Sequence
  mRNA Design a-3 (hSL-A100) comprising derived and/or modified sequence from Pf(3D7)__XP_001351122.1__HsALB_Pf-CSP(98-272) (opt6)
aggagagggcgcuuggcuugcaaggacccugagcugcggcauugaagcacacccaacccaacucgacugaagucagccucacugaaccggaucugagaaucuucucucucugggcuugccagggcucuccgaaccuagcuagcauccucuucaauuccaacuagaaagcuuaccaugaaauggguaacauucauaucacuacuauuccuauucagcucagccuacagcgcagacggaaacccagacccaaacgcaaacccaaacguagacccaaacgcaaacccaaacgucgacccaaacgcaaacccaaacguagacccaaacgcaaacccaaacgcaaacccaaacgcaaacccaaacgcaaacccaaacgcaaacccaaacgcaaacccaaacgcaaacccaaacgcaaacccaaacgcaaacccaaacgcaaacccaaacgcaaacccaaacgcaaacccaaacgcaaacccaaacgcaaacccaaacgcaaacccaaacgcaaacccaaacgcaaacccaaacguagacccaaaugcaaacccaaacgcaaacccaaacgcaaacccaaacgcaaacccaaacgcaaacccaaacgcaaacccaaacgcaaacccaaacgcaaacccaaacgcaaacccaaacgcaaacccaaacgcaaacccaaacgcgaacccaaacgcaaacccaaacgcaaacccaaacgcaaacccaaacgcaaacccaaaugcaaacccaaacgcaaacccauaaggacuagucccuguucccagagcccacuuuuuuuucuuuuuuugaaauaaaauagccugucuuucagaucucaaaggcucuuuucagagccaccaaaaaaaaaaaaaaaaaaaaaaaaaaaaaaaaaaaaaaaaaaaaaaaaaaaaaaaaaaaaaaaaaaaaaaaaaaaaaaaaaaaaaaaaaaaaaaaaaaaaa

SEQ ID NO: 8466 - RNA, 1257 nt, Artificial Sequence
  mRNA Design a-3 (hSL-A100) comprising derived and/or modified sequence from Pf(3D7)__XP_001351122.1__HsALB_Pf-CSP(98-374) (opt6)
aggagagggcgcuuggcuugcaaggacccugagcugcggcauugaagcacacccaacccaacucgacugaagucagccucacugaaccggaucugagaaucuucucucucugggcuugccagggcucuccgaaccuagcuagcauccucuucaauuccaacuagaaagcuuaccaugaaaugggucacauucauaucccuacuauuccuauucucaucagcauauucagcagauggaaacccagacccaaacgccaacccaaacguagacccaaacgcaaacccaaacguagacccaaacgcaaacccaaacguagacccaaacgcaaacccaaacgcaaacccaaacgcaaacccaaacgcaaacccaaacgcaaacccaaacgcaaacccaaacgcaaacccaaacgcaaacccaaacgcaaacccaaacgcaaacccaaacgcaaacccaaaugcaaauccaaacgcaaauccaaacgcaaacccaaacgccaacccaaacgcaaauccaaacgcaaacccaaacguagacccgaacgcaaacccgaacgcaaacccaaacgcaaacccaaaugcaaacccaaacgcaaacccaaacgccaacccaaacgcaaacccaaacgcaaacccaaaugcaaacccaaacgcaaacccaaacgccaacccaaacgcaaacccaaacgcaaacccaaacgcaaacccaaacgcaaacccaaaugcaaacccaaacgcaaacccaaacgcaaacccaaacaaaaacaaccaaggaaauggacaaggccacaacaugccaaacgacccaaacagaaacguagacgaaaacgcaaacgcaaacuccgcagucaaaaacaacaacaacgaagaaccauccgacaaacacauaaaagaauaccucaauaaaauacaaaacucacuaucaacagaaugguccccaugcucaguaacaugcggaaacggaauacaaguaagaauaaaaccaggauccgcaaacaaaccaaaagacgaacuagacuacgcaaacgauauagaaaaaaaaauaugcaaaauggaaaaaugcuaaggacuagucccuguucccagagcccacuuuuuuuucuuuuuuugaaauaaaauagccugucuuucagaucucaaaggcucuuuucagagccaccaaaaaaaaaaaaaaaaaaaaaaaaaaaaaaaaaaaaaaaaaaaaaaaaaaaaaaaaaaaaaaaaaaaaaaaaaaaaaaaaaaaaaaaaaaaaaaaaaaaaa

SEQ ID NO: 8467 - RNA, 1326 nt, Artificial Sequence
  mRNA Design a-3 (hSL-A100) comprising derived and/or modified sequence from Pf(3D7)__XP_001351122.1__HsALB_Pf-CSP(98-397) (opt6)
aggagagggcgcuuggcuugcaaggacccugagcugcggcauugaagcacacccaacccaacucgacugaagucagccucacugaaccggaucugagaaucuucucucucugggcuugccagggcucuccgaaccuagcuagcauccucuucaauuccaacuagaaagcuuaccaugaaauggguaaccuucauaucauuacuauuccuuuucagcucggcauacucagcagacggcaacccagacccaaacgcaaacccaaacgucgacccaaaugcgaacccaaacguagacccaaacgcaaacccaaacguagauccaaacgcaaacccaaacgcaaacccaaacgcaaacccaaacgcaaacccaaacgccaacccaaaugcaaacccaaacgcaaaccccaacgcaaacccaaacgcaaacccaaacgcaaacccaaacgcaaaucccaacgcaaauccaaacgcaaacccaaaugcaaacccaaacgccaacccaaacgcaaacccaaacgcaaaccccaaugucgacccaaacgcaaacccaaacgcaaacccaaacgcaaacccaaacgcaaauccaaacgcaaaccccaacgcaaacccaaacgcaaacccaaacgcaaacccaaacgcaaacccaaacgcaaacccaaacgcaaacccaaacgcaaacccaaacgcaaacccaaacgcaaacccaaacgcaaauccaaacgcaaacccaaacgcaaacccaaacgcaaacccaaacaaaaacaaccaaggaaauggacaaggacacaacaugccaaaugaccccaacagaaacgucgacgaaaacgccaacgcaaacagcgcaguaaaaaacaacaacaaugaagaaccaucagacaaacacauaaaagaauaccuaaacaaaauucaaaacucacuaucaaccgaaugguccccaugcucaguaacaugcggaaacgguauacaaguacgaauaaaaccaggaucagcaaacaaaccaaaagacgaacuagacuacgcaaacgacauagaaaaaaaaauaugcaaaauggaaaaaugcucaucaguuuuuaacguagucaauagcucaaucggacucauaaugguacuaucauuucucuuccuaaauuaaggacuagucccuguucccagagcccacuuuuuuuucuuuuuuugaaauaaaauagccugucuuucagaucucaaaggcucuuuucagagccaccaaaaaaaaaaaaaaaaaaaaaaaaaaaaaaaaaaaaaaaaaaaaaaaaaaaaaaaaaaaaaaaaaaaaaaaaaaaaaaaaaaaaaaaaaaaaaaaaaaaaa

SEQ ID NO: 8468 - RNA, 1653 nt, Artificial Sequence
  mRNA Design a-3 (hSL-A100) comprising derived and/or modified sequence from Pf(3D7)__XP_001351122.1__HsALB_Pf-CSP(199-377)_L(PVTN)_HBsAg (opt6)
aggagagggcgcuuggcuugcaaggacccugagcugcggcauugaagcacacccaacccaacucgacugaagucagccucacugaaccggaucugagaaucuucucucucugggcuugccagggcucuccgaaccuagcuagcauccucuucaauuccaacuagaaagcuuaccaugaaauggguaacauuuauauccuuacuauuucucuucuccucagcuuacucugacccaaacgcaaaucccaacgcaaacccaaaugcaaacccaaacgcaaauccaaacgcaaacccaaaugcuaaucccaacgcaaacccaaacgcaaaccccaaugccaacccaaacgcuaacccaaacgcaaacccaaacgccaacccaaaugcaaacccaaacgcaaacccaaacgcaaauccaaaugcaaacccaaacgcaaauccaaacgcaaacccaaacaaaaacaaccaaggaaacggacaaggccauaauaugccuaaugaccccaacagaaacguagacgaaaaugcuaacgccaacucagcaguaaaaaacaacaauaacgaagaaccaucagauaaacacauaaaagaauacuuaaacaaaauacaaaauucauuaucaacagaauggucaccaugcucagucaccugcggaaacgguauacaaguacgcauaaaaccaggcucagcaaauaaaccaaaagacgaacuagauuacgcuaacgacauagaaaaaaaaauaugcaaaauggaaaaaugcucaucaguaccaguaacaaauauggaaaacauaacaucaggauuccuaggcccacucuuaguacuacaagcaggauuuuuucuucuaacaagaaucuuaacuauaccccaaucacucgacucaugguggaccucacuaaauuuccucggaggaucuccaguaugccucggacaaaauucacaaucaccaacauccaaucacucacccaccuccugcccaccaaucugcccaggauacagauggaugugcuuacgaagauucauaauauuccuauucauacuacuucuaugcuuaauauuccuucucguccuacucgacuaucaaggaaugcucccuguaugcccacucauaccaggauccacaacaacuaacacaggacccuguaaaacaugcacaacacccgcccaaggaaauucaauguuccccucuugcugcugcacaaaaccaacagacggaaauugcacaugcauuccaauuccaucaucuugggcauuugcaaaauacuuaugggaaugggcaucaguccgauucucgugguuaucuuuacuaguaccauucguucaaugguuuguaggacuuucaccuacaguaugguuaucugcaauauggaugaugugguacuggggaccaucauuauacucaaucguaucaccauuuauaccacuacuacccauauuuuucugccuauggguauacauauaaggacuagucccuguucccagagcccacuuuuuuuucuuuuuuugaaauaaaauagccugucuuucagaucucaaaggcucuuuucagagccaccaaaaaaaaaaaaaaaaaaaaaaaaaaaaaaaaaaaaaaaaaaaaaaaaaaaaaaaaaaaaaaaaaaaaaaaaaaaaaaaaaaaaaaaaaaaaaaaaaaaaa

SEQ ID NO: 8469 - RNA, 1563 nt, Artificial Sequence
  mRNA Design a-3 (hSL-A100) comprising derived and/or modified sequence from Pf(3D7)__XP_001351122.1__Pf-CSP (opt11)
aggagagggcgcuuggcuugcaaggacccugagcugcggcauugaagcacacccaacccaacucgacugaagucagccucacugaaccggaucugagaaucuucucucucugggcuugccagggcucuccgaaccuagcuagcauccucuucaauuccaacuagaaagcuuaccaugaugcgaaagcuugcgauccucagcgucuccucauuccuauucguagaagcacuauuccaagaauaccaaugcuacggcucauccucaaacacacgcguacucaacgaacucaacuacgacaacgcaggaacaaaccucuacaacgaacuagagaugaacuacuacggcaaacaagaaaacugguacucucucaaaaaaaacucacgaagccucggcgagaacgacgacggaaacaacgaagacaacgaaaaacuccgcaaaccaaaacacaaaaaacucaaacaacccgccgacggaaacccagacccaaacgcaaacccaaacguagacccaaacgccaaccccaacguagaccccaacgccaacccuaacgucgaccccaaugcaaaccccaacgcgaacccaaacgcaaaccccaacgcaaaccccaacgcaaacccaaacgccaaccccaacgcaaacccaaacgcaaacccuaacgccaacccaaacgccaacccaaacgccaacccaaacgcaaacccgaacgccaaccccaacgccaacccaaacgcaaacccaaacgcaaaccccaacgccaaccccaacguagaccccaacgcaaaccccaacgcaaacccaaacgccaaccccaacgccaaccccaacgccaaccccaacgccaaccccaaugccaacccaaacgcgaaccccaacgcaaacccgaacgcaaacccaaacgcgaacccaaacgcgaacccaaacgccaaccccaacgccaaccccaacgcaaacccaaacgcgaacccaaacgcaaaccccaacgccaacccaaacaaaaacaaccaaggaaacggacaaggccacaacaugccaaacgaccccaaccgcaacguagacgaaaacgccaacgccaacuccgcugucaagaacaacaacaacgaagaaccauccgacaaacacauaaaagaauaccuaaacaaaauccaaaacucccucucaaccgaauggucccccugcuccgucacaugcggaaacggcauccaaguccgaaucaaaccaggcuccgccaacaaacccaaagacgaacuggacuacgccaacgacaucgaaaaaaaaaucugcaaaauggaaaaaugcucauccgucuucaacguggucaacuccuccaucggacuaauaaugguccucuccuuccuauuccuaaacuaaggacuagucccuguucccagagcccacuuuuuuuucuuuuuuugaaauaaaauagccugucuuucagaucucaaaggcucuuuucagagccaccaaaaaaaaaaaaaaaaaaaaaaaaaaaaaaaaaaaaaaaaaaaaaaaaaaaaaaaaaaaaaaaaaaaaaaaaaaaaaaaaaaaaaaaaaaaaaaaaaaaaa

SEQ ID NO: 8470 - RNA, 1494 nt, Artificial Sequence
  mRNA Design a-3 (hSL-A100) comprising derived and/or modified sequence from Pf(3D7)__XP_001351122.1__Pf-CSP(1-374) (opt11)
aggagagggcgcuuggcuugcaaggacccugagcugcggcauugaagcacacccaacccaacucgacugaagucagccucacugaaccggaucugagaaucuucucucucugggcuugccagggcucuccgaaccuagcuagcauccucuucaauuccaacuagaaagcuuaccaugaugcgcaaacucgcaauccucuccgucucaucguuccuauucguagaagcacucuuccaagaauaccaaugcuacggcucaagcuccaacacaagaguacucaacgaacucaacuacgacaaugccggaacaaaccuauacaacgagcuagaaaugaacuacuacggcaaacaagaaaacugguacucgcuaaaaaaaaacagcagaagccuaggugaaaacgacgacggaaacaacgaagacaacgaaaaacugcgcaaaccaaaacacaaaaaacuaaaacaacccgcagacggcaacccagacccaaacgcaaacccaaacguagaccccaacgccaacccaaacguagacccaaacgccaacccaaacguagacccaaacgcaaacccgaacgcaaacccaaacgcaaacccaaacgcaaacccaaacgcaaacccaaacgccaaccccaacgcaaauccaaacgcaaaccccaacgcaaaccccaacgccaacccaaacgcaaaccccaacgcgaacccaaacgccaaccccaacgccaacccaaacgcaaacccaaacgcaaacccaaacgccaaccccaacgucgacccaaacgccaacccaaacgcaaaccccaacgccaaccccaacgcaaacccaaacgccaacccgaacgcaaacccgaacgcaaacccaaacgcaaaccccaacgcaaaccccaacgcaaacccaaacgcaaaccccaacgccaaccccaacgccaaccccaacgcaaacccaaacgcaaacccgaacgcaaaccccaacgcaaaccccaacgccaaucccaacaaaaacaaccaaggcaacggacaaggacacaacaugccaaacgaccccaaccgcaacgucgacgaaaacgccaacgccaacuccgcggucaaaaacaacaacaacgaagagcccucagacaaacacauaaaagaauaccuaaacaaaauccaaaacucccucucgacagaauggucccccugcagcgucaccugcggaaacggcauacaaguacgaauaaaacccggcucagccaacaaaccaaaagacgaacuagacuacgccaacgacauagaaaaaaaaauaugcaaaauggaaaaaugcugaggacuagucccuguucccagagcccacuuuuuuuucuuuuuuugaaauaaaauagccugucuuucagaucucaaaggcucuuuucagagccaccaaaaaaaaaaaaaaaaaaaaaaaaaaaaaaaaaaaaaaaaaaaaaaaaaaaaaaaaaaaaaaaaaaaaaaaaaaaaaaaaaaaaaaaaaaaaaaaaaaaaa

SEQ ID NO: 8471 - RNA, 1347 nt, Artificial Sequence
  mRNA Design a-3 (hSL-A100) comprising derived and/or modified sequence from Pf(3D7)__XP_001351122.1__Pf-CSP(1-325) (opt11)
aggagagggcgcuuggcuugcaaggacccugagcugcggcauugaagcacacccaacccaacucgacugaagucagccucacugaaccggaucugagaaucuucucucucugggcuugccagggcucuccgaaccuagcuagcauccucuucaauuccaacuagaaagcuuaccaugaugcgcaaacucgcaauccuaucaguaagcucauuccuguucguagaagcacuauuccaagaauaccaaugcuacggcucauccucaaacacaagaguacuaaacgaacuaaacuacgacaacgccggaaccaaccuauacaacgaacucgaaaugaacuacuacggcaaacaagaaaacugguacucacuaaagaaaaacagcagaagccucggcgaaaacgacgacggcaacaacgaagacaacgagaaacugagaaaaccaaaacacaagaaacuaaaacaacccgcggacgggaacccagacccaaaugcaaacccaaacgucgacccaaacgcaaacccaaacguagacccaaacgcaaaccccaacguagaccccaacgcaaacccaaacgcaaacccaaacgcaaacccaaacgcaaacccaaacgcaaaccccaacgcaaacccaaacgcaaacccaaacgcaaaccccaacgccaacccaaacgccaaccccaacgcaaacccaaacgcaaacccaaacgcaaaccccaacgccaacccgaacgcaaacccaaacgcaaacccaaacgcaaaccccaacguagacccaaacgcaaacccaaacgccaaccccaacgcaaacccaaacgcaaacccgaacgcaaaccccaacgcaaaccccaacgcaaacccaaacgcaaaccccaacgcaaauccaaacgcaaacccaaacgcaaacccaaacgccaacccaaacgcaaaucccaacgcaaacccaaacgcaaaccccaacgcaaacccaaacgcaaacccaaacgcaaacccaaacaaaaacaaccaaggaaacggccaaggacacaacaugccaaacgacccaaaccgaaacguagacgaaaacgccaacgccaacagcgcagucaaaaacaacaauaaugaagaacccuccgacaaacacauaaaagaauaccuaaacaaaauccaaaacugaggacuagucccuguucccagagcccacuuuuuuuucuuuuuuugaaauaaaauagccugucuuucagaucucaaaggcucuuuucagagccaccaaaaaaaaaaaaaaaaaaaaaaaaaaaaaaaaaaaaaaaaaaaaaaaaaaaaaaaaaaaaaaaaaaaaaaaaaaaaaaaaaaaaaaaaaaaaaaaaaaaaa

SEQ ID NO: 8472 - RNA, 1563 nt, Artificial Sequence
  mRNA Design a-3 (hSL-A100) comprising derived and/or modified sequence from Pf(3D7)__XP_001351122.1__HsALB_Pf-CSP(19-397) (opt11)
aggagagggcgcuuggcuugcaaggacccugagcugcggcauugaagcacacccaacccaacucgacugaagucagccucacugaaccggaucugagaaucuucucucucugggcuugccagggcucuccgaaccuagcuagcauccucuucaauuccaacuagaaagcuuaccaugaaaugggucaccuucauaucccuccuauuccucuucucaucagccuacucccucuuccaggaauaccaaugcuacggaucguccucaaacacuagaguacucaaugaauuaaacuacgacaacgccggcaccaaccucuacaacgaacucgaaaugaacuacuacggaaaacaagaaaacugguacucacucaaaaaaaacucucgaucccucggcgaaaacgacgacggcaacaacgaagacaacgagaaacuacgcaaaccaaaacacaaaaaauuaaaacaacccgccgacggcaaccccgaccccaacgccaaccccaacguagaccccaacgcgaaccccaacgucgacccaaacgccaaccccaacguggaccccaacgccaacccaaacgccaaccccaacgccaacccaaacgcaaaccccaacgccaacccaaacgccaaccccaacgcaaacccaaacgcgaacccaaacgcaaacccaaacgccaacccaaacgcaaacccaaacgcgaacccaaacgccaacccaaacgccaaccccaacgcaaacccaaacgccaacccaaacgccaacccaaacguagacccaaacgcgaaccccaacgcuaacccaaacgcaaacccaaacgccaacccaaacgccaacccuaacgcaaacccaaacgccaaccccaacgccaaccccaacgccaaccccaacgcaaacccaaacgccaacccaaacgccaaccccaacgccaacccaaacgcaaacccaaacgcaaacccaaacgcaaaccccaacgccaacccaaacgccaacccaaacaaaaauaaccaaggcaaugggcaaggccacaacaugccaaacgaccccaaccgcaaugucgacgaaaacgccaacgccaacucugcaguaaaaaacaauaacaacgaagaacccucagacaaacacaucaaagaauaccucaacaagauccaaaauucccucuccacagaauggucccccugcagcguaaccugcggcaacggcauccaaguccgcaucaaacccggcuccgccaacaaaccgaaagacgaacuagacuacgccaacgacauagaaaaaaaaaucugcaaaauggaaaaaugcagcuccgucuucaacgucgucaacagcuccaucggccucaucaugguccucuccuuccuguuccucaacuaaggacuagucccuguucccagagcccacuuuuuuuucuuuuuuugaaauaaaauagccugucuuucagaucucaaaggcucuuuucagagccaccaaaaaaaaaaaaaaaaaaaaaaaaaaaaaaaaaaaaaaaaaaaaaaaaaaaaaaaaaaaaaaaaaaaaaaaaaaaaaaaaaaaaaaaaaaaaaaaaaaaaa

SEQ ID NO: 8473 - RNA, 1581 nt, Artificial Sequence
  mRNA Design a-3 (hSL-A100) comprising derived and/or modified sequence from Pf(3D7)__XP_001351122.1__HsIns-iso1_Pf-CSP(19-397) (opt11)
aggagagggcgcuuggcuugcaaggacccugagcugcggcauugaagcacacccaacccaacucgacugaagucagccucacugaaccggaucugagaaucuucucucucugggcuugccagggcucuccgaaccuagcuagcauccucuucaauuccaacuagaaagcuuaccauggcacucuggaugagacuccucccccuccucgcacuccucgcccuauggggcccagacccagcggcagcccucuuccaagaauaccaaugcuacggcucauccuccaacacccgaguccucaaugaacuaaacuacgacaacgccggcaccaaccuauacaacgaacuagaaaugaacuacuacggcaaacaagaaaacugguacucccucaaaaaaaauucacgcucccuaggugagaacgacgacggaaacaacgaagacaacgaaaaacuccgaaaacccaaacacaaaaaacuaaaacaaccagcagacggcaaccccgaccccaacgcaaaccccaacguagacccaaacgcgaaccccaacgucgauccaaacgccaacccaaacguugaccccaacgcgaaccccaacgcaaacccaaacgcaaacccuaacgcgaaccccaacgcaaaccccaacgccaaccccaacgccaaccccaacgccaacccaaacgcaaaccccaacgccaaccccaacgcaaacccaaacgcaaacccgaacgcaaaccccaacgccaacccaaacgcaaacccaaacgccaacccaaacgcaaaccccaacguagacccaaacgccaaucccaacgcgaaccccaacgcaaacccaaacgcgaacccaaacgccaacccaaacgcaaacccgaacgccaacccaaacgccaaccccaacgcaaaccccaacgcaaacccaaacgccaacccaaacgcaaacccaaacgcaaaccccaacgccaaccccaacgcaaacccaaaugccaaccccaacgccaaccccaacgcaaacccaaacaaaaacaaccaaggaaacggccaaggccacaacaugccgaacgaccccaaccgaaacgucgacgaaaacgcaaacgccaacucagcggucaaaaacaacaacaacgaagaacccucagacaaacacaucaaagaauaccuaaacaagauccagaacucucucucaacagaauggucccccugcuccguaacaugcggcaacggcauccaaguacgaaucaaaccgggaucagccaauaaacccaaagacgaacucgacuacgccaacgacaucgaaaaaaaaauaugcaaaauggaaaaaugcagcucagucuucaacguagucaacagcuccauaggccucaucaugguacucuccuuccuguuccuaaacuaaggacuagucccuguucccagagcccacuuuuuuuucuuuuuuugaaauaaaauagccugucuuucagaucucaaaggcucuuuucagagccaccaaaaaaaaaaaaaaaaaaaaaaaaaaaaaaaaaaaaaaaaaaaaaaaaaaaaaaaaaaaaaaaaaaaaaaaaaaaaaaaaaaaaaaaaaaaaaaaaaaaaa

SEQ ID NO: 8474 - RNA, 1560 nt, Artificial Sequence
  mRNA Design a-3 (hSL-A100) comprising derived and/or modified sequence from Pf(3D7)__XP_001351122.1__HsSPARC_Pf-CSP(19-397) (opt11)
aggagagggcgcuuggcuugcaaggacccugagcugcggcauugaagcacacccaacccaacucgacugaagucagccucacugaaccggaucugagaaucuucucucucugggcuugccagggcucuccgaaccuagcuagcauccucuucaauuccaacuagaaagcuuaccaugcgcgccuggauauucuuccuccuaugccuagcaggacgcgcccucgcacucuuccaagaauaccaaugcuacggcucauccucaaacacccgcguacuuaacgaacuaaacuacgacaacgccggaaccaaccuauacaacgaacucgaaaugaacuacuacgguaaacaagaaaacugguacucccucaaaaaaaacagccgaagccuaggagaaaacgacgacggaaacaacgaagacaacgaaaaacugcgcaaacccaaacacaaaaaacucaaacaacccgcagacgggaacccagacccaaacgcaaacccaaacguggacccaaacgccaacccuaacguagaccccaacgcaaaccccaacgucgacccuaaugcaaacccaaacgccaaccccaacgcgaacccaaacgcaaaccccaacgcuaacccgaacgccaaccccaacgccaacccgaacgcaaacccaaacgcaaacccaaacgcgaacccaaacgcaaacccaaacgccaaccccaacgcgaacccaaacgccaauccaaacgccaacccaaacgcaaacccaaacgccaaccccaacguagacccaaacgccaacccaaacgcgaacccaaacgcaaaccccaacgcaaacccaaacgcaaacccaaacgccaacccuaacgcaaacccaaacgccaaccccaacgccaacccaaacgcaaacccaaacgccaacccaaacgccaaccccaacgcaaacccgaacgcaaaccccaacgcaaacccaaacgcaaacccaaacgcgaacccgaacgccaacccaaauaagaacaaccaaggaaacggacaaggccacaacaugccaaacgaccccaaccgcaacgucgacgaaaacgcaaaugccaacuccgcagucaaaaacaacaauaacgaagaacccucggacaaacacaucaaagaauaccucaacaagauccaaaacucacucuccaccgaauggucacccugcagcguaacuugcggcaacggcauccaaguccgcauaaaaccaggcuccgcaaacaaacccaaagacgaacucgacuaugccaacgacaucgaaaaaaaaauaugcaaaauggaaaaaugcagcucagucuucaacguagucaacagcucuaucggacuaauaaugguacucuccuuccuauucuuaaacuaaggacuagucccuguucccagagcccacuuuuuuuucuuuuuuugaaauaaaauagccugucuuucagaucucaaaggcucuuuucagagccaccaaaaaaaaaaaaaaaaaaaaaaaaaaaaaaaaaaaaaaaaaaaaaaaaaaaaaaaaaaaaaaaaaaaaaaaaaaaaaaaaaaaaaaaaaaaaaaaaaaaaa

SEQ ID NO: 8475 - RNA, 1563 nt, Artificial Sequence
  mRNA Design a-3 (hSL-A100) comprising derived and/or modified sequence from Pf(3D7)__XP_001351122.1__IgE_Pf-CSP(19-397) (opt11)
aggagagggcgcuuggcuugcaaggacccugagcugcggcauugaagcacacccaacccaacucgacugaagucagccucacugaaccggaucugagaaucuucucucucugggcuugccagggcucuccgaaccuagcuagcauccucuucaauuccaacuagaaagcuuaccauggacuggacauggauccucuuccucgucgccgcggccacacgcguacacucacucuuccaagaauaucaaugcuacggcucaagcucgaacacgcgcguacucaacgaacuaaacuacgacaacgccggcaccaaccuauacaacgaacucgaaaugaacuacuacggcaaacaagaaaacugguacucacuuaagaaaaauucacgaucccucggagaaaacgacgaugggaacaacgaagacaacgaaaaacuacgcaaacccaaacacaagaaacuuaaacaacccgcagacggcaacccagacccaaacgcaaaccccaacguagaccccaacgcaaacccaaacguagacccaaacgccaacccaaacguagacccaaacgcgaacccaaacgccaacccaaacgccaaccccaacgcaaacccaaacgcaaauccaaacgcaaacccaaaugcaaacccgaacgccaauccaaacgcaaaccccaacgcaaacccaaacgcaaaccccaaugccaacccaaacgcaaaccccaacgcaaaccccaacgcaaaccccaacgcaaacccaaacgcgaacccaaacguagaccccaacgccaaccccaacgccaacccaaacgcaaacccaaacgccaacccaaacgccaaccccaacgcaaaccccaacgcaaacccgaacgcaaacccaaacgcaaacccaaacgcaaacccgaacgcaaacccuaacgcgaaccccaacgccaaccccaacgcaaacccaaacgcaaacccaaacgccaacccaaacgcaaacccaaacgcaaacccaaacaaaaacaaccaaggaaacgggcaaggacauaacaugccgaacgaccccaaccgcaacguagacgaaaacgccaacgccaacagcgcagucaaaaacaacaacaacgaagaacccuccgacaaacacaucaaagaauaccuaaacaaaauccagaacucacuauccaccgaauggucccccugcagcgugaccugcggcaacggcauacaaguccgcauaaaaccaggcuccgccaacaaacccaaagacgaacuagacuacgccaacgacauagaaaagaaaauaugcaaaauggaaaaaugcagcucagucuucaauguagucaacuccuccaucggacucauaaugguccuaucauuccucuuccuaaacuaaggacuagucccuguucccagagcccacuuuuuuuucuuuuuuugaaauaaaauagccugucuuucagaucucaaaggcucuuuucagagccaccaaaaaaaaaaaaaaaaaaaaaaaaaaaaaaaaaaaaaaaaaaaaaaaaaaaaaaaaaaaaaaaaaaaaaaaaaaaaaaaaaaaaaaaaaaaaaaaaaaaaa

SEQ ID NO: 8476 - RNA, 1728 nt, Artificial Sequence
  mRNA Design a-3 (hSL-A100) comprising derived and/or modified sequence from Pf(3D7)__XP_001351122.1__Pf-CSP_L(G4SG4)_TM domain HA (opt11)
aggagagggcgcuuggcuugcaaggacccugagcugcggcauugaagcacacccaacccaacucgacugaagucagccucacugaaccggaucugagaaucuucucucucugggcuugccagggcucuccgaaccuagcuagcauccucuucaauuccaacuagaaagcuuaccaugaugcgcaaacucgccauccucagcgucagcucguuccucuucgucgaagcacuauuccaagaauaccaguguuacggcucauccucaaacacacgcgugcucaacgaacuaaacuacgacaacgccggcaccaaccucuacaacgaacuagaaaugaacuauuacggcaagcaagaaaacugguacucacucaaaaaaaacagccgaagccuaggcgagaacgacgacgggaacaacgaagacaacgaaaaacuacgcaaacccaagcacaaaaaacugaaacaaccagccgacggaaauccagaccccaacgcaaacccgaacguagaccccaacgcgaaccccaacguggacccgaacgcaaacccgaacguagacccaaacgcaaacccaaacgcgaacccaaacgcaaacccaaacgcuaacccaaacgcaaaccccaacgccaaccccaacgcgaacccaaacgcaaacccaaacgcaaacccaaacgcaaacccgaacgcaaacccaaacgccaacccaaacgcgaacccaaacgccaacccaaacgcaaacccaaacgcaaacccaaacgcaaacccaaacguagacccgaacgccaacccgaaugcaaacccaaacgcaaacccgaacgcaaacccaaacgcgaacccgaacgccaacccaaacgcaaacccgaacgcaaaccccaacgccaacccaaacgcaaaccccaacgcaaaccccaacgcaaacccgaacgcaaacccaaacgcaaacccaaacgccaaccccaacgccaaccccaacgcaaacccgaacgccaacccaaacaaaaacaaccaaggcaacgggcaaggacacaacaugccaaacgaccccaaccgaaacgucgacgaaaacgccaacgccaacuccgcagucaaaaacaacaacaacgaagaacccucagacaaacacauaaaagaauaccucaacaaaauccaaaacucacucucaaccgaguggucacccugcagugugaccuguggcaacggaauacaaguacgcauaaaacccggaucagccaacaaaccgaaagacgaacuagacuacgccaacgacauagaaaaaaaaauaugcaaaauggagaaaugcagcucugucuucaacgucgucaacagcucaaucggacucauaaugguccucuccuuccuauuccucaacggcggagggggcucaggcggcggaggaaaauuagaauccaccagaaucuaucagauucucgccauauacagcacagucgcaagcucgcuuguccuugucguaucacuaggcgcaaucucauucuggaugugcuccaacggaagccugcaaugccgcauuugcauauaaggacuagucccuguucccagagcccacuuuuuuuucuuuuuuugaaauaaaauagccugucuuucagaucucaaaggcucuuuucagagccaccaaaaaaaaaaaaaaaaaaaaaaaaaaaaaaaaaaaaaaaaaaaaaaaaaaaaaaaaaaaaaaaaaaaaaaaaaaaaaaaaaaaaaaaaaaaaaaaaaaaaa

SEQ ID NO: 8477 - RNA, 1602 nt, Artificial Sequence
  mRNA Design a-3 (hSL-A100) comprising derived and/or modified sequence from Pf(3D7)__XP_001351122.1__Pf-CSP(199-377)_L(PVTN)_HBsAg (opt11)
aggagagggcgcuuggcuugcaaggacccugagcugcggcauugaagcacacccaacccaacucgacugaagucagccucacugaaccggaucugagaaucuucucucucugggcuugccagggcucuccgaaccuagcuagcauccucuucaauuccaacuagaaagcuuaccauggaccccaacgccaaccccaacgccaaccccaacgccaaucccaacgcuaaccccaacgccaaccccaacgcaaaccccaacgccaacccaaacgccaaccccaacgcaaaccccaacgccaaucccaaugccaaccccaacgccaaccccaacgcgaaccccaacgccaaccccaacgcaaacccaaacgccaaccccaacgccaaccccaacgccaaccccaacaaaaacaaccaaggcaacggccaaggccacaacaugcccaacgaccccaaccgcaacguagacgagaacgccaacgccaacagcgcugucaaaaacaacaacaacgaggaacccuccgacaaacacaucaaagaauaccuuaacaaaauccaaaacucucucuccaccgaguggucccccugcucagucacaugcggcaacggcauacaaguucguaucaaacccggcucagcaaacaaacccaaagacgaacucgacuacgcaaacgacauagaaaagaaaaucugcaaaauggaaaaauguucauccguccccgucaccaacauggaaaacaucacuuccggauuccucgguccccuacucguacuccaagccggcuucuuccuccucacccgcauccucaccaucccccaaucacuugacuccugguggaccucccucaacuuccucggcggcucccccgucugccuaggccaaaacagccaaucccccacuagcaaccacucccccacauccugcccacccaucugccccggauaucgauggaugugccuucgccgauucauaaucuuccucuucauccuccuacucugccucaucuuccuccucguccuucuagauuaccaaggcaugcuccccgucugcccccuuauccccggcuccaccaccacaaacaccggccccugcaaaaccugcacaacccccgcccaaggcaauagcauguuccccuccugcugcugcacuaaaccaacagacggcaacuguaccugcaucccaaucccaucaucaugggccuucgccaaauaccucugggaaugggcaucuguacgauucuccuggcucucccuucucguacccuucguccagugguucgucggccucucccccaccguauggcuauccgccaucuggaugaugugguacuggggccccucccuauacuccaucgucuccccauucauaccacuccuacccaucuucuucugccucugggucuacaucugaggacuagucccuguucccagagcccacuuuuuuuucuuuuuuugaaauaaaauagccugucuuucagaucucaaaggcucuuuucagagccaccaaaaaaaaaaaaaaaaaaaaaaaaaaaaaaaaaaaaaaaaaaaaaaaaaaaaaaaaaaaaaaaaaaaaaaaaaaaaaaaaaaaaaaaaaaaaaaaaaaaaa

SEQ ID NO: 8478 - RNA, 1644 nt, Artificial Sequence
  mRNA Design a-3 (hSL-A100) comprising derived and/or modified sequence from Pf(3D7)__XP_001351122.1__Pf-CSP(199-387)_L(PVTN)_HBsAg (opt11)
aggagagggcgcuuggcuugcaaggacccugagcugcggcauugaagcacacccaacccaacucgacugaagucagccucacugaaccggaucugagaaucuucucucucugggcuugccagggcucuccgaaccuagcuagcauccucuucaauuccaacuagaaagcuuaccaugauggcccccgaccccaacgcaaauccaaacgcaaaccccaacgccaacccuaacgcaaaccccaacgccaacccaaacgccaaucccaacgccaacccuaacgccaaccccaacgcaaaccccaacgccaaccccaacgccaacccuaacgcaaaccccaacgccaacccaaacgcaaaccccaacgccaaccccaacgccaaccccaacgcaaacccaaacgcaaaccccaacaaaaacaaccaaggaaacggacaaggccacaacaugccuaacgaccccaaucgcaacgucgacgaaaacgcaaacgccaacuccgccgucaaaaacaacaacaacgaagaacccucugacaaacacaucaaagaauaccucaacaagauccaaaacucccuauccaccgaauggucccccugcuccgucacuugcgguaauggcauccaaguccgcauaaaaccaggauccgcaaacaaacccaaagacgaacuagacuacgccaacgacauagaaaagaaaaucugcaaaauggaaaaaugcuccucagucuucaaugucguaaacuccuccauuggccuaggccccgucaccaacauggaaaacauuaccuccggauuccucgguccucuccucguccuccaagccggauucuuucuccucacacgaauccucacuaucccucaaucccuggacucaugguggaccucccucaacuuccugggcggcucccccgucugccucggccaaaacagccaauccccaaccuccaaucacucccccacaagcugcccucccauaugccccggcuaccgcuggaugugccuccgucgcuucaucauauuccucuucauacuucuccucugccucaucuuccuccuuguccugcuagacuaccaaggcaugcuccccgucugcccacucauccccgguuccaccacaacaaacaccggccccugcaaaacaugcaccacacccgcccaagguaacuccauguuccccuccugcugcugcaccaaaccaaccgacggcaacugcacuugcauucccauccccucauccugggccuucgccaaauaccucugggaaugggcauccguccguuucucauggcuaucucuccuaguaccauucguacaaugguucguuggccucucccccaccguauggcucuccgccauauggaugaugugguacuggggcccuucacuuuacuccaucgucucacccuucaucccacuccuacccaucuucuucugccuuuggguauacaucuaaggacuagucccuguucccagagcccacuuuuuuuucuuuuuuugaaauaaaauagccugucuuucagaucucaaaggcucuuuucagagccaccaaaaaaaaaaaaaaaaaaaaaaaaaaaaaaaaaaaaaaaaaaaaaaaaaaaaaaaaaaaaaaaaaaaaaaaaaaaaaaaaaaaaaaaaaaaaaaaaaaaaa

SEQ ID NO: 8479 - RNA, 828 nt, Artificial Sequence
  mRNA Design a-3 (hSL-A100) comprising derived and/or modified sequence from Pf(3D7)__XP_001351122.1__HsALB_Pf-CSP(19-152) (opt11)
aggagagggcgcuuggcuugcaaggacccugagcugcggcauugaagcacacccaacccaacucgacugaagucagccucacugaaccggaucugagaaucuucucucucugggcuugccagggcucuccgaaccuagcuagcauccucuucaauuccaacuagaaagcuuaccaugaaaugggucaccuucaucucccuccucuuccucuucuccagcgcauacucccucuuccaagaauaccaaugcuacggcuccuccuccaacacccgcguccucaacgaacucaacuacgacaacgccggcaccaaccucuacaacgaacucgaaaugaacuacuacggcaaacaagaaaacugguacucccucaaaaaaaacucccgcucccuaggcgaaaacgacgacggaaacaacgaagacaacgaaaaacuccgcaaacccaaacacaaaaaacucaaacaacccgccgacggaaaccccgaccccaacgccaacccaaacgucgaccccaacgccaaccccaacgucgaccccaacgccaaccccaacgucgaccccaacgccaaccccaacgcaaacccaaacgcaaacccaaacgccaaccccaacgccaaccccaacgccaaccccuaaggacuagucccuguucccagagcccacuuuuuuuucuuuuuuugaaauaaaauagccugucuuucagaucucaaaggcucuuuucagagccaccaaaaaaaaaaaaaaaaaaaaaaaaaaaaaaaaaaaaaaaaaaaaaaaaaaaaaaaaaaaaaaaaaaaaaaaaaaaaaaaaaaaaaaaaaaaaaaaaaaaaa

SEQ ID NO: 8480 - RNA, 948 nt, Artificial Sequence
  mRNA Design a-3 (hSL-A100) comprising derived and/or modified sequence from Pf(3D7)__XP_001351122.1__HsALB_Pf-CSP(19-192) (opt11)
aggagagggcgcuuggcuugcaaggacccugagcugcggcauugaagcacacccaacccaacucgacugaagucagccucacugaaccggaucugagaaucuucucucucugggcuugccagggcucuccgaaccuagcuagcauccucuucaauuccaacuagaaagcuuaccaugaaauggguaaccuucauaucccuccucuuccuauucucgagcgccuacucccucuuccaagaauaccaaugcuacggcucauccuccaacacccgcguccucaacgaacucaacuacgacaacgccggcaccaaccucuacaacgaacuagagaugaacuacuacggcaaacaagaaaacugguacucacucaaaaaaaacucccgaucccuaggagaaaacgacgacggcaacaacgaagacaacgaaaaacuacgaaaacccaaacacaaaaaacucaaacaacccgccgacggcaaccccgaccccaacgccaaccccaacgucgaccccaacgccaacccaaacguagaccccaacgccaaccccaacgucgacccaaacgccaaccccaacgccaaccccaacgccaacccaaacgcaaacccaaacgcaaacccaaacgccaacccaaacgccaaccccaacgccaaccccaacgcaaaccccaacgcaaaccccaacgccaacccaaacgcaaaccccaacgccaacccaaacgccaacccaaacgccaaccccaacgcaaaccccuaaggacuagucccuguucccagagcccacuuuuuuuucuuuuuuugaaauaaaauagccugucuuucagaucucaaaggcucuuuucagagccaccaaaaaaaaaaaaaaaaaaaaaaaaaaaaaaaaaaaaaaaaaaaaaaaaaaaaaaaaaaaaaaaaaaaaaaaaaaaaaaaaaaaaaaaaaaaaaaaaaaaaa

SEQ ID NO: 8481 - RNA, 1188 nt, Artificial Sequence
  mRNA Design a-3 (hSL-A100) comprising derived and/or modified sequence from Pf(3D7)__XP_001351122.1__HsALB_Pf-CSP(19-272) (opt11)
aggagagggcgcuuggcuugcaaggacccugagcugcggcauugaagcacacccaacccaacucgacugaagucagccucacugaaccggaucugagaaucuucucucucugggcuugccagggcucuccgaaccuagcuagcauccucuucaauuccaacuagaaagcuuaccaugaaauggguaaccuucaucucccuccucuuccuauucucaucagcauacucacucuuccaagaauaccaaugcuacggcucgagcucaaacacacgcguacucaacgaacugaacuacgacaacgccggaaccaaccucuacaaugaacucgaaaugaacuacuacggcaaacaagagaacugguacucacucaaaaaaaacagcagaagccucggagaaaacgacgacggaaacaacgaagacaacgaaaaacuccgcaaacccaagcacaaaaaacuaaaacaacccgcagacggaaaccccgaccccaacgcaaacccgaacgucgacccaaacgccaacccaaacguagaccccaacgcgaacccaaacguagacccaaacgccaacccaaacgcaaaccccaacgccaaccccaacgcaaacccaaacgccaacccaaacgcaaaccccaaugcaaaccccaacgcaaacccaaacgccaaccccaacgcaaacccaaacgcaaacccaaacgcaaacccaaacgcaaacccaaacgcgaacccaaacgcaaacccaaacgcaaacccgaacgcaaacccaaacguagacccaaacgcaaaccccaacgccaacccaaacgcaaacccaaacgcaaacccaaacgcaaacccaaacgcgaacccaaacgccaacccaaacgcaaacccaaacgcaaacccaaacgcaaacccaaacgcaaacccaaacgcaaacccaaacgcaaacccgaacgcgaacccaaacgcaaacccaaacgcgaacccgaacgcaaaccccaacgcaaacccauaaggacuagucccuguucccagagcccacuuuuuuuucuuuuuuugaaauaaaauagccugucuuucagaucucaaaggcucuuuucagagccaccaaaaaaaaaaaaaaaaaaaaaaaaaaaaaaaaaaaaaaaaaaaaaaaaaaaaaaaaaaaaaaaaaaaaaaaaaaaaaaaaaaaaaaaaaaaaaaaaaaaaa

SEQ ID NO: 8482 - RNA, 1350 nt, Artificial Sequence
  mRNA Design a-3 (hSL-A100) comprising derived and/or modified sequence from Pf(3D7)__XP_001351122.1__HsALB_Pf-CSP(19-272)_L(AAY)_Pf-CSP(310-3 27)_L(AAY)_Pf-CSP(346-375) (opt11)
aggagagggcgcuuggcuugcaaggacccugagcugcggcauugaagcacacccaacccaacucgacugaagucagccucacugaaccggaucugagaaucuucucucucugggcuugccagggcucuccgaaccuagcuagcauccucuucaauuccaacuagaaagcuuaccaugaaaugggucaccuucaucucacuccuauuccuauucuccuccgcauacucacucuuccaagaauaccagugcuacggaucaagcuccaacacacgcguacuaaacgaacugaacuacgacaacgccggaaccaaccucuacaacgaacucgaaaugaauuacuacggcaaacaagagaacugguacucacucaaaaaaaacagcagaucccuaggcgaaaacgacgacggaaacaacgaagacaacgaaaaacuacgcaaacccaaacacaaaaaacuaaaacaacccgcagacggaaacccagauccaaacgcaaacccaaacguagacccaaacgccaacccaaacguagacccaaacgcaaacccaaacguagaccccaacgcaaacccaaacgcaaacccgaacgccaacccaaacgcaaaccccaacgccaacccaaacgcaaacccaaacgcaaacccaaacgcaaacccaaacgccaaccccaacgcgaacccaaacgcaaacccuaacgccaacccaaacgcaaacccaaacgcaaacccgaacgcaaacccaaacgcaaacccaaacgcaaacccgaacguagacccaaacgcaaacccaaacgcaaacccaaacgcaaacccaaacgccaacccaaacgccaacccaaacgcaaaccccaacgcaaaccccaacgcgaacccaaacgccaaccccaacgcaaacccaaacgccaacccaaacgccaacccgaacgcaaacccaaacgccaacccaaacgccaacccgaacgcaaacccaaacgccaacccaaacgccaacccagccgcguacgaacccucagauaaacacauaaaagaauaccucaacaaaauccaaaacucacuagcagccuacaucaaaccaggauccgccaacaaacccaaggacgaacucgacuacgcaaacgacaucgaaaaaaaaaucugcaaaauggaaaaaugcucaugaggacuagucccuguucccagagcccacuuuuuuuucuuuuuuugaaauaaaauagccugucuuucagaucucaaaggcucuuuucagagccaccaaaaaaaaaaaaaaaaaaaaaaaaaaaaaaaaaaaaaaaaaaaaaaaaaaaaaaaaaaaaaaaaaaaaaaaaaaaaaaaaaaaaaaaaaaaaaaaaaaaaa

SEQ ID NO: 8483 - RNA, 1311 nt, Artificial Sequence
  mRNA Design a-3 (hSL-A100) comprising derived and/or modified sequence from Pf(3D7)__XP_001351122.1__HsALB_Pf-CSP(19-272)_L(AAY)_Pf-CSP(346-3 65)_L(AAY)_P2 (opt11)
aggagagggcgcuuggcuugcaaggacccugagcugcggcauugaagcacacccaacccaacucgacugaagucagccucacugaaccggaucugagaaucuucucucucugggcuugccagggcucuccgaaccuagcuagcauccucuucaauuccaacuagaaagcuuaccaugaaaugggucaccuucaucucacuccuauuccuauucucgagcgcauacucacucuuccaagaauaccaaugcuauggcuccagcucaaacacacgcguccuaaacgaacucaacuacgacaacgccggaacaaaccucuacaacgaacucgaaaugaacuacuacggcaaacaagaaaacugguacucgcucaaaaaaaacucccgaagucuaggcgaaaacgacgacggaaacaacgaagacaacgaaaaacuacgcaaacccaaacacaaaaaacuaaaacaacccgcagacggaaaccccgacccaaacgcaaaccccaacguagacccaaacgcaaaccccaacguagacccaaacgcaaacccgaacguagacccaaacgccaacccaaacgccaaccccaacgcaaacccaaacgccaaccccaacgcaaacccaaacgcaaacccaaacgcaaacccaaacgcaaacccaaacgccaaccccaacgccaacccaaacgccaaccccaacgcgaaccccaacgcgaacccaaacgccaacccaaacgcaaaccccaacgcaaacccaaacgcaaacccaaacgucgacccaaacgcaaacccaaacgcaaacccgaacgcaaacccaaacgcaaaccccaacgccaacccaaacgcgaacccaaacgccaacccaaacgccaacccaaacgcaaacccaaacgccaacccaaacgcaaacccaaacgcaaaccccaacgcaaaccccaacgcaaacccaaacgccaaccccaacgcaaaccccaacgcaaacccaaacgccaacccagccgcauacauaaaacccggcuccgccaacaaaccaaaagacgaacuagacuacgccaacgacauagaagcagccuaccaauacaucaaagccaacagcaaauucauaggaauaaccgagcuauaaggacuagucccuguucccagagcccacuuuuuuuucuuuuuuugaaauaaaauagccugucuuucagaucucaaaggcucuuuucagagccaccaaaaaaaaaaaaaaaaaaaaaaaaaaaaaaaaaaaaaaaaaaaaaaaaaaaaaaaaaaaaaaaaaaaaaaaaaaaaaaaaaaaaaaaaaaaaaaaaaaaaa

SEQ ID NO: 8484 - RNA, 1305 nt, Artificial Sequence
  mRNA Design a-3 (hSL-A100) comprising derived and/or modified sequence from Pf(3D7)__XP_001351122.1__HsALB_Pf-CSP(19-272)_L(AAY)_Pf-CSP(346-3 65)_L(AAY)_PADRE (opt11)
aggagagggcgcuuggcuugcaaggacccugagcugcggcauugaagcacacccaacccaacucgacugaagucagccucacugaaccggaucugagaaucuucucucucugggcuugccagggcucuccgaaccuagcuagcauccucuucaauuccaacuagaaagcuuaccaugaaauggguaaccuucaucucgcuacuguuccucuucucauccgcauacucccucuuccaagaauaccaaugcuacggcucauccucaaacacacgaguacuaaacgaacucaacuacgacaacgccggaaccaaccuauacaacgaacucgaaaugaacuacuacggcaaacaagaaaacugguacucacucaaaaaaaacucccgaucccucggcgaaaacgacgacggaaacaacgaagacaacgaaaaacugagaaaacccaaacacaaaaaacuaaaacaaccagccgacggcaacccagaccccaacgcaaaccccaacguagacccaaacgccaaccccaacguagacccaaacgcaaacccaaacguagaccccaacgccaacccaaacgccaacccaaacgccaaccccaacgcaaacccaaacgcaaacccaaacgcaaacccaaacgccaacccaaacgcaaacccaaacgccaacccgaacgcaaaccccaacgcaaacccaaacgcaaaccccaacgccaacccaaacgcaaacccaaacgcaaaccccaacgcaaacccaaaugcgaacccaaacguggacccgaacgcaaaccccaacgccaacccaaacgcaaaccccaacgccaaccccaacgccaaccccaacgcaaaccccaacgccaaccccaacgccaacccaaacgccaacccaaacgcgaacccaaacgcaaaccccaacgcaaacccaaacgcaaacccaaacgcaaacccaaacgcaaaccccaacgcaaacccaaacgcaaacccaaacgcaaaccccgcagccuacauuaaaccaggcuccgccaacaaacccaaagacgaacucgacuacgccaacgacauagaagcagccuacgccaaauucguagccgcauggacacucaaagccgcagccuaaggacuagucccuguucccagagcccacuuuuuuuucuuuuuuugaaauaaaauagccugucuuucagaucucaaaggcucuuuucagagccaccaaaaaaaaaaaaaaaaaaaaaaaaaaaaaaaaaaaaaaaaaaaaaaaaaaaaaaaaaaaaaaaaaaaaaaaaaaaaaaaaaaaaaaaaaaaaaaaaaaaaa

SEQ ID NO: 8485 - RNA, 1362 nt, Artificial Sequence
  mRNA Design a-3 (hSL-A100) comprising derived and/or modified sequence from Pf(3D7)__XP_001351122.1__HsALB_Pf-CSP(19-272)_L(G4S)_Pf-CSP(310-3 27)_L(G4S)_Pf-CSP(346-375) (opt11)
aggagagggcgcuuggcuugcaaggacccugagcugcggcauugaagcacacccaacccaacucgacugaagucagccucacugaaccggaucugagaaucuucucucucugggcuugccagggcucuccgaaccuagcuagcauccucuucaauuccaacuagaaagcuuaccaugaaaugggucaccuucaucucccuacuauuccucuucucaucagccuacucacucuuccaagaguaccaaugcuacggcucaagcucaaacacacgcguacucaacgaacuaaacuacgacaacgcaggcaccaaccucuacaacgaacucgagaugaacuacuacggcaaacaagaaaacugguacucacucaaaaaaaacucccgcagccucggcgaaaacgacgacggcaacaacgaagauaacgagaaacuacgcaaacccaaacacaaaaaacuaaaacaacccgccgacggaaacccagacccaaacgccaacccaaacguagacccaaacgcaaacccaaacguagacccaaacgccaaccccaacguagacccaaacgccaacccaaacgccaacccaaacgcaaacccaaacgcaaacccaaacgcgaacccaaacgcaaaccccaacgccaacccaaacgcaaacccaaacgccaaccccaacgcaaacccaaacgcaaaccccaacgcaaacccaaacgccaaccccaacgcaaaccccaacgcaaacccaaacgcaaacccaaacgcaaacccaaacgucgacccaaacgcaaaccccaacgcaaacccaaacgcaaacccaaacgccaacccaaacgcaaacccaaacgccaacccaaacgcaaaccccaacgcaaaccccaacgccaacccaaacgcaaaccccaacgcgaacccaaacgcaaacccaaacgcaaacccaaacgcaaaccccaacgcaaaccccaacgcaaacccaaacgcaaacccaaacgcaaacccaggcggcggcggaagcgaacccucggacaaacacauaaaagaauaccucaacaaaauccaaaacucccucggaggcggaggcuccaucaaacccggaagcgcaaacaaacccaaagacgaacucgacuacgcaaacgacaucgagaaaaaaauaugcaaaauggaaaaaugcucauaaggacuagucccuguucccagagcccacuuuuuuuucuuuuuuugaaauaaaauagccugucuuucagaucucaaaggcucuuuucagagccaccaaaaaaaaaaaaaaaaaaaaaaaaaaaaaaaaaaaaaaaaaaaaaaaaaaaaaaaaaaaaaaaaaaaaaaaaaaaaaaaaaaaaaaaaaaaaaaaaaaaaa

SEQ ID NO: 8486 - RNA, 1347 nt, Artificial Sequence
  mRNA Design a-3 (hSL-A100) comprising derived and/or modified sequence from Pf(3D7)__XP_001351122.1__HsALB_Pf-CSP(19-272)_L(G4S)_Pf-CSP(310-3 27)_Pf-CSP(346-375) (opt11)
aggagagggcgcuuggcuugcaaggacccugagcugcggcauugaagcacacccaacccaacucgacugaagucagccucacugaaccggaucugagaaucuucucucucugggcuugccagggcucuccgaaccuagcuagcauccucuucaauuccaacuagaaagcuuaccaugaaauggguaaccuucaucucacuccuauuccucuucuccuccgcauacucgcucuuccaagaauaccaaugcuacggcucaagcucaaacacccgcguccucaacgaacucaacuacgacaacgccgguaccaaccuauacaacgaacucgaaaugaacuacuacggcaaacaagaaaacugguacucacucaaaaaaaacuccaggucccuaggagaaaacgacgauggcaacaacgaagacaacgaaaaacuccgaaagccaaaacacaaaaaacuaaaacagcccgcagacggcaacccagacccaaacgcaaacccaaacguagacccaaacgcgaaccccaacguagacccaaacgcaaacccaaacguagacccaaacgcaaaccccaacgcaaacccaaacgcaaaccccaacgcaaaccccaacgcaaacccaaacgcaaacccaaacgcaaacccaaacgcaaacccaaacgcaaaccccaacgccaaccccaacgcaaacccaaacgcaaacccaaacgcaaacccaaacgcaaacccaaacgcaaaccccaacgccaacccaaacgcaaacccaaacguagacccaaacgcaaacccaaacgcaaacccaaacgcaaaccccaacgccaacccaaacgcaaacccaaacgcaaacccaaacgcaaacccaaacgcaaauccaaacgcuaacccaaacgcaaacccgaacgcaaaccccaaugcaaaccccaacgcaaacccaaacgccaacccaaacgcaaacccaaacgcgaacccaaacgcaaacccaaacgcaaacccaggcggaggcggauccgaacccuccgacaaacacauaaaagaauaccuaaacaaaauccaaaacucucucauaaaacccggaucagccaacaaaccaaaagacgaacuagacuacgccaaugacauagaaaaaaaaauaugcaagauggaaaaaugcagcuaaggacuagucccuguucccagagcccacuuuuuuuucuuuuuuugaaauaaaauagccugucuuucagaucucaaaggcucuuuucagagccaccaaaaaaaaaaaaaaaaaaaaaaaaaaaaaaaaaaaaaaaaaaaaaaaaaaaaaaaaaaaaaaaaaaaaaaaaaaaaaaaaaaaaaaaaaaaaaaaaaaaaa

SEQ ID NO: 8487 - RNA, 1347 nt, Artificial Sequence
  mRNA Design a-3 (hSL-A100) comprising derived and/or modified sequence from Pf(3D7)__XP_001351122.1__HsALB_Pf-CSP(19-325) (opt11)
aggagagggcgcuuggcuugcaaggacccugagcugcggcauugaagcacacccaacccaacucgacugaagucagccucacugaaccggaucugagaaucuucucucucugggcuugccagggcucuccgaaccuagcuagcauccucuucaauuccaacuagaaagcuuaccaugaaauggguaaccuucaucucacuccuguuccuauucucauccgcauacucacucuuccaagaauaccaaugcuacggcucgucuucaaacacccgcguacucaacgaacucaacuacgacaacgccggaaccaaccucuacaacgaacucgaaaugaacuacuacggcaaacaagaaaacugguacucacucaaaaaaaacagccgaagccuaggcgaaaacgacgacggaaacaaugaagacaacgaaaaacuccgcaaacccaaacacaaaaaacucaaacaaccagcagacggaaaccccgacccgaacgcaaacccaaacguagacccaaacgcaaacccaaacguagacccaaacgcgaacccaaacguagaccccaacgcaaacccaaacgcaaacccaaacgcaaacccaaacgccaaccccaacgccaacccaaacgccaacccaaacgcaaacccgaacgcgaacccaaacgcaaaccccaacgcaaacccaaacgcaaacccaaacgcgaacccaaacgccaacccaaacgccaacccaaacgcaaacccaaacgccaacccaaacgcaaaccccaacguggaccccaacgcaaacccaaacgcaaacccaaacgccaaccccaacgcaaacccaaacgcaaacccuaacgcaaacccaaacgcaaaccccaacgcgaacccaaacgcaaacccaaacgcaaacccaaacgcaaaccccaacgcaaacccaaacgccaacccaaacgccaacccaaacgcgaauccaaacgcaaaccccaacgcaaacccaaacgcaaacccgaacaaaaacaaccaagggaacggacaaggacacaacaugccaaacgaccccaaccgcaacgucgacgaaaacgccaacgccaacuccgcaguaaaaaacaacaacaacgaagaacccuccgacaaacacauaaaagaauaccucaacaagauacaaaacuagggacuagucccuguucccagagcccacuuuuuuuucuuuuuuugaaauaaaauagccugucuuucagaucucaaaggcucuuuucagagccaccaaaaaaaaaaaaaaaaaaaaaaaaaaaaaaaaaaaaaaaaaaaaaaaaaaaaaaaaaaaaaaaaaaaaaaaaaaaaaaaaaaaaaaaaaaaaaaaaaaaaa

SEQ ID NO: 8488 - RNA, 1524 nt, Artificial Sequence
  mRNA Design a-3 (hSL-A100) comprising derived and/or modified sequence from Pf(3D7)__XP_001351122.1__HsALB_Pf-CSP(19-384) (opt11)
aggagagggcgcuuggcuugcaaggacccugagcugcggcauugaagcacacccaacccaacucgacugaagucagccucacugaaccggaucugagaaucuucucucucugggcuugccagggcucuccgaaccuagcuagcauccucuucaauuccaacuagaaagcuuaccaugaaauggguaaccuucaucucacuacucuuccuauucucaagcgcguacucacucuuccaagaauaccaaugcuacggcucgagcucaaacacccgcguucucaacgaacuaaacuacgacaacgccggaaccaaccuauacaacgaacuugaaaugaacuacuacggcaaacaagaaaacugguacucgcucaaaaaaaacuccaggagccuaggcgaaaacgacgacggaaacaacgaagacaacgagaaacuaagaaaacccaaacacaaaaaacucaaacagcccgcggacggaaaccccgacccaaacgcaaaccccaacguagacccgaacgccaacccaaacguagacccaaacgcaaacccaaacguagaccccaacgcaaacccgaacgccaacccaaacgcaaacccaaaugcgaaccccaacgcgaacccaaacgcaaacccgaacgcaaaccccaacgccaacccaaacgcaaacccaaacgcaaaccccaacgcaaacccaaacgcgaacccaaacgcaaacccaaacgcgaacccgaacgcaaacccaaacgcaaacccgaacgcaaacccaaacguagacccaaacgccaacccaaacgcaaacccaaacgcaaaccccaacgcaaacccaaacgcaaacccgaacgcaaacccaaacgcaaacccaaacgcgaacccaaacgcaaaccccaacgcaaacccaaacgcaaacccuaacgcaaacccgaacgcaaacccaaacgccaacccaaacgcgaaccccaacgcaaacccaaacgccaacccaaacgccaacccgaacaaaaacaaccaaggaaacggacaaggacacaacaugccaaacgaccccaaccgaaacgucgacgaaaacgcaaacgccaacagugccgucaaaaacaacaacaaugaagaacccucagacaaacacauaaaagaauaccuaaacaaaauccagaacucgcucucaaccgaauggucacccugcagcgucaccugcggcaacggaauacaaguacgcaucaaaccaggcucggccaacaaaccaaaagacgaauuagacuacgcaaacgacaucgaaaaaaaaauaugcaaaauggaaaaaugcagcucagucuucaacguagucaauagcucauaaggacuagucccuguucccagagcccacuuuuuuuucuuuuuuugaaauaaaauagccugucuuucagaucucaaaggcucuuuucagagccaccaaaaaaaaaaaaaaaaaaaaaaaaaaaaaaaaaaaaaaaaaaaaaaaaaaaaaaaaaaaaaaaaaaaaaaaaaaaaaaaaaaaaaaaaaaaaaaaaaaaaa

SEQ ID NO: 8489 - RNA, 1662 nt, Artificial Sequence
  mRNA Design a-3 (hSL-A100) comprising derived and/or modified sequence from Pf(3D7)__XP_001351122.1__HsALB_Pf-CSP(19-384)_TM domain HA (opt11)
aggagagggcgcuuggcuugcaaggacccugagcugcggcauugaagcacacccaacccaacucgacugaagucagccucacugaaccggaucugagaaucuucucucucugggcuugccagggcucuccgaaccuagcuagcauccucuucaauuccaacuagaaagcuuaccaugaagugggucaccuucaucucccuccuauuccucuucucuagcgcguacucacucuuccaagaauaccaaugcuacggauccagcucaaacacacgcguccucaaugaacugaacuacgauaacgccggaaccaaccucuacaacgaacucgaaaugaacuacuacggcaaacaagaaaacugguacucacuaaagaaaaauagcaggucccucggcgaaaacgacgacgggaacaacgaagauaacgaaaaacuacgcaaacccaagcacaagaaacuaaaacagccagcagacggaaacccagaccccaacgccaacccaaacgucgaccccaacgcaaacccaaacguagauccgaacgcaaacccaaacgucgauccaaacgcaaacccaaacgcaaacccaaacgcuaaccccaacgccaacccaaacgcaaacccgaacgcaaaccccaacgcgaacccgaacgcaaacccaaacgcaaacccaaacgccaacccaaacgcaaacccaaacgcaaacccaaacgccaacccaaacgcaaaccccaacgcgaaccccaacgcaaaccccaacgcaaacccaaacgucgacccaaacgcaaaccccaacgcaaaccccaacgcaaaccccaaugcaaacccaaacgcgaaccccaacgcaaacccaaacgcgaacccaaaugcaaaccccaacgccaaccccaacgccaacccgaacgcaaacccaaacgccaacccaaacgccaacccaaacgcaaaucccaacgccaacccaaacgcgaacccgaacgcaaacccaaacgcaaacccgaacaaaaacaaccaaggaaacggucaaggacacaacaugccaaacgaccccaaccgcaacgucgacgaaaacgccaaugccaacagcgccgucaaaaacaacaacaacgaagaacccucagacaaacacaucaaagaguaccuaaacaagauccaaaacucccucuccaccgaauggucccccugcagcguaaccugcggaaacggcauccaaguccgcauaaaaccaggcucagccaacaaaccaaaagaugaacucgacuacgcaaacgacauagaaaagaaaaucugcaaaauggaaaaaugcagcuccguauucaacgugguuaacuccucaaaacuagaauccacccgcaucuaccaaauacucgcaauauacagcacaguagccagcucacucguccuagucgucucccucggagccaucagcuucuggaugugcuccaacggaaguuuacaaugucgcauaugcauauaaggacuagucccuguucccagagcccacuuuuuuuucuuuuuuugaaauaaaauagccugucuuucagaucucaaaggcucuuuucagagccaccaaaaaaaaaaaaaaaaaaaaaaaaaaaaaaaaaaaaaaaaaaaaaaaaaaaaaaaaaaaaaaaaaaaaaaaaaaaaaaaaaaaaaaaaaaaaaaaaaaaaa

SEQ ID NO: 8490 - RNA, 1374 nt, Artificial Sequence
  mRNA Design a-3 (hSL-A100) comprising derived and/or modified sequence from Pf(3D7)__XP_001351122.1__HsALB_Pf-CSP(82-397) (opt11)
aggagagggcgcuuggcuugcaaggacccugagcugcggcauugaagcacacccaacccaacucgacugaagucagccucacugaaccggaucugagaaucuucucucucugggcuugccagggcucuccgaaccuagcuagcauccucuucaauuccaacuagaaagcuuaccaugaaaugggucaccuucaucucacuccuguuccucuucucauccgccuacagcgacaacgaaaaacugcgcaaacccaaacacaagaaacucaaacaaccagccgacggcaaccccgaccccaacgccaacccaaacguagaccccaacgccaaccccaacguagacccaaacgccaacccaaacguggaccccaacgcaaacccaaacgccaacccaaacgccaauccaaacgccaacccaaacgcaaacccaaacgcaaaccccaacgccaacccuaacgccaaccccaacgcaaacccaaacgccaaccccaacgccaaccccaacgcaaaccccaacgcaaacccuaacgccaaccccaacgccaaccccaacgcaaacccaaacgccaaccccaacguagacccaaacgccaaccccaacgcaaaccccaacgccaacccaaacgcaaacccaaacgccaaccccaacgccaaccccaacgcaaacccaaacgcaaacccaaaugcaaaccccaacgccaaccccaacgccaaccccaacgcaaaccccaacgcaaaccccaacgcaaacccgaacgccaacccaaacgccaacccaaacgccaaccccaacgcaaaccccaacaaaaacaaccaaggcaacggacaaggacacaacaugcccaacgaccccaaccgcaacgucgacgaaaacgccaacgccaacuccgccgucaaaaacaacaacaacgaagaacccuccgacaaacacaucaaagaauaccucaacaaaauccaaaacucccucucaaccgaauggucacccugcuccguaaccugcggcaacggcauccaaguccgcaucaaacccggcucagccaacaaacccaaagacgaacucgacuacgccaaugacaucgaaaagaaaauaugcaaaauggaaaaaugcuccuccgucuucaacgucgucaacuccuccaucggccucaucaugguccucucguuccuauuccuaaacuaaggacuagucccuguucccagagcccacuuuuuuuucuuuuuuugaaauaaaauagccugucuuucagaucucaaaggcucuuuucagagccaccaaaaaaaaaaaaaaaaaaaaaaaaaaaaaaaaaaaaaaaaaaaaaaaaaaaaaaaaaaaaaaaaaaaaaaaaaaaaaaaaaaaaaaaaaaaaaaaaaaaaa

SEQ ID NO: 8491 - RNA, 726 nt, Artificial Sequence
  mRNA Design a-3 (hSL-A100) comprising derived and/or modified sequence from Pf(3D7)__XP_001351122.1__HsALB_Pf-CSP(93-192) (opt11)
aggagagggcgcuuggcuugcaaggacccugagcugcggcauugaagcacacccaacccaacucgacugaagucagccucacugaaccggaucugagaaucuucucucucugggcuugccagggcucuccgaaccuagcuagcauccucuucaauuccaacuagaaagcuuaccaugaaauggguaaccuucaucucacuccuauuccuauucucaagcgcauacucaaaacuaaaacaacccgcagacggaaacccagacccaaacgcaaacccaaacguagacccaaacgcaaacccaaacguagacccaaacgcaaacccaaacguagacccaaacgcaaacccaaacgcaaacccaaacgcaaacccaaacgcaaacccaaacgcaaaccccaacgcaaacccaaacgcaaacccaaacgcaaacccaaacgcaaacccaaacgcaaacccaaacgcaaacccaaacgcaaacccaaacgcaaacccaaacgcaaacccaaacgccaacccaaacgcaaacccauaaggacuagucccuguucccagagcccacuuuuuuuucuuuuuuugaaauaaaauagccugucuuucagaucucaaaggcucuuuucagagccaccaaaaaaaaaaaaaaaaaaaaaaaaaaaaaaaaaaaaaaaaaaaaaaaaaaaaaaaaaaaaaaaaaaaaaaaaaaaaaaaaaaaaaaaaaaaaaaaaaaaaa

SEQ ID NO: 8492 - RNA, 966 nt, Artificial Sequence
  mRNA Design a-3 (hSL-A100) comprising derived and/or modified sequence from Pf(3D7)__XP_001351122.1__HsALB_Pf-CSP(93-272) (opt11)
aggagagggcgcuuggcuugcaaggacccugagcugcggcauugaagcacacccaacccaacucgacugaagucagccucacugaaccggaucugagaaucuucucucucugggcuugccagggcucuccgaaccuagcuagcauccucuucaauuccaacuagaaagcuuaccaugaaaugggucaccuucaucucacuccuauuccuauucucauccgcauacucaaaacuaaaacaacccgccgacggaaacccagacccaaacgcaaacccaaacguagacccaaacgcaaacccaaacguagacccaaacgcaaacccaaacguagacccaaacgcaaacccaaacgccaacccaaacgcaaauccaaacgcaaacccaaacgcaaacccaaacgcaaacccaaacgcaaacccaaacgccaacccaaacgccaacccaaacgcaaacccaaacgcaaacccaaacgcaaacccaaacgcaaacccaaacgcaaacccaaacgccaaccccaacgcaaacccaaacgcaaaccccaacguagacccaaacgcaaacccaaacgccaaccccaacgcaaaccccaacgccaaccccaacgccaacccaaacgccaacccaaacgcaaacccaaacgcaaacccaaacgcaaacccaaacgcaaacccaaacgcaaacccaaacgcaaacccaaacgcaaacccaaacgcaaacccaaacgccaacccaaacgcaaacccaaacgcaaacccgaacgcaaacccauaaggacuagucccuguucccagagcccacuuuuuuuucuuuuuuugaaauaaaauagccugucuuucagaucucaaaggcucuuuucagagccaccaaaaaaaaaaaaaaaaaaaaaaaaaaaaaaaaaaaaaaaaaaaaaaaaaaaaaaaaaaaaaaaaaaaaaaaaaaaaaaaaaaaaaaaaaaaaaaaaaaaaa

SEQ ID NO: 8493 - RNA, 1341 nt, Artificial Sequence
  mRNA Design a-3 (hSL-A100) comprising derived and/or modified sequence from Pf(3D7)__XP_001351122.1__HsALB_Pf-CSP(93-397) (opt11)
aggagagggcgcuuggcuugcaaggacccugagcugcggcauugaagcacacccaacccaacucgacugaagucagccucacugaaccggaucugagaaucuucucucucugggcuugccagggcucuccgaaccuagcuagcauccucuucaauuccaacuagaaagcuuaccaugaaaugggucacauucaucucacuccuauuccuauucucaagcgccuacuccaaacucaaacaacccgccgacggcaacccagacccaaacgccaaccccaacgucgacccaaacgccaacccaaacgucgacccaaacgcaaacccaaacgucgaccccaacgccaaccccaacgccaaccccaacgccaacccaaacgccaaucccaacgccaaccccaacgccaacccaaacgcaaaccccaacgccaauccaaacgccaaccccaacgcaaaccccaacgccaaccccaacgcaaacccaaacgcaaacccaaacgcaaaccccaacgccaaccccaacgcaaaccccaacgccaaccccaacgucgaccccaacgccaacccaaacgccaacccaaacgccaaccccaacgccaaccccaacgcaaacccaaacgcgaaccccaacgcaaaccccaacgccaacccgaacgccaacccgaacgcaaacccaaacgccaaccccaacgcaaaccccaacgcaaacccaaacgcgaaccccaacgccaacccaaacgccaacccaaacgcgaacccaaacgccaaccccaacaaaaacaaccaagggaacggacaaggccacaacaugcccaacgaccccaaccgcaacgucgacgaaaacgccaacgccaacuccgccgucaaaaacaacaacaacgaagaacccuccgacaaacacauaaaagaauaccuaaacaaaauccaaaacucacucucuacugaauggucccccugcucagucaccugcggcaacggcauacaaguccgcauaaaacccggcucggccaacaaaccaaaagacgaacuagacuacgcaaacgacaucgaaaaaaaaauaugcaaaauggaaaaaugcuccucagucuucaacguaguaaacuccuccaucggccucauaaugguccucuccuuccuauuccucaacuaaggacuagucccuguucccagagcccacuuuuuuuucuuuuuuugaaauaaaauagccugucuuucagaucucaaaggcucuuuucagagccaccaaaaaaaaaaaaaaaaaaaaaaaaaaaaaaaaaaaaaaaaaaaaaaaaaaaaaaaaaaaaaaaaaaaaaaaaaaaaaaaaaaaaaaaaaaaaaaaaaaaaa

SEQ ID NO: 8494 - RNA, 711 nt, Artificial Sequence
  mRNA Design a-3 (hSL-A100) comprising derived and/or modified sequence from Pf(3D7)__XP_001351122.1__HsALB_Pf-CSP(98-192) (opt11)
aggagagggcgcuuggcuugcaaggacccugagcugcggcauugaagcacacccaacccaacucgacugaagucagccucacugaaccggaucugagaaucuucucucucugggcuugccagggcucuccgaaccuagcuagcauccucuucaauuccaacuagaaagcuuaccaugaaaugggucacauucauaagccuacucuuccucuucagcucagccuacuccgcagacggaaacccagacccaaacgcaaacccaaacguagacccaaacgcaaacccaaacguagacccaaacgcaaacccaaacguagacccaaacgcaaacccaaacgcaaacccaaacgcaaacccaaacgcaaacccaaacgcaaacccaaacgcaaacccaaacgcaaacccaaacgcaaacccaaacgcaaacccaaacgcaaaccccaacgcaaacccaaacgcaaacccaaacgcaaacccaaacgcaaacccaaacgcaaacccaaacgcaaacccauaaggacuagucccuguucccagagcccacuuuuuuuucuuuuuuugaaauaaaauagccugucuuucagaucucaaaggcucuuuucagagccaccaaaaaaaaaaaaaaaaaaaaaaaaaaaaaaaaaaaaaaaaaaaaaaaaaaaaaaaaaaaaaaaaaaaaaaaaaaaaaaaaaaaaaaaaaaaaaaaaaaaaa

SEQ ID NO: 8495 - RNA, 951 nt, Artificial Sequence
  mRNA Design a-3 (hSL-A100) comprising derived and/or modified sequence from Pf(3D7)__XP_001351122.1__HsALB_Pf-CSP(98-272) (opt11)
aggagagggcgcuuggcuugcaaggacccugagcugcggcauugaagcacacccaacccaacucgacugaagucagccucacugaaccggaucugagaaucuucucucucugggcuugccagggcucuccgaaccuagcuagcauccucuucaauuccaacuagaaagcuuaccaugaaauggguaaccuucauaagccuacucuuccuauucucaucagccuacagcgcagacggaaacccagaccccaacgcaaacccaaacguagacccaaacgcaaacccaaacguagaccccaacgcaaacccaaacguagacccaaacgccaacccaaacgcaaacccaaacgcaaacccaaacgccaacccaaacgcaaacccaaacgccaacccaaacgcaaacccaaacgcaaacccaaacgcaaacccaaacgcaaacccaaacgcaaacccaaacgcaaacccaaacgccaacccaaacgcaaacccaaacgcaaacccaaacgcaaacccaaacgccaaccccaacguagacccaaacgccaaccccaacgcaaacccaaacgcaaacccaaacgcaaacccaaacgcaaacccaaacgcaaacccaaacgcaaacccaaacgcaaacccaaacgcaaacccgaacgccaacccaaacgcaaacccaaacgcaaacccaaacgcaaacccaaacgcaaacccaaacgcaaaccccaacgcaaacccaaacgcaaacccaaacgcaaacccauaaggacuagucccuguucccagagcccacuuuuuuuucuuuuuuugaaauaaaauagccugucuuucagaucucaaaggcucuuuucagagccaccaaaaaaaaaaaaaaaaaaaaaaaaaaaaaaaaaaaaaaaaaaaaaaaaaaaaaaaaaaaaaaaaaaaaaaaaaaaaaaaaaaaaaaaaaaaaaaaaaaaaa

SEQ ID NO: 8496 - RNA, 1257 nt, Artificial Sequence
  mRNA Design a-3 (hSL-A100) comprising derived and/or modified sequence from Pf(3D7)__XP_001351122.1__HsALB_Pf-CSP(98-374) (opt11)
aggagagggcgcuuggcuugcaaggacccugagcugcggcauugaagcacacccaacccaacucgacugaagucagccucacugaaccggaucugagaaucuucucucucugggcuugccagggcucuccgaaccuagcuagcauccucuucaauuccaacuagaaagcuuaccaugaaauggguaaccuucauaucccuacucuuccuuuucuccucggccuacuccgcagacggaaacccagacccaaacgcaaaccccaacguagacccaaacgcaaacccaaauguagacccaaacgcaaacccaaacguggacccaaacgcgaaccccaacgcaaaccccaacgcaaacccaaacgccaacccaaacgcaaacccaaacgccaacccaaacgcaaaccccaacgccaaccccaacgccaacccaaacgcaaacccaaacgcaaaccccaacgcaaacccaaacgccaacccaaacgccaacccaaacgccaaccccaacgcaaacccaaacgccaacccaaacguagacccaaacgcaaacccaaacgcaaacccaaacgcaaaccccaacgcaaaccccaacgcaaacccaaacgcaaacccaaacgcaaacccaaacgcaaacccaaacgccaacccaaacgcgaaccccaacgccaacccaaacgcaaacccaaacgccaacccaaacgccaacccaaacgcaaaccccaacgcaaacccaaacgcaaacccaaacgccaacccgaacaaaaacaaccaaggcaacggccaaggacacaacaugccaaacgaccccaaccgcaacguagacgaaaacgccaacgcaaacuccgcagucaaaaacaacaacaacgaagaacccuccgacaaacacauaaaagaauaccuaaacaaaauccaaaacucgcucucaaccgaauggucccccugcuccgucaccugcggcaacggcauccaaguacgcaucaaaccaggcucagcaaacaaaccaaaagacgaacucgacuacgccaacgacauagaaaaaaaaauaugcaaaauggagaaaugcuaaggacuagucccuguucccagagcccacuuuuuuuucuuuuuuugaaauaaaauagccugucuuucagaucucaaaggcucuuuucagagccaccaaaaaaaaaaaaaaaaaaaaaaaaaaaaaaaaaaaaaaaaaaaaaaaaaaaaaaaaaaaaaaaaaaaaaaaaaaaaaaaaaaaaaaaaaaaaaaaaaaaaa

SEQ ID NO: 8497 - RNA, 1326 nt, Artificial Sequence
  mRNA Design a-3 (hSL-A100) comprising derived and/or modified sequence from Pf(3D7)__XP_001351122.1__HsALB_Pf-CSP(98-397) (opt11)
aggagagggcgcuuggcuugcaaggacccugagcugcggcauugaagcacacccaacccaacucgacugaagucagccucacugaaccggaucugagaaucuucucucucugggcuugccagggcucuccgaaccuagcuagcauccucuucaauuccaacuagaaagcuuaccaugaaauggguaaccuucaucagccuacuauuccuauucagcuccgccuacagcgccgacggaaacccagacccaaacgccaaccccaacgucgacccaaacgccaaccccaacguagacccaaacgccaaccccaacgucgaccccaacgccaaccccaacgccaacccaaacgccaacccuaacgccaacccaaacgccaacccgaacgccaaccccaacgcgaacccaaacgccaacccaaacgcaaaccccaacgccaaccccaacgccaaccccaacgcaaaccccaacgcaaacccaaacgccaacccaaacgccaaccccaacgccaaccccaaugcaaacccaaacgucgaccccaacgccaacccaaacgccaaccccaacgccaaccccaacgccaaccccaacgcaaaccccaacgccaaccccaacgcgaaccccaacgccaaccccaacgccaacccaaacgccaaccccaacgccaaccccaacgccaaccccaacgcuaaccccaacgcaaacccaaacgccaacccaaacgccaacccaaacgccaaccccaacgccaacccaaacaaaaacaaccaaggcaacggacaaggacacaacaugccaaacgaccccaaccgcaacgucgacgaaaaugccaacgccaacuccgccgucaaaaacaacaacaacgaagaacccuccgacaaacacaucaaagaauaccuaaacaaaauacaaaacucucucucaaccgaauggucccccugcuccgucacaugcggcaacggcauccaaguccgcaucaaaccaggaucagccaauaaacccaaagacgaacucgacuacgccaacgacauagaaaaaaaaaucugcaaaauggaaaaaugcagcucagucuucaacgucgucaacuccucaaucggacuuauaaugguccuauccuuccucuuccuuaacuaaggacuagucccuguucccagagcccacuuuuuuuucuuuuuuugaaauaaaauagccugucuuucagaucucaaaggcucuuuucagagccaccaaaaaaaaaaaaaaaaaaaaaaaaaaaaaaaaaaaaaaaaaaaaaaaaaaaaaaaaaaaaaaaaaaaaaaaaaaaaaaaaaaaaaaaaaaaaaaaaaaaaa

SEQ ID NO: 8498 - RNA, 1653 nt, Artificial Sequence
  mRNA Design a-3 (hSL-A100) comprising derived and/or modified sequence from Pf(3D7)__XP_001351122.1__HsALB_Pf-CSP(199-377)_L(PVTN)_HBsAg (opt11)
aggagagggcgcuuggcuugcaaggacccugagcugcggcauugaagcacacccaacccaacucgacugaagucagccucacugaaccggaucugagaaucuucucucucugggcuugccagggcucuccgaaccuagcuagcauccucuucaauuccaacuagaaagcuuaccaugaaaugggucacauucaucucgcuccucuuccuauucuccuccgccuacuccgacccuaacgccaaucccaacgccaaccccaacgccaaccccaacgccaaccccaacgccaaccccaaugcaaacccaaacgcaaaccccaacgccaaccccaacgcaaacccaaaugcaaaccccaacgcaaaccccaacgccaaccccaaugccaaccccaacgcuaaccccaacgccaauccaaacgccaaccccaacgcaaaccccaacgccaacccuaacaaaaauaaccaaggcaacggccaaggacacaacaugcccaacgaccccaaccgaaaugucgacgaaaacgcuaacgcuaacagcgccgucaaaaacaacaacaacgaagaacccuccgacaaacacauuaaagaauaccucaacaaaauccaaaacucccucuccaccgaauggucccccugcucuguaacuugcggcaacggcauccaaguccgcauaaaacccggaucagcaaacaaacccaaagacgaacucgacuacgcaaacgacauugagaagaaaaucugcaaaauggaaaaaugcucaucaguacccgucacuaacauggaaaacaucaccuccggcuuccucggcccccuccuaguccuacaagccgguuucuuccuucuuacacgcauccuaaccaucccacaaucccuagacuccugguggacaucuuuaaacuuccuuggaggauccccugucugccucggccaaaacucccaauccccaaccucuaaccacucucccacauccugcccucccauaugccccgguuaccgcuggaugugccuccgccgcuucaucaucuuccucuucauacuccucuuaugccucaucuuccuccucguacuacucgacuaccaagguaugcuacccguaugcccucucauccccggcuccaccacaaccaacaccggccccugcaaaacaugcaccacccccgcacagggcaauuccauguuccccuccugcuguugcaccaaacccacagacggcaacuguaccugcauccccauccccuccucuugggcauuugccaaauaccucugggaaugggccuccguccgauucucuuggcuuucacuccucguucccuucguacaaugguucgucggccuaucacccaccgucuggcucuccgccaucuggaugaugugguacuggggcccuucacuuuacuccauagucagccccuucauaccacuccuccccaucuucuucugccuauggguauacaucuaaggacuagucccuguucccagagcccacuuuuuuuucuuuuuuugaaauaaaauagccugucuuucagaucucaaaggcucuuuucagagccaccaaaaaaaaaaaaaaaaaaaaaaaaaaaaaaaaaaaaaaaaaaaaaaaaaaaaaaaaaaaaaaaaaaaaaaaaaaaaaaaaaaaaaaaaaaaaaaaaaaaaa

SEQ ID NO: 8499 - RNA, 1407 nt, Artificial Sequence
  mRNA Design i-3 (hSL-A100) comprising derived and/or modified sequence from Pf(3D7)__XP_001351122.1__Pf-CSP (wt)
aggagaaagcuuaccaugaugagaaaauuagcuauuuuaucuguuucuuccuuuuuauuuguugaggccuuauuccaggaauaccagugcuauggaaguucgucaaacacaaggguucuaaaugaauuaaauuaugauaaugcaggcacuaauuuauauaaugaauuagaaaugaauuauuaugggaaacaggaaaauugguauagucuuaaaaaaaauaguagaucacuuggagaaaaugaugauggaaauaacgaagacaacgagaaauuaaggaaaccaaaacauaaaaaauuaaagcaaccagcggaugguaauccugauccaaaugcaaacccaaauguagaucccaaugccaacccaaauguagauccaaaugcaaacccaaauguagauccaaaugcaaacccaaaugcaaacccaaaugcaaacccaaaugcaaacccaaaugcaaacccaaaugcaaacccaaaugcaaacccaaaugcaaacccaaaugcaaacccaaaugcaaacccaaaugcaaacccaaaugcaaacccaaaugcaaacccaaaugcaaaccccaaugcaaauccuaaugcaaacccaaaugcaaacccaaacguagauccuaaugcaaauccaaaugcaaacccaaacgcaaaccccaaugcaaauccuaaugcaaaccccaaugcaaauccuaaugcaaauccuaaugccaauccaaaugcaaauccaaaugcaaacccaaacgcaaaccccaaugcaaauccuaaugccaauccaaaugcaaauccaaaugcaaacccaaaugcaaacccaaaugcaaaccccaaugcaaauccuaauaaaaacaaucaagguaauggacaaggucacaauaugccaaaugacccaaaccgaaauguagaugaaaaugcuaaugccaacagugcuguaaaaaauaauaauaacgaagaaccaagugauaagcacauaaaagaauauuuaaacaaaauacaaaauucucuuucaacugaaugguccccauguaguguaacuuguggaaaugguauucaaguuagaauaaagccuggcucugcuaauaaaccuaaagacgaauuagauuaugcaaaugauauugaaaaaaaaauuuguaaaauggaaaaauguuccaguguguuuaaugucguaaauaguucaauaggauuaauaaugguauuauccuucuuguuccuuaauuagggacuaguuauaagacugacuagcccgaugggccucccaacgggcccuccuccccuccuugcaccgagauuaaucaaaggcucuuuucagagccaccaaaaaaaaaaaaaaaaaaaaaaaaaaaaaaaaaaaaaaaaaaaaaaaaaaaaaaaaaaaaaaaaaaaaaaaaaaaaaaaaaaaaaaaaaaaaaaaaaaaaa

SEQ ID NO: 8500 - RNA, 1338 nt, Artificial Sequence
  mRNA Design i-3 (hSL-A100) comprising derived and/or modified sequence from Pf(3D7)__XP_001351122.1__Pf-CSP(1-374) (wt)
aggagaaagcuuaccaugaugagaaaauuagcuauuuuaucuguuucuuccuuuuuauuuguugaggccuuauuccaggaauaccagugcuauggaaguucgucaaacacaaggguucuaaaugaauuaaauuaugauaaugcaggcacuaauuuauauaaugaauuagaaaugaauuauuaugggaaacaggaaaauugguauagucuuaaaaaaaauaguagaucacuuggagaaaaugaugauggaaauaacgaagacaacgagaaauuaaggaaaccaaaacauaaaaaauuaaagcaaccagcggaugguaauccugauccaaaugcaaacccaaauguagaucccaaugccaacccaaauguagauccaaaugcaaacccaaauguagauccaaaugcaaacccaaaugcaaacccaaaugcaaacccaaaugcaaacccaaaugcaaacccaaaugcaaacccaaaugcaaacccaaaugcaaacccaaaugcaaacccaaaugcaaacccaaaugcaaacccaaaugcaaacccaaaugcaaacccaaaugcaaaccccaaugcaaauccuaaugcaaacccaaaugcaaacccaaacguagauccuaaugcaaauccaaaugcaaacccaaacgcaaaccccaaugcaaauccuaaugcaaaccccaaugcaaauccuaaugcaaauccuaaugccaauccaaaugcaaauccaaaugcaaacccaaacgcaaaccccaaugcaaauccuaaugccaauccaaaugcaaauccaaaugcaaacccaaaugcaaacccaaaugcaaaccccaaugcaaauccuaauaaaaacaaucaagguaauggacaaggucacaauaugccaaaugacccaaaccgaaauguagaugaaaaugcuaaugccaacagugcuguaaaaaauaauaauaacgaagaaccaagugauaagcacauaaaagaauauuuaaacaaaauacaaaauucucuuucaacugaaugguccccauguaguguaacuuguggaaaugguauucaaguuagaauaaagccuggcucugcuaauaaaccuaaagacgaauuagauuaugcaaaugauauugaaaaaaaaauuuguaaaauggaaaaauguugaggacuaguuauaagacugacuagcccgaugggccucccaacgggcccuccuccccuccuugcaccgagauuaaucaaaggcucuuuucagagccaccaaaaaaaaaaaaaaaaaaaaaaaaaaaaaaaaaaaaaaaaaaaaaaaaaaaaaaaaaaaaaaaaaaaaaaaaaaaaaaaaaaaaaaaaaaaaaaaaaaaaa

SEQ ID NO: 8501 - RNA, 1191 nt, Artificial Sequence
  mRNA Design i-3 (hSL-A100) comprising derived and/or modified sequence from Pf(3D7)__XP_001351122.1__Pf-CSP(1-325) (wt)
aggagaaagcuuaccaugaugagaaaauuagcuauuuuaucuguuucuuccuuuuuauuuguugaggccuuauuccaggaauaccagugcuauggaaguucgucaaacacaaggguucuaaaugaauuaaauuaugauaaugcaggcacuaauuuauauaaugaauuagaaaugaauuauuaugggaaacaggaaaauugguauagucuuaaaaaaaauaguagaucacuuggagaaaaugaugauggaaauaacgaagacaacgagaaauuaaggaaaccaaaacauaaaaaauuaaagcaaccagcggaugguaauccugauccaaaugcaaacccaaauguagaucccaaugccaacccaaauguagauccaaaugcaaacccaaauguagauccaaaugcaaacccaaaugcaaacccaaaugcaaacccaaaugcaaacccaaaugcaaacccaaaugcaaacccaaaugcaaacccaaaugcaaacccaaaugcaaacccaaaugcaaacccaaaugcaaacccaaaugcaaacccaaaugcaaacccaaaugcaaaccccaaugcaaauccuaaugcaaacccaaaugcaaacccaaacguagauccuaaugcaaauccaaaugcaaacccaaacgcaaaccccaaugcaaauccuaaugcaaaccccaaugcaaauccuaaugcaaauccuaaugccaauccaaaugcaaauccaaaugcaaacccaaacgcaaaccccaaugcaaauccuaaugccaauccaaaugcaaauccaaaugcaaacccaaaugcaaacccaaaugcaaaccccaaugcaaauccuaauaaaaacaaucaagguaauggacaaggucacaauaugccaaaugacccaaaccgaaauguagaugaaaaugcuaaugccaacagugcuguaaaaaauaauaauaacgaagaaccaagugauaagcacauaaaagaauauuuaaacaaaauacaaaauugaggacuaguuauaagacugacuagcccgaugggccucccaacgggcccuccuccccuccuugcaccgagauuaaucaaaggcucuuuucagagccaccaaaaaaaaaaaaaaaaaaaaaaaaaaaaaaaaaaaaaaaaaaaaaaaaaaaaaaaaaaaaaaaaaaaaaaaaaaaaaaaaaaaaaaaaaaaaaaaaaaaaa

SEQ ID NO: 8502 - RNA, 1407 nt, Artificial Sequence
  mRNA Design i-3 (hSL-A100) comprising derived and/or modified sequence from Pf(3D7)__XP_001351122.1__Pf-CSP (opt1)
aggagaaagcuuaccaugaugcgcaagcuggccauccucagcguguccagcuuccuguucgucgaggcccuguuccaggaguaccagugcuacggcuccagcuccaacacccgggugcucaacgagcugaacuacgacaacgcggggaccaaccuguacaacgagcucgagaugaacuacuacggcaagcaggagaacugguacagccugaagaagaacucccgcagccugggggagaacgacgacggcaacaacgaggacaacgagaagcuccggaagcccaagcacaagaagcugaagcagccggccgacgggaaccccgaccccaacgccaaccccaacguggacccgaacgccaaccccaacgucgaccccaacgccaaccccaacguggacccgaacgcgaaccccaacgccaaccccaacgccaaccccaacgccaacccgaacgcgaaccccaacgccaaccccaacgccaaccccaacgccaacccgaacgccaaccccaacgcgaaccccaacgccaaccccaacgccaacccgaacgccaaccccaacgccaaccccaacgcgaaccccaacgccaacccgaacgccaaccccaacguggaccccaacgccaaccccaacgccaacccgaacgcgaaccccaacgccaaccccaacgccaacccgaacgccaaccccaacgccaaccccaacgcgaaccccaacgccaacccgaacgccaaccccaacgccaaccccaacgcgaaccccaacgccaacccgaacgccaaccccaacgccaaccccaacgccaaccccaacgcgaacccgaacgccaaccccaacaagaacaaccagggcaacggccaggggcacaacaugcccaacgaccccaaccgcaacgucgacgagaacgccaacgccaacuccgccgugaagaacaacaacaacgaggagccgagcgacaagcacaucaaggaguaccugaacaagauccagaacucccucagcacggaguggucccccugcagcgugaccugcggcaacgggauccagguccggaucaagcccggcuccgcgaacaagcccaaggacgagcuggacuacgccaacgacaucgagaagaagaucugcaagauggagaagugcagcuccguguucaacguggucaacagcuccaucgggcugaucauggugcucagcuuccuguuccugaacugaggacuaguuauaagacugacuagcccgaugggccucccaacgggcccuccuccccuccuugcaccgagauuaaucaaaggcucuuuucagagccaccaaaaaaaaaaaaaaaaaaaaaaaaaaaaaaaaaaaaaaaaaaaaaaaaaaaaaaaaaaaaaaaaaaaaaaaaaaaaaaaaaaaaaaaaaaaaaaaaaaaaa

SEQ ID NO: 8503 - RNA, 1338 nt, Artificial Sequence
  mRNA Design i-3 (hSL-A100) comprising derived and/or modified sequence from Pf(3D7)__XP_001351122.1__Pf-CSP(1-374) (opt1)
aggagaaagcuuaccaugaugcgcaagcuggccauccucagcguguccagcuuccuguucgucgaggcccuguuccaggaguaccagugcuacggcuccagcuccaacacccgggugcucaacgagcugaacuacgacaacgcggggaccaaccuguacaacgagcucgagaugaacuacuacggcaagcaggagaacugguacagccugaagaagaacucccgcagccugggggagaacgacgacggcaacaacgaggacaacgagaagcuccggaagcccaagcacaagaagcugaagcagccggccgacgggaaccccgaccccaacgccaaccccaacguggacccgaacgccaaccccaacgucgaccccaacgccaaccccaacguggacccgaacgcgaaccccaacgccaaccccaacgccaaccccaacgccaacccgaacgcgaaccccaacgccaaccccaacgccaaccccaacgccaacccgaacgccaaccccaacgcgaaccccaacgccaaccccaacgccaacccgaacgccaaccccaacgccaaccccaacgcgaaccccaacgccaacccgaacgccaaccccaacguggaccccaacgccaaccccaacgccaacccgaacgcgaaccccaacgccaaccccaacgccaacccgaacgccaaccccaacgccaaccccaacgcgaaccccaacgccaacccgaacgccaaccccaacgccaaccccaacgcgaaccccaacgccaacccgaacgccaaccccaacgccaaccccaacgccaaccccaacgcgaacccgaacgccaaccccaacaagaacaaccagggcaacggccaggggcacaacaugcccaacgaccccaaccgcaacgucgacgagaacgccaacgccaacuccgccgugaagaacaacaacaacgaggagccgagcgacaagcacaucaaggaguaccugaacaagauccagaacucccucagcacggaguggucccccugcagcgugaccugcggcaacgggauccagguccggaucaagcccggcuccgcgaacaagcccaaggacgagcuggacuacgccaacgacaucgagaagaagaucugcaagauggagaagugcugaggacuaguuauaagacugacuagcccgaugggccucccaacgggcccuccuccccuccuugcaccgagauuaaucaaaggcucuuuucagagccaccaaaaaaaaaaaaaaaaaaaaaaaaaaaaaaaaaaaaaaaaaaaaaaaaaaaaaaaaaaaaaaaaaaaaaaaaaaaaaaaaaaaaaaaaaaaaaaaaaaaaa

SEQ ID NO: 8504 - RNA, 1191 nt, Artificial Sequence
  mRNA Design i-3 (hSL-A100) comprising derived and/or modified sequence from Pf(3D7)__XP_001351122.1__Pf-CSP(1-325) (opt1)
aggagaaagcuuaccaugaugcgcaagcuggccauccucagcguguccagcuuccuguucgucgaggcccuguuccaggaguaccagugcuacggcuccagcuccaacacccgggugcucaacgagcugaacuacgacaacgcggggaccaaccuguacaacgagcucgagaugaacuacuacggcaagcaggagaacugguacagccugaagaagaacucccgcagccugggggagaacgacgacggcaacaacgaggacaacgagaagcuccggaagcccaagcacaagaagcugaagcagccggccgacgggaaccccgaccccaacgccaaccccaacguggacccgaacgccaaccccaacgucgaccccaacgccaaccccaacguggacccgaacgcgaaccccaacgccaaccccaacgccaaccccaacgccaacccgaacgcgaaccccaacgccaaccccaacgccaaccccaacgccaacccgaacgccaaccccaacgcgaaccccaacgccaaccccaacgccaacccgaacgccaaccccaacgccaaccccaacgcgaaccccaacgccaacccgaacgccaaccccaacguggaccccaacgccaaccccaacgccaacccgaacgcgaaccccaacgccaaccccaacgccaacccgaacgccaaccccaacgccaaccccaacgcgaaccccaacgccaacccgaacgccaaccccaacgccaaccccaacgcgaaccccaacgccaacccgaacgccaaccccaacgccaaccccaacgccaaccccaacgcgaacccgaacgccaaccccaacaagaacaaccagggcaacggccaggggcacaacaugcccaacgaccccaaccgcaacgucgacgagaacgccaacgccaacuccgccgugaagaacaacaacaacgaggagccgagcgacaagcacaucaaggaguaccugaacaagauccagaacugaggacuaguuauaagacugacuagcccgaugggccucccaacgggcccuccuccccuccuugcaccgagauuaaucaaaggcucuuuucagagccaccaaaaaaaaaaaaaaaaaaaaaaaaaaaaaaaaaaaaaaaaaaaaaaaaaaaaaaaaaaaaaaaaaaaaaaaaaaaaaaaaaaaaaaaaaaaaaaaaaaaaa

SEQ ID NO: 8505 - RNA, 1407 nt, Artificial Sequence
  mRNA Design i-3 (hSL-A100) comprising derived and/or modified sequence from Pf(3D7)__XP_001351122.1__HsALB_Pf-CSP(19-397) (opt1) R8529/R8532
aggagaaagcuuaccaugaagugggugaccuucaucagccuccuguuccuguucuccagcgccuacucccuguuccaggaguaccagugcuacggcuccagcuccaacacccgggugcucaacgagcugaacuacgacaacgcggggaccaaccuguacaacgagcucgagaugaacuacuacggcaagcaggagaacugguacagccugaagaagaacucccgcagccugggggagaacgacgacggcaacaacgaggacaacgagaagcuccggaagcccaagcacaagaagcugaagcagccggccgacgggaaccccgaccccaacgccaaccccaacguggacccgaacgccaaccccaacgucgaccccaacgccaaccccaacguggacccgaacgcgaaccccaacgccaaccccaacgccaaccccaacgccaacccgaacgcgaaccccaacgccaaccccaacgccaaccccaacgccaacccgaacgccaaccccaacgcgaaccccaacgccaaccccaacgccaacccgaacgccaaccccaacgccaaccccaacgcgaaccccaacgccaacccgaacgccaaccccaacguggaccccaacgccaaccccaacgccaacccgaacgcgaaccccaacgccaaccccaacgccaacccgaacgccaaccccaacgccaaccccaacgcgaaccccaacgccaacccgaacgccaaccccaacgccaaccccaacgcgaaccccaacgccaacccgaacgccaaccccaacgccaaccccaacgccaaccccaacgcgaacccgaacgccaaccccaacaagaacaaccagggcaacggccaggggcacaacaugcccaacgaccccaaccgcaacgucgacgagaacgccaacgccaacuccgccgugaagaacaacaacaacgaggagccgagcgacaagcacaucaaggaguaccugaacaagauccagaacucccucagcacggaguggucccccugcagcgugaccugcggcaacgggauccagguccggaucaagcccggcuccgcgaacaagcccaaggacgagcuggacuacgccaacgacaucgagaagaagaucugcaagauggagaagugcagcuccguguucaacguggucaacagcuccaucgggcugaucauggugcucagcuuccuguuccugaacugaggacuaguuauaagacugacuagcccgaugggccucccaacgggcccuccuccccuccuugcaccgagauuaaucaaaggcucuuuucagagccaccaaaaaaaaaaaaaaaaaaaaaaaaaaaaaaaaaaaaaaaaaaaaaaaaaaaaaaaaaaaaaaaaaaaaaaaaaaaaaaaaaaaaaaaaaaaaaaaaaaaaa

SEQ ID NO: 8506 - RNA, 1425 nt, Artificial Sequence
  mRNA Design i-3 (hSL-A100) comprising derived and/or modified sequence from Pf(3D7)__XP_001351122.1__HsIns-iso1_Pf-CSP(19-397) (opt1)
aggagaaagcuuaccauggcccuguggaugcgccuccugccccugcucgcccugcuggcgcucuggggcccggaccccgccgccgcccuguuccaggaguaccagugcuacggcuccagcuccaacacccgggugcucaacgagcugaacuacgacaacgcggggaccaaccuguacaacgagcucgagaugaacuacuacggcaagcaggagaacugguacagccugaagaagaacucccgcagccugggggagaacgacgacggcaacaacgaggacaacgagaagcuccggaagcccaagcacaagaagcugaagcagccggccgacgggaaccccgaccccaacgccaaccccaacguggacccgaacgccaaccccaacgucgaccccaacgccaaccccaacguggacccgaacgcgaaccccaacgccaaccccaacgccaaccccaacgccaacccgaacgcgaaccccaacgccaaccccaacgccaaccccaacgccaacccgaacgccaaccccaacgcgaaccccaacgccaaccccaacgccaacccgaacgccaaccccaacgccaaccccaacgcgaaccccaacgccaacccgaacgccaaccccaacguggaccccaacgccaaccccaacgccaacccgaacgcgaaccccaacgccaaccccaacgccaacccgaacgccaaccccaacgccaaccccaacgcgaaccccaacgccaacccgaacgccaaccccaacgccaaccccaacgcgaaccccaacgccaacccgaacgccaaccccaacgccaaccccaacgccaaccccaacgcgaacccgaacgccaaccccaacaagaacaaccagggcaacggccaggggcacaacaugcccaacgaccccaaccgcaacgucgacgagaacgccaacgccaacuccgccgugaagaacaacaacaacgaggagccgagcgacaagcacaucaaggaguaccugaacaagauccagaacucccucagcacggaguggucccccugcagcgugaccugcggcaacgggauccagguccggaucaagcccggcuccgcgaacaagcccaaggacgagcuggacuacgccaacgacaucgagaagaagaucugcaagauggagaagugcagcuccguguucaacguggucaacagcuccaucgggcugaucauggugcucagcuuccuguuccugaacugaggacuaguuauaagacugacuagcccgaugggccucccaacgggcccuccuccccuccuugcaccgagauuaaucaaaggcucuuuucagagccaccaaaaaaaaaaaaaaaaaaaaaaaaaaaaaaaaaaaaaaaaaaaaaaaaaaaaaaaaaaaaaaaaaaaaaaaaaaaaaaaaaaaaaaaaaaaaaaaaaaaaa

SEQ ID NO: 8507 - RNA, 1404 nt, Artificial Sequence
  mRNA Design i-3 (hSL-A100) comprising derived and/or modified sequence from Pf(3D7)__XP_001351122.1__HsSPARC_Pf-CSP(19-397) (opt1)
aggagaaagcuuaccaugcgcgccuggaucuucuuccugcucugccuggccggccgggcccuggcccuguuccaggaguaccagugcuacggcuccagcuccaacacccgggugcucaacgagcugaacuacgacaacgcggggaccaaccuguacaacgagcucgagaugaacuacuacggcaagcaggagaacugguacagccugaagaagaacucccgcagccugggggagaacgacgacggcaacaacgaggacaacgagaagcuccggaagcccaagcacaagaagcugaagcagccggccgacgggaaccccgaccccaacgccaaccccaacguggacccgaacgccaaccccaacgucgaccccaacgccaaccccaacguggacccgaacgcgaaccccaacgccaaccccaacgccaaccccaacgccaacccgaacgcgaaccccaacgccaaccccaacgccaaccccaacgccaacccgaacgccaaccccaacgcgaaccccaacgccaaccccaacgccaacccgaacgccaaccccaacgccaaccccaacgcgaaccccaacgccaacccgaacgccaaccccaacguggaccccaacgccaaccccaacgccaacccgaacgcgaaccccaacgccaaccccaacgccaacccgaacgccaaccccaacgccaaccccaacgcgaaccccaacgccaacccgaacgccaaccccaacgccaaccccaacgcgaaccccaacgccaacccgaacgccaaccccaacgccaaccccaacgccaaccccaacgcgaacccgaacgccaaccccaacaagaacaaccagggcaacggccaggggcacaacaugcccaacgaccccaaccgcaacgucgacgagaacgccaacgccaacuccgccgugaagaacaacaacaacgaggagccgagcgacaagcacaucaaggaguaccugaacaagauccagaacucccucagcacggaguggucccccugcagcgugaccugcggcaacgggauccagguccggaucaagcccggcuccgcgaacaagcccaaggacgagcuggacuacgccaacgacaucgagaagaagaucugcaagauggagaagugcagcuccguguucaacguggucaacagcuccaucgggcugaucauggugcucagcuuccuguuccugaacugaggacuaguuauaagacugacuagcccgaugggccucccaacgggcccuccuccccuccuugcaccgagauuaaucaaaggcucuuuucagagccaccaaaaaaaaaaaaaaaaaaaaaaaaaaaaaaaaaaaaaaaaaaaaaaaaaaaaaaaaaaaaaaaaaaaaaaaaaaaaaaaaaaaaaaaaaaaaaaaaaaaaa

SEQ ID NO: 8508 - RNA, 1407 nt, Artificial Sequence
  mRNA Design i-3 (hSL-A100) comprising derived and/or modified sequence from Pf(3D7)__XP_001351122.1__IgE_Pf-CSP(19-397) (opt1)
aggagaaagcuuaccauggacuggaccuggauccuguuccucguggccgccgcgacccgcguccacagccuguuccaggaguaccagugcuacggcuccagcuccaacacccgggugcucaacgagcugaacuacgacaacgcggggaccaaccuguacaacgagcucgagaugaacuacuacggcaagcaggagaacugguacagccugaagaagaacucccgcagccugggggagaacgacgacggcaacaacgaggacaacgagaagcuccggaagcccaagcacaagaagcugaagcagccggccgacgggaaccccgaccccaacgccaaccccaacguggacccgaacgccaaccccaacgucgaccccaacgccaaccccaacguggacccgaacgcgaaccccaacgccaaccccaacgccaaccccaacgccaacccgaacgcgaaccccaacgccaaccccaacgccaaccccaacgccaacccgaacgccaaccccaacgcgaaccccaacgccaaccccaacgccaacccgaacgccaaccccaacgccaaccccaacgcgaaccccaacgccaacccgaacgccaaccccaacguggaccccaacgccaaccccaacgccaacccgaacgcgaaccccaacgccaaccccaacgccaacccgaacgccaaccccaacgccaaccccaacgcgaaccccaacgccaacccgaacgccaaccccaacgccaaccccaacgcgaaccccaacgccaacccgaacgccaaccccaacgccaaccccaacgccaaccccaacgcgaacccgaacgccaaccccaacaagaacaaccagggcaacggccaggggcacaacaugcccaacgaccccaaccgcaacgucgacgagaacgccaacgccaacuccgccgugaagaacaacaacaacgaggagccgagcgacaagcacaucaaggaguaccugaacaagauccagaacucccucagcacggaguggucccccugcagcgugaccugcggcaacgggauccagguccggaucaagcccggcuccgcgaacaagcccaaggacgagcuggacuacgccaacgacaucgagaagaagaucugcaagauggagaagugcagcuccguguucaacguggucaacagcuccaucgggcugaucauggugcucagcuuccuguuccugaacugaggacuaguuauaagacugacuagcccgaugggccucccaacgggcccuccuccccuccuugcaccgagauuaaucaaaggcucuuuucagagccaccaaaaaaaaaaaaaaaaaaaaaaaaaaaaaaaaaaaaaaaaaaaaaaaaaaaaaaaaaaaaaaaaaaaaaaaaaaaaaaaaaaaaaaaaaaaaaaaaaaaaa

SEQ ID NO: 8509 - RNA, 1572 nt, Artificial Sequence
  mRNA Design i-3 (hSL-A100) comprising derived and/or modified sequence from Pf(3D7)__XP_001351122.1__Pf-CSP_L(G4SG4)_TM domain HA (opt1)
aggagaaagcuuaccaugaugcgcaagcuggccauccucagcguguccagcuuccuguucgucgaggcccuguuccaggaguaccagugcuacggcuccagcuccaacacccgggugcucaacgagcugaacuacgacaacgcggggaccaaccuguacaacgagcucgagaugaacuacuacggcaagcaggagaacugguacagccugaagaagaacucccgcagccugggggagaacgacgacggcaacaacgaggacaacgagaagcuccggaagcccaagcacaagaagcugaagcagccggccgacgggaaccccgaccccaacgccaaccccaacguggacccgaacgccaaccccaacgucgaccccaacgccaaccccaacguggacccgaacgcgaaccccaacgccaaccccaacgccaaccccaacgccaacccgaacgcgaaccccaacgccaaccccaacgccaaccccaacgccaacccgaacgccaaccccaacgcgaaccccaacgccaaccccaacgccaacccgaacgccaaccccaacgccaaccccaacgcgaaccccaacgccaacccgaacgccaaccccaacguggaccccaacgccaaccccaacgccaacccgaacgcgaaccccaacgccaaccccaacgccaacccgaacgccaaccccaacgccaaccccaacgcgaaccccaacgccaacccgaacgccaaccccaacgccaaccccaacgcgaaccccaacgccaacccgaacgccaaccccaacgccaaccccaacgccaaccccaacgcgaacccgaacgccaaccccaacaagaacaaccagggcaacggccaggggcacaacaugcccaacgaccccaaccgcaacgucgacgagaacgccaacgccaacuccgccgugaagaacaacaacaacgaggagccgagcgacaagcacaucaaggaguaccugaacaagauccagaacucccucagcacggaguggucccccugcagcgugaccugcggcaacgggauccagguccggaucaagcccggcuccgcgaacaagcccaaggacgagcuggacuacgccaacgacaucgagaagaagaucugcaagauggagaagugcagcuccguguucaacguggucaacagcuccaucgggcugaucauggugcucagcuuccuguuccugaacggcgggggcgggagcggcgggggcggcaagcucgaguccacgcggaucuaccagauccuggcgaucuacagcaccgucgccagcucccuggugcucguggucagccugggggccaucuccuucuggaugugcagcaacggcucccugcagugccgcaucugcaucugaggacuaguuauaagacugacuagcccgaugggccucccaacgggcccuccuccccuccuugcaccgagauuaaucaaaggcucuuuucagagccaccaaaaaaaaaaaaaaaaaaaaaaaaaaaaaaaaaaaaaaaaaaaaaaaaaaaaaaaaaaaaaaaaaaaaaaaaaaaaaaaaaaaaaaaaaaaaaaaaaaaaa

SEQ ID NO: 8510 - RNA, 1446 nt, Artificial Sequence
  mRNA Design i-3 (hSL-A100) comprising derived and/or modified sequence from Pf(3D7)__XP_001351122.1__Pf-CSP(199-377)_L(PVTN)_HBsAg (opt1)
aggagaaagcuuaccauggaccccaacgccaaccccaacgccaacccgaacgcgaaccccaacgccaaccccaacgccaacccgaacgccaaccccaacgccaaccccaacgcgaaccccaacgccaacccgaacgccaaccccaacgccaaccccaacgcgaaccccaacgccaacccgaacgccaaccccaacgccaaccccaacgccaaccccaacgcgaacccgaacgccaaccccaacaagaacaaccagggcaacggccaggggcacaacaugcccaacgaccccaaccgcaacgucgacgagaacgccaacgccaacuccgccgugaagaacaacaacaacgaggagccgagcgacaagcacaucaaggaguaccugaacaagauccagaacucccucagcacggaguggucccccugcagcgugaccugcggcaacgggauccagguccggaucaagcccggcuccgcgaacaagcccaaggacgagcuggacuacgccaacgacaucgagaagaagaucugcaagauggagaagugcagcuccgugccggugacgaacauggagaacaucaccagcggcuuccuggggccccuccuggugcugcaggccggcuucuuccuccugacccgcauccugaccaucccgcagucccucgacagcugguggaccucccugaacuuccucgggggcagccccgucugccuggggcagaacucccagagccccaccuccaaccacagccccaccuccugcccgcccaucugccccggcuaccgguggaugugccugcgccgguucaucaucuuccuguucauccuccugcugugccucaucuuccugcuggugcuccuggacuaccagggcaugcugcccgugugcccgcucauccccgggagcacgaccaccaacaccggccccugcaagacgugcaccacccccgcccaggggaacuccauguucccgagcugcugcugcaccaagcccacggacggcaacugcacgugcauccccauccccuccagcugggcguucgccaaguaccugugggagugggccuccguccgcuucagcuggcugucccuccuggugccguucgugcagugguucgucgggcugagccccaccguguggcucuccgccaucuggaugaugugguacuggggccccagccuguacagcaucgugucccccuucaucccgcugcuccccaucuucuucugccugugggucuacaucugaggacuaguuauaagacugacuagcccgaugggccucccaacgggcccuccuccccuccuugcaccgagauuaaucaaaggcucuuuucagagccaccaaaaaaaaaaaaaaaaaaaaaaaaaaaaaaaaaaaaaaaaaaaaaaaaaaaaaaaaaaaaaaaaaaaaaaaaaaaaaaaaaaaaaaaaaaaaaaaaaaaaa

SEQ ID NO: 8511 - RNA, 1488 nt, Artificial Sequence
  mRNA Design i-3 (hSL-A100) comprising derived and/or modified sequence from Pf(3D7)__XP_001351122.1__Pf-CSP(199-387)_L(PVTN)_HBsAg (opt1)
aggagaaagcuuaccaugauggccccggaccccaacgccaaccccaacgccaacccgaacgcgaaccccaacgccaaccccaacgccaacccgaacgccaaccccaacgccaaccccaacgcgaaccccaacgccaacccgaacgccaaccccaacgccaaccccaacgcgaaccccaacgccaacccgaacgccaaccccaacgccaaccccaacgccaaccccaacgcgaacccgaacgccaaccccaacaagaacaaccagggcaacggccaggggcacaacaugcccaacgaccccaaccgcaacgucgacgagaacgccaacgccaacuccgccgugaagaacaacaacaacgaggagccgagcgacaagcacaucaaggaguaccugaacaagauccagaacucccucagcacggaguggucccccugcagcgugaccugcggcaacgggauccagguccggaucaagcccggcuccgcgaacaagcccaaggacgagcuggacuacgccaacgacaucgagaagaagaucugcaagauggagaagugcagcuccguguucaacguggucaacagcuccaucgggcuggggccggugacgaacauggagaacaucaccagcggcuuccuggggccccuccuggugcugcaggccggcuucuuccuccugacccgcauccugaccaucccgcagucccucgacagcugguggaccucccugaacuuccucgggggcagccccgucugccuggggcagaacucccagagccccaccuccaaccacagccccaccuccugcccgcccaucugccccggcuaccgguggaugugccugcgccgguucaucaucuuccuguucauccuccugcugugccucaucuuccugcuggugcuccuggacuaccagggcaugcugcccgugugcccgcucauccccgggagcacgaccaccaacaccggccccugcaagacgugcaccacccccgcccaggggaacuccauguucccgagcugcugcugcaccaagcccacggacggcaacugcacgugcauccccauccccuccagcugggcguucgccaaguaccugugggagugggccuccguccgcuucagcuggcugucccuccuggugccguucgugcagugguucgucgggcugagccccaccguguggcucuccgccaucuggaugaugugguacuggggccccagccuguacagcaucgugucccccuucaucccgcugcuccccaucuucuucugccugugggucuacaucugaggacuaguuauaagacugacuagcccgaugggccucccaacgggcccuccuccccuccuugcaccgagauuaaucaaaggcucuuuucagagccaccaaaaaaaaaaaaaaaaaaaaaaaaaaaaaaaaaaaaaaaaaaaaaaaaaaaaaaaaaaaaaaaaaaaaaaaaaaaaaaaaaaaaaaaaaaaaaaaaaaaaa

SEQ ID NO: 8512 - RNA, 672 nt, Artificial Sequence
  mRNA Design i-3 (hSL-A100) comprising derived and/or modified sequence from Pf(3D7)__XP_001351122.1__HsALB_Pf-CSP(19-152) (opt1)
aggagaaagcuuaccaugaagugggugaccuucaucagccuccuguuccuguucuccagcgccuacucccuguuccaggaguaccagugcuacggcuccagcuccaacacccgggugcucaacgagcugaacuacgacaacgcggggaccaaccuguacaacgagcucgagaugaacuacuacggcaagcaggagaacugguacagccugaagaagaacucccgcagccugggggagaacgacgacggcaacaacgaggacaacgagaagcuccggaagcccaagcacaagaagcugaagcagccggccgacgggaaccccgaccccaacgccaaccccaacguggacccgaacgccaaccccaacgucgaccccaacgccaaccccaacguggacccgaacgcgaaccccaacgccaaccccaacgccaaccccaacgccaacccgaacgcgaaccccaacgccaaccccugaggacuaguuauaagacugacuagcccgaugggccucccaacgggcccuccuccccuccuugcaccgagauuaaucaaaggcucuuuucagagccaccaaaaaaaaaaaaaaaaaaaaaaaaaaaaaaaaaaaaaaaaaaaaaaaaaaaaaaaaaaaaaaaaaaaaaaaaaaaaaaaaaaaaaaaaaaaaaaaaaaaaa

SEQ ID NO: 8513 - RNA, 792 nt, Artificial Sequence
  mRNA Design i-3 (hSL-A100) comprising derived and/or modified sequence from Pf(3D7)__XP_001351122.1__HsALB_Pf-CSP(19-192) (opt1)
aggagaaagcuuaccaugaagugggugaccuucaucagccuccuguuccuguucuccagcgccuacucccuguuccaggaguaccagugcuacggcuccagcuccaacacccgggugcucaacgagcugaacuacgacaacgcggggaccaaccuguacaacgagcucgagaugaacuacuacggcaagcaggagaacugguacagccugaagaagaacucccgcagccugggggagaacgacgacggcaacaacgaggacaacgagaagcuccggaagcccaagcacaagaagcugaagcagccggccgacgggaaccccgaccccaacgccaaccccaacguggacccgaacgccaaccccaacgucgaccccaacgccaaccccaacguggacccgaacgcgaaccccaacgccaaccccaacgccaaccccaacgccaacccgaacgcgaaccccaacgccaaccccaacgccaaccccaacgccaacccgaacgccaaccccaacgcgaaccccaacgccaaccccaacgccaacccgaacgccaaccccaacgccaaccccaacgcgaaccccaacgccaacccgugaggacuaguuauaagacugacuagcccgaugggccucccaacgggcccuccuccccuccuugcaccgagauuaaucaaaggcucuuuucagagccaccaaaaaaaaaaaaaaaaaaaaaaaaaaaaaaaaaaaaaaaaaaaaaaaaaaaaaaaaaaaaaaaaaaaaaaaaaaaaaaaaaaaaaaaaaaaaaaaaaaaaa

SEQ ID NO: 8514 - RNA, 1032 nt, Artificial Sequence
  mRNA Design i-3 (hSL-A100) comprising derived and/or modified sequence from Pf(3D7)__XP_001351122.1__HsALB_Pf-CSP(19-272) (opt1)
aggagaaagcuuaccaugaagugggugaccuucaucagccuccuguuccuguucuccagcgccuacucccuguuccaggaguaccagugcuacggcuccagcuccaacacccgggugcucaacgagcugaacuacgacaacgcggggaccaaccuguacaacgagcucgagaugaacuacuacggcaagcaggagaacugguacagccugaagaagaacucccgcagccugggggagaacgacgacggcaacaacgaggacaacgagaagcuccggaagcccaagcacaagaagcugaagcagccggccgacgggaaccccgaccccaacgccaaccccaacguggacccgaacgccaaccccaacgucgaccccaacgccaaccccaacguggacccgaacgcgaaccccaacgccaaccccaacgccaaccccaacgccaacccgaacgcgaaccccaacgccaaccccaacgccaaccccaacgccaacccgaacgccaaccccaacgcgaaccccaacgccaaccccaacgccaacccgaacgccaaccccaacgccaaccccaacgcgaaccccaacgccaacccgaacgccaaccccaacguggaccccaacgccaaccccaacgccaacccgaacgcgaaccccaacgccaaccccaacgccaacccgaacgccaaccccaacgccaaccccaacgcgaaccccaacgccaacccgaacgccaaccccaacgccaaccccaacgcgaaccccaacgccaacccgaacgccaaccccaacgccaaccccaacgccaaccccaacgcgaacccgaacgccaaccccugaggacuaguuauaagacugacuagcccgaugggccucccaacgggcccuccuccccuccuugcaccgagauuaaucaaaggcucuuuucagagccaccaaaaaaaaaaaaaaaaaaaaaaaaaaaaaaaaaaaaaaaaaaaaaaaaaaaaaaaaaaaaaaaaaaaaaaaaaaaaaaaaaaaaaaaaaaaaaaaaaaaaa

SEQ ID NO: 8515 - RNA, 1194 nt, Artificial Sequence
  mRNA Design i-3 (hSL-A100) comprising derived and/or modified sequence from Pf(3D7)__XP_001351122.1__HsALB_Pf-CSP(19-272)_L(AAY)_Pf-CSP(310-3 27)_L(AAY)_Pf-CSP(346-375) (opt1)
aggagaaagcuuaccaugaagugggugaccuucaucagccuccuguuccuguucuccagcgccuacucccuguuccaggaguaccagugcuacggcuccagcuccaacacccgggugcucaacgagcugaacuacgacaacgcggggaccaaccuguacaacgagcucgagaugaacuacuacggcaagcaggagaacugguacagccugaagaagaacucccgcagccugggggagaacgacgacggcaacaacgaggacaacgagaagcuccggaagcccaagcacaagaagcugaagcagccggccgacgggaaccccgaccccaacgccaaccccaacguggacccgaacgccaaccccaacgucgaccccaacgccaaccccaacguggacccgaacgcgaaccccaacgccaaccccaacgccaaccccaacgccaacccgaacgcgaaccccaacgccaaccccaacgccaaccccaacgccaacccgaacgccaaccccaacgcgaaccccaacgccaaccccaacgccaacccgaacgccaaccccaacgccaaccccaacgcgaaccccaacgccaacccgaacgccaaccccaacguggaccccaacgccaaccccaacgccaacccgaacgcgaaccccaacgccaaccccaacgccaacccgaacgccaaccccaacgccaaccccaacgcgaaccccaacgccaacccgaacgccaaccccaacgccaaccccaacgcgaaccccaacgccaacccgaacgccaaccccaacgccaaccccaacgccaaccccaacgcgaacccgaacgccaaccccgccgcguaugagccgagcgacaagcacaucaaggaguaccugaacaagauccagaacucccucgcggccuacaucaagcccggcuccgcgaacaagcccaaggacgagcuggacuacgccaacgacaucgagaagaagaucugcaagauggagaagugcagcugaggacuaguuauaagacugacuagcccgaugggccucccaacgggcccuccuccccuccuugcaccgagauuaaucaaaggcucuuuucagagccaccaaaaaaaaaaaaaaaaaaaaaaaaaaaaaaaaaaaaaaaaaaaaaaaaaaaaaaaaaaaaaaaaaaaaaaaaaaaaaaaaaaaaaaaaaaaaaaaaaaaaa

SEQ ID NO: 8516 - RNA, 1155 nt, Artificial Sequence
  mRNA Design i-3 (hSL-A100) comprising derived and/or modified sequence from Pf(3D7)__XP_001351122.1__HsALB_Pf-CSP(19-272)_L(AAY)_Pf-CSP(346-3 65)_L(AAY)_P2 (opt1)
aggagaaagcuuaccaugaagugggugaccuucaucagccuccuguuccuguucuccagcgccuacucccuguuccaggaguaccagugcuacggcuccagcuccaacacccgggugcucaacgagcugaacuacgacaacgcggggaccaaccuguacaacgagcucgagaugaacuacuacggcaagcaggagaacugguacagccugaagaagaacucccgcagccugggggagaacgacgacggcaacaacgaggacaacgagaagcuccggaagcccaagcacaagaagcugaagcagccggccgacgggaaccccgaccccaacgccaaccccaacguggacccgaacgccaaccccaacgucgaccccaacgccaaccccaacguggacccgaacgcgaaccccaacgccaaccccaacgccaaccccaacgccaacccgaacgcgaaccccaacgccaaccccaacgccaaccccaacgccaacccgaacgccaaccccaacgcgaaccccaacgccaaccccaacgccaacccgaacgccaaccccaacgccaaccccaacgcgaaccccaacgccaacccgaacgccaaccccaacguggaccccaacgccaaccccaacgccaacccgaacgcgaaccccaacgccaaccccaacgccaacccgaacgccaaccccaacgccaaccccaacgcgaaccccaacgccaacccgaacgccaaccccaacgccaaccccaacgcgaaccccaacgccaacccgaacgccaaccccaacgccaaccccaacgccaaccccaacgcgaacccgaacgccaaccccgccgcguauaucaagcccggcuccgcgaacaagcccaaggacgagcuggacuacgccaacgacaucgaggcggccuaccaguacaucaaggccaacagcaaguucaucggcaucaccgagcugugaggacuaguuauaagacugacuagcccgaugggccucccaacgggcccuccuccccuccuugcaccgagauuaaucaaaggcucuuuucagagccaccaaaaaaaaaaaaaaaaaaaaaaaaaaaaaaaaaaaaaaaaaaaaaaaaaaaaaaaaaaaaaaaaaaaaaaaaaaaaaaaaaaaaaaaaaaaaaaaaaaaaa

SEQ ID NO: 8517 - RNA, 1149 nt, Artificial Sequence
  mRNA Design i-3 (hSL-A100) comprising derived and/or modified sequence from Pf(3D7)__XP_001351122.1__HsALB_Pf-CSP(19-272)_L(AAY)_Pf-CSP(346-3 65)_L(AAY)_PADRE (opt1)
aggagaaagcuuaccaugaagugggugaccuucaucagccuccuguuccuguucuccagcgccuacucccuguuccaggaguaccagugcuacggcuccagcuccaacacccgggugcucaacgagcugaacuacgacaacgcggggaccaaccuguacaacgagcucgagaugaacuacuacggcaagcaggagaacugguacagccugaagaagaacucccgcagccugggggagaacgacgacggcaacaacgaggacaacgagaagcuccggaagcccaagcacaagaagcugaagcagccggccgacgggaaccccgaccccaacgccaaccccaacguggacccgaacgccaaccccaacgucgaccccaacgccaaccccaacguggacccgaacgcgaaccccaacgccaaccccaacgccaaccccaacgccaacccgaacgcgaaccccaacgccaaccccaacgccaaccccaacgccaacccgaacgccaaccccaacgcgaaccccaacgccaaccccaacgccaacccgaacgccaaccccaacgccaaccccaacgcgaaccccaacgccaacccgaacgccaaccccaacguggaccccaacgccaaccccaacgccaacccgaacgcgaaccccaacgccaaccccaacgccaacccgaacgccaaccccaacgccaaccccaacgcgaaccccaacgccaacccgaacgccaaccccaacgccaaccccaacgcgaaccccaacgccaacccgaacgccaaccccaacgccaaccccaacgccaaccccaacgcgaacccgaacgccaaccccgccgcguauaucaagcccggcuccgcgaacaagcccaaggacgagcuggacuacgccaacgacaucgaggcggccuacgccaaguucguggccgccuggacccugaaggcggccgccugaggacuaguuauaagacugacuagcccgaugggccucccaacgggcccuccuccccuccuugcaccgagauuaaucaaaggcucuuuucagagccaccaaaaaaaaaaaaaaaaaaaaaaaaaaaaaaaaaaaaaaaaaaaaaaaaaaaaaaaaaaaaaaaaaaaaaaaaaaaaaaaaaaaaaaaaaaaaaaaaaaaaa

SEQ ID NO: 8518 - RNA, 1206 nt, Artificial Sequence
  mRNA Design i-3 (hSL-A100) comprising derived and/or modified sequence from Pf(3D7)__XP_001351122.1__HsALB_Pf-CSP(19-272)_L(G4S)_Pf-CSP(310-3 27)_L(G4S)_Pf-CSP(346-375) (opt1)
aggagaaagcuuaccaugaagugggugaccuucaucagccuccuguuccuguucuccagcgccuacucccuguuccaggaguaccagugcuacggcuccagcuccaacacccgggugcucaacgagcugaacuacgacaacgcggggaccaaccuguacaacgagcucgagaugaacuacuacggcaagcaggagaacugguacagccugaagaagaacucccgcagccugggggagaacgacgacggcaacaacgaggacaacgagaagcuccggaagcccaagcacaagaagcugaagcagccggccgacgggaaccccgaccccaacgccaaccccaacguggacccgaacgccaaccccaacgucgaccccaacgccaaccccaacguggacccgaacgcgaaccccaacgccaaccccaacgccaaccccaacgccaacccgaacgcgaaccccaacgccaaccccaacgccaaccccaacgccaacccgaacgccaaccccaacgcgaaccccaacgccaaccccaacgccaacccgaacgccaaccccaacgccaaccccaacgcgaaccccaacgccaacccgaacgccaaccccaacguggaccccaacgccaaccccaacgccaacccgaacgcgaaccccaacgccaaccccaacgccaacccgaacgccaaccccaacgccaaccccaacgcgaaccccaacgccaacccgaacgccaaccccaacgccaaccccaacgcgaaccccaacgccaacccgaacgccaaccccaacgccaaccccaacgccaaccccaacgcgaacccgaacgccaaccccggaggcggaggaucugagccgagcgacaagcacaucaaggaguaccugaacaagauccagaacucccucggcggagguggaaguaucaagcccggcuccgcgaacaagcccaaggacgagcuggacuacgccaacgacaucgagaagaagaucugcaagauggagaagugcagcugaggacuaguuauaagacugacuagcccgaugggccucccaacgggcccuccuccccuccuugcaccgagauuaaucaaaggcucuuuucagagccaccaaaaaaaaaaaaaaaaaaaaaaaaaaaaaaaaaaaaaaaaaaaaaaaaaaaaaaaaaaaaaaaaaaaaaaaaaaaaaaaaaaaaaaaaaaaaaaaaaaaaa

SEQ ID NO: 8519 - RNA, 1191 nt, Artificial Sequence
  mRNA Design i-3 (hSL-A100) comprising derived and/or modified sequence from Pf(3D7)__XP_001351122.1__HsALB_Pf-CSP(19-272)_L(G4S)_Pf-CSP(310-3 27)_Pf-CSP(346-375) (opt1)
aggagaaagcuuaccaugaagugggugaccuucaucagccuccuguuccuguucuccagcgccuacucccuguuccaggaguaccagugcuacggcuccagcuccaacacccgggugcucaacgagcugaacuacgacaacgcggggaccaaccuguacaacgagcucgagaugaacuacuacggcaagcaggagaacugguacagccugaagaagaacucccgcagccugggggagaacgacgacggcaacaacgaggacaacgagaagcuccggaagcccaagcacaagaagcugaagcagccggccgacgggaaccccgaccccaacgccaaccccaacguggacccgaacgccaaccccaacgucgaccccaacgccaaccccaacguggacccgaacgcgaaccccaacgccaaccccaacgccaaccccaacgccaacccgaacgcgaaccccaacgccaaccccaacgccaaccccaacgccaacccgaacgccaaccccaacgcgaaccccaacgccaaccccaacgccaacccgaacgccaaccccaacgccaaccccaacgcgaaccccaacgccaacccgaacgccaaccccaacguggaccccaacgccaaccccaacgccaacccgaacgcgaaccccaacgccaaccccaacgccaacccgaacgccaaccccaacgccaaccccaacgcgaaccccaacgccaacccgaacgccaaccccaacgccaaccccaacgcgaaccccaacgccaacccgaacgccaaccccaacgccaaccccaacgccaaccccaacgcgaacccgaacgccaaccccggaggcggaggaucugagccgagcgacaagcacaucaaggaguaccugaacaagauccagaacucccucaucaagcccggcuccgcgaacaagcccaaggacgagcuggacuacgccaacgacaucgagaagaagaucugcaagauggagaagugcagcugaggacuaguuauaagacugacuagcccgaugggccucccaacgggcccuccuccccuccuugcaccgagauuaaucaaaggcucuuuucagagccaccaaaaaaaaaaaaaaaaaaaaaaaaaaaaaaaaaaaaaaaaaaaaaaaaaaaaaaaaaaaaaaaaaaaaaaaaaaaaaaaaaaaaaaaaaaaaaaaaaaaaa

SEQ ID NO: 8520 - RNA, 1191 nt, Artificial Sequence
  mRNA Design i-3 (hSL-A100) comprising derived and/or modified sequence from Pf(3D7)__XP_001351122.1__HsALB_Pf-CSP(19-325) (opt1)
aggagaaagcuuaccaugaagugggugaccuucaucagccuccuguuccuguucuccagcgccuacucccuguuccaggaguaccagugcuacggcuccagcuccaacacccgggugcucaacgagcugaacuacgacaacgcggggaccaaccuguacaacgagcucgagaugaacuacuacggcaagcaggagaacugguacagccugaagaagaacucccgcagccugggggagaacgacgacggcaacaacgaggacaacgagaagcuccggaagcccaagcacaagaagcugaagcagccggccgacgggaaccccgaccccaacgccaaccccaacguggacccgaacgccaaccccaacgucgaccccaacgccaaccccaacguggacccgaacgcgaaccccaacgccaaccccaacgccaaccccaacgccaacccgaacgcgaaccccaacgccaaccccaacgccaaccccaacgccaacccgaacgccaaccccaacgcgaaccccaacgccaaccccaacgccaacccgaacgccaaccccaacgccaaccccaacgcgaaccccaacgccaacccgaacgccaaccccaacguggaccccaacgccaaccccaacgccaacccgaacgcgaaccccaacgccaaccccaacgccaacccgaacgccaaccccaacgccaaccccaacgcgaaccccaacgccaacccgaacgccaaccccaacgccaaccccaacgcgaaccccaacgccaacccgaacgccaaccccaacgccaaccccaacgccaaccccaacgcgaacccgaacgccaaccccaacaagaacaaccagggcaacggccaggggcacaacaugcccaacgaccccaaccgcaacgucgacgagaacgccaacgccaacuccgccgugaagaacaacaacaacgaggagccgagcgacaagcacaucaaggaguaccugaacaagauccagaacugaggacuaguuauaagacugacuagcccgaugggccucccaacgggcccuccuccccuccuugcaccgagauuaaucaaaggcucuuuucagagccaccaaaaaaaaaaaaaaaaaaaaaaaaaaaaaaaaaaaaaaaaaaaaaaaaaaaaaaaaaaaaaaaaaaaaaaaaaaaaaaaaaaaaaaaaaaaaaaaaaaaaa

SEQ ID NO: 8521 - RNA, 1368 nt, Artificial Sequence
  mRNA Design i-3 (hSL-A100) comprising derived and/or modified sequence from Pf(3D7)__XP_001351122.1__HsALB_Pf-CSP(19-384) (opt1)
aggagaaagcuuaccaugaagugggugaccuucaucagccuccuguuccuguucuccagcgccuacucccuguuccaggaguaccagugcuacggcuccagcuccaacacccgggugcucaacgagcugaacuacgacaacgcggggaccaaccuguacaacgagcucgagaugaacuacuacggcaagcaggagaacugguacagccugaagaagaacucccgcagccugggggagaacgacgacggcaacaacgaggacaacgagaagcuccggaagcccaagcacaagaagcugaagcagccggccgacgggaaccccgaccccaacgccaaccccaacguggacccgaacgccaaccccaacgucgaccccaacgccaaccccaacguggacccgaacgcgaaccccaacgccaaccccaacgccaaccccaacgccaacccgaacgcgaaccccaacgccaaccccaacgccaaccccaacgccaacccgaacgccaaccccaacgcgaaccccaacgccaaccccaacgccaacccgaacgccaaccccaacgccaaccccaacgcgaaccccaacgccaacccgaacgccaaccccaacguggaccccaacgccaaccccaacgccaacccgaacgcgaaccccaacgccaaccccaacgccaacccgaacgccaaccccaacgccaaccccaacgcgaaccccaacgccaacccgaacgccaaccccaacgccaaccccaacgcgaaccccaacgccaacccgaacgccaaccccaacgccaaccccaacgccaaccccaacgcgaacccgaacgccaaccccaacaagaacaaccagggcaacggccaggggcacaacaugcccaacgaccccaaccgcaacgucgacgagaacgccaacgccaacuccgccgugaagaacaacaacaacgaggagccgagcgacaagcacaucaaggaguaccugaacaagauccagaacucccucagcacggaguggucccccugcagcgugaccugcggcaacgggauccagguccggaucaagcccggcuccgcgaacaagcccaaggacgagcuggacuacgccaacgacaucgagaagaagaucugcaagauggagaagugcagcuccguguucaacguggucaacagcuccugaggacuaguuauaagacugacuagcccgaugggccucccaacgggcccuccuccccuccuugcaccgagauuaaucaaaggcucuuuucagagccaccaaaaaaaaaaaaaaaaaaaaaaaaaaaaaaaaaaaaaaaaaaaaaaaaaaaaaaaaaaaaaaaaaaaaaaaaaaaaaaaaaaaaaaaaaaaaaaaaaaaaa

SEQ ID NO: 8522 - RNA, 1506 nt, Artificial Sequence
  mRNA Design i-3 (hSL-A100) comprising derived and/or modified sequence from Pf(3D7)__XP_001351122.1__HsALB_Pf-CSP(19-384)_TM domain HA (opt1)
aggagaaagcuuaccaugaagugggugaccuucaucagccuccuguuccuguucuccagcgccuacucccuguuccaggaguaccagugcuacggcuccagcuccaacacccgggugcucaacgagcugaacuacgacaacgcggggaccaaccuguacaacgagcucgagaugaacuacuacggcaagcaggagaacugguacagccugaagaagaacucccgcagccugggggagaacgacgacggcaacaacgaggacaacgagaagcuccggaagcccaagcacaagaagcugaagcagccggccgacgggaaccccgaccccaacgccaaccccaacguggacccgaacgccaaccccaacgucgaccccaacgccaaccccaacguggacccgaacgcgaaccccaacgccaaccccaacgccaaccccaacgccaacccgaacgcgaaccccaacgccaaccccaacgccaaccccaacgccaacccgaacgccaaccccaacgcgaaccccaacgccaaccccaacgccaacccgaacgccaaccccaacgccaaccccaacgcgaaccccaacgccaacccgaacgccaaccccaacguggaccccaacgccaaccccaacgccaacccgaacgcgaaccccaacgccaaccccaacgccaacccgaacgccaaccccaacgccaaccccaacgcgaaccccaacgccaacccgaacgccaaccccaacgccaaccccaacgcgaaccccaacgccaacccgaacgccaaccccaacgccaaccccaacgccaaccccaacgcgaacccgaacgccaaccccaacaagaacaaccagggcaacggccaggggcacaacaugcccaacgaccccaaccgcaacgucgacgagaacgccaacgccaacuccgccgugaagaacaacaacaacgaggagccgagcgacaagcacaucaaggaguaccugaacaagauccagaacucccucagcacggaguggucccccugcagcgugaccugcggcaacgggauccagguccggaucaagcccggcuccgcgaacaagcccaaggacgagcuggacuacgccaacgacaucgagaagaagaucugcaagauggagaagugcagcuccguguucaacguggucaacagcuccaagcucgaguccacgcggaucuaccagauccuggcgaucuacagcaccgucgccagcucccuggugcucguggucagccugggggccaucuccuucuggaugugcagcaacggcucccugcagugccgcaucugcaucugaggacuaguuauaagacugacuagcccgaugggccucccaacgggcccuccuccccuccuugcaccgagauuaaucaaaggcucuuuucagagccaccaaaaaaaaaaaaaaaaaaaaaaaaaaaaaaaaaaaaaaaaaaaaaaaaaaaaaaaaaaaaaaaaaaaaaaaaaaaaaaaaaaaaaaaaaaaaaaaaaaaaa

SEQ ID NO: 8523 - RNA, 1218 nt, Artificial Sequence
  mRNA Design i-3 (hSL-A100) comprising derived and/or modified sequence from Pf(3D7)__XP_001351122.1__HsALB_Pf-CSP(82-397) (opt1)
aggagaaagcuuaccaugaagugggugaccuucaucagccuccuguuccuguucuccagcgccuacuccgacaacgagaagcuccggaagcccaagcacaagaagcugaagcagccggccgacgggaaccccgaccccaacgccaaccccaacguggacccgaacgccaaccccaacgucgaccccaacgccaaccccaacguggacccgaacgcgaaccccaacgccaaccccaacgccaaccccaacgccaacccgaacgcgaaccccaacgccaaccccaacgccaaccccaacgccaacccgaacgccaaccccaacgcgaaccccaacgccaaccccaacgccaacccgaacgccaaccccaacgccaaccccaacgcgaaccccaacgccaacccgaacgccaaccccaacguggaccccaacgccaaccccaacgccaacccgaacgcgaaccccaacgccaaccccaacgccaacccgaacgccaaccccaacgccaaccccaacgcgaaccccaacgccaacccgaacgccaaccccaacgccaaccccaacgcgaaccccaacgccaacccgaacgccaaccccaacgccaaccccaacgccaaccccaacgcgaacccgaacgccaaccccaacaagaacaaccagggcaacggccaggggcacaacaugcccaacgaccccaaccgcaacgucgacgagaacgccaacgccaacuccgccgugaagaacaacaacaacgaggagccgagcgacaagcacaucaaggaguaccugaacaagauccagaacucccucagcacggaguggucccccugcagcgugaccugcggcaacgggauccagguccggaucaagcccggcuccgcgaacaagcccaaggacgagcuggacuacgccaacgacaucgagaagaagaucugcaagauggagaagugcagcuccguguucaacguggucaacagcuccaucgggcugaucauggugcucagcuuccuguuccugaacugaggacuaguuauaagacugacuagcccgaugggccucccaacgggcccuccuccccuccuugcaccgagauuaaucaaaggcucuuuucagagccaccaaaaaaaaaaaaaaaaaaaaaaaaaaaaaaaaaaaaaaaaaaaaaaaaaaaaaaaaaaaaaaaaaaaaaaaaaaaaaaaaaaaaaaaaaaaaaaaaaaaaa

SEQ ID NO: 8524 - RNA, 570 nt, Artificial Sequence
  mRNA Design i-3 (hSL-A100) comprising derived and/or modified sequence from Pf(3D7)__XP_001351122.1__HsALB_Pf-CSP(93-192) (opt1)
aggagaaagcuuaccaugaagugggugaccuucaucagccuccuguuccuguucuccagcgccuacuccaagcugaagcagccggccgacgggaaccccgaccccaacgccaaccccaacguggacccgaacgccaaccccaacgucgaccccaacgccaaccccaacguggacccgaacgcgaaccccaacgccaaccccaacgccaaccccaacgccaacccgaacgcgaaccccaacgccaaccccaacgccaaccccaacgccaacccgaacgccaaccccaacgcgaaccccaacgccaaccccaacgccaacccgaacgccaaccccaacgccaaccccaacgcgaaccccaacgccaacccgugaggacuaguuauaagacugacuagcccgaugggccucccaacgggcccuccuccccuccuugcaccgagauuaaucaaaggcucuuuucagagccaccaaaaaaaaaaaaaaaaaaaaaaaaaaaaaaaaaaaaaaaaaaaaaaaaaaaaaaaaaaaaaaaaaaaaaaaaaaaaaaaaaaaaaaaaaaaaaaaaaaaaa

SEQ ID NO: 8525 - RNA, 810 nt, Artificial Sequence
  mRNA Design i-3 (hSL-A100) comprising derived and/or modified sequence from Pf(3D7)__XP_001351122.1__HsALB_Pf-CSP(93-272) (opt1)
aggagaaagcuuaccaugaagugggugaccuucaucagccuccuguuccuguucuccagcgccuacuccaagcugaagcagccggccgacgggaaccccgaccccaacgccaaccccaacguggacccgaacgccaaccccaacgucgaccccaacgccaaccccaacguggacccgaacgcgaaccccaacgccaaccccaacgccaaccccaacgccaacccgaacgcgaaccccaacgccaaccccaacgccaaccccaacgccaacccgaacgccaaccccaacgcgaaccccaacgccaaccccaacgccaacccgaacgccaaccccaacgccaaccccaacgcgaaccccaacgccaacccgaacgccaaccccaacguggaccccaacgccaaccccaacgccaacccgaacgcgaaccccaacgccaaccccaacgccaacccgaacgccaaccccaacgccaaccccaacgcgaaccccaacgccaacccgaacgccaaccccaacgccaaccccaacgcgaaccccaacgccaacccgaacgccaaccccaacgccaaccccaacgccaaccccaacgcgaacccgaacgccaaccccugaggacuaguuauaagacugacuagcccgaugggccucccaacgggcccuccuccccuccuugcaccgagauuaaucaaaggcucuuuucagagccaccaaaaaaaaaaaaaaaaaaaaaaaaaaaaaaaaaaaaaaaaaaaaaaaaaaaaaaaaaaaaaaaaaaaaaaaaaaaaaaaaaaaaaaaaaaaaaaaaaaaaa

SEQ ID NO: 8526 - RNA, 1185 nt, Artificial Sequence
  mRNA Design i-3 (hSL-A100) comprising derived and/or modified sequence from Pf(3D7)__XP_001351122.1__HsALB_Pf-CSP(93-397) (opt1)
aggagaaagcuuaccaugaagugggugaccuucaucagccuccuguuccuguucuccagcgccuacuccaagcugaagcagccggccgacgggaaccccgaccccaacgccaaccccaacguggacccgaacgccaaccccaacgucgaccccaacgccaaccccaacguggacccgaacgcgaaccccaacgccaaccccaacgccaaccccaacgccaacccgaacgcgaaccccaacgccaaccccaacgccaaccccaacgccaacccgaacgccaaccccaacgcgaaccccaacgccaaccccaacgccaacccgaacgccaaccccaacgccaaccccaacgcgaaccccaacgccaacccgaacgccaaccccaacguggaccccaacgccaaccccaacgccaacccgaacgcgaaccccaacgccaaccccaacgccaacccgaacgccaaccccaacgccaaccccaacgcgaaccccaacgccaacccgaacgccaaccccaacgccaaccccaacgcgaaccccaacgccaacccgaacgccaaccccaacgccaaccccaacgccaaccccaacgcgaacccgaacgccaaccccaacaagaacaaccagggcaacggccaggggcacaacaugcccaacgaccccaaccgcaacgucgacgagaacgccaacgccaacuccgccgugaagaacaacaacaacgaggagccgagcgacaagcacaucaaggaguaccugaacaagauccagaacucccucagcacggaguggucccccugcagcgugaccugcggcaacgggauccagguccggaucaagcccggcuccgcgaacaagcccaaggacgagcuggacuacgccaacgacaucgagaagaagaucugcaagauggagaagugcagcuccguguucaacguggucaacagcuccaucgggcugaucauggugcucagcuuccuguuccugaacugaggacuaguuauaagacugacuagcccgaugggccucccaacgggcccuccuccccuccuugcaccgagauuaaucaaaggcucuuuucagagccaccaaaaaaaaaaaaaaaaaaaaaaaaaaaaaaaaaaaaaaaaaaaaaaaaaaaaaaaaaaaaaaaaaaaaaaaaaaaaaaaaaaaaaaaaaaaaaaaaaaaaa

SEQ ID NO: 8527 - RNA, 555 nt, Artificial Sequence
  mRNA Design i-3 (hSL-A100) comprising derived and/or modified sequence from Pf(3D7)__XP_001351122.1__HsALB_Pf-CSP(98-192) (opt1)
aggagaaagcuuaccaugaagugggugaccuucaucagccuccuguuccuguucuccagcgccuacuccgccgacgggaaccccgaccccaacgccaaccccaacguggacccgaacgccaaccccaacgucgaccccaacgccaaccccaacguggacccgaacgcgaaccccaacgccaaccccaacgccaaccccaacgccaacccgaacgcgaaccccaacgccaaccccaacgccaaccccaacgccaacccgaacgccaaccccaacgcgaaccccaacgccaaccccaacgccaacccgaacgccaaccccaacgccaaccccaacgcgaaccccaacgccaacccgugaggacuaguuauaagacugacuagcccgaugggccucccaacgggcccuccuccccuccuugcaccgagauuaaucaaaggcucuuuucagagccaccaaaaaaaaaaaaaaaaaaaaaaaaaaaaaaaaaaaaaaaaaaaaaaaaaaaaaaaaaaaaaaaaaaaaaaaaaaaaaaaaaaaaaaaaaaaaaaaaaaaaa

SEQ ID NO: 8528 - RNA, 795 nt, Artificial Sequence
  mRNA Design i-3 (hSL-A100) comprising derived and/or modified sequence from Pf(3D7)__XP_001351122.1__HsALB_Pf-CSP(98-272) (opt1)
aggagaaagcuuaccaugaagugggugaccuucaucagccuccuguuccuguucuccagcgccuacuccgccgacgggaaccccgaccccaacgccaaccccaacguggacccgaacgccaaccccaacgucgaccccaacgccaaccccaacguggacccgaacgcgaaccccaacgccaaccccaacgccaaccccaacgccaacccgaacgcgaaccccaacgccaaccccaacgccaaccccaacgccaacccgaacgccaaccccaacgcgaaccccaacgccaaccccaacgccaacccgaacgccaaccccaacgccaaccccaacgcgaaccccaacgccaacccgaacgccaaccccaacguggaccccaacgccaaccccaacgccaacccgaacgcgaaccccaacgccaaccccaacgccaacccgaacgccaaccccaacgccaaccccaacgcgaaccccaacgccaacccgaacgccaaccccaacgccaaccccaacgcgaaccccaacgccaacccgaacgccaaccccaacgccaaccccaacgccaaccccaacgcgaacccgaacgccaaccccugaggacuaguuauaagacugacuagcccgaugggccucccaacgggcccuccuccccuccuugcaccgagauuaaucaaaggcucuuuucagagccaccaaaaaaaaaaaaaaaaaaaaaaaaaaaaaaaaaaaaaaaaaaaaaaaaaaaaaaaaaaaaaaaaaaaaaaaaaaaaaaaaaaaaaaaaaaaaaaaaaaaaa

SEQ ID NO: 8529 - RNA, 1101 nt, Artificial Sequence
  mRNA Design i-3 (hSL-A100) comprising derived and/or modified sequence from Pf(3D7)__XP_001351122.1__HsALB_Pf-CSP(98-374) (opt1)
aggagaaagcuuaccaugaagugggugaccuucaucagccuccuguuccuguucuccagcgccuacuccgccgacgggaaccccgaccccaacgccaaccccaacguggacccgaacgccaaccccaacgucgaccccaacgccaaccccaacguggacccgaacgcgaaccccaacgccaaccccaacgccaaccccaacgccaacccgaacgcgaaccccaacgccaaccccaacgccaaccccaacgccaacccgaacgccaaccccaacgcgaaccccaacgccaaccccaacgccaacccgaacgccaaccccaacgccaaccccaacgcgaaccccaacgccaacccgaacgccaaccccaacguggaccccaacgccaaccccaacgccaacccgaacgcgaaccccaacgccaaccccaacgccaacccgaacgccaaccccaacgccaaccccaacgcgaaccccaacgccaacccgaacgccaaccccaacgccaaccccaacgcgaaccccaacgccaacccgaacgccaaccccaacgccaaccccaacgccaaccccaacgcgaacccgaacgccaaccccaacaagaacaaccagggcaacggccaggggcacaacaugcccaacgaccccaaccgcaacgucgacgagaacgccaacgccaacuccgccgugaagaacaacaacaacgaggagccgagcgacaagcacaucaaggaguaccugaacaagauccagaacucccucagcacggaguggucccccugcagcgugaccugcggcaacgggauccagguccggaucaagcccggcuccgcgaacaagcccaaggacgagcuggacuacgccaacgacaucgagaagaagaucugcaagauggagaagugcugaggacuaguuauaagacugacuagcccgaugggccucccaacgggcccuccuccccuccuugcaccgagauuaaucaaaggcucuuuucagagccaccaaaaaaaaaaaaaaaaaaaaaaaaaaaaaaaaaaaaaaaaaaaaaaaaaaaaaaaaaaaaaaaaaaaaaaaaaaaaaaaaaaaaaaaaaaaaaaaaaaaaa

SEQ ID NO: 8530 - RNA, 1170 nt, Artificial Sequence
  mRNA Design i-3 (hSL-A100) comprising derived and/or modified sequence from Pf(3D7)__XP_001351122.1__HsALB_Pf-CSP(98-397) (opt1)
aggagaaagcuuaccaugaagugggugaccuucaucagccuccuguuccuguucuccagcgccuacuccgccgacgggaaccccgaccccaacgccaaccccaacguggacccgaacgccaaccccaacgucgaccccaacgccaaccccaacguggacccgaacgcgaaccccaacgccaaccccaacgccaaccccaacgccaacccgaacgcgaaccccaacgccaaccccaacgccaaccccaacgccaacccgaacgccaaccccaacgcgaaccccaacgccaaccccaacgccaacccgaacgccaaccccaacgccaaccccaacgcgaaccccaacgccaacccgaacgccaaccccaacguggaccccaacgccaaccccaacgccaacccgaacgcgaaccccaacgccaaccccaacgccaacccgaacgccaaccccaacgccaaccccaacgcgaaccccaacgccaacccgaacgccaaccccaacgccaaccccaacgcgaaccccaacgccaacccgaacgccaaccccaacgccaaccccaacgccaaccccaacgcgaacccgaacgccaaccccaacaagaacaaccagggcaacggccaggggcacaacaugcccaacgaccccaaccgcaacgucgacgagaacgccaacgccaacuccgccgugaagaacaacaacaacgaggagccgagcgacaagcacaucaaggaguaccugaacaagauccagaacucccucagcacggaguggucccccugcagcgugaccugcggcaacgggauccagguccggaucaagcccggcuccgcgaacaagcccaaggacgagcuggacuacgccaacgacaucgagaagaagaucugcaagauggagaagugcagcuccguguucaacguggucaacagcuccaucgggcugaucauggugcucagcuuccuguuccugaacugaggacuaguuauaagacugacuagcccgaugggccucccaacgggcccuccuccccuccuugcaccgagauuaaucaaaggcucuuuucagagccaccaaaaaaaaaaaaaaaaaaaaaaaaaaaaaaaaaaaaaaaaaaaaaaaaaaaaaaaaaaaaaaaaaaaaaaaaaaaaaaaaaaaaaaaaaaaaaaaaaaaaa

SEQ ID NO: 8531 - RNA, 1497 nt, Artificial Sequence
  mRNA Design i-3 (hSL-A100) comprising derived and/or modified sequence from Pf(3D7)__XP_001351122.1__HsALB_Pf-CSP(199-377)_L(PVTN)_HBsAg (opt1)
aggagaaagcuuaccaugaaguggguaaccuuuauuucccuucuuuuucucuuuagcucggcuuauuccgaccccaacgccaaccccaacgccaacccgaacgcgaaccccaacgccaaccccaacgccaacccgaacgccaaccccaacgccaaccccaacgcgaaccccaacgccaacccgaacgccaaccccaacgccaaccccaacgcgaaccccaacgccaacccgaacgccaaccccaacgccaaccccaacgccaaccccaacgcgaacccgaacgccaaccccaacaagaacaaccagggcaacggccaggggcacaacaugcccaacgaccccaaccgcaacgucgacgagaacgccaacgccaacuccgccgugaagaacaacaacaacgaggagccgagcgacaagcacaucaaggaguaccugaacaagauccagaacucccucagcacggaguggucccccugcagcgugaccugcggcaacgggauccagguccggaucaagcccggcuccgcgaacaagcccaaggacgagcuggacuacgccaacgacaucgagaagaagaucugcaagauggagaagugcagcuccgugccggugacgaacauggagaacaucaccagcggcuuccuggggccccuccuggugcugcaggccggcuucuuccuccugacccgcauccugaccaucccgcagucccucgacagcugguggaccucccugaacuuccucgggggcagccccgucugccuggggcagaacucccagagccccaccuccaaccacagccccaccuccugcccgcccaucugccccggcuaccgguggaugugccugcgccgguucaucaucuuccuguucauccuccugcugugccucaucuuccugcuggugcuccuggacuaccagggcaugcugcccgugugcccgcucauccccgggagcacgaccaccaacaccggccccugcaagacgugcaccacccccgcccaggggaacuccauguucccgagcugcugcugcaccaagcccacggacggcaacugcacgugcauccccauccccuccagcugggcguucgccaaguaccugugggagugggccuccguccgcuucagcuggcugucccuccuggugccguucgugcagugguucgucgggcugagccccaccguguggcucuccgccaucuggaugaugugguacuggggccccagccuguacagcaucgugucccccuucaucccgcugcuccccaucuucuucugccugugggucuacaucugaggacuaguuauaagacugacuagcccgaugggccucccaacgggcccuccuccccuccuugcaccgagauuaaucaaaggcucuuuucagagccaccaaaaaaaaaaaaaaaaaaaaaaaaaaaaaaaaaaaaaaaaaaaaaaaaaaaaaaaaaaaaaaaaaaaaaaaaaaaaaaaaaaaaaaaaaaaaaaaaaaaaa

SEQ ID NO: 8532 - RNA, 1407 nt, Artificial Sequence; identical to SEQ ID NO: 8502
  mRNA Design i-3 (hSL-A100) comprising derived and/or modified sequence from Pf(3D7)__XP_001351122.1__Pf-CSP (opt1)

SEQ ID NO: 8533 - RNA, 1338 nt, Artificial Sequence; identical to SEQ ID NO: 8503
  mRNA Design i-3 (hSL-A100) comprising derived and/or modified sequence from Pf(3D7)__XP_001351122.1__Pf-CSP(1-374) (opt1)

SEQ ID NO: 8534 - RNA, 1191 nt, Artificial Sequence; identical to SEQ ID NO: 8504
  mRNA Design i-3 (hSL-A100) comprising derived and/or modified sequence from Pf(3D7)__XP_001351122.1__Pf-CSP(1-325) (opt1)

SEQ ID NO: 8535 - RNA, 1407 nt, Artificial Sequence
  mRNA Design i-3 (hSL-A100) comprising derived and/or modified sequence from Pf(3D7)__XP_001351122.1__HsALB_Pf-CSP(19-397) (opt1)
aggagaaagcuuaccaugaagugggugaccuucaucagccuccuguuccuguucuccagcgccuacucccuguuccaggaguaccagugcuacggcagcuccagcaacacccgcguccucaacgagcugaacuacgacaacgccgggacgaaccuguacaacgagcucgagaugaacuacuacggcaagcaggagaacugguacucccugaagaagaacagccggucccugggggagaacgacgacggcaacaacgaggacaacgagaagcuccgcaagcccaagcacaagaagcugaagcagccggcggacgggaaccccgaccccaacgccaaccccaacguggacccgaacgccaaccccaacguggaccccaacgccaaccccaacgucgacccgaacgccaaccccaacgcgaaccccaacgccaaccccaacgccaacccgaacgccaaccccaacgcgaaccccaacgccaaccccaacgccaacccgaacgccaaccccaacgccaaccccaacgcgaaccccaacgccaacccgaacgccaaccccaacgccaaccccaacgccaaccccaacgcgaacccgaacgccaaccccaacguggaccccaacgccaaccccaacgccaacccgaacgccaaccccaacgcgaaccccaacgccaacccgaacgccaaccccaacgccaaccccaacgccaaccccaacgcgaacccgaacgccaaccccaacgccaaccccaacgccaaccccaacgcgaacccgaacgccaaccccaacgccaaccccaacgccaaccccaacgccaacccgaacgcgaaccccaacaagaacaaccagggcaacggccaggggcacaacaugcccaacgaccccaaccggaacguggacgagaacgccaacgccaacagcgccgucaagaacaacaacaacgaggagccguccgacaagcacaucaaggaguaccugaacaagauccagaacagccucuccaccgaguggagccccugcuccgugaccugcggcaacgggauccaggugcgcaucaagcccggcagcgccaacaagcccaaggacgagcuggacuacgcgaacgacaucgagaagaagaucugcaagauggagaagugcuccagcgucuucaacguggugaacuccagcaucgggcugaucaugguccucagcuuccuguuccugaacugaggacuaguuauaagacugacuagcccgaugggccucccaacgggcccuccuccccuccuugcaccgagauuaaucaaaggcucuuuucagagccaccaaaaaaaaaaaaaaaaaaaaaaaaaaaaaaaaaaaaaaaaaaaaaaaaaaaaaaaaaaaaaaaaaaaaaaaaaaaaaaaaaaaaaaaaaaaaaaaaaaaaa

SEQ ID NO: 8536 - RNA, 1425 nt, Artificial Sequence
  mRNA Design i-3 (hSL-A100) comprising derived and/or modified sequence from Pf(3D7)__XP_001351122.1__HsIns-iso1_Pf-CSP(19-397) (opt1)
aggagaaagcuuaccauggcccuguggaugcgccuccugccccugcucgcccugcuggcgcucuggggcccggaccccgccgccgcccuguuccaggaguaccagugcuacgggagcuccagcaacacccgggugcugaacgagcucaacuacgacaacgccggcaccaaccuguacaacgagcuggagaugaacuacuacgggaagcaggagaacugguacucccucaagaagaacagccgcucccugggcgagaacgacgacgggaacaacgaggacaacgagaagcugcggaagcccaagcacaagaagcucaagcagcccgcggacggcaacccggaccccaacgccaaccccaacgucgaccccaacgccaacccgaacguggaccccaacgccaaccccaacguggaccccaacgcgaacccgaacgccaaccccaacgccaaccccaacgccaaccccaacgccaacccgaacgcgaaccccaacgccaaccccaacgccaaccccaacgccaacccgaacgccaaccccaacgcgaaccccaacgccaaccccaacgccaacccgaacgccaaccccaacgccaaccccaacgcgaaccccaacgccaacccgaacgucgaccccaacgccaaccccaacgccaacccgaacgccaaccccaacgcgaaccccaacgccaaccccaacgccaacccgaacgccaaccccaacgcgaaccccaacgccaaccccaacgccaacccgaacgccaaccccaacgccaaccccaacgcgaaccccaacgccaacccgaacgccaaccccaacgccaaccccaacgccaaccccaacgcgaacccgaacaagaacaaccagggcaacgggcagggccacaacaugcccaacgaccccaaccgcaacguggacgagaacgccaacgccaacagcgccgugaagaacaacaacaacgaggagcccuccgacaagcacaucaaggaguaccugaacaagauccagaacagccuguccacggaguggagcccgugcuccgugaccugcgggaacggcauccagguccggaucaagcccgggagcgccaacaagcccaaggacgagcucgacuacgcgaacgacaucgagaagaagaucugcaagauggagaagugcuccagcguguucaacgucgugaacuccagcaucggccugaucauggugcuguccuuccucuuccugaacugaggacuaguuauaagacugacuagcccgaugggccucccaacgggcccuccuccccuccuugcaccgagauuaaucaaaggcucuuuucagagccaccaaaaaaaaaaaaaaaaaaaaaaaaaaaaaaaaaaaaaaaaaaaaaaaaaaaaaaaaaaaaaaaaaaaaaaaaaaaaaaaaaaaaaaaaaaaaaaaaaaaaa

SEQ ID NO: 8537 - RNA, 1404 nt, Artificial Sequence
  mRNA Design i-3 (hSL-A100) comprising derived and/or modified sequence from Pf(3D7)__XP_001351122.1__HsSPARC_Pf-CSP(19-397) (opt1)
aggagaaagcuuaccaugcgcgccuggaucuucuuccugcucugccuggccggccgggcgcuggcccucuuccaggaguaccagugcuacgggagcuccagcaacacccgcgugcugaacgagcugaacuacgacaacgccggcaccaaccucuacaacgagcuggagaugaacuacuacgggaagcaggagaacugguacucccugaagaagaacagccggucccucggcgagaacgacgacgggaacaacgaggacaacgagaagcugcgcaagcccaagcacaagaagcugaagcagccggccgacggcaaccccgaccccaacgccaaccccaacgucgacccgaacgcgaaccccaacguggaccccaacgccaaccccaacguggacccgaacgccaaccccaacgccaaccccaacgcgaaccccaacgccaacccgaacgccaaccccaacgccaaccccaacgccaaccccaacgcgaacccgaacgccaaccccaacgccaaccccaacgccaaccccaacgccaacccgaacgcgaaccccaacgccaaccccaacgccaaccccaacgccaacccgaacgccaaccccaacgucgaccccaacgcgaaccccaacgccaacccgaacgccaaccccaacgccaaccccaacgccaacccgaacgcgaaccccaacgccaaccccaacgccaaccccaacgccaacccgaacgcgaaccccaacgccaaccccaacgccaaccccaacgccaacccgaacgccaaccccaacgcgaaccccaacgccaaccccaacgccaacccgaacgccaaccccaacaagaacaaccagggcaacgggcagggccacaacaugcccaacgaccccaaccggaacguggacgagaacgccaacgcgaacagcgccgugaagaacaacaacaacgaggagccguccgacaagcacaucaaggaguaccucaacaagauccagaacagccuguccacggaguggagccccugcuccgugaccugcgggaacggcauccagguccgcaucaagcccgggagcgccaacaagcccaaggacgagcuggacuacgccaacgacaucgagaagaagaucugcaagauggagaagugcuccagcguguucaacgucgugaacuccagcaucggccucaucauggugcuguccuuccuguuccucaacugaggacuaguuauaagacugacuagcccgaugggccucccaacgggcccuccuccccuccuugcaccgagauuaaucaaaggcucuuuucagagccaccaaaaaaaaaaaaaaaaaaaaaaaaaaaaaaaaaaaaaaaaaaaaaaaaaaaaaaaaaaaaaaaaaaaaaaaaaaaaaaaaaaaaaaaaaaaaaaaaaaaaa

SEQ ID NO: 8538 - RNA, 1407 nt, Artificial Sequence
  mRNA Design i-3 (hSL-A100) comprising derived and/or modified sequence from Pf(3D7)__XP_001351122.1__IgE_Pf-CSP(19-397) (opt1)
aggagaaagcuuaccauggacuggaccuggauccuguuccucguggccgccgcgacccgcguccacagccuguuccaggaguaccagugcuacggcuccagcuccaacacgcgggugcugaacgagcucaacuacgacaacgccgggaccaaccuguacaacgagcuggagaugaacuacuacggcaagcaggagaacugguacagccucaagaagaacucccgcagccugggggagaacgacgacggcaacaacgaggacaacgagaagcugcggaagcccaagcacaagaagcucaagcagccggccgacgggaaccccgaccccaacgccaaccccaacguggacccgaacgccaaccccaacgucgaccccaacgcgaaccccaacguggacccgaacgccaaccccaacgccaaccccaacgccaaccccaacgcgaacccgaacgccaaccccaacgccaaccccaacgccaaccccaacgccaacccgaacgcgaaccccaacgccaaccccaacgccaaccccaacgccaacccgaacgccaaccccaacgcgaaccccaacgccaaccccaacgccaacccgaacgccaaccccaacguggaccccaacgccaaccccaacgcgaacccgaacgccaaccccaacgccaaccccaacgccaacccgaacgccaaccccaacgcgaaccccaacgccaaccccaacgccaacccgaacgccaaccccaacgcgaaccccaacgccaaccccaacgccaacccgaacgccaaccccaacgccaaccccaacgcgaaccccaacgccaacccgaacgccaaccccaacaagaacaaccagggcaacggccaggggcacaacaugcccaacgaccccaaccgcaacgucgacgagaacgccaacgccaacuccgcggugaagaacaacaacaacgaggagccgagcgacaagcacaucaaggaguaccugaacaagauccagaacucccugagcaccgaguggucccccugcagcgugaccugcggcaacgggauccagguccggaucaagcccggcuccgccaacaagcccaaggacgagcucgacuacgccaacgacaucgagaagaagaucugcaagauggagaagugcagcuccguguucaacguggucaacagcuccaucgggcugaucauggugcugagcuuccucuuccugaacugaggacuaguuauaagacugacuagcccgaugggccucccaacgggcccuccuccccuccuugcaccgagauuaaucaaaggcucuuuucagagccaccaaaaaaaaaaaaaaaaaaaaaaaaaaaaaaaaaaaaaaaaaaaaaaaaaaaaaaaaaaaaaaaaaaaaaaaaaaaaaaaaaaaaaaaaaaaaaaaaaaaaa

SEQ ID NO: 8539 - RNA, 1572 nt, Artificial Sequence
  mRNA Design i-3 (hSL-A100) comprising derived and/or modified sequence from Pf(3D7)__XP_001351122.1__Pf-CSP_L(G4SG4)_TM domain HA (opt1)
aggagaaagcuuaccaugaugcgcaagcuggccauccucagcguguccagcuuccuguucgucgaggcccuguuccaggaguaccagugcuacggcuccagcuccaacacccgggugcucaacgagcugaacuacgacaacgcggggaccaaccuguacaacgagcucgagaugaacuacuacggcaagcaggagaacugguacagccugaagaagaacucccgcagccugggggagaacgacgacggcaacaacgaggacaacgagaagcuccggaagcccaagcacaagaagcugaagcagccggccgacgggaaccccgaccccaacgccaaccccaacguggacccgaacgccaaccccaacgucgaccccaacgccaaccccaacguggacccgaacgcgaaccccaacgccaaccccaacgccaaccccaacgccaacccgaacgcgaaccccaacgccaaccccaacgccaaccccaacgccaacccgaacgccaaccccaacgcgaaccccaacgccaaccccaacgccaacccgaacgccaaccccaacgccaaccccaacgcgaaccccaacgccaacccgaacgccaaccccaacguggaccccaacgccaaccccaacgccaacccgaacgcgaaccccaacgccaaccccaacgccaacccgaacgccaaccccaacgccaaccccaacgcgaaccccaacgccaacccgaacgccaaccccaacgccaaccccaacgcgaaccccaacgccaacccgaacgccaaccccaacgccaaccccaacgccaaccccaacgcgaacccgaacgccaaccccaacaagaacaaccagggcaacggccaggggcacaacaugcccaacgaccccaaccgcaacgucgacgagaacgccaacgccaacuccgccgugaagaacaacaacaacgaggagccgagcgacaagcacaucaaggaguaccugaacaagauccagaacucccucagcacggaguggucccccugcagcgugaccugcggcaacgggauccagguccggaucaagcccggcuccgcgaacaagcccaaggacgagcuggacuacgccaacgacaucgagaagaagaucugcaagauggagaagugcagcuccguguucaacguggucaacagcuccaucgggcugaucauggugcucagcuuccuguuccugaacggcggcgggggcagcgggggcggcgggaagcucgaguccacccgcaucuaccagauccuggccaucuacagcaccguggccuccagccugguccucguggugucccugggcgccaucagcuucuggaugugcuccaacgggagccugcagugccggaucugcaucugaggacuaguuauaagacugacuagcccgaugggccucccaacgggcccuccuccccuccuugcaccgagauuaaucaaaggcucuuuucagagccaccaaaaaaaaaaaaaaaaaaaaaaaaaaaaaaaaaaaaaaaaaaaaaaaaaaaaaaaaaaaaaaaaaaaaaaaaaaaaaaaaaaaaaaaaaaaaaaaaaaaaa

SEQ ID NO: 8540 - RNA, 1446 nt, Artificial Sequence
  mRNA Design i-3 (hSL-A100) comprising derived and/or modified sequence from Pf(3D7)__XP_001351122.1__Pf-CSP(199-377)_L(PVTN)_HBsAg (opt1)
aggagaaagcuuaccauggaccccaacgccaacccgaacgccaaccccaacgcgaaccccaacgccaaccccaacgccaacccgaacgccaaccccaacgccaaccccaacgcgaaccccaacgccaacccgaacgccaaccccaacgccaaccccaacgcgaaccccaacgccaacccgaacgccaaccccaacgccaaccccaacgccaaccccaacgcgaacccgaacgccaaccccaacaagaacaaccagggcaacgggcagggccacaacaugcccaacgaccccaaccgcaacguggacgagaacgccaacgccaacagcgccgucaagaacaacaacaacgaggagccguccgacaagcacaucaaggaguaccugaacaagauccagaacagccucuccaccgaguggagccccugcuccgugaccugcgggaacggcauccaggugcggaucaagcccgggagcgcgaacaagcccaaggacgagcuggacuacgccaacgacaucgagaagaagaucugcaagauggagaagugcuccagcgucccggugacgaacauggagaacaucaccuccggcuuccugggcccccuccuggugcugcaggccggguucuuccuccugacccgcauccugaccaucccccagagccucgacuccugguggacgagccugaacuuccugggcgggucccccgucugccucggccagaacagccaguccccgaccagcaaccacucccccaccagcugcccgcccaucugccccggguaccgguggaugugccugcgccgguucaucaucuuccuguucauccuccugcugugccucaucuuccugcuggugcuccuggacuaccagggcaugcugcccgugugcccccucaucccgggcuccaccacgaccaacaccgggcccugcaagaccugcacgacccccgcccagggcaacagcauguuccccagcugcugcugcaccaagccgaccgacgggaacugcacgugcauccccauccccuccagcugggccuucgcgaaguaccugugggagugggccuccguccgcuucagcuggcugucccuccuggugcccuucgugcagugguucgucggccugagcccgaccguguggcucuccgccaucuggaugaugugguacuggggccccagccuguacuccaucgugagccccuucaucccccugcucccgaucuucuucugccugugggucuacaucugaggacuaguuauaagacugacuagcccgaugggccucccaacgggcccuccuccccuccuugcaccgagauuaaucaaaggcucuuuucagagccaccaaaaaaaaaaaaaaaaaaaaaaaaaaaaaaaaaaaaaaaaaaaaaaaaaaaaaaaaaaaaaaaaaaaaaaaaaaaaaaaaaaaaaaaaaaaaaaaaaaaaa

SEQ ID NO: 8541 - RNA, 1488 nt, Artificial Sequence
  mRNA Design i-3 (hSL-A100) comprising derived and/or modified sequence from Pf(3D7)__XP_001351122.1__Pf-CSP(199-387)_L(PVTN)_HBsAg (opt1)
aggagaaagcuuaccaugauggcccccgacccgaacgccaaccccaacgcgaaccccaacgccaaccccaacgccaacccgaacgccaaccccaacgccaaccccaacgcgaaccccaacgccaacccgaacgccaaccccaacgccaaccccaacgcgaaccccaacgccaacccgaacgccaaccccaacgccaaccccaacgccaaccccaacgcgaacccgaacgccaaccccaacgccaaccccaacaagaacaaccagggcaacgggcagggccacaacaugcccaacgacccgaaccgcaacguggacgagaacgccaacgccaacagcgcggucaagaacaacaacaacgaggagcccuccgacaagcacaucaaggaguaccugaacaagauccagaacagccucuccaccgaguggagccccugcuccgugaccugcgggaacggcauccaggugcggaucaagcccgggagcgccaacaagccgaaggacgagcuggacuacgccaacgacaucgagaagaagaucugcaagauggagaagugcuccagcgucuucaacguggugaacuccagcaucggccugggccccgucacgaacauggagaacaucaccuccggguuccucggcccccugcuggugcuccaggccggguucuuccugcugacccgcauccucaccaucccccagagccuggacuccugguggacgagccugaacuuccucggcggguccccggugugccugggccagaacagccagucccccaccagcaaccacucccccaccagcugcccgcccaucugccccggcuaccgguggaugugccugcgccgguucaucaucuuccucuucauccugcugcucugccugaucuuccugcucguccugcuggacuaccaggggaugcuccccgugugcccgcugauccccggcagcaccacgaccaacaccgggcccugcaagaccugcacgacccccgcccagggcaacuccauguucccgagcugcugcugcaccaagcccaccgacggcaacugcacgugcauccccauccccuccagcugggcguucgccaaguaccugugggagugggccuccgugcgcuucagcuggcucucccugcuggucccguucgugcagugguucguggggcucagccccaccgucuggcuguccgccaucuggaugaugugguacuggggccccagccuguacuccaucgugagccccuucaucccgcuccugcccaucuucuucugccuguggguguacaucugaggacuaguuauaagacugacuagcccgaugggccucccaacgggcccuccuccccuccuugcaccgagauuaaucaaaggcucuuuucagagccaccaaaaaaaaaaaaaaaaaaaaaaaaaaaaaaaaaaaaaaaaaaaaaaaaaaaaaaaaaaaaaaaaaaaaaaaaaaaaaaaaaaaaaaaaaaaaaaaaaaaaa

SEQ ID NO: 8542 - RNA, 672 nt, Artificial Sequence
  mRNA Design i-3 (hSL-A100) comprising derived and/or modified sequence from Pf(3D7)__XP_001351122.1__HsALB_Pf-CSP(19-152) (opt1)
aggagaaagcuuaccaugaagugggugaccuucaucagccuccuguuccuguucuccagcgccuacucccuguuccaggaguaccagugcuacggcagcuccagcaacacccgcguccucaacgagcugaacuacgacaacgccgggacgaaccuguacaacgagcucgagaugaacuacuacggcaagcaggagaacugguacucccugaagaagaacagccggucccugggggagaacgacgacggcaacaacgaggacaacgagaagcuccgcaagcccaagcacaagaagcugaagcagccggcggacgggaaccccgaccccaacgccaaccccaacguggacccgaacgccaaccccaacguggaccccaacgccaaccccaacgucgacccgaacgccaaccccaacgcgaaccccaacgccaaccccaacgccaacccgaacgccaaccccaacgcgaaccccugaggacuaguuauaagacugacuagcccgaugggccucccaacgggcccuccuccccuccuugcaccgagauuaaucaaaggcucuuuucagagccaccaaaaaaaaaaaaaaaaaaaaaaaaaaaaaaaaaaaaaaaaaaaaaaaaaaaaaaaaaaaaaaaaaaaaaaaaaaaaaaaaaaaaaaaaaaaaaaaaaaaaa

SEQ ID NO: 8543 - RNA, 792 nt, Artificial Sequence
  mRNA Design i-3 (hSL-A100) comprising derived and/or modified sequence from Pf(3D7)__XP_001351122.1__HsALB_Pf-CSP(19-192) (opt1)
aggagaaagcuuaccaugaagugggugaccuucaucagccuccuguuccuguucuccagcgccuacucccuguuccaggaguaccagugcuacggcagcuccagcaacacccgcguccucaacgagcugaacuacgacaacgccgggacgaaccuguacaacgagcucgagaugaacuacuacggcaagcaggagaacugguacucccugaagaagaacagccggucccugggggagaacgacgacggcaacaacgaggacaacgagaagcuccgcaagcccaagcacaagaagcugaagcagccggcggacgggaaccccgaccccaacgccaaccccaacguggacccgaacgccaaccccaacguggaccccaacgccaaccccaacgucgacccgaacgccaaccccaacgcgaaccccaacgccaaccccaacgccaacccgaacgccaaccccaacgcgaaccccaacgccaaccccaacgccaacccgaacgccaaccccaacgccaaccccaacgcgaaccccaacgccaacccgaacgccaaccccaacgccaaccccaacgccaaccccaacgcgaacccgugaggacuaguuauaagacugacuagcccgaugggccucccaacgggcccuccuccccuccuugcaccgagauuaaucaaaggcucuuuucagagccaccaaaaaaaaaaaaaaaaaaaaaaaaaaaaaaaaaaaaaaaaaaaaaaaaaaaaaaaaaaaaaaaaaaaaaaaaaaaaaaaaaaaaaaaaaaaaaaaaaaaaa

SEQ ID NO: 8544 - RNA, 1032 nt, Artificial Sequence
  mRNA Design i-3 (hSL-A100) comprising derived and/or modified sequence from Pf(3D7)__XP_001351122.1__HsALB_Pf-CSP(19-272) (opt1)
aggagaaagcuuaccaugaagugggugaccuucaucagccuccuguuccuguucuccagcgccuacucccuguuccaggaguaccagugcuacggcagcuccagcaacacccgcguccucaacgagcugaacuacgacaacgccgggacgaaccuguacaacgagcucgagaugaacuacuacggcaagcaggagaacugguacucccugaagaagaacagccggucccugggggagaacgacgacggcaacaacgaggacaacgagaagcuccgcaagcccaagcacaagaagcugaagcagccggcggacgggaaccccgaccccaacgccaaccccaacguggacccgaacgccaaccccaacguggaccccaacgccaaccccaacgucgacccgaacgccaaccccaacgcgaaccccaacgccaaccccaacgccaacccgaacgccaaccccaacgcgaaccccaacgccaaccccaacgccaacccgaacgccaaccccaacgccaaccccaacgcgaaccccaacgccaacccgaacgccaaccccaacgccaaccccaacgccaaccccaacgcgaacccgaacgccaaccccaacguggaccccaacgccaaccccaacgccaacccgaacgccaaccccaacgcgaaccccaacgccaacccgaacgccaaccccaacgccaaccccaacgccaaccccaacgcgaacccgaacgccaaccccaacgccaaccccaacgccaaccccaacgcgaacccgaacgccaaccccaacgccaaccccaacgccaaccccaacgccaacccgaacgcgaaccccugaggacuaguuauaagacugacuagcccgaugggccucccaacgggcccuccuccccuccuugcaccgagauuaaucaaaggcucuuuucagagccaccaaaaaaaaaaaaaaaaaaaaaaaaaaaaaaaaaaaaaaaaaaaaaaaaaaaaaaaaaaaaaaaaaaaaaaaaaaaaaaaaaaaaaaaaaaaaaaaaaaaaa

SEQ ID NO: 8545 - RNA, 1194 nt, Artificial Sequence
  mRNA Design i-3 (hSL-A100) comprising derived and/or modified sequence from Pf(3D7)__XP_001351122.1__HsALB_Pf-CSP(19-272)_L(AAY)_Pf-CSP(310-3 27)_L(AAY)_Pf-CSP(346-375) (opt1)
aggagaaagcuuaccaugaagugggugaccuucaucagccuccuguuccuguucuccagcgccuacucccuguuccaggaguaccagugcuacggcagcuccagcaacacccgcguccucaacgagcugaacuacgacaacgccgggacgaaccuguacaacgagcucgagaugaacuacuacggcaagcaggagaacugguacucccugaagaagaacagccggucccugggggagaacgacgacggcaacaacgaggacaacgagaagcuccgcaagcccaagcacaagaagcugaagcagccggcggacgggaaccccgaccccaacgccaaccccaacguggacccgaacgccaaccccaacguggaccccaacgccaaccccaacgucgacccgaacgccaaccccaacgcgaaccccaacgccaaccccaacgccaacccgaacgccaaccccaacgcgaaccccaacgccaaccccaacgccaacccgaacgccaaccccaacgccaaccccaacgcgaaccccaacgccaacccgaacgccaaccccaacgccaaccccaacgccaaccccaacgcgaacccgaacgccaaccccaacguggaccccaacgccaaccccaacgccaacccgaacgccaaccccaacgcgaaccccaacgccaacccgaacgccaaccccaacgccaaccccaacgccaaccccaacgcgaacccgaacgccaaccccaacgccaaccccaacgccaaccccaacgcgaacccgaacgccaaccccaacgccaaccccaacgccaaccccaacgccaacccgaacgcgaaccccgccgccuacgagcccagcgacaagcacaucaaggaguaccugaacaagauccagaacucccucgccgccuacaucaagcccggcagcgcgaacaagccgaaggacgagcuggacuacgccaacgacaucgagaagaagaucugcaagauggagaagugcuccugaggacuaguuauaagacugacuagcccgaugggccucccaacgggcccuccuccccuccuugcaccgagauuaaucaaaggcucuuuucagagccaccaaaaaaaaaaaaaaaaaaaaaaaaaaaaaaaaaaaaaaaaaaaaaaaaaaaaaaaaaaaaaaaaaaaaaaaaaaaaaaaaaaaaaaaaaaaaaaaaaaaaa

SEQ ID NO: 8546 - RNA, 1155 nt, Artificial Sequence
  mRNA Design i-3 (hSL-A100) comprising derived and/or modified sequence from Pf(3D7)__XP_001351122.1__HsALB_Pf-CSP(19-272)_L(AAY)_Pf-CSP(346-3 65)_L(AAY)_P2 (opt1)
aggagaaagcuuaccaugaagugggugaccuucaucagccuccuguuccuguucuccagcgccuacucccuguuccaggaguaccagugcuacggcagcuccagcaacacccgcguccucaacgagcugaacuacgacaacgccgggacgaaccuguacaacgagcucgagaugaacuacuacggcaagcaggagaacugguacucccugaagaagaacagccggucccugggggagaacgacgacggcaacaacgaggacaacgagaagcuccgcaagcccaagcacaagaagcugaagcagccggcggacgggaaccccgaccccaacgccaaccccaacguggacccgaacgccaaccccaacguggaccccaacgccaaccccaacgucgacccgaacgccaaccccaacgcgaaccccaacgccaaccccaacgccaacccgaacgccaaccccaacgcgaaccccaacgccaaccccaacgccaacccgaacgccaaccccaacgccaaccccaacgcgaaccccaacgccaacccgaacgccaaccccaacgccaaccccaacgccaaccccaacgcgaacccgaacgccaaccccaacguggaccccaacgccaaccccaacgccaacccgaacgccaaccccaacgcgaaccccaacgccaacccgaacgccaaccccaacgccaaccccaacgccaaccccaacgcgaacccgaacgccaaccccaacgccaaccccaacgccaaccccaacgcgaacccgaacgccaaccccaacgccaaccccaacgccaaccccaacgccaacccgaacgcgaaccccgccgccuacaucaagcccggcagcgccaacaagcccaaggacgagcuggacuacgccaacgacaucgaggcggccuaccaguacaucaaggccaacuccaaguucaucggcaucaccgagcucugaggacuaguuauaagacugacuagcccgaugggccucccaacgggcccuccuccccuccuugcaccgagauuaaucaaaggcucuuuucagagccaccaaaaaaaaaaaaaaaaaaaaaaaaaaaaaaaaaaaaaaaaaaaaaaaaaaaaaaaaaaaaaaaaaaaaaaaaaaaaaaaaaaaaaaaaaaaaaaaaaaaaa

SEQ ID NO: 8547 - RNA, 1149 nt, Artificial Sequence
  mRNA Design i-3 (hSL-A100) comprising derived and/or modified sequence from Pf(3D7)__XP_001351122.1__HsALB_Pf-CSP(19-272)_L(AAY)_Pf-CSP(346-3 65)_L(AAY)_PADRE (opt1)
aggagaaagcuuaccaugaagugggugaccuucaucagccuccuguuccuguucuccagcgccuacucccuguuccaggaguaccagugcuacggcagcuccagcaacacccgcguccucaacgagcugaacuacgacaacgccgggacgaaccuguacaacgagcucgagaugaacuacuacggcaagcaggagaacugguacucccugaagaagaacagccggucccugggggagaacgacgacggcaacaacgaggacaacgagaagcuccgcaagcccaagcacaagaagcugaagcagccggcggacgggaaccccgaccccaacgccaaccccaacguggacccgaacgccaaccccaacguggaccccaacgccaaccccaacgucgacccgaacgccaaccccaacgcgaaccccaacgccaaccccaacgccaacccgaacgccaaccccaacgcgaaccccaacgccaaccccaacgccaacccgaacgccaaccccaacgccaaccccaacgcgaaccccaacgccaacccgaacgccaaccccaacgccaaccccaacgccaaccccaacgcgaacccgaacgccaaccccaacguggaccccaacgccaaccccaacgccaacccgaacgccaaccccaacgcgaaccccaacgccaacccgaacgccaaccccaacgccaaccccaacgccaaccccaacgcgaacccgaacgccaaccccaacgccaaccccaacgccaaccccaacgcgaacccgaacgccaaccccaacgccaaccccaacgccaaccccaacgccaacccgaacgcgaaccccgccgccuacaucaagcccggcagcgccaacaagcccaaggacgagcuggacuacgccaacgacaucgaggcggccuacgccaaguucguggccgccuggacccucaaggcggccgccugaggacuaguuauaagacugacuagcccgaugggccucccaacgggcccuccuccccuccuugcaccgagauuaaucaaaggcucuuuucagagccaccaaaaaaaaaaaaaaaaaaaaaaaaaaaaaaaaaaaaaaaaaaaaaaaaaaaaaaaaaaaaaaaaaaaaaaaaaaaaaaaaaaaaaaaaaaaaaaaaaaaaa

SEQ ID NO: 8548 - RNA, 1206 nt, Artificial Sequence
  mRNA Design i-3 (hSL-A100) comprising derived and/or modified sequence from Pf(3D7)__XP_001351122.1__HsALB_Pf-CSP(19-272)_L(G4S)_Pf-CSP(310-3 27)_L(G4S)_Pf-CSP(346-375) (opt1)
aggagaaagcuuaccaugaagugggugaccuucaucagccuccuguuccuguucuccagcgccuacucccuguuccaggaguaccagugcuacggcagcuccagcaacacccgcguccucaacgagcugaacuacgacaacgccgggacgaaccuguacaacgagcucgagaugaacuacuacggcaagcaggagaacugguacucccugaagaagaacagccggucccugggggagaacgacgacggcaacaacgaggacaacgagaagcuccgcaagcccaagcacaagaagcugaagcagccggcggacgggaaccccgaccccaacgccaaccccaacguggacccgaacgccaaccccaacguggaccccaacgccaaccccaacgucgacccgaacgccaaccccaacgcgaaccccaacgccaaccccaacgccaacccgaacgccaaccccaacgcgaaccccaacgccaaccccaacgccaacccgaacgccaaccccaacgccaaccccaacgcgaaccccaacgccaacccgaacgccaaccccaacgccaaccccaacgccaaccccaacgcgaacccgaacgccaaccccaacguggaccccaacgccaaccccaacgccaacccgaacgccaaccccaacgcgaaccccaacgccaacccgaacgccaaccccaacgccaaccccaacgccaaccccaacgcgaacccgaacgccaaccccaacgccaaccccaacgccaaccccaacgcgaacccgaacgccaaccccaacgccaaccccaacgccaaccccaacgccaacccgaacgcgaaccccggcggcgggggcagcgagcccuccgacaagcacaucaaggaguaccugaacaagauccagaacagccucgggggcgggggcuccaucaagcccggcagcgccaacaagccgaaggacgagcuggacuacgccaacgacaucgagaagaagaucugcaagauggagaagugcuccugaggacuaguuauaagacugacuagcccgaugggccucccaacgggcccuccuccccuccuugcaccgagauuaaucaaaggcucuuuucagagccaccaaaaaaaaaaaaaaaaaaaaaaaaaaaaaaaaaaaaaaaaaaaaaaaaaaaaaaaaaaaaaaaaaaaaaaaaaaaaaaaaaaaaaaaaaaaaaaaaaaaaa

SEQ ID NO: 8549 - RNA, 1191 nt, Artificial Sequence
  mRNA Design i-3 (hSL-A100) comprising derived and/or modified sequence from Pf(3D7)__XP_001351122.1__HsALB_Pf-CSP(19-272)_L(G4S)_Pf-CSP(310-3 27)_Pf-CSP(346-375) (opt1)
aggagaaagcuuaccaugaagugggugaccuucaucagccuccuguuccuguucuccagcgccuacucccuguuccaggaguaccagugcuacggcagcuccagcaacacccgcguccucaacgagcugaacuacgacaacgccgggacgaaccuguacaacgagcucgagaugaacuacuacggcaagcaggagaacugguacucccugaagaagaacagccggucccugggggagaacgacgacggcaacaacgaggacaacgagaagcuccgcaagcccaagcacaagaagcugaagcagccggcggacgggaaccccgaccccaacgccaaccccaacguggacccgaacgccaaccccaacguggaccccaacgccaaccccaacgucgacccgaacgccaaccccaacgcgaaccccaacgccaaccccaacgccaacccgaacgccaaccccaacgcgaaccccaacgccaaccccaacgccaacccgaacgccaaccccaacgccaaccccaacgcgaaccccaacgccaacccgaacgccaaccccaacgccaaccccaacgccaaccccaacgcgaacccgaacgccaaccccaacguggaccccaacgccaaccccaacgccaacccgaacgccaaccccaacgcgaaccccaacgccaacccgaacgccaaccccaacgccaaccccaacgccaaccccaacgcgaacccgaacgccaaccccaacgccaaccccaacgccaaccccaacgcgaacccgaacgccaaccccaacgccaaccccaacgccaaccccaacgccaacccgaacgcgaaccccggcggcgggggcagcgagcccuccgacaagcacaucaaggaguaccugaacaagauccagaacagccucaucaagcccggguccgccaacaagccgaaggacgagcuggacuacgccaacgacaucgagaagaagaucugcaagauggagaagugcagcugaggacuaguuauaagacugacuagcccgaugggccucccaacgggcccuccuccccuccuugcaccgagauuaaucaaaggcucuuuucagagccaccaaaaaaaaaaaaaaaaaaaaaaaaaaaaaaaaaaaaaaaaaaaaaaaaaaaaaaaaaaaaaaaaaaaaaaaaaaaaaaaaaaaaaaaaaaaaaaaaaaaaa

SEQ ID NO: 8550 - RNA, 1191 nt, Artificial Sequence
  mRNA Design i-3 (hSL-A100) comprising derived and/or modified sequence from Pf(3D7)__XP_001351122.1__HsALB_Pf-CSP(19-325) (opt1)
aggagaaagcuuaccaugaagugggugaccuucaucagccuccuguuccuguucuccagcgccuacucccuguuccaggaguaccagugcuacggcagcuccagcaacacccgcguccucaacgagcugaacuacgacaacgccgggacgaaccuguacaacgagcucgagaugaacuacuacggcaagcaggagaacugguacucccugaagaagaacagccggucccugggggagaacgacgacggcaacaacgaggacaacgagaagcuccgcaagcccaagcacaagaagcugaagcagccggcggacgggaaccccgaccccaacgccaaccccaacguggacccgaacgccaaccccaacguggaccccaacgccaaccccaacgucgacccgaacgccaaccccaacgcgaaccccaacgccaaccccaacgccaacccgaacgccaaccccaacgcgaaccccaacgccaaccccaacgccaacccgaacgccaaccccaacgccaaccccaacgcgaaccccaacgccaacccgaacgccaaccccaacgccaaccccaacgccaaccccaacgcgaacccgaacgccaaccccaacguggaccccaacgccaaccccaacgccaacccgaacgccaaccccaacgcgaaccccaacgccaacccgaacgccaaccccaacgccaaccccaacgccaaccccaacgcgaacccgaacgccaaccccaacgccaaccccaacgccaaccccaacgcgaacccgaacgccaaccccaacgccaaccccaacgccaaccccaacgccaacccgaacgcgaaccccaacaagaacaaccagggcaacggccaggggcacaacaugcccaacgaccccaaccggaacguggacgagaacgccaacgccaacagcgccgucaagaacaacaacaacgaggagccguccgacaagcacaucaaggaguaccugaacaagauccagaacugaggacuaguuauaagacugacuagcccgaugggccucccaacgggcccuccuccccuccuugcaccgagauuaaucaaaggcucuuuucagagccaccaaaaaaaaaaaaaaaaaaaaaaaaaaaaaaaaaaaaaaaaaaaaaaaaaaaaaaaaaaaaaaaaaaaaaaaaaaaaaaaaaaaaaaaaaaaaaaaaaaaaa

SEQ ID NO: 8551 - RNA, 1368 nt, Artificial Sequence
  mRNA Design i-3 (hSL-A100) comprising derived and/or modified sequence from Pf(3D7)__XP_001351122.1__HsALB_Pf-CSP(19-384) (opt1)
aggagaaagcuuaccaugaagugggugaccuucaucagccuccuguuccuguucuccagcgccuacucccuguuccaggaguaccagugcuacggcagcuccagcaacacccgcguccucaacgagcugaacuacgacaacgccgggacgaaccuguacaacgagcucgagaugaacuacuacggcaagcaggagaacugguacucccugaagaagaacagccggucccugggggagaacgacgacggcaacaacgaggacaacgagaagcuccgcaagcccaagcacaagaagcugaagcagccggcggacgggaaccccgaccccaacgccaaccccaacguggacccgaacgccaaccccaacguggaccccaacgccaaccccaacgucgacccgaacgccaaccccaacgcgaaccccaacgccaaccccaacgccaacccgaacgccaaccccaacgcgaaccccaacgccaaccccaacgccaacccgaacgccaaccccaacgccaaccccaacgcgaaccccaacgccaacccgaacgccaaccccaacgccaaccccaacgccaaccccaacgcgaacccgaacgccaaccccaacguggaccccaacgccaaccccaacgccaacccgaacgccaaccccaacgcgaaccccaacgccaacccgaacgccaaccccaacgccaaccccaacgccaaccccaacgcgaacccgaacgccaaccccaacgccaaccccaacgccaaccccaacgcgaacccgaacgccaaccccaacgccaaccccaacgccaaccccaacgccaacccgaacgcgaaccccaacaagaacaaccagggcaacggccaggggcacaacaugcccaacgaccccaaccggaacguggacgagaacgccaacgccaacagcgccgucaagaacaacaacaacgaggagccguccgacaagcacaucaaggaguaccugaacaagauccagaacagccucuccaccgaguggagccccugcuccgugaccugcggcaacgggauccaggugcgcaucaagcccggcagcgccaacaagcccaaggacgagcuggacuacgcgaacgacaucgagaagaagaucugcaagauggagaagugcuccagcgucuucaacguggugaacuccagcugaggacuaguuauaagacugacuagcccgaugggccucccaacgggcccuccuccccuccuugcaccgagauuaaucaaaggcucuuuucagagccaccaaaaaaaaaaaaaaaaaaaaaaaaaaaaaaaaaaaaaaaaaaaaaaaaaaaaaaaaaaaaaaaaaaaaaaaaaaaaaaaaaaaaaaaaaaaaaaaaaaaaa

SEQ ID NO: 8552 - RNA, 1506 nt, Artificial Sequence
  mRNA Design i-3 (hSL-A100) comprising derived and/or modified sequence from Pf(3D7)__XP_001351122.1__HsALB_Pf-CSP(19-384)_TM domain HA (opt1)
aggagaaagcuuaccaugaagugggugaccuucaucagccuccuguuccuguucuccagcgccuacucccuguuccaggaguaccagugcuacggcagcuccagcaacacccgcguccucaacgagcugaacuacgacaacgccgggacgaaccuguacaacgagcucgagaugaacuacuacggcaagcaggagaacugguacucccugaagaagaacagccggucccugggggagaacgacgacggcaacaacgaggacaacgagaagcuccgcaagcccaagcacaagaagcugaagcagccggcggacgggaaccccgaccccaacgccaaccccaacguggacccgaacgccaaccccaacguggaccccaacgccaaccccaacgucgacccgaacgccaaccccaacgcgaaccccaacgccaaccccaacgccaacccgaacgccaaccccaacgcgaaccccaacgccaaccccaacgccaacccgaacgccaaccccaacgccaaccccaacgcgaaccccaacgccaacccgaacgccaaccccaacgccaaccccaacgccaaccccaacgcgaacccgaacgccaaccccaacguggaccccaacgccaaccccaacgccaacccgaacgccaaccccaacgcgaaccccaacgccaacccgaacgccaaccccaacgccaaccccaacgccaaccccaacgcgaacccgaacgccaaccccaacgccaaccccaacgccaaccccaacgcgaacccgaacgccaaccccaacgccaaccccaacgccaaccccaacgccaacccgaacgcgaaccccaacaagaacaaccagggcaacggccaggggcacaacaugcccaacgaccccaaccggaacguggacgagaacgccaacgccaacagcgccgucaagaacaacaacaacgaggagccguccgacaagcacaucaaggaguaccugaacaagauccagaacagccucuccaccgaguggagccccugcuccgugaccugcggcaacgggauccaggugcgcaucaagcccggcagcgccaacaagcccaaggacgagcuggacuacgcgaacgacaucgagaagaagaucugcaagauggagaagugcuccagcgucuucaacguggugaacuccagcaagcuggagagcacccggaucuaccagauccucgccaucuacuccacggucgccagcucccuggugcugguggucagccucggggccaucuccuucuggaugugcagcaacggcucccugcagugccgcaucugcaucugaggacuaguuauaagacugacuagcccgaugggccucccaacgggcccuccuccccuccuugcaccgagauuaaucaaaggcucuuuucagagccaccaaaaaaaaaaaaaaaaaaaaaaaaaaaaaaaaaaaaaaaaaaaaaaaaaaaaaaaaaaaaaaaaaaaaaaaaaaaaaaaaaaaaaaaaaaaaaaaaaaaaa

SEQ ID NO: 8553 - RNA, 1218 nt, Artificial Sequence
  mRNA Design i-3 (hSL-A100) comprising derived and/or modified sequence from Pf(3D7)__XP_001351122.1__HsALB_Pf-CSP(82-397) (opt1)
aggagaaagcuuaccaugaagugggugaccuucaucagccuccuguuccuguucuccagcgccuacuccgacaacgagaagcugcgcaagcccaagcacaagaagcucaagcagccggccgacggcaaccccgaccccaacgcgaaccccaacgucgacccgaacgccaaccccaacguggaccccaacgccaaccccaacguggacccgaacgccaaccccaacgccaaccccaacgcgaaccccaacgccaacccgaacgccaaccccaacgccaaccccaacgcgaaccccaacgccaacccgaacgccaaccccaacgccaaccccaacgccaaccccaacgcgaacccgaacgccaaccccaacgccaaccccaacgccaaccccaacgccaacccgaacgcgaaccccaacgucgaccccaacgccaaccccaacgccaacccgaacgccaaccccaacgccaaccccaacgcgaacccgaacgccaaccccaacgccaaccccaacgccaaccccaacgccaacccgaacgcgaaccccaacgccaaccccaacgccaaccccaacgccaacccgaacgcgaaccccaacgccaaccccaacgccaaccccaacgccaacccgaacgccaaccccaacaagaacaaccaggggaacggccaggggcacaacaugcccaacgaccccaaccggaacguggacgagaacgcgaacgccaacagcgccgugaagaacaacaacaacgaggagccguccgacaagcacaucaaggaguaccugaacaagauccagaacagccuguccaccgaguggagccccugcuccgucacgugcggcaacgggauccaggugcgcaucaagcccggcagcgccaacaagcccaaggacgagcucgacuacgccaacgacaucgagaagaagaucugcaagauggagaagugcuccagcguguucaacgucgugaacuccagcaucggccugaucauggugcuguccuuccucuuccugaacugaggacuaguuauaagacugacuagcccgaugggccucccaacgggcccuccuccccuccuugcaccgagauuaaucaaaggcucuuuucagagccaccaaaaaaaaaaaaaaaaaaaaaaaaaaaaaaaaaaaaaaaaaaaaaaaaaaaaaaaaaaaaaaaaaaaaaaaaaaaaaaaaaaaaaaaaaaaaaaaaaaaaa

SEQ ID NO: 8554 - RNA, 570 nt, Artificial Sequence
  mRNA Design i-3 (hSL-A100) comprising derived and/or modified sequence from Pf(3D7)__XP_001351122.1__HsALB_Pf-CSP(93-192) (opt1)
aggagaaagcuuaccaugaagugggugaccuucaucagccuccuguuccuguucuccagcgccuacuccaagcugaagcagcccgccgacggcaacccggaccccaacgcgaaccccaacgucgaccccaacgccaacccgaacguggaccccaacgccaaccccaacguggaccccaacgccaacccgaacgccaaccccaacgcgaaccccaacgccaaccccaacgccaacccgaacgccaaccccaacgcgaaccccaacgccaaccccaacgccaacccgaacgccaaccccaacgccaaccccaacgcgaaccccaacgccaacccgaacgccaaccccaacgccaaccccaacgccaaccccugaggacuaguuauaagacugacuagcccgaugggccucccaacgggcccuccuccccuccuugcaccgagauuaaucaaaggcucuuuucagagccaccaaaaaaaaaaaaaaaaaaaaaaaaaaaaaaaaaaaaaaaaaaaaaaaaaaaaaaaaaaaaaaaaaaaaaaaaaaaaaaaaaaaaaaaaaaaaaaaaaaaaa

SEQ ID NO: 8555 - RNA, 810 nt, Artificial Sequence
  mRNA Design i-3 (hSL-A100) comprising derived and/or modified sequence from Pf(3D7)__XP_001351122.1__HsALB_Pf-CSP(93-272) (opt1)
aggagaaagcuuaccaugaagugggugaccuucaucagccuccuguuccuguucuccagcgccuacuccaagcugaagcagcccgccgacggcaacccggaccccaacgcgaaccccaacgucgaccccaacgccaacccgaacguggaccccaacgccaaccccaacguggaccccaacgccaacccgaacgccaaccccaacgcgaaccccaacgccaaccccaacgccaacccgaacgccaaccccaacgcgaaccccaacgccaaccccaacgccaacccgaacgccaaccccaacgccaaccccaacgcgaaccccaacgccaacccgaacgccaaccccaacgccaaccccaacgccaaccccaacgcgaacccgaacgucgaccccaacgccaaccccaacgccaaccccaacgccaacccgaacgccaaccccaacgcgaaccccaacgccaacccgaacgccaaccccaacgccaaccccaacgccaaccccaacgcgaacccgaacgccaaccccaacgccaaccccaacgccaaccccaacgcgaacccgaacgccaaccccaacgccaaccccaacgccaaccccaacgccaacccgugaggacuaguuauaagacugacuagcccgaugggccucccaacgggcccuccuccccuccuugcaccgagauuaaucaaaggcucuuuucagagccaccaaaaaaaaaaaaaaaaaaaaaaaaaaaaaaaaaaaaaaaaaaaaaaaaaaaaaaaaaaaaaaaaaaaaaaaaaaaaaaaaaaaaaaaaaaaaaaaaaaaaa

SEQ ID NO: 8556 - RNA, 1185 nt, Artificial Sequence
  mRNA Design i-3 (hSL-A100) comprising derived and/or modified sequence from Pf(3D7)__XP_001351122.1__HsALB_Pf-CSP(93-397) (opt1)
aggagaaagcuuaccaugaagugggugaccuucaucagccuccuguuccuguucuccagcgccuacuccaagcugaagcagcccgccgacggcaacccggaccccaacgcgaaccccaacgucgaccccaacgccaacccgaacguggaccccaacgccaaccccaacguggaccccaacgccaacccgaacgccaaccccaacgcgaaccccaacgccaaccccaacgccaacccgaacgccaaccccaacgcgaaccccaacgccaaccccaacgccaacccgaacgccaaccccaacgccaaccccaacgcgaaccccaacgccaacccgaacgccaaccccaacgccaaccccaacgccaaccccaacgcgaacccgaacgucgaccccaacgccaaccccaacgccaaccccaacgccaacccgaacgccaaccccaacgcgaaccccaacgccaacccgaacgccaaccccaacgccaaccccaacgccaaccccaacgcgaacccgaacgccaaccccaacgccaaccccaacgccaaccccaacgcgaacccgaacgccaaccccaacgccaaccccaacgccaaccccaacgccaacccgaacaagaacaaccaggggaacggccaggggcacaacaugcccaacgaccccaaccgcaacguggacgagaacgcgaacgccaacagcgccgugaagaacaacaacaacgaggagcccuccgacaagcacaucaaggaguaccucaacaagauccagaacagccuguccaccgaguggagcccgugcuccgucacgugcggcaacgggauccaggugcggaucaagcccggcagcgccaacaagcccaaggacgagcuggacuacgccaacgacaucgagaagaagaucugcaagauggagaagugcuccagcguguucaacgucgugaacuccagcaucggccucaucauggugcuguccuuccuguuccucaacugaggacuaguuauaagacugacuagcccgaugggccucccaacgggcccuccuccccuccuugcaccgagauuaaucaaaggcucuuuucagagccaccaaaaaaaaaaaaaaaaaaaaaaaaaaaaaaaaaaaaaaaaaaaaaaaaaaaaaaaaaaaaaaaaaaaaaaaaaaaaaaaaaaaaaaaaaaaaaaaaaaaaa

SEQ ID NO: 8557 - RNA, 555 nt, Artificial Sequence
  mRNA Design i-3 (hSL-A100) comprising derived and/or modified sequence from Pf(3D7)__XP_001351122.1__HsALB_Pf-CSP(98-192) (opt1)
aggagaaagcuuaccaugaagugggugaccuucaucagccuccuguuccuguucuccagcgccuacuccgccgacggcaaccccgacccgaacgcgaaccccaacgucgaccccaacgccaaccccaacguggacccgaacgccaaccccaacguggaccccaacgccaaccccaacgccaacccgaacgcgaaccccaacgccaaccccaacgccaaccccaacgccaacccgaacgcgaaccccaacgccaaccccaacgccaaccccaacgccaacccgaacgccaaccccaacgcgaaccccaacgccaaccccaacgccaacccgaacgccaaccccaacgccaaccccugaggacuaguuauaagacugacuagcccgaugggccucccaacgggcccuccuccccuccuugcaccgagauuaaucaaaggcucuuuucagagccaccaaaaaaaaaaaaaaaaaaaaaaaaaaaaaaaaaaaaaaaaaaaaaaaaaaaaaaaaaaaaaaaaaaaaaaaaaaaaaaaaaaaaaaaaaaaaaaaaaaaaa

SEQ ID NO: 8558 - RNA, 795 nt, Artificial Sequence
  mRNA Design i-3 (hSL-A100) comprising derived and/or modified sequence from Pf(3D7)__XP_001351122.1__HsALB_Pf-CSP(98-272) (opt1)
aggagaaagcuuaccaugaagugggugaccuucaucagccuccuguuccuguucuccagcgccuacuccgccgacggcaaccccgacccgaacgcgaaccccaacgucgaccccaacgccaaccccaacguggacccgaacgccaaccccaacguggaccccaacgccaaccccaacgccaacccgaacgcgaaccccaacgccaaccccaacgccaaccccaacgccaacccgaacgcgaaccccaacgccaaccccaacgccaaccccaacgccaacccgaacgccaaccccaacgcgaaccccaacgccaaccccaacgccaacccgaacgccaaccccaacgccaaccccaacgcgaaccccaacgucgacccgaacgccaaccccaacgccaaccccaacgccaaccccaacgccaacccgaacgcgaaccccaacgccaaccccaacgccaacccgaacgccaaccccaacgccaaccccaacgcgaaccccaacgccaacccgaacgccaaccccaacgccaaccccaacgcgaaccccaacgccaacccgaacgccaaccccaacgccaaccccaacgccaaccccugaggacuaguuauaagacugacuagcccgaugggccucccaacgggcccuccuccccuccuugcaccgagauuaaucaaaggcucuuuucagagccaccaaaaaaaaaaaaaaaaaaaaaaaaaaaaaaaaaaaaaaaaaaaaaaaaaaaaaaaaaaaaaaaaaaaaaaaaaaaaaaaaaaaaaaaaaaaaaaaaaaaaa

SEQ ID NO: 8559 - RNA, 1101 nt, Artificial Sequence
  mRNA Design i-3 (hSL-A100) comprising derived and/or modified sequence from Pf(3D7)__XP_001351122.1__HsALB_Pf-CSP(98-374) (opt1)
aggagaaagcuuaccaugaagugggugaccuucaucagccuccuguuccuguucuccagcgccuacuccgccgacggcaaccccgacccgaacgcgaaccccaacgucgaccccaacgccaaccccaacguggacccgaacgccaaccccaacguggaccccaacgccaaccccaacgccaacccgaacgcgaaccccaacgccaaccccaacgccaaccccaacgccaacccgaacgcgaaccccaacgccaaccccaacgccaaccccaacgccaacccgaacgccaaccccaacgcgaaccccaacgccaaccccaacgccaacccgaacgccaaccccaacgccaaccccaacgcgaaccccaacgucgacccgaacgccaaccccaacgccaaccccaacgccaaccccaacgccaacccgaacgcgaaccccaacgccaaccccaacgccaacccgaacgccaaccccaacgccaaccccaacgcgaaccccaacgccaacccgaacgccaaccccaacgccaaccccaacgcgaaccccaacgccaacccgaacgccaaccccaacgccaaccccaacgccaaccccaacaagaacaaccaggggaacggccaggggcacaacaugccgaacgaccccaaccgcaacguggacgagaacgcgaacgccaacagcgccgugaagaacaacaacaacgaggagcccuccgacaagcacaucaaggaguaccugaacaagauccagaacagccucuccaccgaguggagccccugcuccgucacgugcggcaacgggauccaggugcggaucaagccgggcagcgccaacaagcccaaggacgagcuggacuacgccaacgacaucgagaagaagaucugcaagauggagaagugcugaggacuaguuauaagacugacuagcccgaugggccucccaacgggcccuccuccccuccuugcaccgagauuaaucaaaggcucuuuucagagccaccaaaaaaaaaaaaaaaaaaaaaaaaaaaaaaaaaaaaaaaaaaaaaaaaaaaaaaaaaaaaaaaaaaaaaaaaaaaaaaaaaaaaaaaaaaaaaaaaaaaaa

SEQ ID NO: 8560 - RNA, 1170 nt, Artificial Sequence
  mRNA Design i-3 (hSL-A100) comprising derived and/or modified sequence from Pf(3D7)__XP_001351122.1__HsALB_Pf-CSP(98-397) (opt1)
aggagaaagcuuaccaugaagugggugaccuucaucagccuccuguuccuguucuccagcgccuacuccgccgacggcaaccccgacccgaacgcgaaccccaacgucgaccccaacgccaaccccaacguggacccgaacgccaaccccaacguggaccccaacgccaaccccaacgccaacccgaacgcgaaccccaacgccaaccccaacgccaaccccaacgccaacccgaacgcgaaccccaacgccaaccccaacgccaaccccaacgccaacccgaacgccaaccccaacgcgaaccccaacgccaaccccaacgccaacccgaacgccaaccccaacgccaaccccaacgcgaaccccaacgucgacccgaacgccaaccccaacgccaaccccaacgccaaccccaacgccaacccgaacgcgaaccccaacgccaaccccaacgccaacccgaacgccaaccccaacgccaaccccaacgcgaaccccaacgccaacccgaacgccaaccccaacgccaaccccaacgcgaaccccaacgccaacccgaacgccaaccccaacgccaaccccaacgccaaccccaacaagaacaaccaggggaacggccaggggcacaacaugccgaacgaccccaaccgcaacguggacgagaacgcgaacgccaacagcgccgugaagaacaacaacaacgaggagcccuccgacaagcacaucaaggaguaccugaacaagauccagaacagccucuccaccgaguggagccccugcuccgucacgugcggcaacgggauccaggugcggaucaagccgggcagcgccaacaagcccaaggacgagcuggacuacgccaacgacaucgagaagaagaucugcaagauggagaagugcuccagcguguucaacgucgugaacuccagcaucggccugaucauggugcucuccuuccuguuccugaacugaggacuaguuauaagacugacuagcccgaugggccucccaacgggcccuccuccccuccuugcaccgagauuaaucaaaggcucuuuucagagccaccaaaaaaaaaaaaaaaaaaaaaaaaaaaaaaaaaaaaaaaaaaaaaaaaaaaaaaaaaaaaaaaaaaaaaaaaaaaaaaaaaaaaaaaaaaaaaaaaaaaaa

SEQ ID NO: 8561 - RNA, 1497 nt, Artificial Sequence
  mRNA Design i-3 (hSL-A100) comprising derived and/or modified sequence from Pf(3D7)__XP_001351122.1__HsALB_Pf-CSP(199-377)_L(PVTN)_HBsAg (opt1)
aggagaaagcuuaccaugaagugggugaccuucaucagccuccuguuccuguucuccagcgccuacuccgaccccaacgccaacccgaacgcgaaccccaacgccaaccccaacgccaaccccaacgccaacccgaacgccaaccccaacgcgaaccccaacgccaaccccaacgccaacccgaacgccaaccccaacgcgaaccccaacgccaaccccaacgccaacccgaacgccaaccccaacgccaaccccaacgcgaaccccaacgccaacccgaacgccaaccccaacaagaacaaccagggcaacgggcagggccacaacaugcccaacgaccccaaccgcaacgucgacgagaacgccaacgccaacagcgcggugaagaacaacaacaacgaggagccguccgacaagcacaucaaggaguaccugaacaagauccagaacagccucuccaccgaguggagccccugcuccgugaccugcgggaacggcauccagguccggaucaagcccgggagcgccaacaagcccaaggacgagcuggacuacgccaacgacaucgagaagaagaucugcaagauggagaagugcuccagcgugccggugaccaacauggagaacaucaccuccggcuuccugggcccccuccugguccugcaggccggguucuuccuccugacccgcauccugacgaucccccagagccucgacuccugguggaccagccugaacuuccugggcgggucccccgugugccucggccagaacagccaguccccgaccagcaaccacagccccaccuccugcccgcccaucugccccggguaccgguggaugugccugcgccgguucaucaucuuccuguucauccuccugcugugccucaucuuccugcuggugcuccuggacuaccagggcaugcugcccgucugcccccucaucccgggcagcacgaccaccaacaccgggcccugcaagacgugcaccacccccgcccagggcaacuccauguuccccagcugcugcugcaccaagccgacggacgggaacugcacgugcauccccauccccuccagcugggcguucgccaaguaccugugggagugggccuccgugcgcuucagcuggcugucccuccuggugcccuucguccagugguucgugggccugagcccgaccguguggcucuccgccaucuggaugaugugguacuggggccccagccuguacuccaucgucagccccuucaucccccugcucccgaucuucuucugccuguggguguacaucugaggacuaguuauaagacugacuagcccgaugggccucccaacgggcccuccuccccuccuugcaccgagauuaaucaaaggcucuuuucagagccaccaaaaaaaaaaaaaaaaaaaaaaaaaaaaaaaaaaaaaaaaaaaaaaaaaaaaaaaaaaaaaaaaaaaaaaaaaaaaaaaaaaaaaaaaaaaaaaaaaaaaa

SEQ ID NO: 8562 - RNA, 1407 nt, Artificial Sequence
  mRNA Design i-3 (hSL-A100) comprising derived and/or modified sequence from Pf(3D7)__XP_001351122.1__Pf-CSP (opt2)
aggagaaagcuuaccaugaugcgcaagcucgccauccucuccgucuccuccuuccucuucgucgaggcccucuuccaggaguaccagugcuacggcuccuccuccaacacccgcguccucaacgagcucaacuacgacaacgccggcaccaaccucuacaacgagcucgagaugaacuacuacggcaagcaggagaacugguacucccucaagaagaacucccgcucccucggcgagaacgacgacggcaacaacgaggacaacgagaagcuccgcaagcccaagcacaagaagcucaagcagcccgccgacggcaaccccgaccccaacgccaaccccaacgucgaccccaacgccaaccccaacgucgaccccaacgccaaccccaacgucgaccccaacgccaaccccaacgccaaccccaacgccaaccccaacgccaaccccaacgccaaccccaacgccaaccccaacgccaaccccaacgccaaccccaacgccaaccccaacgccaaccccaacgccaaccccaacgccaaccccaacgccaaccccaacgccaaccccaacgccaaccccaacgccaaccccaacgccaaccccaacgucgaccccaacgccaaccccaacgccaaccccaacgccaaccccaacgccaaccccaacgccaaccccaacgccaaccccaacgccaaccccaacgccaaccccaacgccaaccccaacgccaaccccaacgccaaccccaacgccaaccccaacgccaaccccaacgccaaccccaacgccaaccccaacgccaaccccaacgccaaccccaacgccaaccccaacaagaacaaccagggcaacggccagggccacaacaugcccaacgaccccaaccgcaacgucgacgagaacgccaacgccaacuccgccgucaagaacaacaacaacgaggagcccuccgacaagcacaucaaggaguaccucaacaagauccagaacucccucuccaccgaguggucccccugcuccgucaccugcggcaacggcauccagguccgcaucaagcccggcuccgccaacaagcccaaggacgagcucgacuacgccaacgacaucgagaagaagaucugcaagauggagaagugcuccuccgucuucaacgucgucaacuccuccaucggccucaucaugguccucuccuuccucuuccucaacugaggacuaguuauaagacugacuagcccgaugggccucccaacgggcccuccuccccuccuugcaccgagauuaaucaaaggcucuuuucagagccaccaaaaaaaaaaaaaaaaaaaaaaaaaaaaaaaaaaaaaaaaaaaaaaaaaaaaaaaaaaaaaaaaaaaaaaaaaaaaaaaaaaaaaaaaaaaaaaaaaaaaa

SEQ ID NO: 8563 - RNA, 1338 nt, Artificial Sequence
  mRNA Design i-3 (hSL-A100) comprising derived and/or modified sequence from Pf(3D7)__XP_001351122.1__Pf-CSP(1-374) (opt2)
aggagaaagcuuaccaugaugcgcaagcucgccauccucuccgucuccuccuuccucuucgucgaggcccucuuccaggaguaccagugcuacggcuccuccuccaacacccgcguccucaacgagcucaacuacgacaacgccggcaccaaccucuacaacgagcucgagaugaacuacuacggcaagcaggagaacugguacucccucaagaagaacucccgcucccucggcgagaacgacgacggcaacaacgaggacaacgagaagcuccgcaagcccaagcacaagaagcucaagcagcccgccgacggcaaccccgaccccaacgccaaccccaacgucgaccccaacgccaaccccaacgucgaccccaacgccaaccccaacgucgaccccaacgccaaccccaacgccaaccccaacgccaaccccaacgccaaccccaacgccaaccccaacgccaaccccaacgccaaccccaacgccaaccccaacgccaaccccaacgccaaccccaacgccaaccccaacgccaaccccaacgccaaccccaacgccaaccccaacgccaaccccaacgccaaccccaacgccaaccccaacgucgaccccaacgccaaccccaacgccaaccccaacgccaaccccaacgccaaccccaacgccaaccccaacgccaaccccaacgccaaccccaacgccaaccccaacgccaaccccaacgccaaccccaacgccaaccccaacgccaaccccaacgccaaccccaacgccaaccccaacgccaaccccaacgccaaccccaacgccaaccccaacgccaaccccaacaagaacaaccagggcaacggccagggccacaacaugcccaacgaccccaaccgcaacgucgacgagaacgccaacgccaacuccgccgucaagaacaacaacaacgaggagcccuccgacaagcacaucaaggaguaccucaacaagauccagaacucccucuccaccgaguggucccccugcuccgucaccugcggcaacggcauccagguccgcaucaagcccggcuccgccaacaagcccaaggacgagcucgacuacgccaacgacaucgagaagaagaucugcaagauggagaagugcugaggacuaguuauaagacugacuagcccgaugggccucccaacgggcccuccuccccuccuugcaccgagauuaaucaaaggcucuuuucagagccaccaaaaaaaaaaaaaaaaaaaaaaaaaaaaaaaaaaaaaaaaaaaaaaaaaaaaaaaaaaaaaaaaaaaaaaaaaaaaaaaaaaaaaaaaaaaaaaaaaaaaa

SEQ ID NO: 8564 - RNA, 1191 nt, Artificial Sequence
  mRNA Design i-3 (hSL-A100) comprising derived and/or modified sequence from Pf(3D7)__XP_001351122.1__Pf-CSP(1-325) (opt2)
aggagaaagcuuaccaugaugcgcaagcucgccauccucuccgucuccuccuuccucuucgucgaggcccucuuccaggaguaccagugcuacggcuccuccuccaacacccgcguccucaacgagcucaacuacgacaacgccggcaccaaccucuacaacgagcucgagaugaacuacuacggcaagcaggagaacugguacucccucaagaagaacucccgcucccucggcgagaacgacgacggcaacaacgaggacaacgagaagcuccgcaagcccaagcacaagaagcucaagcagcccgccgacggcaaccccgaccccaacgccaaccccaacgucgaccccaacgccaaccccaacgucgaccccaacgccaaccccaacgucgaccccaacgccaaccccaacgccaaccccaacgccaaccccaacgccaaccccaacgccaaccccaacgccaaccccaacgccaaccccaacgccaaccccaacgccaaccccaacgccaaccccaacgccaaccccaacgccaaccccaacgccaaccccaacgccaaccccaacgccaaccccaacgccaaccccaacgccaaccccaacgucgaccccaacgccaaccccaacgccaaccccaacgccaaccccaacgccaaccccaacgccaaccccaacgccaaccccaacgccaaccccaacgccaaccccaacgccaaccccaacgccaaccccaacgccaaccccaacgccaaccccaacgccaaccccaacgccaaccccaacgccaaccccaacgccaaccccaacgccaaccccaacgccaaccccaacaagaacaaccagggcaacggccagggccacaacaugcccaacgaccccaaccgcaacgucgacgagaacgccaacgccaacuccgccgucaagaacaacaacaacgaggagcccuccgacaagcacaucaaggaguaccucaacaagauccagaacugaggacuaguuauaagacugacuagcccgaugggccucccaacgggcccuccuccccuccuugcaccgagauuaaucaaaggcucuuuucagagccaccaaaaaaaaaaaaaaaaaaaaaaaaaaaaaaaaaaaaaaaaaaaaaaaaaaaaaaaaaaaaaaaaaaaaaaaaaaaaaaaaaaaaaaaaaaaaaaaaaaaaa

SEQ ID NO: 8565 - RNA, 1407 nt, Artificial Sequence
  mRNA Design i-3 (hSL-A100) comprising derived and/or modified sequence from Pf(3D7)__XP_001351122.1__HsALB_Pf-CSP(19-397) (opt2)
aggagaaagcuuaccaugaagugggucaccuucaucucccuccucuuccucuucuccuccgccuacucccucuuccaggaguaccagugcuacggcuccuccuccaacacccgcguccucaacgagcucaacuacgacaacgccggcaccaaccucuacaacgagcucgagaugaacuacuacggcaagcaggagaacugguacucccucaagaagaacucccgcucccucggcgagaacgacgacggcaacaacgaggacaacgagaagcuccgcaagcccaagcacaagaagcucaagcagcccgccgacggcaaccccgaccccaacgccaaccccaacgucgaccccaacgccaaccccaacgucgaccccaacgccaaccccaacgucgaccccaacgccaaccccaacgccaaccccaacgccaaccccaacgccaaccccaacgccaaccccaacgccaaccccaacgccaaccccaacgccaaccccaacgccaaccccaacgccaaccccaacgccaaccccaacgccaaccccaacgccaaccccaacgccaaccccaacgccaaccccaacgccaaccccaacgccaaccccaacgucgaccccaacgccaaccccaacgccaaccccaacgccaaccccaacgccaaccccaacgccaaccccaacgccaaccccaacgccaaccccaacgccaaccccaacgccaaccccaacgccaaccccaacgccaaccccaacgccaaccccaacgccaaccccaacgccaaccccaacgccaaccccaacgccaaccccaacgccaaccccaacgccaaccccaacaagaacaaccagggcaacggccagggccacaacaugcccaacgaccccaaccgcaacgucgacgagaacgccaacgccaacuccgccgucaagaacaacaacaacgaggagcccuccgacaagcacaucaaggaguaccucaacaagauccagaacucccucuccaccgaguggucccccugcuccgucaccugcggcaacggcauccagguccgcaucaagcccggcuccgccaacaagcccaaggacgagcucgacuacgccaacgacaucgagaagaagaucugcaagauggagaagugcuccuccgucuucaacgucgucaacuccuccaucggccucaucaugguccucuccuuccucuuccucaacugaggacuaguuauaagacugacuagcccgaugggccucccaacgggcccuccuccccuccuugcaccgagauuaaucaaaggcucuuuucagagccaccaaaaaaaaaaaaaaaaaaaaaaaaaaaaaaaaaaaaaaaaaaaaaaaaaaaaaaaaaaaaaaaaaaaaaaaaaaaaaaaaaaaaaaaaaaaaaaaaaaaaa

SEQ ID NO: 8566 - RNA, 1425 nt, Artificial Sequence
  mRNA Design i-3 (hSL-A100) comprising derived and/or modified sequence from Pf(3D7)__XP_001351122.1__HsIns-iso1_Pf-CSP(19-397) (opt2)
aggagaaagcuuaccauggcccucuggaugcgccuccucccccuccucgcccuccucgcccucuggggccccgaccccgccgccgcccucuuccaggaguaccagugcuacggcuccuccuccaacacccgcguccucaacgagcucaacuacgacaacgccggcaccaaccucuacaacgagcucgagaugaacuacuacggcaagcaggagaacugguacucccucaagaagaacucccgcucccucggcgagaacgacgacggcaacaacgaggacaacgagaagcuccgcaagcccaagcacaagaagcucaagcagcccgccgacggcaaccccgaccccaacgccaaccccaacgucgaccccaacgccaaccccaacgucgaccccaacgccaaccccaacgucgaccccaacgccaaccccaacgccaaccccaacgccaaccccaacgccaaccccaacgccaaccccaacgccaaccccaacgccaaccccaacgccaaccccaacgccaaccccaacgccaaccccaacgccaaccccaacgccaaccccaacgccaaccccaacgccaaccccaacgccaaccccaacgccaaccccaacgccaaccccaacgucgaccccaacgccaaccccaacgccaaccccaacgccaaccccaacgccaaccccaacgccaaccccaacgccaaccccaacgccaaccccaacgccaaccccaacgccaaccccaacgccaaccccaacgccaaccccaacgccaaccccaacgccaaccccaacgccaaccccaacgccaaccccaacgccaaccccaacgccaaccccaacgccaaccccaacaagaacaaccagggcaacggccagggccacaacaugcccaacgaccccaaccgcaacgucgacgagaacgccaacgccaacuccgccgucaagaacaacaacaacgaggagcccuccgacaagcacaucaaggaguaccucaacaagauccagaacucccucuccaccgaguggucccccugcuccgucaccugcggcaacggcauccagguccgcaucaagcccggcuccgccaacaagcccaaggacgagcucgacuacgccaacgacaucgagaagaagaucugcaagauggagaagugcuccuccgucuucaacgucgucaacuccuccaucggccucaucaugguccucuccuuccucuuccucaacugaggacuaguuauaagacugacuagcccgaugggccucccaacgggcccuccuccccuccuugcaccgagauuaaucaaaggcucuuuucagagccaccaaaaaaaaaaaaaaaaaaaaaaaaaaaaaaaaaaaaaaaaaaaaaaaaaaaaaaaaaaaaaaaaaaaaaaaaaaaaaaaaaaaaaaaaaaaaaaaaaaaaa

SEQ ID NO: 8567 - RNA, 1404 nt, Artificial Sequence
  mRNA Design i-3 (hSL-A100) comprising derived and/or modified sequence from Pf(3D7)__XP_001351122.1__HsSPARC_Pf-CSP(19-397) (opt2)
aggagaaagcuuaccaugcgcgccuggaucuucuuccuccucugccucgccggccgcgcccucgcccucuuccaggaguaccagugcuacggcuccuccuccaacacccgcguccucaacgagcucaacuacgacaacgccggcaccaaccucuacaacgagcucgagaugaacuacuacggcaagcaggagaacugguacucccucaagaagaacucccgcucccucggcgagaacgacgacggcaacaacgaggacaacgagaagcuccgcaagcccaagcacaagaagcucaagcagcccgccgacggcaaccccgaccccaacgccaaccccaacgucgaccccaacgccaaccccaacgucgaccccaacgccaaccccaacgucgaccccaacgccaaccccaacgccaaccccaacgccaaccccaacgccaaccccaacgccaaccccaacgccaaccccaacgccaaccccaacgccaaccccaacgccaaccccaacgccaaccccaacgccaaccccaacgccaaccccaacgccaaccccaacgccaaccccaacgccaaccccaacgccaaccccaacgccaaccccaacgucgaccccaacgccaaccccaacgccaaccccaacgccaaccccaacgccaaccccaacgccaaccccaacgccaaccccaacgccaaccccaacgccaaccccaacgccaaccccaacgccaaccccaacgccaaccccaacgccaaccccaacgccaaccccaacgccaaccccaacgccaaccccaacgccaaccccaacgccaaccccaacgccaaccccaacaagaacaaccagggcaacggccagggccacaacaugcccaacgaccccaaccgcaacgucgacgagaacgccaacgccaacuccgccgucaagaacaacaacaacgaggagcccuccgacaagcacaucaaggaguaccucaacaagauccagaacucccucuccaccgaguggucccccugcuccgucaccugcggcaacggcauccagguccgcaucaagcccggcuccgccaacaagcccaaggacgagcucgacuacgccaacgacaucgagaagaagaucugcaagauggagaagugcuccuccgucuucaacgucgucaacuccuccaucggccucaucaugguccucuccuuccucuuccucaacugaggacuaguuauaagacugacuagcccgaugggccucccaacgggcccuccuccccuccuugcaccgagauuaaucaaaggcucuuuucagagccaccaaaaaaaaaaaaaaaaaaaaaaaaaaaaaaaaaaaaaaaaaaaaaaaaaaaaaaaaaaaaaaaaaaaaaaaaaaaaaaaaaaaaaaaaaaaaaaaaaaaaa

SEQ ID NO: 8568 - RNA, 1407 nt, Artificial Sequence
  mRNA Design i-3 (hSL-A100) comprising derived and/or modified sequence from Pf(3D7)__XP_001351122.1__IgE_Pf-CSP(19-397) (opt2)
aggagaaagcuuaccauggacuggaccuggauccucuuccucgucgccgccgccacccgcguccacucccucuuccaggaguaccagugcuacggcuccuccuccaacacccgcguccucaacgagcucaacuacgacaacgccggcaccaaccucuacaacgagcucgagaugaacuacuacggcaagcaggagaacugguacucccucaagaagaacucccgcucccucggcgagaacgacgacggcaacaacgaggacaacgagaagcuccgcaagcccaagcacaagaagcucaagcagcccgccgacggcaaccccgaccccaacgccaaccccaacgucgaccccaacgccaaccccaacgucgaccccaacgccaaccccaacgucgaccccaacgccaaccccaacgccaaccccaacgccaaccccaacgccaaccccaacgccaaccccaacgccaaccccaacgccaaccccaacgccaaccccaacgccaaccccaacgccaaccccaacgccaaccccaacgccaaccccaacgccaaccccaacgccaaccccaacgccaaccccaacgccaaccccaacgccaaccccaacgucgaccccaacgccaaccccaacgccaaccccaacgccaaccccaacgccaaccccaacgccaaccccaacgccaaccccaacgccaaccccaacgccaaccccaacgccaaccccaacgccaaccccaacgccaaccccaacgccaaccccaacgccaaccccaacgccaaccccaacgccaaccccaacgccaaccccaacgccaaccccaacgccaaccccaacaagaacaaccagggcaacggccagggccacaacaugcccaacgaccccaaccgcaacgucgacgagaacgccaacgccaacuccgccgucaagaacaacaacaacgaggagcccuccgacaagcacaucaaggaguaccucaacaagauccagaacucccucuccaccgaguggucccccugcuccgucaccugcggcaacggcauccagguccgcaucaagcccggcuccgccaacaagcccaaggacgagcucgacuacgccaacgacaucgagaagaagaucugcaagauggagaagugcuccuccgucuucaacgucgucaacuccuccaucggccucaucaugguccucuccuuccucuuccucaacugaggacuaguuauaagacugacuagcccgaugggccucccaacgggcccuccuccccuccuugcaccgagauuaaucaaaggcucuuuucagagccaccaaaaaaaaaaaaaaaaaaaaaaaaaaaaaaaaaaaaaaaaaaaaaaaaaaaaaaaaaaaaaaaaaaaaaaaaaaaaaaaaaaaaaaaaaaaaaaaaaaaaa

SEQ ID NO: 8569 - RNA, 1572 nt, Artificial Sequence
  mRNA Design i-3 (hSL-A100) comprising derived and/or modified sequence from Pf(3D7)__XP_001351122.1__Pf-CSP_L(G4SG4)_TM domain HA (opt2)
aggagaaagcuuaccaugaugcgcaagcucgccauccucuccgucuccuccuuccucuucgucgaggcccucuuccaggaguaccagugcuacggcuccuccuccaacacccgcguccucaacgagcucaacuacgacaacgccggcaccaaccucuacaacgagcucgagaugaacuacuacggcaagcaggagaacugguacucccucaagaagaacucccgcucccucggcgagaacgacgacggcaacaacgaggacaacgagaagcuccgcaagcccaagcacaagaagcucaagcagcccgccgacggcaaccccgaccccaacgccaaccccaacgucgaccccaacgccaaccccaacgucgaccccaacgccaaccccaacgucgaccccaacgccaaccccaacgccaaccccaacgccaaccccaacgccaaccccaacgccaaccccaacgccaaccccaacgccaaccccaacgccaaccccaacgccaaccccaacgccaaccccaacgccaaccccaacgccaaccccaacgccaaccccaacgccaaccccaacgccaaccccaacgccaaccccaacgccaaccccaacgucgaccccaacgccaaccccaacgccaaccccaacgccaaccccaacgccaaccccaacgccaaccccaacgccaaccccaacgccaaccccaacgccaaccccaacgccaaccccaacgccaaccccaacgccaaccccaacgccaaccccaacgccaaccccaacgccaaccccaacgccaaccccaacgccaaccccaacgccaaccccaacgccaaccccaacaagaacaaccagggcaacggccagggccacaacaugcccaacgaccccaaccgcaacgucgacgagaacgccaacgccaacuccgccgucaagaacaacaacaacgaggagcccuccgacaagcacaucaaggaguaccucaacaagauccagaacucccucuccaccgaguggucccccugcuccgucaccugcggcaacggcauccagguccgcaucaagcccggcuccgccaacaagcccaaggacgagcucgacuacgccaacgacaucgagaagaagaucugcaagauggagaagugcuccuccgucuucaacgucgucaacuccuccaucggccucaucaugguccucuccuuccucuuccucaacggcggcggcggcuccggcggcggcggcaagcucgaguccacccgcaucuaccagauccucgccaucuacuccaccgucgccuccucccucguccucgucgucucccucggcgccaucuccuucuggaugugcuccaacggcucccuccagugccgcaucugcaucugaggacuaguuauaagacugacuagcccgaugggccucccaacgggcccuccuccccuccuugcaccgagauuaaucaaaggcucuuuucagagccaccaaaaaaaaaaaaaaaaaaaaaaaaaaaaaaaaaaaaaaaaaaaaaaaaaaaaaaaaaaaaaaaaaaaaaaaaaaaaaaaaaaaaaaaaaaaaaaaaaaaaa

SEQ ID NO: 8570 - RNA, 1446 nt, Artificial Sequence
  mRNA Design i-3 (hSL-A100) comprising derived and/or modified sequence from Pf(3D7)__XP_001351122.1__Pf-CSP(199-377)_L(PVTN)_HBsAg (opt2)
aggagaaagcuuaccauggaccccaacgccaaccccaacgccaaccccaacgccaaccccaacgccaaccccaacgccaaccccaacgccaaccccaacgccaaccccaacgccaaccccaacgccaaccccaacgccaaccccaacgccaaccccaacgccaaccccaacgccaaccccaacgccaaccccaacgccaaccccaacgccaaccccaacgccaaccccaacgccaaccccaacaagaacaaccagggcaacggccagggccacaacaugcccaacgaccccaaccgcaacgucgacgagaacgccaacgccaacuccgccgucaagaacaacaacaacgaggagcccuccgacaagcacaucaaggaguaccucaacaagauccagaacucccucuccaccgaguggucccccugcuccgucaccugcggcaacggcauccagguccgcaucaagcccggcuccgccaacaagcccaaggacgagcucgacuacgccaacgacaucgagaagaagaucugcaagauggagaagugcuccuccguccccgucaccaacauggagaacaucaccuccggcuuccucggcccccuccucguccuccaggccggcuucuuccuccucacccgcauccucaccaucccccagucccucgacuccugguggaccucccucaacuuccucggcggcucccccgucugccucggccagaacucccagucccccaccuccaaccacucccccaccuccugcccccccaucugccccggcuaccgcuggaugugccuccgccgcuucaucaucuuccucuucauccuccuccucugccucaucuuccuccucguccuccucgacuaccagggcaugcuccccgucugcccccucauccccggcuccaccaccaccaacaccggccccugcaagaccugcaccacccccgcccagggcaacuccauguuccccuccugcugcugcaccaagcccaccgacggcaacugcaccugcauccccauccccuccuccugggccuucgccaaguaccucugggagugggccuccguccgcuucuccuggcucucccuccucguccccuucguccagugguucgucggccucucccccaccgucuggcucuccgccaucuggaugaugugguacuggggccccucccucuacuccaucgucucccccuucaucccccuccuccccaucuucuucugccucugggucuacaucugaggacuaguuauaagacugacuagcccgaugggccucccaacgggcccuccuccccuccuugcaccgagauuaaucaaaggcucuuuucagagccaccaaaaaaaaaaaaaaaaaaaaaaaaaaaaaaaaaaaaaaaaaaaaaaaaaaaaaaaaaaaaaaaaaaaaaaaaaaaaaaaaaaaaaaaaaaaaaaaaaaaaa

SEQ ID NO: 8571 - RNA, 1488 nt, Artificial Sequence
  mRNA Design i-3 (hSL-A100) comprising derived and/or modified sequence from Pf(3D7)__XP_001351122.1__Pf-CSP(199-387)_L(PVTN)_HBsAg (opt2)
aggagaaagcuuaccaugauggcccccgaccccaacgccaaccccaacgccaaccccaacgccaaccccaacgccaaccccaacgccaaccccaacgccaaccccaacgccaaccccaacgccaaccccaacgccaaccccaacgccaaccccaacgccaaccccaacgccaaccccaacgccaaccccaacgccaaccccaacgccaaccccaacgccaaccccaacgccaaccccaacgccaaccccaacaagaacaaccagggcaacggccagggccacaacaugcccaacgaccccaaccgcaacgucgacgagaacgccaacgccaacuccgccgucaagaacaacaacaacgaggagcccuccgacaagcacaucaaggaguaccucaacaagauccagaacucccucuccaccgaguggucccccugcuccgucaccugcggcaacggcauccagguccgcaucaagcccggcuccgccaacaagcccaaggacgagcucgacuacgccaacgacaucgagaagaagaucugcaagauggagaagugcuccuccgucuucaacgucgucaacuccuccaucggccucggccccgucaccaacauggagaacaucaccuccggcuuccucggcccccuccucguccuccaggccggcuucuuccuccucacccgcauccucaccaucccccagucccucgacuccugguggaccucccucaacuuccucggcggcucccccgucugccucggccagaacucccagucccccaccuccaaccacucccccaccuccugcccccccaucugccccggcuaccgcuggaugugccuccgccgcuucaucaucuuccucuucauccuccuccucugccucaucuuccuccucguccuccucgacuaccagggcaugcuccccgucugcccccucauccccggcuccaccaccaccaacaccggccccugcaagaccugcaccacccccgcccagggcaacuccauguuccccuccugcugcugcaccaagcccaccgacggcaacugcaccugcauccccauccccuccuccugggccuucgccaaguaccucugggagugggccuccguccgcuucuccuggcucucccuccucguccccuucguccagugguucgucggccucucccccaccgucuggcucuccgccaucuggaugaugugguacuggggccccucccucuacuccaucgucucccccuucaucccccuccuccccaucuucuucugccucugggucuacaucugaggacuaguuauaagacugacuagcccgaugggccucccaacgggcccuccuccccuccuugcaccgagauuaaucaaaggcucuuuucagagccaccaaaaaaaaaaaaaaaaaaaaaaaaaaaaaaaaaaaaaaaaaaaaaaaaaaaaaaaaaaaaaaaaaaaaaaaaaaaaaaaaaaaaaaaaaaaaaaaaaaaaa

SEQ ID NO: 8572 - RNA, 672 nt, Artificial Sequence
  mRNA Design i-3 (hSL-A100) comprising derived and/or modified sequence from Pf(3D7)__XP_001351122.1__HsALB_Pf-CSP(19-152) (opt2)
aggagaaagcuuaccaugaagugggucaccuucaucucccuccucuuccucuucuccuccgccuacucccucuuccaggaguaccagugcuacggcuccuccuccaacacccgcguccucaacgagcucaacuacgacaacgccggcaccaaccucuacaacgagcucgagaugaacuacuacggcaagcaggagaacugguacucccucaagaagaacucccgcucccucggcgagaacgacgacggcaacaacgaggacaacgagaagcuccgcaagcccaagcacaagaagcucaagcagcccgccgacggcaaccccgaccccaacgccaaccccaacgucgaccccaacgccaaccccaacgucgaccccaacgccaaccccaacgucgaccccaacgccaaccccaacgccaaccccaacgccaaccccaacgccaaccccaacgccaaccccaacgccaaccccugaggacuaguuauaagacugacuagcccgaugggccucccaacgggcccuccuccccuccuugcaccgagauuaaucaaaggcucuuuucagagccaccaaaaaaaaaaaaaaaaaaaaaaaaaaaaaaaaaaaaaaaaaaaaaaaaaaaaaaaaaaaaaaaaaaaaaaaaaaaaaaaaaaaaaaaaaaaaaaaaaaaaa

SEQ ID NO: 8573 - RNA, 792 nt, Artificial Sequence
  mRNA Design i-3 (hSL-A100) comprising derived and/or modified sequence from Pf(3D7)__XP_001351122.1__HsALB_Pf-CSP(19-192) (opt2)
aggagaaagcuuaccaugaagugggucaccuucaucucccuccucuuccucuucuccuccgccuacucccucuuccaggaguaccagugcuacggcuccuccuccaacacccgcguccucaacgagcucaacuacgacaacgccggcaccaaccucuacaacgagcucgagaugaacuacuacggcaagcaggagaacugguacucccucaagaagaacucccgcucccucggcgagaacgacgacggcaacaacgaggacaacgagaagcuccgcaagcccaagcacaagaagcucaagcagcccgccgacggcaaccccgaccccaacgccaaccccaacgucgaccccaacgccaaccccaacgucgaccccaacgccaaccccaacgucgaccccaacgccaaccccaacgccaaccccaacgccaaccccaacgccaaccccaacgccaaccccaacgccaaccccaacgccaaccccaacgccaaccccaacgccaaccccaacgccaaccccaacgccaaccccaacgccaaccccaacgccaaccccaacgccaaccccaacgccaaccccaacgccaaccccugaggacuaguuauaagacugacuagcccgaugggccucccaacgggcccuccuccccuccuugcaccgagauuaaucaaaggcucuuuucagagccaccaaaaaaaaaaaaaaaaaaaaaaaaaaaaaaaaaaaaaaaaaaaaaaaaaaaaaaaaaaaaaaaaaaaaaaaaaaaaaaaaaaaaaaaaaaaaaaaaaaaaa

SEQ ID NO: 8574 - RNA, 1032 nt, Artificial Sequence
  mRNA Design i-3 (hSL-A100) comprising derived and/or modified sequence from Pf(3D7)__XP_001351122.1__HsALB_Pf-CSP(19-272) (opt2)
aggagaaagcuuaccaugaagugggucaccuucaucucccuccucuuccucuucuccuccgccuacucccucuuccaggaguaccagugcuacggcuccuccuccaacacccgcguccucaacgagcucaacuacgacaacgccggcaccaaccucuacaacgagcucgagaugaacuacuacggcaagcaggagaacugguacucccucaagaagaacucccgcucccucggcgagaacgacgacggcaacaacgaggacaacgagaagcuccgcaagcccaagcacaagaagcucaagcagcccgccgacggcaaccccgaccccaacgccaaccccaacgucgaccccaacgccaaccccaacgucgaccccaacgccaaccccaacgucgaccccaacgccaaccccaacgccaaccccaacgccaaccccaacgccaaccccaacgccaaccccaacgccaaccccaacgccaaccccaacgccaaccccaacgccaaccccaacgccaaccccaacgccaaccccaacgccaaccccaacgccaaccccaacgccaaccccaacgccaaccccaacgccaaccccaacgccaaccccaacgucgaccccaacgccaaccccaacgccaaccccaacgccaaccccaacgccaaccccaacgccaaccccaacgccaaccccaacgccaaccccaacgccaaccccaacgccaaccccaacgccaaccccaacgccaaccccaacgccaaccccaacgccaaccccaacgccaaccccaacgccaaccccaacgccaaccccaacgccaaccccaacgccaaccccugaggacuaguuauaagacugacuagcccgaugggccucccaacgggcccuccuccccuccuugcaccgagauuaaucaaaggcucuuuucagagccaccaaaaaaaaaaaaaaaaaaaaaaaaaaaaaaaaaaaaaaaaaaaaaaaaaaaaaaaaaaaaaaaaaaaaaaaaaaaaaaaaaaaaaaaaaaaaaaaaaaaaa

SEQ ID NO: 8575 - RNA, 1194 nt, Artificial Sequence
  mRNA Design i-3 (hSL-A100) comprising derived and/or modified sequence from Pf(3D7)__XP_001351122.1__HsALB_Pf-CSP(19-272)_L(AAY)_Pf-CSP(310-3 27)_L(AAY)_Pf-CSP(346-375) (opt2)
aggagaaagcuuaccaugaagugggucaccuucaucucccuccucuuccucuucuccuccgccuacucccucuuccaggaguaccagugcuacggcuccuccuccaacacccgcguccucaacgagcucaacuacgacaacgccggcaccaaccucuacaacgagcucgagaugaacuacuacggcaagcaggagaacugguacucccucaagaagaacucccgcucccucggcgagaacgacgacggcaacaacgaggacaacgagaagcuccgcaagcccaagcacaagaagcucaagcagcccgccgacggcaaccccgaccccaacgccaaccccaacgucgaccccaacgccaaccccaacgucgaccccaacgccaaccccaacgucgaccccaacgccaaccccaacgccaaccccaacgccaaccccaacgccaaccccaacgccaaccccaacgccaaccccaacgccaaccccaacgccaaccccaacgccaaccccaacgccaaccccaacgccaaccccaacgccaaccccaacgccaaccccaacgccaaccccaacgccaaccccaacgccaaccccaacgccaaccccaacgucgaccccaacgccaaccccaacgccaaccccaacgccaaccccaacgccaaccccaacgccaaccccaacgccaaccccaacgccaaccccaacgccaaccccaacgccaaccccaacgccaaccccaacgccaaccccaacgccaaccccaacgccaaccccaacgccaaccccaacgccaaccccaacgccaaccccaacgccaaccccaacgccaaccccgccgccuacgagcccuccgacaagcacaucaaggaguaccucaacaagauccagaacucccucgccgccuacaucaagcccggcuccgccaacaagcccaaggacgagcucgacuacgccaacgacaucgagaagaagaucugcaagauggagaagugcuccugaggacuaguuauaagacugacuagcccgaugggccucccaacgggcccuccuccccuccuugcaccgagauuaaucaaaggcucuuuucagagccaccaaaaaaaaaaaaaaaaaaaaaaaaaaaaaaaaaaaaaaaaaaaaaaaaaaaaaaaaaaaaaaaaaaaaaaaaaaaaaaaaaaaaaaaaaaaaaaaaaaaaa

SEQ ID NO: 8576 - RNA, 1155 nt, Artificial Sequence
  mRNA Design i-3 (hSL-A100) comprising derived and/or modified sequence from Pf(3D7)__XP_001351122.1__HsALB_Pf-CSP(19-272)_L(AAY)_Pf-CSP(346-3 65)_L(AAY)_P2 (opt2)
aggagaaagcuuaccaugaagugggucaccuucaucucccuccucuuccucuucuccuccgccuacucccucuuccaggaguaccagugcuacggcuccuccuccaacacccgcguccucaacgagcucaacuacgacaacgccggcaccaaccucuacaacgagcucgagaugaacuacuacggcaagcaggagaacugguacucccucaagaagaacucccgcucccucggcgagaacgacgacggcaacaacgaggacaacgagaagcuccgcaagcccaagcacaagaagcucaagcagcccgccgacggcaaccccgaccccaacgccaaccccaacgucgaccccaacgccaaccccaacgucgaccccaacgccaaccccaacgucgaccccaacgccaaccccaacgccaaccccaacgccaaccccaacgccaaccccaacgccaaccccaacgccaaccccaacgccaaccccaacgccaaccccaacgccaaccccaacgccaaccccaacgccaaccccaacgccaaccccaacgccaaccccaacgccaaccccaacgccaaccccaacgccaaccccaacgccaaccccaacgucgaccccaacgccaaccccaacgccaaccccaacgccaaccccaacgccaaccccaacgccaaccccaacgccaaccccaacgccaaccccaacgccaaccccaacgccaaccccaacgccaaccccaacgccaaccccaacgccaaccccaacgccaaccccaacgccaaccccaacgccaaccccaacgccaaccccaacgccaaccccaacgccaaccccgccgccuacaucaagcccggcuccgccaacaagcccaaggacgagcucgacuacgccaacgacaucgaggccgccuaccaguacaucaaggccaacuccaaguucaucggcaucaccgagcucugaggacuaguuauaagacugacuagcccgaugggccucccaacgggcccuccuccccuccuugcaccgagauuaaucaaaggcucuuuucagagccaccaaaaaaaaaaaaaaaaaaaaaaaaaaaaaaaaaaaaaaaaaaaaaaaaaaaaaaaaaaaaaaaaaaaaaaaaaaaaaaaaaaaaaaaaaaaaaaaaaaaaa

SEQ ID NO: 8577 - RNA, 1149 nt, Artificial Sequence
  mRNA Design i-3 (hSL-A100) comprising derived and/or modified sequence from Pf(3D7)__XP_001351122.1__HsALB_Pf-CSP(19-272)_L(AAY)_Pf-CSP(346-3 65)_L(AAY)_PADRE (opt2)
aggagaaagcuuaccaugaagugggucaccuucaucucccuccucuuccucuucuccuccgccuacucccucuuccaggaguaccagugcuacggcuccuccuccaacacccgcguccucaacgagcucaacuacgacaacgccggcaccaaccucuacaacgagcucgagaugaacuacuacggcaagcaggagaacugguacucccucaagaagaacucccgcucccucggcgagaacgacgacggcaacaacgaggacaacgagaagcuccgcaagcccaagcacaagaagcucaagcagcccgccgacggcaaccccgaccccaacgccaaccccaacgucgaccccaacgccaaccccaacgucgaccccaacgccaaccccaacgucgaccccaacgccaaccccaacgccaaccccaacgccaaccccaacgccaaccccaacgccaaccccaacgccaaccccaacgccaaccccaacgccaaccccaacgccaaccccaacgccaaccccaacgccaaccccaacgccaaccccaacgccaaccccaacgccaaccccaacgccaaccccaacgccaaccccaacgccaaccccaacgucgaccccaacgccaaccccaacgccaaccccaacgccaaccccaacgccaaccccaacgccaaccccaacgccaaccccaacgccaaccccaacgccaaccccaacgccaaccccaacgccaaccccaacgccaaccccaacgccaaccccaacgccaaccccaacgccaaccccaacgccaaccccaacgccaaccccaacgccaaccccaacgccaaccccgccgccuacaucaagcccggcuccgccaacaagcccaaggacgagcucgacuacgccaacgacaucgaggccgccuacgccaaguucgucgccgccuggacccucaaggccgccgccugaggacuaguuauaagacugacuagcccgaugggccucccaacgggcccuccuccccuccuugcaccgagauuaaucaaaggcucuuuucagagccaccaaaaaaaaaaaaaaaaaaaaaaaaaaaaaaaaaaaaaaaaaaaaaaaaaaaaaaaaaaaaaaaaaaaaaaaaaaaaaaaaaaaaaaaaaaaaaaaaaaaaa

SEQ ID NO: 8578 - RNA, 1206 nt, Artificial Sequence
  mRNA Design i-3 (hSL-A100) comprising derived and/or modified sequence from Pf(3D7)__XP_001351122.1__HsALB_Pf-CSP(19-272)_L(G4S)_Pf-CSP(310-3 27)_L(G4S)_Pf-CSP(346-375) (opt2)
aggagaaagcuuaccaugaagugggucaccuucaucucccuccucuuccucuucuccuccgccuacucccucuuccaggaguaccagugcuacggcuccuccuccaacacccgcguccucaacgagcucaacuacgacaacgccggcaccaaccucuacaacgagcucgagaugaacuacuacggcaagcaggagaacugguacucccucaagaagaacucccgcucccucggcgagaacgacgacggcaacaacgaggacaacgagaagcuccgcaagcccaagcacaagaagcucaagcagcccgccgacggcaaccccgaccccaacgccaaccccaacgucgaccccaacgccaaccccaacgucgaccccaacgccaaccccaacgucgaccccaacgccaaccccaacgccaaccccaacgccaaccccaacgccaaccccaacgccaaccccaacgccaaccccaacgccaaccccaacgccaaccccaacgccaaccccaacgccaaccccaacgccaaccccaacgccaaccccaacgccaaccccaacgccaaccccaacgccaaccccaacgccaaccccaacgccaaccccaacgucgaccccaacgccaaccccaacgccaaccccaacgccaaccccaacgccaaccccaacgccaaccccaacgccaaccccaacgccaaccccaacgccaaccccaacgccaaccccaacgccaaccccaacgccaaccccaacgccaaccccaacgccaaccccaacgccaaccccaacgccaaccccaacgccaaccccaacgccaaccccaacgccaaccccggcggcggcggcuccgagcccuccgacaagcacaucaaggaguaccucaacaagauccagaacucccucggcggcggcggcuccaucaagcccggcuccgccaacaagcccaaggacgagcucgacuacgccaacgacaucgagaagaagaucugcaagauggagaagugcuccugaggacuaguuauaagacugacuagcccgaugggccucccaacgggcccuccuccccuccuugcaccgagauuaaucaaaggcucuuuucagagccaccaaaaaaaaaaaaaaaaaaaaaaaaaaaaaaaaaaaaaaaaaaaaaaaaaaaaaaaaaaaaaaaaaaaaaaaaaaaaaaaaaaaaaaaaaaaaaaaaaaaaa

SEQ ID NO: 8579 - RNA, 1191 nt, Artificial Sequence
  mRNA Design i-3 (hSL-A100) comprising derived and/or modified sequence from Pf(3D7)__XP_001351122.1__HsALB_Pf-CSP(19-272)_L(G4S)_Pf-CSP(310-3 27)_Pf-CSP(346-375) (opt2)
aggagaaagcuuaccaugaagugggucaccuucaucucccuccucuuccucuucuccuccgccuacucccucuuccaggaguaccagugcuacggcuccuccuccaacacccgcguccucaacgagcucaacuacgacaacgccggcaccaaccucuacaacgagcucgagaugaacuacuacggcaagcaggagaacugguacucccucaagaagaacucccgcucccucggcgagaacgacgacggcaacaacgaggacaacgagaagcuccgcaagcccaagcacaagaagcucaagcagcccgccgacggcaaccccgaccccaacgccaaccccaacgucgaccccaacgccaaccccaacgucgaccccaacgccaaccccaacgucgaccccaacgccaaccccaacgccaaccccaacgccaaccccaacgccaaccccaacgccaaccccaacgccaaccccaacgccaaccccaacgccaaccccaacgccaaccccaacgccaaccccaacgccaaccccaacgccaaccccaacgccaaccccaacgccaaccccaacgccaaccccaacgccaaccccaacgccaaccccaacgucgaccccaacgccaaccccaacgccaaccccaacgccaaccccaacgccaaccccaacgccaaccccaacgccaaccccaacgccaaccccaacgccaaccccaacgccaaccccaacgccaaccccaacgccaaccccaacgccaaccccaacgccaaccccaacgccaaccccaacgccaaccccaacgccaaccccaacgccaaccccaacgccaaccccggcggcggcggcuccgagcccuccgacaagcacaucaaggaguaccucaacaagauccagaacucccucaucaagcccggcuccgccaacaagcccaaggacgagcucgacuacgccaacgacaucgagaagaagaucugcaagauggagaagugcuccugaggacuaguuauaagacugacuagcccgaugggccucccaacgggcccuccuccccuccuugcaccgagauuaaucaaaggcucuuuucagagccaccaaaaaaaaaaaaaaaaaaaaaaaaaaaaaaaaaaaaaaaaaaaaaaaaaaaaaaaaaaaaaaaaaaaaaaaaaaaaaaaaaaaaaaaaaaaaaaaaaaaaa

SEQ ID NO: 8580 - RNA, 1191 nt, Artificial Sequence
  mRNA Design i-3 (hSL-A100) comprising derived and/or modified sequence from Pf(3D7)__XP_001351122.1__HsALB_Pf-CSP(19-325) (opt2)
aggagaaagcuuaccaugaagugggucaccuucaucucccuccucuuccucuucuccuccgccuacucccucuuccaggaguaccagugcuacggcuccuccuccaacacccgcguccucaacgagcucaacuacgacaacgccggcaccaaccucuacaacgagcucgagaugaacuacuacggcaagcaggagaacugguacucccucaagaagaacucccgcucccucggcgagaacgacgacggcaacaacgaggacaacgagaagcuccgcaagcccaagcacaagaagcucaagcagcccgccgacggcaaccccgaccccaacgccaaccccaacgucgaccccaacgccaaccccaacgucgaccccaacgccaaccccaacgucgaccccaacgccaaccccaacgccaaccccaacgccaaccccaacgccaaccccaacgccaaccccaacgccaaccccaacgccaaccccaacgccaaccccaacgccaaccccaacgccaaccccaacgccaaccccaacgccaaccccaacgccaaccccaacgccaaccccaacgccaaccccaacgccaaccccaacgccaaccccaacgucgaccccaacgccaaccccaacgccaaccccaacgccaaccccaacgccaaccccaacgccaaccccaacgccaaccccaacgccaaccccaacgccaaccccaacgccaaccccaacgccaaccccaacgccaaccccaacgccaaccccaacgccaaccccaacgccaaccccaacgccaaccccaacgccaaccccaacgccaaccccaacgccaaccccaacaagaacaaccagggcaacggccagggccacaacaugcccaacgaccccaaccgcaacgucgacgagaacgccaacgccaacuccgccgucaagaacaacaacaacgaggagcccuccgacaagcacaucaaggaguaccucaacaagauccagaacugaggacuaguuauaagacugacuagcccgaugggccucccaacgggcccuccuccccuccuugcaccgagauuaaucaaaggcucuuuucagagccaccaaaaaaaaaaaaaaaaaaaaaaaaaaaaaaaaaaaaaaaaaaaaaaaaaaaaaaaaaaaaaaaaaaaaaaaaaaaaaaaaaaaaaaaaaaaaaaaaaaaaa

SEQ ID NO: 8581 - RNA, 1368 nt, Artificial Sequence
  mRNA Design i-3 (hSL-A100) comprising derived and/or modified sequence from Pf(3D7)__XP_001351122.1__HsALB_Pf-CSP(19-384) (opt2)
aggagaaagcuuaccaugaagugggucaccuucaucucccuccucuuccucuucuccuccgccuacucccucuuccaggaguaccagugcuacggcuccuccuccaacacccgcguccucaacgagcucaacuacgacaacgccggcaccaaccucuacaacgagcucgagaugaacuacuacggcaagcaggagaacugguacucccucaagaagaacucccgcucccucggcgagaacgacgacggcaacaacgaggacaacgagaagcuccgcaagcccaagcacaagaagcucaagcagcccgccgacggcaaccccgaccccaacgccaaccccaacgucgaccccaacgccaaccccaacgucgaccccaacgccaaccccaacgucgaccccaacgccaaccccaacgccaaccccaacgccaaccccaacgccaaccccaacgccaaccccaacgccaaccccaacgccaaccccaacgccaaccccaacgccaaccccaacgccaaccccaacgccaaccccaacgccaaccccaacgccaaccccaacgccaaccccaacgccaaccccaacgccaaccccaacgccaaccccaacgucgaccccaacgccaaccccaacgccaaccccaacgccaaccccaacgccaaccccaacgccaaccccaacgccaaccccaacgccaaccccaacgccaaccccaacgccaaccccaacgccaaccccaacgccaaccccaacgccaaccccaacgccaaccccaacgccaaccccaacgccaaccccaacgccaaccccaacgccaaccccaacgccaaccccaacaagaacaaccagggcaacggccagggccacaacaugcccaacgaccccaaccgcaacgucgacgagaacgccaacgccaacuccgccgucaagaacaacaacaacgaggagcccuccgacaagcacaucaaggaguaccucaacaagauccagaacucccucuccaccgaguggucccccugcuccgucaccugcggcaacggcauccagguccgcaucaagcccggcuccgccaacaagcccaaggacgagcucgacuacgccaacgacaucgagaagaagaucugcaagauggagaagugcuccuccgucuucaacgucgucaacuccuccugaggacuaguuauaagacugacuagcccgaugggccucccaacgggcccuccuccccuccuugcaccgagauuaaucaaaggcucuuuucagagccaccaaaaaaaaaaaaaaaaaaaaaaaaaaaaaaaaaaaaaaaaaaaaaaaaaaaaaaaaaaaaaaaaaaaaaaaaaaaaaaaaaaaaaaaaaaaaaaaaaaaaa

SEQ ID NO: 8582 - RNA, 1506 nt, Artificial Sequence
  mRNA Design i-3 (hSL-A100) comprising derived and/or modified sequence from Pf(3D7)__XP_001351122.1__HsALB_Pf-CSP(19-384)_TM domain HA (opt2)
aggagaaagcuuaccaugaagugggucaccuucaucucccuccucuuccucuucuccuccgccuacucccucuuccaggaguaccagugcuacggcuccuccuccaacacccgcguccucaacgagcucaacuacgacaacgccggcaccaaccucuacaacgagcucgagaugaacuacuacggcaagcaggagaacugguacucccucaagaagaacucccgcucccucggcgagaacgacgacggcaacaacgaggacaacgagaagcuccgcaagcccaagcacaagaagcucaagcagcccgccgacggcaaccccgaccccaacgccaaccccaacgucgaccccaacgccaaccccaacgucgaccccaacgccaaccccaacgucgaccccaacgccaaccccaacgccaaccccaacgccaaccccaacgccaaccccaacgccaaccccaacgccaaccccaacgccaaccccaacgccaaccccaacgccaaccccaacgccaaccccaacgccaaccccaacgccaaccccaacgccaaccccaacgccaaccccaacgccaaccccaacgccaaccccaacgccaaccccaacgucgaccccaacgccaaccccaacgccaaccccaacgccaaccccaacgccaaccccaacgccaaccccaacgccaaccccaacgccaaccccaacgccaaccccaacgccaaccccaacgccaaccccaacgccaaccccaacgccaaccccaacgccaaccccaacgccaaccccaacgccaaccccaacgccaaccccaacgccaaccccaacgccaaccccaacaagaacaaccagggcaacggccagggccacaacaugcccaacgaccccaaccgcaacgucgacgagaacgccaacgccaacuccgccgucaagaacaacaacaacgaggagcccuccgacaagcacaucaaggaguaccucaacaagauccagaacucccucuccaccgaguggucccccugcuccgucaccugcggcaacggcauccagguccgcaucaagcccggcuccgccaacaagcccaaggacgagcucgacuacgccaacgacaucgagaagaagaucugcaagauggagaagugcuccuccgucuucaacgucgucaacuccuccaagcucgaguccacccgcaucuaccagauccucgccaucuacuccaccgucgccuccucccucguccucgucgucucccucggcgccaucuccuucuggaugugcuccaacggcucccuccagugccgcaucugcaucugaggacuaguuauaagacugacuagcccgaugggccucccaacgggcccuccuccccuccuugcaccgagauuaaucaaaggcucuuuucagagccaccaaaaaaaaaaaaaaaaaaaaaaaaaaaaaaaaaaaaaaaaaaaaaaaaaaaaaaaaaaaaaaaaaaaaaaaaaaaaaaaaaaaaaaaaaaaaaaaaaaaaa

SEQ ID NO: 8583 - RNA, 1218 nt, Artificial Sequence
  mRNA Design i-3 (hSL-A100) comprising derived and/or modified sequence from Pf(3D7)__XP_001351122.1__HsALB_Pf-CSP(82-397) (opt2)
aggagaaagcuuaccaugaagugggucaccuucaucucccuccucuuccucuucuccuccgccuacuccgacaacgagaagcuccgcaagcccaagcacaagaagcucaagcagcccgccgacggcaaccccgaccccaacgccaaccccaacgucgaccccaacgccaaccccaacgucgaccccaacgccaaccccaacgucgaccccaacgccaaccccaacgccaaccccaacgccaaccccaacgccaaccccaacgccaaccccaacgccaaccccaacgccaaccccaacgccaaccccaacgccaaccccaacgccaaccccaacgccaaccccaacgccaaccccaacgccaaccccaacgccaaccccaacgccaaccccaacgccaaccccaacgccaaccccaacgucgaccccaacgccaaccccaacgccaaccccaacgccaaccccaacgccaaccccaacgccaaccccaacgccaaccccaacgccaaccccaacgccaaccccaacgccaaccccaacgccaaccccaacgccaaccccaacgccaaccccaacgccaaccccaacgccaaccccaacgccaaccccaacgccaaccccaacgccaaccccaacgccaaccccaacaagaacaaccagggcaacggccagggccacaacaugcccaacgaccccaaccgcaacgucgacgagaacgccaacgccaacuccgccgucaagaacaacaacaacgaggagcccuccgacaagcacaucaaggaguaccucaacaagauccagaacucccucuccaccgaguggucccccugcuccgucaccugcggcaacggcauccagguccgcaucaagcccggcuccgccaacaagcccaaggacgagcucgacuacgccaacgacaucgagaagaagaucugcaagauggagaagugcuccuccgucuucaacgucgucaacuccuccaucggccucaucaugguccucuccuuccucuuccucaacugaggacuaguuauaagacugacuagcccgaugggccucccaacgggcccuccuccccuccuugcaccgagauuaaucaaaggcucuuuucagagccaccaaaaaaaaaaaaaaaaaaaaaaaaaaaaaaaaaaaaaaaaaaaaaaaaaaaaaaaaaaaaaaaaaaaaaaaaaaaaaaaaaaaaaaaaaaaaaaaaaaaaa

SEQ ID NO: 8584 - RNA, 570 nt, Artificial Sequence
  mRNA Design i-3 (hSL-A100) comprising derived and/or modified sequence from Pf(3D7)__XP_001351122.1__HsALB_Pf-CSP(93-192) (opt2)
aggagaaagcuuaccaugaagugggucaccuucaucucccuccucuuccucuucuccuccgccuacuccaagcucaagcagcccgccgacggcaaccccgaccccaacgccaaccccaacgucgaccccaacgccaaccccaacgucgaccccaacgccaaccccaacgucgaccccaacgccaaccccaacgccaaccccaacgccaaccccaacgccaaccccaacgccaaccccaacgccaaccccaacgccaaccccaacgccaaccccaacgccaaccccaacgccaaccccaacgccaaccccaacgccaaccccaacgccaaccccaacgccaaccccaacgccaaccccaacgccaaccccugaggacuaguuauaagacugacuagcccgaugggccucccaacgggcccuccuccccuccuugcaccgagauuaaucaaaggcucuuuucagagccaccaaaaaaaaaaaaaaaaaaaaaaaaaaaaaaaaaaaaaaaaaaaaaaaaaaaaaaaaaaaaaaaaaaaaaaaaaaaaaaaaaaaaaaaaaaaaaaaaaaaaa

SEQ ID NO: 8585 - RNA, 810 nt, Artificial Sequence
  mRNA Design i-3 (hSL-A100) comprising derived and/or modified sequence from Pf(3D7)__XP_001351122.1__HsALB_Pf-CSP(93-272) (opt2)
aggagaaagcuuaccaugaagugggucaccuucaucucccuccucuuccucuucuccuccgccuacuccaagcucaagcagcccgccgacggcaaccccgaccccaacgccaaccccaacgucgaccccaacgccaaccccaacgucgaccccaacgccaaccccaacgucgaccccaacgccaaccccaacgccaaccccaacgccaaccccaacgccaaccccaacgccaaccccaacgccaaccccaacgccaaccccaacgccaaccccaacgccaaccccaacgccaaccccaacgccaaccccaacgccaaccccaacgccaaccccaacgccaaccccaacgccaaccccaacgccaaccccaacgccaaccccaacgucgaccccaacgccaaccccaacgccaaccccaacgccaaccccaacgccaaccccaacgccaaccccaacgccaaccccaacgccaaccccaacgccaaccccaacgccaaccccaacgccaaccccaacgccaaccccaacgccaaccccaacgccaaccccaacgccaaccccaacgccaaccccaacgccaaccccaacgccaaccccaacgccaaccccugaggacuaguuauaagacugacuagcccgaugggccucccaacgggcccuccuccccuccuugcaccgagauuaaucaaaggcucuuuucagagccaccaaaaaaaaaaaaaaaaaaaaaaaaaaaaaaaaaaaaaaaaaaaaaaaaaaaaaaaaaaaaaaaaaaaaaaaaaaaaaaaaaaaaaaaaaaaaaaaaaaaaa

SEQ ID NO: 8586 - RNA, 1185 nt, Artificial Sequence
  mRNA Design i-3 (hSL-A100) comprising derived and/or modified sequence from Pf(3D7)__XP_001351122.1__HsALB_Pf-CSP(93-397) (opt2)
aggagaaagcuuaccaugaagugggucaccuucaucucccuccucuuccucuucuccuccgccuacuccaagcucaagcagcccgccgacggcaaccccgaccccaacgccaaccccaacgucgaccccaacgccaaccccaacgucgaccccaacgccaaccccaacgucgaccccaacgccaaccccaacgccaaccccaacgccaaccccaacgccaaccccaacgccaaccccaacgccaaccccaacgccaaccccaacgccaaccccaacgccaaccccaacgccaaccccaacgccaaccccaacgccaaccccaacgccaaccccaacgccaaccccaacgccaaccccaacgccaaccccaacgccaaccccaacgucgaccccaacgccaaccccaacgccaaccccaacgccaaccccaacgccaaccccaacgccaaccccaacgccaaccccaacgccaaccccaacgccaaccccaacgccaaccccaacgccaaccccaacgccaaccccaacgccaaccccaacgccaaccccaacgccaaccccaacgccaaccccaacgccaaccccaacgccaaccccaacgccaaccccaacaagaacaaccagggcaacggccagggccacaacaugcccaacgaccccaaccgcaacgucgacgagaacgccaacgccaacuccgccgucaagaacaacaacaacgaggagcccuccgacaagcacaucaaggaguaccucaacaagauccagaacucccucuccaccgaguggucccccugcuccgucaccugcggcaacggcauccagguccgcaucaagcccggcuccgccaacaagcccaaggacgagcucgacuacgccaacgacaucgagaagaagaucugcaagauggagaagugcuccuccgucuucaacgucgucaacuccuccaucggccucaucaugguccucuccuuccucuuccucaacugaggacuaguuauaagacugacuagcccgaugggccucccaacgggcccuccuccccuccuugcaccgagauuaaucaaaggcucuuuucagagccaccaaaaaaaaaaaaaaaaaaaaaaaaaaaaaaaaaaaaaaaaaaaaaaaaaaaaaaaaaaaaaaaaaaaaaaaaaaaaaaaaaaaaaaaaaaaaaaaaaaaaa

SEQ ID NO: 8587 - RNA, 555 nt, Artificial Sequence
  mRNA Design i-3 (hSL-A100) comprising derived and/or modified sequence from Pf(3D7)__XP_001351122.1__HsALB_Pf-CSP(98-192) (opt2)
aggagaaagcuuaccaugaagugggucaccuucaucucccuccucuuccucuucuccuccgccuacuccgccgacggcaaccccgaccccaacgccaaccccaacgucgaccccaacgccaaccccaacgucgaccccaacgccaaccccaacgucgaccccaacgccaaccccaacgccaaccccaacgccaaccccaacgccaaccccaacgccaaccccaacgccaaccccaacgccaaccccaacgccaaccccaacgccaaccccaacgccaaccccaacgccaaccccaacgccaaccccaacgccaaccccaacgccaaccccaacgccaaccccaacgccaaccccugaggacuaguuauaagacugacuagcccgaugggccucccaacgggcccuccuccccuccuugcaccgagauuaaucaaaggcucuuuucagagccaccaaaaaaaaaaaaaaaaaaaaaaaaaaaaaaaaaaaaaaaaaaaaaaaaaaaaaaaaaaaaaaaaaaaaaaaaaaaaaaaaaaaaaaaaaaaaaaaaaaaaa

SEQ ID NO: 8588 - RNA, 795 nt, Artificial Sequence
  mRNA Design i-3 (hSL-A100) comprising derived and/or modified sequence from Pf(3D7)__XP_001351122.1__HsALB_Pf-CSP(98-272) (opt2)
aggagaaagcuuaccaugaagugggucaccuucaucucccuccucuuccucuucuccuccgccuacuccgccgacggcaaccccgaccccaacgccaaccccaacgucgaccccaacgccaaccccaacgucgaccccaacgccaaccccaacgucgaccccaacgccaaccccaacgccaaccccaacgccaaccccaacgccaaccccaacgccaaccccaacgccaaccccaacgccaaccccaacgccaaccccaacgccaaccccaacgccaaccccaacgccaaccccaacgccaaccccaacgccaaccccaacgccaaccccaacgccaaccccaacgccaaccccaacgccaaccccaacgucgaccccaacgccaaccccaacgccaaccccaacgccaaccccaacgccaaccccaacgccaaccccaacgccaaccccaacgccaaccccaacgccaaccccaacgccaaccccaacgccaaccccaacgccaaccccaacgccaaccccaacgccaaccccaacgccaaccccaacgccaaccccaacgccaaccccaacgccaaccccaacgccaaccccugaggacuaguuauaagacugacuagcccgaugggccucccaacgggcccuccuccccuccuugcaccgagauuaaucaaaggcucuuuucagagccaccaaaaaaaaaaaaaaaaaaaaaaaaaaaaaaaaaaaaaaaaaaaaaaaaaaaaaaaaaaaaaaaaaaaaaaaaaaaaaaaaaaaaaaaaaaaaaaaaaaaaa

SEQ ID NO: 8589 - RNA, 1101 nt, Artificial Sequence
  mRNA Design i-3 (hSL-A100) comprising derived and/or modified sequence from Pf(3D7)__XP_001351122.1__HsALB_Pf-CSP(98-374) (opt2)
aggagaaagcuuaccaugaagugggucaccuucaucucccuccucuuccucuucuccuccgccuacuccgccgacggcaaccccgaccccaacgccaaccccaacgucgaccccaacgccaaccccaacgucgaccccaacgccaaccccaacgucgaccccaacgccaaccccaacgccaaccccaacgccaaccccaacgccaaccccaacgccaaccccaacgccaaccccaacgccaaccccaacgccaaccccaacgccaaccccaacgccaaccccaacgccaaccccaacgccaaccccaacgccaaccccaacgccaaccccaacgccaaccccaacgccaaccccaacgccaaccccaacgucgaccccaacgccaaccccaacgccaaccccaacgccaaccccaacgccaaccccaacgccaaccccaacgccaaccccaacgccaaccccaacgccaaccccaacgccaaccccaacgccaaccccaacgccaaccccaacgccaaccccaacgccaaccccaacgccaaccccaacgccaaccccaacgccaaccccaacgccaaccccaacgccaaccccaacaagaacaaccagggcaacggccagggccacaacaugcccaacgaccccaaccgcaacgucgacgagaacgccaacgccaacuccgccgucaagaacaacaacaacgaggagcccuccgacaagcacaucaaggaguaccucaacaagauccagaacucccucuccaccgaguggucccccugcuccgucaccugcggcaacggcauccagguccgcaucaagcccggcuccgccaacaagcccaaggacgagcucgacuacgccaacgacaucgagaagaagaucugcaagauggagaagugcugaggacuaguuauaagacugacuagcccgaugggccucccaacgggcccuccuccccuccuugcaccgagauuaaucaaaggcucuuuucagagccaccaaaaaaaaaaaaaaaaaaaaaaaaaaaaaaaaaaaaaaaaaaaaaaaaaaaaaaaaaaaaaaaaaaaaaaaaaaaaaaaaaaaaaaaaaaaaaaaaaaaaa

SEQ ID NO: 8590 - RNA, 1170 nt, Artificial Sequence
  mRNA Design i-3 (hSL-A100) comprising derived and/or modified sequence from Pf(3D7)__XP_001351122.1__HsALB_Pf-CSP(98-397) (opt2)
aggagaaagcuuaccaugaagugggucaccuucaucucccuccucuuccucuucuccuccgccuacuccgccgacggcaaccccgaccccaacgccaaccccaacgucgaccccaacgccaaccccaacgucgaccccaacgccaaccccaacgucgaccccaacgccaaccccaacgccaaccccaacgccaaccccaacgccaaccccaacgccaaccccaacgccaaccccaacgccaaccccaacgccaaccccaacgccaaccccaacgccaaccccaacgccaaccccaacgccaaccccaacgccaaccccaacgccaaccccaacgccaaccccaacgccaaccccaacgccaaccccaacgucgaccccaacgccaaccccaacgccaaccccaacgccaaccccaacgccaaccccaacgccaaccccaacgccaaccccaacgccaaccccaacgccaaccccaacgccaaccccaacgccaaccccaacgccaaccccaacgccaaccccaacgccaaccccaacgccaaccccaacgccaaccccaacgccaaccccaacgccaaccccaacgccaaccccaacaagaacaaccagggcaacggccagggccacaacaugcccaacgaccccaaccgcaacgucgacgagaacgccaacgccaacuccgccgucaagaacaacaacaacgaggagcccuccgacaagcacaucaaggaguaccucaacaagauccagaacucccucuccaccgaguggucccccugcuccgucaccugcggcaacggcauccagguccgcaucaagcccggcuccgccaacaagcccaaggacgagcucgacuacgccaacgacaucgagaagaagaucugcaagauggagaagugcuccuccgucuucaacgucgucaacuccuccaucggccucaucaugguccucuccuuccucuuccucaacugaggacuaguuauaagacugacuagcccgaugggccucccaacgggcccuccuccccuccuugcaccgagauuaaucaaaggcucuuuucagagccaccaaaaaaaaaaaaaaaaaaaaaaaaaaaaaaaaaaaaaaaaaaaaaaaaaaaaaaaaaaaaaaaaaaaaaaaaaaaaaaaaaaaaaaaaaaaaaaaaaaaaa

SEQ ID NO: 8591 - RNA, 1497 nt, Artificial Sequence
  mRNA Design i-3 (hSL-A100) comprising derived and/or modified sequence from Pf(3D7)__XP_001351122.1__HsALB_Pf-CSP(199-377)_L(PVTN)_HBsAg (opt2)
aggagaaagcuuaccaugaagugggucaccuucaucucccuccucuuccucuucuccuccgccuacuccgaccccaacgccaaccccaacgccaaccccaacgccaaccccaacgccaaccccaacgccaaccccaacgccaaccccaacgccaaccccaacgccaaccccaacgccaaccccaacgccaaccccaacgccaaccccaacgccaaccccaacgccaaccccaacgccaaccccaacgccaaccccaacgccaaccccaacgccaaccccaacgccaaccccaacaagaacaaccagggcaacggccagggccacaacaugcccaacgaccccaaccgcaacgucgacgagaacgccaacgccaacuccgccgucaagaacaacaacaacgaggagcccuccgacaagcacaucaaggaguaccucaacaagauccagaacucccucuccaccgaguggucccccugcuccgucaccugcggcaacggcauccagguccgcaucaagcccggcuccgccaacaagcccaaggacgagcucgacuacgccaacgacaucgagaagaagaucugcaagauggagaagugcuccuccguccccgucaccaacauggagaacaucaccuccggcuuccucggcccccuccucguccuccaggccggcuucuuccuccucacccgcauccucaccaucccccagucccucgacuccugguggaccucccucaacuuccucggcggcucccccgucugccucggccagaacucccagucccccaccuccaaccacucccccaccuccugcccccccaucugccccggcuaccgcuggaugugccuccgccgcuucaucaucuuccucuucauccuccuccucugccucaucuuccuccucguccuccucgacuaccagggcaugcuccccgucugcccccucauccccggcuccaccaccaccaacaccggccccugcaagaccugcaccacccccgcccagggcaacuccauguuccccuccugcugcugcaccaagcccaccgacggcaacugcaccugcauccccauccccuccuccugggccuucgccaaguaccucugggagugggccuccguccgcuucuccuggcucucccuccucguccccuucguccagugguucgucggccucucccccaccgucuggcucuccgccaucuggaugaugugguacuggggccccucccucuacuccaucgucucccccuucaucccccuccuccccaucuucuucugccucugggucuacaucugaggacuaguuauaagacugacuagcccgaugggccucccaacgggcccuccuccccuccuugcaccgagauuaaucaaaggcucuuuucagagccaccaaaaaaaaaaaaaaaaaaaaaaaaaaaaaaaaaaaaaaaaaaaaaaaaaaaaaaaaaaaaaaaaaaaaaaaaaaaaaaaaaaaaaaaaaaaaaaaaaaaaa

SEQ ID NO: 8592 - RNA, 1407 nt, Artificial Sequence
  mRNA Design i-3 (hSL-A100) comprising derived and/or modified sequence from Pf(3D7)__XP_001351122.1__Pf-CSP (opt3)
aggagaaagcuuaccaugaugagaaagcuggccauccucagcguguccucuuuccuuuuugucgaggcucuguuccaggaauaccaaugcuauggcucaaguagcaacaccaggguuuugaaugaguuaaacuacgacaaugcagggacaaaccuguauaaugaacuagagaugaacuacuauggaaaacaggaaaauugguacucccucaagaaaaacucucggucgcugggugagaaugaugacggcaacaaugaggauaacgaaaaacuucgcaagcccaagcacaagaaacugaagcagccugccgacgggaauccagauccgaacgcgaaucccaacguggacccuaacgcuaauccaaacguagaucccaaugccaacccuaauguggacccaaacgcaaaucccaacgccaauccuaacgcuaauccaaacgcaaauccgaacgccaaucccaacgcuaacccuaaugccaacccaaaugcgaaccccaaugcaaacccuaaugccaacccaaaugcuaaccccaaugccaacccgaaugcaaacccuaaugcuaaccccaacgccaauccaaacgcgaauccuaacgccaaucccaacgucgauccaaaugcaaaccccaaugcuaacccuaaugccaacccaaaugcuaacccgaaugccaaccccaacgcaaauccuaacgccaauccaaacgcuaaucccaacgcgaauccuaacgcaaauccaaacgccaaucccaacgcuaauccgaacgccaauccuaacgcaaauccaaacgccaaccccaaugcuaacccuaaugccaaccccaaugcaaacccaaauaaaaacaaucagggaaacggccaaggucauaauaugccuaacgaccccaaucgaaacguggaugagaaugcgaacgcuaacucagccguuaagaauaacaauaacgaggaaccaagcgacaaacacauuaaggaguauuugaauaagauacagaacagucucuccacugaauggucuccguguagcgugacgugcgggaauggaauccagguccguauuaaaccuggcuccgcaaacaagcccaaagaugagcuggacuacgccaaugacaucgaaaagaaaauuuguaagauggagaaaugcucaaguguguuuaacguaguuaauagcucuaucggccugauaauggugcucuccuucuuauuucugaacugaggacuaguuauaagacugacuagcccgaugggccucccaacgggcccuccuccccuccuugcaccgagauuaaucaaaggcucuuuucagagccaccaaaaaaaaaaaaaaaaaaaaaaaaaaaaaaaaaaaaaaaaaaaaaaaaaaaaaaaaaaaaaaaaaaaaaaaaaaaaaaaaaaaaaaaaaaaaaaaaaaaaa

SEQ ID NO: 8593 - RNA, 1338 nt, Artificial Sequence
  mRNA Design i-3 (hSL-A100) comprising derived and/or modified sequence from Pf(3D7)__XP_001351122.1__Pf-CSP(1-374) (opt3)
aggagaaagcuuaccaugaugagaaagcuggccauccucagcguguccucuuuccuuuuugucgaggcucuguuccaggaauaccaaugcuauggcucaaguagcaacaccaggguuuugaaugaguuaaacuacgacaaugcagggacaaaccuguauaaugaacuagagaugaacuacuauggaaaacaggaaaauugguacucccucaagaaaaacucucggucgcugggugagaaugaugacggcaacaaugaggauaacgaaaaacuucgcaagcccaagcacaagaaacugaagcagccugccgacgggaauccagauccgaacgcgaaucccaacguggacccuaacgcuaauccaaacguagaucccaaugccaacccuaauguggacccaaacgcaaaucccaacgccaauccuaacgcuaauccaaacgcaaauccgaacgccaaucccaacgcuaacccuaaugccaacccaaaugcgaaccccaaugcaaacccuaaugccaacccaaaugcuaaccccaaugccaacccgaaugcaaacccuaaugcuaaccccaacgccaauccaaacgcgaauccuaacgccaaucccaacgucgauccaaaugcaaaccccaaugcuaacccuaaugccaacccaaaugcuaacccgaaugccaaccccaacgcaaauccuaacgccaauccaaacgcuaaucccaacgcgaauccuaacgcaaauccaaacgccaaucccaacgcuaauccgaacgccaauccuaacgcaaauccaaacgccaaccccaaugcuaacccuaaugccaaccccaaugcaaacccaaauaaaaacaaucagggaaacggccaaggucauaauaugccuaacgaccccaaucgaaacguggaugagaaugcgaacgcuaacucagccguuaagaauaacaauaacgaggaaccaagcgacaaacacauuaaggaguauuugaauaagauacagaacagucucuccacugaauggucuccguguagcgugacgugcgggaauggaauccagguccguauuaaaccuggcuccgcaaacaagcccaaagaugagcuggacuacgccaaugacaucgaaaagaaaauuuguaagauggagaaaugcugaggacuaguuauaagacugacuagcccgaugggccucccaacgggcccuccuccccuccuugcaccgagauuaaucaaaggcucuuuucagagccaccaaaaaaaaaaaaaaaaaaaaaaaaaaaaaaaaaaaaaaaaaaaaaaaaaaaaaaaaaaaaaaaaaaaaaaaaaaaaaaaaaaaaaaaaaaaaaaaaaaaaa

SEQ ID NO: 8594 - RNA, 1191 nt, Artificial Sequence
  mRNA Design i-3 (hSL-A100) comprising derived and/or modified sequence from Pf(3D7)__XP_001351122.1__Pf-CSP(1-325) (opt3)
aggagaaagcuuaccaugaugagaaagcuggccauccucagcguguccucuuuccuuuuugucgaggcucuguuccaggaauaccaaugcuauggcucaaguagcaacaccaggguuuugaaugaguuaaacuacgacaaugcagggacaaaccuguauaaugaacuagagaugaacuacuauggaaaacaggaaaauugguacucccucaagaaaaacucucggucgcugggugagaaugaugacggcaacaaugaggauaacgaaaaacuucgcaagcccaagcacaagaaacugaagcagccugccgacgggaauccagauccgaacgcgaaucccaacguggacccuaacgcuaauccaaacguagaucccaaugccaacccuaauguggacccaaacgcaaaucccaacgccaauccuaacgcuaauccaaacgcaaauccgaacgccaaucccaacgcuaacccuaaugccaacccaaaugcgaaccccaaugcaaacccuaaugccaacccaaaugcuaaccccaaugccaacccgaaugcaaacccuaaugcuaaccccaacgccaauccaaacgcgaauccuaacgccaaucccaacgucgauccaaaugcaaaccccaaugcuaacccuaaugccaacccaaaugcuaacccgaaugccaaccccaacgcaaauccuaacgccaauccaaacgcuaaucccaacgcgaauccuaacgcaaauccaaacgccaaucccaacgcuaauccgaacgccaauccuaacgcaaauccaaacgccaaccccaaugcuaacccuaaugccaaccccaaugcaaacccaaauaaaaacaaucagggaaacggccaaggucauaauaugccuaacgaccccaaucgaaacguggaugagaaugcgaacgcuaacucagccguuaagaauaacaauaacgaggaaccaagcgacaaacacauuaaggaguauuugaauaagauacagaacugaggacuaguuauaagacugacuagcccgaugggccucccaacgggcccuccuccccuccuugcaccgagauuaaucaaaggcucuuuucagagccaccaaaaaaaaaaaaaaaaaaaaaaaaaaaaaaaaaaaaaaaaaaaaaaaaaaaaaaaaaaaaaaaaaaaaaaaaaaaaaaaaaaaaaaaaaaaaaaaaaaaaa

SEQ ID NO: 8595 - RNA, 1407 nt, Artificial Sequence
  mRNA Design i-3 (hSL-A100) comprising derived and/or modified sequence from Pf(3D7)__XP_001351122.1__HsALB_Pf-CSP(19-397) (opt3)
aggagaaagcuuaccaugaagugggugaccuucaucagccugcucuuucuuuucuccucugccuacucacuguuucaggaguaucaaugcuacggcaguagcuccaacacaagagucuugaaugaauuaaacuaugacaaugcugggacuaaccuguacaaugagcuagaaaugaacuauuacggaaaacaggagaauugguauucucucaagaaaaacucgaggucacugggugaaaaugaugacggcaacaaugaggauaacgagaaacuucggaagcccaagcacaagaaacugaagcagccugcagacgggaauccagauccgaacgccaaucccaacguugacccuaacgcgaauccaaacguggaucccaaugcuaacccuaauguagacccaaacgccaaucccaacgcaaauccuaacgccaauccaaacgcuaauccgaacgcaaaucccaacgccaacccuaaugcuaacccaaaugccaaccccaaugcgaacccuaaugcaaacccaaaugccaaccccaaugcuaacccgaaugccaacccuaaugcaaaccccaacgcuaauccaaacgccaauccuaacgcgaaucccaacguggauccaaaugccaaccccaaugcaaacccuaaugcuaacccaaaugccaacccgaaugcuaaccccaacgccaauccuaacgcaaauccaaacgccaaucccaacgcuaauccuaacgcgaauccaaacgcaaaucccaacgccaauccgaacgcuaauccuaacgccaauccaaacgcaaaccccaaugccaacccuaaugcuaaccccaaugccaacccaaauaaaaacaaucagggaaacggccaaggucauaauaugccuaacgaccccaaucgcaacgucgaugaaaaugcaaacgcgaacagcgcugugaagaauaacaauaacgaggaaccaagugacaaacacauuaaggaguacuugaauaagauacagaacucccucucuacggaguggagcccguguuccguuaccugcgggaauggaauccaggugcgaauuaaaccuggcucagccaacaagcccaaagaugaacuggacuacgcaaaugacaucgagaagaaaauuuguaagauggaaaaaugcaguagcgucuucaacgugguaaauucuuccaucggccugauaaugguucucucauuuuuauuccugaacugaggacuaguuauaagacugacuagcccgaugggccucccaacgggcccuccuccccuccuugcaccgagauuaaucaaaggcucuuuucagagccaccaaaaaaaaaaaaaaaaaaaaaaaaaaaaaaaaaaaaaaaaaaaaaaaaaaaaaaaaaaaaaaaaaaaaaaaaaaaaaaaaaaaaaaaaaaaaaaaaaaaaa

SEQ ID NO: 8596 - RNA, 1425 nt, Artificial Sequence
  mRNA Design i-3 (hSL-A100) comprising derived and/or modified sequence from Pf(3D7)__XP_001351122.1__HsIns-iso1_Pf-CSP(19-397) (opt3)
aggagaaagcuuaccauggcccuguggaugagacuccuuccccuguuggcuuuacuggcacuauggggcccugacccagccgcggcucucuuccaggaguaccaaugcuaugggagcuccucuaacaccagggugcugaaugaacuuaacuacgauaaugccggaacaaaccuguauaaugaguuggaaaugaacuacuaugguaagcaggagaauugguacucacucaaaaagaacagucggagccugggcgaaaaugacgaugggaacaaugaggacaacgagaaacugcgcaagccgaaacacaagaagcucaaacagcccgcagauggaaauccugacccaaacgccaaucccaacgucgauccuaacgcuaauccaaacguugaccccaaugcaaacccuaauguggauccaaacgccaauccgaacgcuaaucccaacgccaauccuaacgcgaauccaaacgcaaaucccaacgccaacccuaaugcuaacccaaaugccaaccccaaugcaaacccgaaugcuaacccuaaugccaaccccaaugcgaacccaaaugccaacccuaaugcaaaccccaacgcuaauccaaacgccaaucccaacgcuaauccuaacguagacccaaaugccaacccgaaugcaaaccccaaugccaacccuaaugcuaacccaaaugcgaaccccaacgcaaauccuaacgccaauccaaacgcuaaucccaacgccaauccgaacgcaaauccuaacgccaauccaaacgcuaaucccaacgccaauccuaacgcaaaucccaacgcgaacccaaaugcuaacccuaaugccaaccccaaugcaaacccaaauaagaacaaucagggcaacggucaagggcauaauaugccgaacgauccuaaucgaaacguggacgaaaaugccaacgcuaacuccgccgucaaaaauaacaauaacgaggaacccucugauaagcacaucaaagaguauuuaaauaagauucagaacucgcugucaacugaguggagcccauguagugugacgugcggaaauggcauacagguucguaucaagcccggcuccgcaaacaaaccuaaggacgaacuugacuacgcuaaugauauugagaaaaagaucuguaaaauggaaaagugcucuagcguguuuaacgucguaaauuccucaauuggguugaucauggugcugaguuuccuauuucucaacugaggacuaguuauaagacugacuagcccgaugggccucccaacgggcccuccuccccuccuugcaccgagauuaaucaaaggcucuuuucagagccaccaaaaaaaaaaaaaaaaaaaaaaaaaaaaaaaaaaaaaaaaaaaaaaaaaaaaaaaaaaaaaaaaaaaaaaaaaaaaaaaaaaaaaaaaaaaaaaaaaaaaa

SEQ ID NO: 8597 - RNA, 1404 nt, Artificial Sequence
  mRNA Design i-3 (hSL-A100) comprising derived and/or modified sequence from Pf(3D7)__XP_001351122.1__HsSPARC_Pf-CSP(19-397) (opt3)
aggagaaagcuuaccaugagagccuggaucuucuuucugcucugccuugcuggcagggcacuggccuuguuccaggaguaccaauguuaugggagcuccucuaacacccggguguuaaaugaacugaacuacgacaaugcgggaacaaaccuauauaaugagcucgaaaugaacuacuaugguaagcaggagaauugguacucacugaaaaagaacagucgcagccuuggcgaaaaugaugacgggaacaaugaggauaacgagaaacugcgaaagcccaaacacaagaaguugaaacagccugcugacggaaauccagauccgaacgccaaucccaacgucgacccuaacgcaaauccaaacguugaucccaaugccaacccuaauguggacccaaacgcuaaucccaacgcaaauccuaacgccaauccaaacgcuaauccgaacgccaaucccaacgcgaacccuaaugcaaacccaaaugccaaccccaaugcuaacccuaaugccaacccaaaugcaaaccccaaugcuaacccgaaugccaacccuaaugcgaaccccaacgccaauccaaacgcaaauccuaacgcuaaucccaacguagauccaaaugccaaccccaaugcuaacccuaaugccaacccaaaugcaaacccgaaugccaaccccaacgcuaauccuaacgcgaauccaaacgcaaaucccaacgccaauccuaacgcuaauccaaacgccaaucccaacgcaaauccgaacgccaauccuaacgcuaauccaaacgccaaccccaaugcaaacccuaaugcgaaccccaaugcuaacccaaauaagaacaaucagggcaacggucaagggcauaauaugccuaacgaccccaaucguaacguggaugaaaaugccaacgcaaacuccgccgucaaaaauaacaauaacgaggaaccaucugacaagcacauuaaagaguaucucaauaagauacagaacucgcugucaacugaguggagcccgugcagugugacguguggaaauggcauccagguuagaauuaagccuggcuccgcuaacaaacccaaggaugaacuggacuacgccaaugacaucgagaaaaagauuugcaaaauggaaaaguguucuagcguguuuaacgucguaaauuccucaaucgggcucauaaugguguuaaguuuccuguuucuuaacugaggacuaguuauaagacugacuagcccgaugggccucccaacgggcccuccuccccuccuugcaccgagauuaaucaaaggcucuuuucagagccaccaaaaaaaaaaaaaaaaaaaaaaaaaaaaaaaaaaaaaaaaaaaaaaaaaaaaaaaaaaaaaaaaaaaaaaaaaaaaaaaaaaaaaaaaaaaaaaaaaaaaa

SEQ ID NO: 8598 - RNA, 1407 nt, Artificial Sequence
  mRNA Design i-3 (hSL-A100) comprising derived and/or modified sequence from Pf(3D7)__XP_001351122.1__IgE_Pf-CSP(19-397) (opt3)
aggagaaagcuuaccauggacuggaccuggauccuguuccucguggccgcugcaacaagaguccacagccuuuuucaggaguaccaaugcuauggcuccucuucaaacacuaggguucugaaugaauugaacuacgauaaugccgggacgaacuuauauaaugagcuggaaaugaacuacuauggaaagcaggagaauugguacagucuaaagaagaacagccggucccucggugaaaaugacgauggcaacaaugaggacaacgagaaacugcgcaagcccaaacauaagaaacuuaaacagccugcggaugggaauccagacccgaacgcuaaucccaacguggauccuaacgccaauccaaacguagaccccaaugcaaacccuaauguggauccaaacgccaaucccaacgcuaauccuaacgcaaauccaaacgccaauccgaacgcuaaucccaacgccaacccuaaugcgaacccaaaugcaaaccccaaugccaacccuaaugcuaacccaaaugccaaccccaaugcaaacccgaaugcuaacccuaaugccaaccccaacgcgaauccaaacgccaauccuaacgcaaaucccaacgucgacccaaaugcuaaccccaaugccaacccuaaugcuaacccaaaugccaacccgaaugcaaaccccaacgccaauccuaacgcuaauccaaacgcgaaucccaacgcaaauccuaacgccaauccaaacgcuaaucccaacgccaauccgaacgcaaauccuaacgccaauccaaacgcuaaccccaaugccaacccuaaugcaaaccccaaugcgaacccaaauaagaacaaucagggaaacggccaaggucacaauaugccuaacgaucccaaucgaaacguggacgaaaaugcuaacgccaacucugcaguuaaaaauaacaauaacgaggaaccaucggauaagcauauuaaagaguaucugaauaagauacagaacucauugagcaccgaguggaguccguguuccgugacaugcgggaauggaauccagguccguauuaagccuggcucugccaacaaacccaaggacgaacucgacuacgcuaaugauaucgagaaaaagauuuguaaaauggaaaagugcagcuccguguucaacguaguuaauucaaguaucggccugauaauggugcugagcuuucucuucuuaaacugaggacuaguuauaagacugacuagcccgaugggccucccaacgggcccuccuccccuccuugcaccgagauuaaucaaaggcucuuuucagagccaccaaaaaaaaaaaaaaaaaaaaaaaaaaaaaaaaaaaaaaaaaaaaaaaaaaaaaaaaaaaaaaaaaaaaaaaaaaaaaaaaaaaaaaaaaaaaaaaaaaaaa

SEQ ID NO: 8599 - RNA, 1572 nt, Artificial Sequence
  mRNA Design i-3 (hSL-A100) comprising derived and/or modified sequence from Pf(3D7)__XP_001351122.1__Pf-CSP_L(G4SG4)_TM domain HA (opt3)
aggagaaagcuuaccaugaugagaaagcuggccauccucagcguguccucuuuccuuuuugucgaggcucuguuccaggaauaccaaugcuauggcucaaguagcaacaccaggguuuugaaugaguuaaacuacgacaaugcagggacaaaccuguauaaugaacuagagaugaacuacuauggaaagcaggaaaauugguacucccucaagaaaaacucucggucgcugggugagaaugaugacggcaacaaugaggauaacgaaaaacuucgcaagcccaagcacaagaaacugaagcagccugccgacgggaauccagauccgaacgcgaaucccaacguggacccuaacgcuaauccaaacguagaucccaaugccaacccuaauguggacccaaacgcaaaucccaacgccaauccuaacgcuaauccaaacgcaaauccgaacgccaaucccaacgcuaacccuaaugccaacccaaaugcgaaccccaaugcaaacccuaaugccaacccaaaugcuaaccccaaugccaacccgaaugcaaacccuaaugcuaaccccaacgccaauccaaacgcgaauccuaacgccaaucccaacgucgauccaaaugcaaaccccaaugcuaacccuaaugccaacccaaaugcuaacccgaaugccaaccccaacgcaaauccuaacgccaauccaaacgcuaaucccaacgcgaauccuaacgcaaauccaaacgccaaucccaacgcuaauccgaacgccaauccuaacgcaaauccaaacgccaaccccaaugcuaacccuaaugccaaccccaaugcaaacccaaauaaaaacaaucagggaaacggccaaggucauaauaugccuaacgaccccaaucgaaacguggaugagaaugcgaacgcuaacucagccguuaagaauaacaauaacgaggaaccaagcgacaaacacauuaaggaguauuugaauaagauacagaacagucucuccacugaauggucuccguguagcgugacgugcgggaauggaauccagguccguauuaaaccuggcuccgcaaacaagcccaaagaugagcuggacuacgccaaugacaucgaaaagaaaauuuguaagauggagaaaugcucaaguguguuuaacguaguuaauagcucuaucggccugauaauggugcucuccuucuuauuucugaacgggggagguggcucagggggaggcgguaaacuugaaagcaccagaaucuaccagauuuuggcuaucuauaguacagucgccucuucccuggugcuaguggucagccucggggcaauuucguucuggauguguucuaauggaucccugcaaugcaggaucuguauaugaggacuaguuauaagacugacuagcccgaugggccucccaacgggcccuccuccccuccuugcaccgagauuaaucaaaggcucuuuucagagccaccaaaaaaaaaaaaaaaaaaaaaaaaaaaaaaaaaaaaaaaaaaaaaaaaaaaaaaaaaaaaaaaaaaaaaaaaaaaaaaaaaaaaaaaaaaaaaaaaaaaaa

SEQ ID NO: 8600 - RNA, 1446 nt, Artificial Sequence
  mRNA Design i-3 (hSL-A100) comprising derived and/or modified sequence from Pf(3D7)__XP_001351122.1__Pf-CSP(199-377)_L(PVTN)_HBsAg (opt3)
aggagaaagcuuaccauggaccccaacgccaauccuaacgcuaauccaaacgcaaauccgaacgccaaucccaacgcgaauccuaacgcuaauccaaacgccaaucccaacgcaaauccuaacgccaacccaaaugcuaaccccaaugcaaacccuaaugccaacccaaaugcuaacccgaaugccaaccccaaugcgaacccuaaugcaaacccaaaugccaaccccaacgcuaauccuaacaagaauaaccagggcaaugggcaaggacacaacaugccaaaugaucccaacagaaauguggacgagaacgccaaugcaaacagcgcugucaaaaauaacaauaacgaggaaccguccgauaagcauaucaaagaauaccugaacaagauucaaaauucucucucaaccgaguggaguccuugcagcguuacaugugguaacggcauacaggugaggaucaaacccggguccgccaauaagccaaaggacgaacuugauuaugcgaacgacauugagaaaaagaucugcaaaauggagaaguguucuucgguaccugugacuaauauggaaaacauuacgucaggauuccugggccccuuguuaguccugcaggccggguuuuuccuacucacccggauccugacaauaccacagagccuugauaguugguggacuucccugaauuuucucgguggaucucccgugugcuugggccagaacagccaguccccuaccucaaaucacaguccaacaagcuguccgcccaucugcccuggcuaccgcuggaugugucugcgacguuucauuaucuuucuguucauucucuuacugugccuuaucuuuuugcugguucuacucgacuaucaggggaugcugccaguguguccccuuauaccuggaucuaccacuacaaacaccgguccaugcaaaacguguacuacccccgcacaaggcaauuccauguucccgucaugcugcuguacaaagccuacugaugggaacugcaccuguauuccaauccccagcaguugggcuuuugccaaguaccugugggagugggcuucugucagauucuccugguugagccuccuggugccuuuuguacagugguucguuggauuaucgcccacaguguggcugucugccauuuggaugaugugguauuggggcccaucccucuacucaaucgucaguccuuuuaucccccuucugccaauuuucuucugcuuguggguguauauaugaggacuaguuauaagacugacuagcccgaugggccucccaacgggcccuccuccccuccuugcaccgagauuaaucaaaggcucuuuucagagccaccaaaaaaaaaaaaaaaaaaaaaaaaaaaaaaaaaaaaaaaaaaaaaaaaaaaaaaaaaaaaaaaaaaaaaaaaaaaaaaaaaaaaaaaaaaaaaaaaaaaaa

SEQ ID NO: 8601 - RNA, 1488 nt, Artificial Sequence
  mRNA Design i-3 (hSL-A100) comprising derived and/or modified sequence from Pf(3D7)__XP_001351122.1__Pf-CSP(199-387)_L(PVTN)_HBsAg (opt3)
aggagaaagcuuaccaugauggcccccgacccuaacgcuaauccaaacgcaaauccgaacgccaaucccaacgcgaauccuaacgcuaauccaaacgccaaucccaacgcaaauccuaacgccaauccaaacgcuaaccccaaugcaaacccuaaugccaacccaaaugcuaacccgaaugccaaccccaaugcgaacccuaaugcaaacccaaaugccaaccccaaugcuaacccuaacgccaauccaaacaagaauaaccagggcaaugggcaaggacacaacaugcccaaugauccgaacagaaauguggacgagaacgcaaaugcuaacagcgccgucaaaaauaacaauaacgaggaaccuuccgauaagcauaucaaagaauaccugaacaagauucaaaauucucucucaaccgaguggagucccugcagcguuacaugugguaacggcauacaggugaggaucaaaccaggguccgcgaauaagccuaaggacgaacuugauuaugccaacgacauugagaaaaagaucugcaaaauggagaaguguucuucgguauucaauguggucaacucaagcauuggacugggccccgugacuaauauggaaaacaucacgaguggguuuuuggguccauuacugguucuacaggcaggauucuuucuccugacccggauacuuacaaucccccagucccuggauucuugguggacuagcuugaauuuccucggcggcuccccugugugccuggggcagaacucacagaguccaaccagcaaucacucuccgacauccugucccccuauuugcccaggauaccgcuggaugugucugcgacguuuuaucauuuuccucuuuaucuuacugcuuugcuugauauuccugcuaguccuccuggacuaucaggguaugcuucccguguguccucugauuccaggcucaaccacuacaaacaccgggcccugcaaaacguguacuaccccggcucaaggaaauagcauguuuccuaguugcugcuguacaaagccaacugauggcaacugcaccuguauccccauuccuucuuccugggccuucgcuaaguacuugugggagugggccagcguaagauuuucguggcucucucuguuaguucccuucgugcagugguuugucggucuguccccaacaguguggcucucagcaaucuggaugaugugguauugggggccuagucuuuacagcaucgugucccccuucauuccacuguugccgauauucuuuugccuaugggucuauaucugaggacuaguuauaagacugacuagcccgaugggccucccaacgggcccuccuccccuccuugcaccgagauuaaucaaaggcucuuuucagagccaccaaaaaaaaaaaaaaaaaaaaaaaaaaaaaaaaaaaaaaaaaaaaaaaaaaaaaaaaaaaaaaaaaaaaaaaaaaaaaaaaaaaaaaaaaaaaaaaaaaaaa

SEQ ID NO: 8602 - RNA, 672 nt, Artificial Sequence
  mRNA Design i-3 (hSL-A100) comprising derived and/or modified sequence from Pf(3D7)__XP_001351122.1__HsALB_Pf-CSP(19-152) (opt3)
aggagaaagcuuaccaugaagugggugaccuucaucagccugcucuuucuuuucuccucugccuacucacuguuucaggaguaucaaugcuacggcaguagcuccaacacaagagucuugaaugaauuaaacuaugacaaugcugggacuaaccuguacaaugagcuagaaaugaacuauuacggaaaacaggagaauugguauucucucaagaaaaacucgaggucacugggugaaaaugaugacggcaacaaugaggauaacgagaaacuucggaagcccaagcacaagaaacugaagcagccugcagacgggaauccagauccgaacgccaaucccaacguugacccuaacgcgaauccaaacguggaucccaaugcuaacccuaauguagacccaaacgccaaucccaacgcaaauccuaacgccaauccaaacgcuaauccgaacgcaaaucccaacgccaacccuugaggacuaguuauaagacugacuagcccgaugggccucccaacgggcccuccuccccuccuugcaccgagauuaaucaaaggcucuuuucagagccaccaaaaaaaaaaaaaaaaaaaaaaaaaaaaaaaaaaaaaaaaaaaaaaaaaaaaaaaaaaaaaaaaaaaaaaaaaaaaaaaaaaaaaaaaaaaaaaaaaaaaa

SEQ ID NO: 8603 - RNA, 792 nt, Artificial Sequence
  mRNA Design i-3 (hSL-A100) comprising derived and/or modified sequence from Pf(3D7)__XP_001351122.1__HsALB_Pf-CSP(19-192) (opt3)
aggagaaagcuuaccaugaagugggugaccuucaucagccugcucuuucuuuucuccucugccuacucacuguuucaggaguaucaaugcuacggcaguagcuccaacacaagagucuugaaugaauuaaacuaugacaaugcugggacuaaccuguacaaugagcuagaaaugaacuauuacggaaaacaggagaauugguauucucucaagaaaaacucgaggucacugggugaaaaugaugacggcaacaaugaggauaacgagaaacuucggaagcccaagcacaagaaacugaagcagccugcagacgggaauccagauccgaacgccaaucccaacguugacccuaacgcgaauccaaacguggaucccaaugcuaacccuaauguagacccaaacgccaaucccaacgcaaauccuaacgccaauccaaacgcuaauccgaacgcaaaucccaacgccaacccuaaugcuaacccaaaugccaaccccaaugcgaacccuaaugcaaacccaaaugccaaccccaaugcuaacccgaaugccaacccuaaugcaaaccccaacgcuaauccaaacgccaauccuugaggacuaguuauaagacugacuagcccgaugggccucccaacgggcccuccuccccuccuugcaccgagauuaaucaaaggcucuuuucagagccaccaaaaaaaaaaaaaaaaaaaaaaaaaaaaaaaaaaaaaaaaaaaaaaaaaaaaaaaaaaaaaaaaaaaaaaaaaaaaaaaaaaaaaaaaaaaaaaaaaaaaa

SEQ ID NO: 8604 - RNA, 1032 nt, Artificial Sequence
  mRNA Design i-3 (hSL-A100) comprising derived and/or modified sequence from Pf(3D7)__XP_001351122.1__HsALB_Pf-CSP(19-272) (opt3)
aggagaaagcuuaccaugaagugggugaccuucaucagccugcucuuucuuuucuccucugccuacucacuguuucaggaguaucaaugcuacggcaguagcuccaacacaagagucuugaaugaauuaaacuaugacaaugcugggacuaaccuguacaaugagcuagaaaugaacuauuacggaaaacaggagaauugguauucucucaagaaaaacucgaggucacugggugaaaaugaugacggcaacaaugaggauaacgagaaacuucggaagcccaagcacaagaaacugaagcagccugcagacgggaauccagauccgaacgccaaucccaacguugacccuaacgcgaauccaaacguggaucccaaugcuaacccuaauguagacccaaacgccaaucccaacgcaaauccuaacgccaauccaaacgcuaauccgaacgcaaaucccaacgccaacccuaaugcuaacccaaaugccaaccccaaugcgaacccuaaugcaaacccaaaugccaaccccaaugcuaacccgaaugccaacccuaaugcaaaccccaacgcuaauccaaacgccaauccuaacgcgaaucccaacguggauccaaaugccaaccccaaugcaaacccuaaugcuaacccaaaugccaacccgaaugcuaaccccaacgccaauccuaacgcaaauccaaacgccaaucccaacgcuaauccuaacgcgaauccaaacgcaaaucccaacgccaauccgaacgcuaauccuaacgccaauccaaacgcaaaccccaaugccaacccuaaugcuaaccccaaugccaacccaugaggacuaguuauaagacugacuagcccgaugggccucccaacgggcccuccuccccuccuugcaccgagauuaaucaaaggcucuuuucagagccaccaaaaaaaaaaaaaaaaaaaaaaaaaaaaaaaaaaaaaaaaaaaaaaaaaaaaaaaaaaaaaaaaaaaaaaaaaaaaaaaaaaaaaaaaaaaaaaaaaaaaa

SEQ ID NO: 8605 - RNA, 1194 nt, Artificial Sequence
  mRNA Design i-3 (hSL-A100) comprising derived and/or modified sequence from Pf(3D7)__XP_001351122.1__HsALB_Pf-CSP(19-272)_L(AAY)_Pf-CSP(310-3 27)_L(AAY)_Pf-CSP(346-375) (opt3)
aggagaaagcuuaccaugaagugggugaccuucaucagccugcucuuucuuuucuccucugccuacucacuguuucaggaguaucaaugcuacggcaguagcuccaacacaagagucuugaaugaauuaaacuaugacaaugcugggacuaaccuguacaaugagcuagaaaugaacuauuacggaaaacaggagaauugguauucucucaagaaaaacucgaggucacugggugaaaaugaugacggcaacaaugaggauaacgagaaacuucggaagcccaagcacaagaaacugaagcagccugcagacgggaauccagauccgaacgccaaucccaacguugacccuaacgcgaauccaaacguggaucccaaugcuaacccuaauguagacccaaacgccaaucccaacgcaaauccuaacgccaauccaaacgcuaauccgaacgcaaaucccaacgccaacccuaaugcuaacccaaaugccaaccccaaugcgaacccuaaugcaaacccaaaugccaaccccaaugcuaacccgaaugccaacccuaaugcaaaccccaacgcuaauccaaacgccaauccuaacgcgaaucccaacguggauccaaaugccaaccccaaugcaaacccuaaugcuaacccaaaugccaacccgaaugcuaaccccaacgccaauccuaacgcaaauccaaacgccaaucccaacgcuaauccuaacgcgaauccaaacgcaaaucccaacgccaauccgaacgcuaauccuaacgccaauccaaacgcaaaccccaaugccaacccuaaugcuaaccccaaugccaacccagcagcguacgaaccuagcgacaaacauauuaaggaguacuugaauaaaauacagaacagucucgcugccuauaucaagcccggauccgcaaauaagccaaaagaugaacuggacuacgccaacgauauugagaagaaaaucuguaagauggagaaaugcucuugaggacuaguuauaagacugacuagcccgaugggccucccaacgggcccuccuccccuccuugcaccgagauuaaucaaaggcucuuuucagagccaccaaaaaaaaaaaaaaaaaaaaaaaaaaaaaaaaaaaaaaaaaaaaaaaaaaaaaaaaaaaaaaaaaaaaaaaaaaaaaaaaaaaaaaaaaaaaaaaaaaaaa

SEQ ID NO: 8606 - RNA, 1155 nt, Artificial Sequence
  mRNA Design i-3 (hSL-A100) comprising derived and/or modified sequence from Pf(3D7)__XP_001351122.1__HsALB_Pf-CSP(19-272)_L(AAY)_Pf-CSP(346-3 65)_L(AAY)_P2 (opt3)
aggagaaagcuuaccaugaagugggugaccuucaucagccugcucuuucuuuucuccucugccuacucacuguuucaggaguaucaaugcuacggcaguagcuccaacacaagagucuugaaugaauuaaacuaugacaaugcugggacuaaccuguacaaugagcuagaaaugaacuauuacggaaaacaggagaauugguauucucucaagaaaaacucgaggucacugggugaaaaugaugacggcaacaaugaggauaacgagaaacuucggaagcccaagcacaagaaacugaagcagccugcagacgggaauccagauccgaacgccaaucccaacguugacccuaacgcgaauccaaacguggaucccaaugcuaacccuaauguagacccaaacgccaaucccaacgcaaauccuaacgccaauccaaacgcuaauccgaacgcaaaucccaacgccaacccuaaugcuaacccaaaugccaaccccaaugcgaacccuaaugcaaacccaaaugccaaccccaaugcuaacccgaaugccaacccuaaugcaaaccccaacgcuaauccaaacgccaauccuaacgcgaaucccaacguggauccaaaugccaaccccaaugcaaacccuaaugcuaacccaaaugccaacccgaaugcuaaccccaacgccaauccuaacgcaaauccaaacgccaaucccaacgcuaauccuaacgcgaauccaaacgcaaaucccaacgccaauccgaacgcuaauccuaacgccaauccaaacgcaaaccccaaugccaacccuaaugcuaaccccaaugccaacccagcagcguacauuaaaccuggaagcgcuaauaagcccaaagacgaauuggauuacgccaacgacauagaggcagccuaucaguacaucaaggcuaauaguaaguucauuggcaucacggaacucugaggacuaguuauaagacugacuagcccgaugggccucccaacgggcccuccuccccuccuugcaccgagauuaaucaaaggcucuuuucagagccaccaaaaaaaaaaaaaaaaaaaaaaaaaaaaaaaaaaaaaaaaaaaaaaaaaaaaaaaaaaaaaaaaaaaaaaaaaaaaaaaaaaaaaaaaaaaaaaaaaaaaa

SEQ ID NO: 8607 - RNA, 1149 nt, Artificial Sequence
  mRNA Design i-3 (hSL-A100) comprising derived and/or modified sequence from Pf(3D7)__XP_001351122.1__HsALB_Pf-CSP(19-272)_L(AAY)_Pf-CSP(346-3 65)_L(AAY)_PADRE (opt3)
aggagaaagcuuaccaugaagugggugaccuucaucagccugcucuuucuuuucuccucugccuacucacuguuucaggaguaucaaugcuacggcaguagcuccaacacaagagucuugaaugaauuaaacuaugacaaugcugggacuaaccuguacaaugagcuagaaaugaacuauuacggaaaacaggagaauugguauucucucaagaaaaacucgaggucacugggugaaaaugaugacggcaacaaugaggauaacgagaaacuucggaagcccaagcacaagaaacugaagcagccugcagacgggaauccagauccgaacgccaaucccaacguugacccuaacgcgaauccaaacguggaucccaaugcuaacccuaauguagacccaaacgccaaucccaacgcaaauccuaacgccaauccaaacgcuaauccgaacgcaaaucccaacgccaacccuaaugcuaacccaaaugccaaccccaaugcgaacccuaaugcaaacccaaaugccaaccccaaugcuaacccgaaugccaacccuaaugcaaaccccaacgcuaauccaaacgccaauccuaacgcgaaucccaacguggauccaaaugccaaccccaaugcaaacccuaaugcuaacccaaaugccaacccgaaugcuaaccccaacgccaauccuaacgcaaauccaaacgccaaucccaacgcuaauccuaacgcgaauccaaacgcaaaucccaacgccaauccgaacgcuaauccuaacgccaauccaaacgcaaaccccaaugccaacccuaaugcuaaccccaaugccaacccagcagcguacauuaaaccuggaagcgcuaauaagcccaaagacgaauuggauuacgccaacgacauagaggcagccuaugcuaaguucgucgccgcauggacgcucaaggcugccgcgugaggacuaguuauaagacugacuagcccgaugggccucccaacgggcccuccuccccuccuugcaccgagauuaaucaaaggcucuuuucagagccaccaaaaaaaaaaaaaaaaaaaaaaaaaaaaaaaaaaaaaaaaaaaaaaaaaaaaaaaaaaaaaaaaaaaaaaaaaaaaaaaaaaaaaaaaaaaaaaaaaaaaa

SEQ ID NO: 8608 - RNA, 1206 nt, Artificial Sequence
  mRNA Design i-3 (hSL-A100) comprising derived and/or modified sequence from Pf(3D7)__XP_001351122.1__HsALB_Pf-CSP(19-272)_L(G4S)_Pf-CSP(310-3 27)_L(G4S)_Pf-CSP(346-375) (opt3)
aggagaaagcuuaccaugaagugggugaccuucaucagccugcucuuucuuuucuccucugccuacucacuguuucaggaguaucaaugcuacggcaguagcuccaacacaagagucuugaaugaauuaaacuaugacaaugcugggacuaaccuguacaaugagcuagaaaugaacuauuacggaaaacaggagaauugguauucucucaagaaaaacucgaggucacugggugaaaaugaugacggcaacaaugaggauaacgagaaacuucggaagcccaagcacaagaaacugaagcagccugcagacgggaauccagauccgaacgccaaucccaacguugacccuaacgcgaauccaaacguggaucccaaugcuaacccuaauguagacccaaacgccaaucccaacgcaaauccuaacgccaauccaaacgcuaauccgaacgcaaaucccaacgccaacccuaaugcuaacccaaaugccaaccccaaugcgaacccuaaugcaaacccaaaugccaaccccaaugcuaacccgaaugccaacccuaaugcaaaccccaacgcuaauccaaacgccaauccuaacgcgaaucccaacguggauccaaaugccaaccccaaugcaaacccuaaugcuaacccaaaugccaacccgaaugcuaaccccaacgccaauccuaacgcaaauccaaacgccaaucccaacgcuaauccuaacgcgaauccaaacgcaaaucccaacgccaauccgaacgcuaauccuaacgccaauccaaacgcaaaccccaaugccaacccuaaugcuaaccccaaugccaacccaggaggcggugggagcgaaccuagugacaaacauauuaaggaguacuugaauaaaauacagaacucccucggaggcggcgggucuaucaagcccggaagcgcaaauaagccaaaagaugaacuggacuacgcgaacgauauugagaagaaaaucuguaagauggagaaaugcuccugaggacuaguuauaagacugacuagcccgaugggccucccaacgggcccuccuccccuccuugcaccgagauuaaucaaaggcucuuuucagagccaccaaaaaaaaaaaaaaaaaaaaaaaaaaaaaaaaaaaaaaaaaaaaaaaaaaaaaaaaaaaaaaaaaaaaaaaaaaaaaaaaaaaaaaaaaaaaaaaaaaaaa

SEQ ID NO: 8609 - RNA, 1191 nt, Artificial Sequence
  mRNA Design i-3 (hSL-A100) comprising derived and/or modified sequence from Pf(3D7)__XP_001351122.1__HsALB_Pf-CSP(19-272)_L(G4S)_Pf-CSP(310-3 27)_Pf-CSP(346-375) (opt3)
aggagaaagcuuaccaugaagugggugaccuucaucagccugcucuuucuuuucuccucugccuacucacuguuucaggaguaucaaugcuacggcaguagcuccaacacaagagucuugaaugaauuaaacuaugacaaugcugggacuaaccuguacaaugagcuagaaaugaacuauuacggaaaacaggagaauugguauucucucaagaaaaacucgaggucacugggugaaaaugaugacggcaacaaugaggauaacgagaaacuucggaagcccaagcacaagaaacugaagcagccugcagacgggaauccagauccgaacgccaaucccaacguugacccuaacgcgaauccaaacguggaucccaaugcuaacccuaauguagacccaaacgccaaucccaacgcaaauccuaacgccaauccaaacgcuaauccgaacgcaaaucccaacgccaacccuaaugcuaacccaaaugccaaccccaaugcgaacccuaaugcaaacccaaaugccaaccccaaugcuaacccgaaugccaacccuaaugcaaaccccaacgcuaauccaaacgccaauccuaacgcgaaucccaacguggauccaaaugccaaccccaaugcaaacccuaaugcuaacccaaaugccaacccgaaugcuaaccccaacgccaauccuaacgcaaauccaaacgccaaucccaacgcuaauccuaacgcgaauccaaacgcaaaucccaacgccaauccgaacgcuaauccuaacgccaauccaaacgcaaaccccaaugccaacccuaaugcuaaccccaaugccaacccaggaggcggugggagcgaaccuagugacaaacauauuaaggaguacuugaauaaaauacagaacucccucaucaagcccggaucugcaaauaagccaaaagaugaacuggacuacgcgaacgauauugagaagaaaaucuguaagauggagaaaugcagcugaggacuaguuauaagacugacuagcccgaugggccucccaacgggcccuccuccccuccuugcaccgagauuaaucaaaggcucuuuucagagccaccaaaaaaaaaaaaaaaaaaaaaaaaaaaaaaaaaaaaaaaaaaaaaaaaaaaaaaaaaaaaaaaaaaaaaaaaaaaaaaaaaaaaaaaaaaaaaaaaaaaaa

SEQ ID NO: 8610 - RNA, 1191 nt, Artificial Sequence
  mRNA Design i-3 (hSL-A100) comprising derived and/or modified sequence from Pf(3D7)__XP_001351122.1__HsALB_Pf-CSP(19-325) (opt3)
aggagaaagcuuaccaugaagugggugaccuucaucagccugcucuuucuuuucuccucugccuacucacuguuucaggaguaucaaugcuacggcaguagcuccaacacaagagucuugaaugaauuaaacuaugacaaugcugggacuaaccuguacaaugagcuagaaaugaacuauuacggaaaacaggagaauugguauucucucaagaaaaacucgaggucacugggugaaaaugaugacggcaacaaugaggauaacgagaaacuucggaagcccaagcacaagaaacugaagcagccugcagacgggaauccagauccgaacgccaaucccaacguugacccuaacgcgaauccaaacguggaucccaaugcuaacccuaauguagacccaaacgccaaucccaacgcaaauccuaacgccaauccaaacgcuaauccgaacgcaaaucccaacgccaacccuaaugcuaacccaaaugccaaccccaaugcgaacccuaaugcaaacccaaaugccaaccccaaugcuaacccgaaugccaacccuaaugcaaaccccaacgcuaauccaaacgccaauccuaacgcgaaucccaacguggauccaaaugccaaccccaaugcaaacccuaaugcuaacccaaaugccaacccgaaugcuaaccccaacgccaauccuaacgcaaauccaaacgccaaucccaacgcuaauccuaacgcgaauccaaacgcaaaucccaacgccaauccgaacgcuaauccuaacgccaauccaaacgcaaaccccaaugccaacccuaaugcuaaccccaaugccaacccaaauaaaaacaaucagggaaacggccaaggucauaauaugccuaacgaccccaaucgcaacgucgaugaaaaugcaaacgcgaacagcgcugugaagaauaacaauaacgaggaaccaagugacaaacacauuaaggaguacuugaauaagauacagaacugaggacuaguuauaagacugacuagcccgaugggccucccaacgggcccuccuccccuccuugcaccgagauuaaucaaaggcucuuuucagagccaccaaaaaaaaaaaaaaaaaaaaaaaaaaaaaaaaaaaaaaaaaaaaaaaaaaaaaaaaaaaaaaaaaaaaaaaaaaaaaaaaaaaaaaaaaaaaaaaaaaaaa

SEQ ID NO: 8611 - RNA, 1368 nt, Artificial Sequence
  mRNA Design i-3 (hSL-A100) comprising derived and/or modified sequence from Pf(3D7)__XP_001351122.1__HsALB_Pf-CSP(19-384) (opt3)
aggagaaagcuuaccaugaagugggugaccuucaucagccugcucuuucuuuucuccucugccuacucacuguuucaggaguaucaaugcuacggcaguagcuccaacacaagagucuugaaugaauuaaacuaugacaaugcugggacuaaccuguacaaugagcuagaaaugaacuauuacggaaaacaggagaauugguauucucucaagaaaaacucgaggucacugggugaaaaugaugacggcaacaaugaggauaacgagaaacuucggaagcccaagcacaagaaacugaagcagccugcagacgggaauccagauccgaacgccaaucccaacguugacccuaacgcgaauccaaacguggaucccaaugcuaacccuaauguagacccaaacgccaaucccaacgcaaauccuaacgccaauccaaacgcuaauccgaacgcaaaucccaacgccaacccuaaugcuaacccaaaugccaaccccaaugcgaacccuaaugcaaacccaaaugccaaccccaaugcuaacccgaaugccaacccuaaugcaaaccccaacgcuaauccaaacgccaauccuaacgcgaaucccaacguggauccaaaugccaaccccaaugcaaacccuaaugcuaacccaaaugccaacccgaaugcuaaccccaacgccaauccuaacgcaaauccaaacgccaaucccaacgcuaauccuaacgcgaauccaaacgcaaaucccaacgccaauccgaacgcuaauccuaacgccaauccaaacgcaaaccccaaugccaacccuaaugcuaaccccaaugccaacccaaauaaaaacaaucagggaaacggccaaggucauaauaugccuaacgaccccaaucgcaacgucgaugaaaaugcaaacgcgaacagcgcugugaagaauaacaauaacgaggaaccaagugacaaacacauuaaggaguacuugaauaagauacagaacucccucucuacggaguggagcccguguuccguuaccugcgggaauggaauccaggugcgaauuaaaccuggcucagccaacaagcccaaagaugaacuggacuacgcaaaugacaucgagaagaaaauuuguaagauggaaaaaugcaguagcgucuucaacgugguaaauucuuccugaggacuaguuauaagacugacuagcccgaugggccucccaacgggcccuccuccccuccuugcaccgagauuaaucaaaggcucuuuucagagccaccaaaaaaaaaaaaaaaaaaaaaaaaaaaaaaaaaaaaaaaaaaaaaaaaaaaaaaaaaaaaaaaaaaaaaaaaaaaaaaaaaaaaaaaaaaaaaaaaaaaaa

SEQ ID NO: 8612 - RNA, 1506 nt, Artificial Sequence
  mRNA Design i-3 (hSL-A100) comprising derived and/or modified sequence from Pf(3D7)__XP_001351122.1__HsALB_Pf-CSP(19-384)_TM domain HA (opt3)
aggagaaagcuuaccaugaagugggugaccuucaucagccugcucuuucuuuucuccucugccuacucacuguuucaggaguaucaaugcuacggcaguagcuccaacacaagagucuugaaugaauuaaacuaugacaaugcugggacuaaccuguacaaugagcuagaaaugaacuauuacggaaaacaggagaauugguauucucucaagaaaaacucgaggucacugggugaaaaugaugacggcaacaaugaggauaacgagaaacuucggaagcccaagcacaagaaacugaagcagccugcagacgggaauccagauccgaacgccaaucccaacguugacccuaacgcgaauccaaacguggaucccaaugcuaacccuaauguagacccaaacgccaaucccaacgcaaauccuaacgccaauccaaacgcuaauccgaacgcaaaucccaacgccaacccuaaugcuaacccaaaugccaaccccaaugcgaacccuaaugcaaacccaaaugccaaccccaaugcuaacccgaaugccaacccuaaugcaaaccccaacgcuaauccaaacgccaauccuaacgcgaaucccaacguggauccaaaugccaaccccaaugcaaacccuaaugcuaacccaaaugccaacccgaaugcuaaccccaacgccaauccuaacgcaaauccaaacgccaaucccaacgcuaauccuaacgcgaauccaaacgcaaaucccaacgccaauccgaacgcuaauccuaacgccaauccaaacgcaaaccccaaugccaacccuaaugcuaaccccaaugccaacccaaauaaaaacaaucagggaaacggccaaggucauaauaugccuaacgaccccaaucgcaacgucgaugaaaaugcaaacgcgaacagcgcugugaagaauaacaauaacgaggaaccaagugacaaacacauuaaggaguacuugaauaagauacagaacucccucucuacggaguggagcccguguuccguuaccugcgggaauggaauccaggugcgaauuaaaccuggcucagccaacaagcccaaagaugaacuggacuacgcaaaugacaucgagaagaaaauuuguaagauggaaaaaugcaguagcgucuucaacgugguaaauucuuccaagcuggagucaacacguaucuaucagauacucgccaucuacagcacuguugcuaguucuuuagugcuggucgugucccuuggcgccauuagcuuuuggauguguucgaacgggucuuugcaaugcagaaucuguauuugaggacuaguuauaagacugacuagcccgaugggccucccaacgggcccuccuccccuccuugcaccgagauuaaucaaaggcucuuuucagagccaccaaaaaaaaaaaaaaaaaaaaaaaaaaaaaaaaaaaaaaaaaaaaaaaaaaaaaaaaaaaaaaaaaaaaaaaaaaaaaaaaaaaaaaaaaaaaaaaaaaaaa

SEQ ID NO: 8613 - RNA, 1218 nt, Artificial Sequence
  mRNA Design i-3 (hSL-A100) comprising derived and/or modified sequence from Pf(3D7)__XP_001351122.1__HsALB_Pf-CSP(82-397) (opt3)
aggagaaagcuuaccaugaagugggugaccuucaucagccugcucuuucuuuucuccucugccuacucagacaacgagaaacugagaaagcccaaacacaagaaauugaagcagccugcugauggcaauccagacccgaacgcaaaucccaacgucgauccuaaugccaacccaaauguugaccccaacgcgaauccuaacguggauccaaaugcuaaccccaaugccaacccuaaugcaaacccaaacgccaauccgaacgcuaaucccaacgcaaauccuaacgccaauccaaacgcuaaucccaacgccaauccuaacgcgaauccaaacgcaaaucccaacgccaacccgaaugcuaacccuaaugccaaccccaaugcaaacccaaaugcuaacccuaaugccaaccccaauguagacccaaacgcgaaucccaacgccaauccuaacgcaaacccaaaugcuaacccgaaugccaaccccaaugcuaacccuaaugccaacccaaaugcaaaccccaaugccaacccuaaugcuaacccaaaugcgaaccccaacgcaaauccgaacgccaauccuaacgcuaauccaaacgccaaucccaacgcaaauccuaacgccaaucccaacgcuaauccaaacaagaauaaccaggggaauggacagggucauaacaugccuaacgaucccaauaggaacguggacgaaaaugccaacgcaaauagugcggucaaaaacaauaacaaugaggaaccaagcgauaagcacauuaaagaguauuuaaacaagauacaaaauucccugucuacagaauggucgccgugcucagugacuuguggcaacgggauccagguucggauuaaaccuggaagcgcuaauaagcccaaggacgagcuagauuacgccaacgacaucgagaaaaagauuugcaaaauggaaaaguguaguuccguguuuaaugucgugaacucuagcaucggccucauaaugguacuguccuuccuuuuucugaacugaggacuaguuauaagacugacuagcccgaugggccucccaacgggcccuccuccccuccuugcaccgagauuaaucaaaggcucuuuucagagccaccaaaaaaaaaaaaaaaaaaaaaaaaaaaaaaaaaaaaaaaaaaaaaaaaaaaaaaaaaaaaaaaaaaaaaaaaaaaaaaaaaaaaaaaaaaaaaaaaaaaaa

SEQ ID NO: 8614 - RNA, 570 nt, Artificial Sequence
  mRNA Design i-3 (hSL-A100) comprising derived and/or modified sequence from Pf(3D7)__XP_001351122.1__HsALB_Pf-CSP(93-192) (opt3)
aggagaaagcuuaccaugaagugggugaccuucaucagccugcucuuucuuuucuccucugccuacucaaaacugaagcagcccgcugacggcaacccugauccaaaugcaaacccgaaugucgaccccaacgccaauccuaacguugauccaaaugcgaaccccaauguggacccuaacgcuaauccaaacgccaaucccaacgcaaauccuaacgccaacccaaaugcuaacccgaaugcaaaccccaaugccaacccuaaugcuaacccaaaugccaaccccaaugcgaacccuaaugcaaacccaaaugccaaccccaacgcuaauccgaacgccaauccuaacgcaaaucccaacgcuaauccaugaggacuaguuauaagacugacuagcccgaugggccucccaacgggcccuccuccccuccuugcaccgagauuaaucaaaggcucuuuucagagccaccaaaaaaaaaaaaaaaaaaaaaaaaaaaaaaaaaaaaaaaaaaaaaaaaaaaaaaaaaaaaaaaaaaaaaaaaaaaaaaaaaaaaaaaaaaaaaaaaaaaaa

SEQ ID NO: 8615 - RNA, 810 nt, Artificial Sequence
  mRNA Design i-3 (hSL-A100) comprising derived and/or modified sequence from Pf(3D7)__XP_001351122.1__HsALB_Pf-CSP(93-272) (opt3)
aggagaaagcuuaccaugaagugggugaccuucaucagccugcucuuucuuuucuccucugccuacucaaaacugaagcagcccgcugacggcaacccugauccaaaugcaaacccgaaugucgaccccaacgccaauccuaacguugauccaaaugcgaaccccaauguggacccuaacgcuaauccaaacgccaaucccaacgcaaauccuaacgccaacccaaaugcuaacccgaaugcaaaccccaaugccaacccuaaugcuaacccaaaugccaaccccaaugcgaacccuaaugcaaacccaaaugccaaccccaacgcuaauccgaacgccaauccuaacgcaaaucccaacgcuaauccaaacgccaauccuaacguagaucccaaugcgaacccaaaugccaaccccaaugcaaacccuaacgcuaauccaaacgccaauccgaacgcuaaucccaacgccaauccuaacgcaaauccaaacgccaaucccaacgcuaauccuaacgcgaauccaaacgcaaaccccaaugccaacccgaaugcuaacccuaaugccaacccaaaugcaaaccccaaugccaacccuaaugcuaaccccugaggacuaguuauaagacugacuagcccgaugggccucccaacgggcccuccuccccuccuugcaccgagauuaaucaaaggcucuuuucagagccaccaaaaaaaaaaaaaaaaaaaaaaaaaaaaaaaaaaaaaaaaaaaaaaaaaaaaaaaaaaaaaaaaaaaaaaaaaaaaaaaaaaaaaaaaaaaaaaaaaaaaa

SEQ ID NO: 8616 - RNA, 1185 nt, Artificial Sequence
  mRNA Design i-3 (hSL-A100) comprising derived and/or modified sequence from Pf(3D7)__XP_001351122.1__HsALB_Pf-CSP(93-397) (opt3)
aggagaaagcuuaccaugaagugggugaccuucaucagccugcucuuucuuuucuccucugccuacucaaaacugaagcagcccgcugacggcaacccugauccaaaugcaaacccgaaugucgaccccaacgccaauccuaacguugauccaaaugcgaaccccaauguggacccuaacgcuaauccaaacgccaaucccaacgcaaauccuaacgccaacccaaaugcuaacccgaaugcaaaccccaaugccaacccuaaugcuaacccaaaugccaaccccaaugcgaacccuaaugcaaacccaaaugccaaccccaacgcuaauccgaacgccaauccuaacgcaaaucccaacgcuaauccaaacgccaauccuaacguagaucccaaugcgaacccaaaugccaaccccaaugcaaacccuaacgcuaauccaaacgccaauccgaacgcuaaucccaacgccaauccuaacgcaaauccaaacgccaaucccaacgcuaauccuaacgcgaauccaaacgcaaaccccaaugccaacccgaaugcuaacccuaaugccaacccaaaugcaaaccccaaugccaacccuaaugcuaaccccaauaaaaacaaucaagggaacggacagggucacaauaugccaaacgacccuaacagaaauguggaugagaacgccaaugcaaacagugcggucaagaauaacaauaacgaggaacccagcgacaaacauauuaaggaauauuugaauaagauacagaacuccuuaucuacagaguggucgccaugcucagugacuuguggcaaugggauccagguuaggauuaaaccgggaagcgcuaacaagccuaaagaugaacuggacuacgccaaugauaucgagaagaaaauuugcaagauggagaaguguaguuccguguuuaacgucguaaauucuagcaucggccuaauaauggugcucuccuuccuguuucuuaacugaggacuaguuauaagacugacuagcccgaugggccucccaacgggcccuccuccccuccuugcaccgagauuaaucaaaggcucuuuucagagccaccaaaaaaaaaaaaaaaaaaaaaaaaaaaaaaaaaaaaaaaaaaaaaaaaaaaaaaaaaaaaaaaaaaaaaaaaaaaaaaaaaaaaaaaaaaaaaaaaaaaaa

SEQ ID NO: 8617 - RNA, 555 nt, Artificial Sequence
  mRNA Design i-3 (hSL-A100) comprising derived and/or modified sequence from Pf(3D7)__XP_001351122.1__HsALB_Pf-CSP(98-192) (opt3)
aggagaaagcuuaccaugaagugggugaccuucaucagccugcucuuucuuuucuccucugccuacucagcugacggcaaccccgauccuaaugcaaacccaaaugucgacccgaacgccaaucccaacguugauccuaaugcgaacccaaauguggaccccaacgcuaauccuaacgccaauccaaacgcaaaucccaacgccaacccuaaugcuaacccaaaugcaaacccgaaugccaaccccaaugcuaacccuaaugccaacccaaaugcgaaccccaaugcaaacccuaaugccaacccaaacgcuaaucccaacgccaauccgaacgcaaauccuaacgcuaaucccugaggacuaguuauaagacugacuagcccgaugggccucccaacgggcccuccuccccuccuugcaccgagauuaaucaaaggcucuuuucagagccaccaaaaaaaaaaaaaaaaaaaaaaaaaaaaaaaaaaaaaaaaaaaaaaaaaaaaaaaaaaaaaaaaaaaaaaaaaaaaaaaaaaaaaaaaaaaaaaaaaaaaa

SEQ ID NO: 8618 - RNA, 795 nt, Artificial Sequence
  mRNA Design i-3 (hSL-A100) comprising derived and/or modified sequence from Pf(3D7)__XP_001351122.1__HsALB_Pf-CSP(98-272) (opt3)
aggagaaagcuuaccaugaagugggugaccuucaucagccugcucuuucuuuucuccucugccuacucagcugacggcaaccccgauccuaaugcaaacccaaaugucgacccgaacgccaaucccaacguugauccuaaugcgaacccaaauguggaccccaacgcuaauccuaacgccaauccaaacgcaaaucccaacgccaacccuaaugcuaacccaaaugcaaacccgaaugccaaccccaaugcuaacccuaaugccaacccaaaugcgaaccccaaugcaaacccuaaugccaacccaaacgcuaaucccaacgccaauccgaacgcaaauccuaacgcuaaucccaacgccaauccaaacguagauccuaaugcgaaccccaaugccaacccaaaugcaaaccccaacgcuaauccuaacgccaauccaaacgcuaauccgaacgccaaucccaacgcaaauccuaacgccaauccaaacgcuaaucccaacgcgaauccuaacgcaaacccaaaugccaaccccaaugcuaacccgaaugccaacccuaaugcaaacccaaaugccaaccccaaugcuaacccuugaggacuaguuauaagacugacuagcccgaugggccucccaacgggcccuccuccccuccuugcaccgagauuaaucaaaggcucuuuucagagccaccaaaaaaaaaaaaaaaaaaaaaaaaaaaaaaaaaaaaaaaaaaaaaaaaaaaaaaaaaaaaaaaaaaaaaaaaaaaaaaaaaaaaaaaaaaaaaaaaaaaaa

SEQ ID NO: 8619 - RNA, 1101 nt, Artificial Sequence
  mRNA Design i-3 (hSL-A100) comprising derived and/or modified sequence from Pf(3D7)__XP_001351122.1__HsALB_Pf-CSP(98-374) (opt3)
aggagaaagcuuaccaugaagugggugaccuucaucagccugcucuuucuuuucuccucugccuacucagcugacggcaaccccgauccuaaugcaaacccaaaugucgacccgaacgccaaucccaacguugauccuaaugcgaacccaaauguggaccccaacgcuaauccuaacgccaauccaaacgcaaaucccaacgccaacccuaaugcuaacccaaaugcaaacccgaaugccaaccccaaugcuaacccuaaugccaacccaaaugcgaaccccaaugcaaacccuaaugccaacccaaacgcuaaucccaacgccaauccgaacgcaaauccuaacgcuaaucccaacgccaauccaaacguagauccuaaugcgaaccccaaugccaacccaaaugcaaaccccaacgcuaauccuaacgccaauccaaacgcuaauccgaacgccaaucccaacgcaaauccuaacgccaauccaaacgcuaaucccaacgcgaauccuaacgcaaacccaaaugccaaccccaaugcuaacccgaaugccaacccuaaugcaaacccaaaugccaaccccaaugcuaacccuaauaaaaacaaucaggggaacggacaaggucacaauaugcccaacgacccaaacagaaauguggaugagaacgccaaugcaaacagugcggucaagaauaacaauaacgaggaaccuagcgacaaacauauuaaggaauaucugaauaaaauacagaacuccuugucuacagaguggucgcccugcucagugacuuguggcaaugggauccagguuaggauuaagccaggaagcgcuaacaagccgaaagaugaauuagacuacgccaaugauaucgagaagaaaauuugcaagauggagaaauguugaggacuaguuauaagacugacuagcccgaugggccucccaacgggcccuccuccccuccuugcaccgagauuaaucaaaggcucuuuucagagccaccaaaaaaaaaaaaaaaaaaaaaaaaaaaaaaaaaaaaaaaaaaaaaaaaaaaaaaaaaaaaaaaaaaaaaaaaaaaaaaaaaaaaaaaaaaaaaaaaaaaaa

SEQ ID NO: 8620 - RNA, 1170 nt, Artificial Sequence
  mRNA Design i-3 (hSL-A100) comprising derived and/or modified sequence from Pf(3D7)__XP_001351122.1__HsALB_Pf-CSP(98-397) (opt3)
aggagaaagcuuaccaugaagugggugaccuucaucagccugcucuuucuuuucuccucugccuacucagcugacggcaaccccgauccuaaugcaaacccaaaugucgacccgaacgccaaucccaacguugauccuaaugcgaacccaaauguggaccccaacgcuaauccuaacgccaauccaaacgcaaaucccaacgccaacccuaaugcuaacccaaaugcaaacccgaaugccaaccccaaugcuaacccuaaugccaacccaaaugcgaaccccaaugcaaacccuaaugccaacccaaacgcuaaucccaacgccaauccgaacgcaaauccuaacgcuaaucccaacgccaauccaaacguagauccuaaugcgaaccccaaugccaacccaaaugcaaaccccaacgcuaauccuaacgccaauccaaacgcuaauccgaacgccaaucccaacgcaaauccuaacgccaauccaaacgcuaaucccaacgcgaauccuaacgcaaacccaaaugccaaccccaaugcuaacccgaaugccaacccuaaugcaaacccaaaugccaaccccaaugcuaacccuaauaaaaacaaucaggggaacggacaaggucacaauaugcccaacgacccaaacagaaauguggaugagaacgccaaugcaaacagugcggucaagaauaacaauaacgaggaaccuagcgacaaacauauuaaggaauaucugaauaaaauacagaacuccuugucuacagaguggucgcccugcucagugacuuguggcaaugggauccagguuaggauuaagccaggaagcgcuaacaagccgaaagaugaauuagacuacgccaaugauaucgagaagaaaauuugcaagauggagaaauguaguuccguguuuaacgucguaaauucuagcaucggccugauaauggugcuauccuuccucuuucugaacugaggacuaguuauaagacugacuagcccgaugggccucccaacgggcccuccuccccuccuugcaccgagauuaaucaaaggcucuuuucagagccaccaaaaaaaaaaaaaaaaaaaaaaaaaaaaaaaaaaaaaaaaaaaaaaaaaaaaaaaaaaaaaaaaaaaaaaaaaaaaaaaaaaaaaaaaaaaaaaaaaaaaa

SEQ ID NO: 8621 - RNA, 1497 nt, Artificial Sequence
  mRNA Design i-3 (hSL-A100) comprising derived and/or modified sequence from Pf(3D7)__XP_001351122.1__HsALB_Pf-CSP(199-377)_L(PVTN)_HBsAg (opt3)
aggagaaagcuuaccaugaagugggugaccuucaucagccugcucuuucuuuucuccucugccuacucagaccccaacgcuaauccuaacgcaaauccaaacgccaauccgaacgcgaaucccaacgcuaauccuaacgccaauccaaacgcaaaucccaacgccaauccuaacgcuaacccaaaugcaaaccccaaugccaacccuaaugcuaacccaaaugccaacccgaaugcgaaccccaaugcaaacccuaaugccaacccaaaugcuaaccccaacgccaauccuaacaaaaauaaccagggcaaugggcaaggacacaacaugccaaaugaucccaacagaaaugucgacgagaacgcaaaugcuaacagugccguuaagaauaacaauaacgaggaaccgagcgauaaacauauuaaggaauaucugaacaaaauacaaaauuccuugucuacagaguggucgccuugcucagugacuugugguaacggcauccagguaaggauuaagcccgggagcgcgaauaagccaaaagacgaauuagauuacgccaacgacaucgagaagaaaauuugcaagauggagaaauguaguuccgugccugucacgaauauggaaaacaucaccucuggauuucugggcccccuacucgugcugcaggcagguuucuuucuucugacacggauauugacuaucccacagagccucgauuccugguggaccucacugaauuuccucgggggaagucccguuugccugggccagaacagccagucuccuacauccaaucacucaccaaccagcuguccgcccauuugcccuggcuaucgcuggauguguuuacgacguuuuaucauuuuccuguuuauccuuuugcugugccuaauauuccuccuggugcuucuggacuaccaggggauguugccagucuguccccucauuccuggaaguacuacaaccaacacggguccaugcaagacuuguaccacacccgcucaaggcaauucuauguuuccguccugcugcuguacuaagccuaccgaugggaacugcacauguaucccaauucccagcucgugggccuucgcuaaauaucugugggagugggccucugugagauuuuccugguuaucacugcucguaccuuucguucagugguucgugggacuuagucccaccgucuggcugagcgcaaucuggaugaugugguacuggggcccauccuuguauucuaucgugagcccuuuuauuccccuacugccaauauucuuuugccucuggguguacaucugaggacuaguuauaagacugacuagcccgaugggccucccaacgggcccuccuccccuccuugcaccgagauuaaucaaaggcucuuuucagagccaccaaaaaaaaaaaaaaaaaaaaaaaaaaaaaaaaaaaaaaaaaaaaaaaaaaaaaaaaaaaaaaaaaaaaaaaaaaaaaaaaaaaaaaaaaaaaaaaaaaaaa

SEQ ID NO: 8622 - RNA, 1407 nt, Artificial Sequence
  mRNA Design i-3 (hSL-A100) comprising derived and/or modified sequence from Pf(3D7)__XP_001351122.1__Pf-CSP (opt4)
aggagaaagcuuaccaugaugagaaagcuggccauccugagcgugagcagcuuccuguucguggaggcccuguuccaggaguaccagugcuacggcagcagcagcaacaccagagugcugaacgagcugaacuacgacaacgccggcaccaaccuguacaacgagcuggagaugaacuacuacggcaagcaggagaacugguacagccugaagaagaacagcagaagccugggcgagaacgacgacggcaacaacgaggacaacgagaagcugagaaagcccaagcacaagaagcugaagcagcccgccgacggcaaccccgaccccaacgccaaccccaacguggaccccaacgccaaccccaacguggaccccaacgccaaccccaacguggaccccaacgccaaccccaacgccaaccccaacgccaaccccaacgccaaccccaacgccaaccccaacgccaaccccaacgccaaccccaacgccaaccccaacgccaaccccaacgccaaccccaacgccaaccccaacgccaaccccaacgccaaccccaacgccaaccccaacgccaaccccaacgccaaccccaacgccaaccccaacguggaccccaacgccaaccccaacgccaaccccaacgccaaccccaacgccaaccccaacgccaaccccaacgccaaccccaacgccaaccccaacgccaaccccaacgccaaccccaacgccaaccccaacgccaaccccaacgccaaccccaacgccaaccccaacgccaaccccaacgccaaccccaacgccaaccccaacgccaaccccaacgccaaccccaacaagaacaaccagggcaacggccagggccacaacaugcccaacgaccccaacagaaacguggacgagaacgccaacgccaacagcgccgugaagaacaacaacaacgaggagcccagcgacaagcacaucaaggaguaccugaacaagauccagaacagccugagcaccgaguggagccccugcagcgugaccugcggcaacggcauccaggugagaaucaagcccggcagcgccaacaagcccaaggacgagcuggacuacgccaacgacaucgagaagaagaucugcaagauggagaagugcagcagcguguucaacguggugaacagcagcaucggccugaucauggugcugagcuuccuguuccugaacugaggacuaguuauaagacugacuagcccgaugggccucccaacgggcccuccuccccuccuugcaccgagauuaaucaaaggcucuuuucagagccaccaaaaaaaaaaaaaaaaaaaaaaaaaaaaaaaaaaaaaaaaaaaaaaaaaaaaaaaaaaaaaaaaaaaaaaaaaaaaaaaaaaaaaaaaaaaaaaaaaaaaa

SEQ ID NO: 8623 - RNA, 1338 nt, Artificial Sequence
  mRNA Design i-3 (hSL-A100) comprising derived and/or modified sequence from Pf(3D7)__XP_001351122.1__Pf-CSP(1-374) (opt4)
aggagaaagcuuaccaugaugagaaagcuggccauccugagcgugagcagcuuccuguucguggaggcccuguuccaggaguaccagugcuacggcagcagcagcaacaccagagugcugaacgagcugaacuacgacaacgccggcaccaaccuguacaacgagcuggagaugaacuacuacggcaagcaggagaacugguacagccugaagaagaacagcagaagccugggcgagaacgacgacggcaacaacgaggacaacgagaagcugagaaagcccaagcacaagaagcugaagcagcccgccgacggcaaccccgaccccaacgccaaccccaacguggaccccaacgccaaccccaacguggaccccaacgccaaccccaacguggaccccaacgccaaccccaacgccaaccccaacgccaaccccaacgccaaccccaacgccaaccccaacgccaaccccaacgccaaccccaacgccaaccccaacgccaaccccaacgccaaccccaacgccaaccccaacgccaaccccaacgccaaccccaacgccaaccccaacgccaaccccaacgccaaccccaacgccaaccccaacguggaccccaacgccaaccccaacgccaaccccaacgccaaccccaacgccaaccccaacgccaaccccaacgccaaccccaacgccaaccccaacgccaaccccaacgccaaccccaacgccaaccccaacgccaaccccaacgccaaccccaacgccaaccccaacgccaaccccaacgccaaccccaacgccaaccccaacgccaaccccaacgccaaccccaacaagaacaaccagggcaacggccagggccacaacaugcccaacgaccccaacagaaacguggacgagaacgccaacgccaacagcgccgugaagaacaacaacaacgaggagcccagcgacaagcacaucaaggaguaccugaacaagauccagaacagccugagcaccgaguggagccccugcagcgugaccugcggcaacggcauccaggugagaaucaagcccggcagcgccaacaagcccaaggacgagcuggacuacgccaacgacaucgagaagaagaucugcaagauggagaagugcugaggacuaguuauaagacugacuagcccgaugggccucccaacgggcccuccuccccuccuugcaccgagauuaaucaaaggcucuuuucagagccaccaaaaaaaaaaaaaaaaaaaaaaaaaaaaaaaaaaaaaaaaaaaaaaaaaaaaaaaaaaaaaaaaaaaaaaaaaaaaaaaaaaaaaaaaaaaaaaaaaaaaa

SEQ ID NO: 8624 - RNA, 1191 nt, Artificial Sequence
  mRNA Design i-3 (hSL-A100) comprising derived and/or modified sequence from Pf(3D7)__XP_001351122.1__Pf-CSP(1-325) (opt4)
aggagaaagcuuaccaugaugagaaagcuggccauccugagcgugagcagcuuccuguucguggaggcccuguuccaggaguaccagugcuacggcagcagcagcaacaccagagugcugaacgagcugaacuacgacaacgccggcaccaaccuguacaacgagcuggagaugaacuacuacggcaagcaggagaacugguacagccugaagaagaacagcagaagccugggcgagaacgacgacggcaacaacgaggacaacgagaagcugagaaagcccaagcacaagaagcugaagcagcccgccgacggcaaccccgaccccaacgccaaccccaacguggaccccaacgccaaccccaacguggaccccaacgccaaccccaacguggaccccaacgccaaccccaacgccaaccccaacgccaaccccaacgccaaccccaacgccaaccccaacgccaaccccaacgccaaccccaacgccaaccccaacgccaaccccaacgccaaccccaacgccaaccccaacgccaaccccaacgccaaccccaacgccaaccccaacgccaaccccaacgccaaccccaacgccaaccccaacguggaccccaacgccaaccccaacgccaaccccaacgccaaccccaacgccaaccccaacgccaaccccaacgccaaccccaacgccaaccccaacgccaaccccaacgccaaccccaacgccaaccccaacgccaaccccaacgccaaccccaacgccaaccccaacgccaaccccaacgccaaccccaacgccaaccccaacgccaaccccaacgccaaccccaacaagaacaaccagggcaacggccagggccacaacaugcccaacgaccccaacagaaacguggacgagaacgccaacgccaacagcgccgugaagaacaacaacaacgaggagcccagcgacaagcacaucaaggaguaccugaacaagauccagaacugaggacuaguuauaagacugacuagcccgaugggccucccaacgggcccuccuccccuccuugcaccgagauuaaucaaaggcucuuuucagagccaccaaaaaaaaaaaaaaaaaaaaaaaaaaaaaaaaaaaaaaaaaaaaaaaaaaaaaaaaaaaaaaaaaaaaaaaaaaaaaaaaaaaaaaaaaaaaaaaaaaaaa

SEQ ID NO: 8625 - RNA, 1407 nt, Artificial Sequence
  mRNA Design i-3 (hSL-A100) comprising derived and/or modified sequence from Pf(3D7)__XP_001351122.1__HsALB_Pf-CSP(19-397) (opt4)
aggagaaagcuuaccaugaagugggugaccuucaucagccugcuguuccuguucagcagcgccuacagccuguuccaggaguaccagugcuacggcagcagcagcaacaccagagugcugaacgagcugaacuacgacaacgccggcaccaaccuguacaacgagcuggagaugaacuacuacggcaagcaggagaacugguacagccugaagaagaacagcagaagccugggcgagaacgacgacggcaacaacgaggacaacgagaagcugagaaagcccaagcacaagaagcugaagcagcccgccgacggcaaccccgaccccaacgccaaccccaacguggaccccaacgccaaccccaacguggaccccaacgccaaccccaacguggaccccaacgccaaccccaacgccaaccccaacgccaaccccaacgccaaccccaacgccaaccccaacgccaaccccaacgccaaccccaacgccaaccccaacgccaaccccaacgccaaccccaacgccaaccccaacgccaaccccaacgccaaccccaacgccaaccccaacgccaaccccaacgccaaccccaacgccaaccccaacguggaccccaacgccaaccccaacgccaaccccaacgccaaccccaacgccaaccccaacgccaaccccaacgccaaccccaacgccaaccccaacgccaaccccaacgccaaccccaacgccaaccccaacgccaaccccaacgccaaccccaacgccaaccccaacgccaaccccaacgccaaccccaacgccaaccccaacgccaaccccaacgccaaccccaacaagaacaaccagggcaacggccagggccacaacaugcccaacgaccccaacagaaacguggacgagaacgccaacgccaacagcgccgugaagaacaacaacaacgaggagcccagcgacaagcacaucaaggaguaccugaacaagauccagaacagccugagcaccgaguggagccccugcagcgugaccugcggcaacggcauccaggugagaaucaagcccggcagcgccaacaagcccaaggacgagcuggacuacgccaacgacaucgagaagaagaucugcaagauggagaagugcagcagcguguucaacguggugaacagcagcaucggccugaucauggugcugagcuuccuguuccugaacugaggacuaguuauaagacugacuagcccgaugggccucccaacgggcccuccuccccuccuugcaccgagauuaaucaaaggcucuuuucagagccaccaaaaaaaaaaaaaaaaaaaaaaaaaaaaaaaaaaaaaaaaaaaaaaaaaaaaaaaaaaaaaaaaaaaaaaaaaaaaaaaaaaaaaaaaaaaaaaaaaaaaa

SEQ ID NO: 8626 - RNA, 1425 nt, Artificial Sequence
  mRNA Design i-3 (hSL-A100) comprising derived and/or modified sequence from Pf(3D7)__XP_001351122.1__HsIns-iso1_Pf-CSP(19-397) (opt4)
aggagaaagcuuaccauggcccuguggaugagacugcugccccugcuggcccugcuggcccuguggggccccgaccccgccgccgcccuguuccaggaguaccagugcuacggcagcagcagcaacaccagagugcugaacgagcugaacuacgacaacgccggcaccaaccuguacaacgagcuggagaugaacuacuacggcaagcaggagaacugguacagccugaagaagaacagcagaagccugggcgagaacgacgacggcaacaacgaggacaacgagaagcugagaaagcccaagcacaagaagcugaagcagcccgccgacggcaaccccgaccccaacgccaaccccaacguggaccccaacgccaaccccaacguggaccccaacgccaaccccaacguggaccccaacgccaaccccaacgccaaccccaacgccaaccccaacgccaaccccaacgccaaccccaacgccaaccccaacgccaaccccaacgccaaccccaacgccaaccccaacgccaaccccaacgccaaccccaacgccaaccccaacgccaaccccaacgccaaccccaacgccaaccccaacgccaaccccaacgccaaccccaacguggaccccaacgccaaccccaacgccaaccccaacgccaaccccaacgccaaccccaacgccaaccccaacgccaaccccaacgccaaccccaacgccaaccccaacgccaaccccaacgccaaccccaacgccaaccccaacgccaaccccaacgccaaccccaacgccaaccccaacgccaaccccaacgccaaccccaacgccaaccccaacgccaaccccaacaagaacaaccagggcaacggccagggccacaacaugcccaacgaccccaacagaaacguggacgagaacgccaacgccaacagcgccgugaagaacaacaacaacgaggagcccagcgacaagcacaucaaggaguaccugaacaagauccagaacagccugagcaccgaguggagccccugcagcgugaccugcggcaacggcauccaggugagaaucaagcccggcagcgccaacaagcccaaggacgagcuggacuacgccaacgacaucgagaagaagaucugcaagauggagaagugcagcagcguguucaacguggugaacagcagcaucggccugaucauggugcugagcuuccuguuccugaacugaggacuaguuauaagacugacuagcccgaugggccucccaacgggcccuccuccccuccuugcaccgagauuaaucaaaggcucuuuucagagccaccaaaaaaaaaaaaaaaaaaaaaaaaaaaaaaaaaaaaaaaaaaaaaaaaaaaaaaaaaaaaaaaaaaaaaaaaaaaaaaaaaaaaaaaaaaaaaaaaaaaaa

SEQ ID NO: 8627 - RNA, 1404 nt, Artificial Sequence
  mRNA Design i-3 (hSL-A100) comprising derived and/or modified sequence from Pf(3D7)__XP_001351122.1__HsSPARC_Pf-CSP(19-397) (opt4)
aggagaaagcuuaccaugagagccuggaucuucuuccugcugugccuggccggcagagcccuggcccuguuccaggaguaccagugcuacggcagcagcagcaacaccagagugcugaacgagcugaacuacgacaacgccggcaccaaccuguacaacgagcuggagaugaacuacuacggcaagcaggagaacugguacagccugaagaagaacagcagaagccugggcgagaacgacgacggcaacaacgaggacaacgagaagcugagaaagcccaagcacaagaagcugaagcagcccgccgacggcaaccccgaccccaacgccaaccccaacguggaccccaacgccaaccccaacguggaccccaacgccaaccccaacguggaccccaacgccaaccccaacgccaaccccaacgccaaccccaacgccaaccccaacgccaaccccaacgccaaccccaacgccaaccccaacgccaaccccaacgccaaccccaacgccaaccccaacgccaaccccaacgccaaccccaacgccaaccccaacgccaaccccaacgccaaccccaacgccaaccccaacgccaaccccaacguggaccccaacgccaaccccaacgccaaccccaacgccaaccccaacgccaaccccaacgccaaccccaacgccaaccccaacgccaaccccaacgccaaccccaacgccaaccccaacgccaaccccaacgccaaccccaacgccaaccccaacgccaaccccaacgccaaccccaacgccaaccccaacgccaaccccaacgccaaccccaacgccaaccccaacaagaacaaccagggcaacggccagggccacaacaugcccaacgaccccaacagaaacguggacgagaacgccaacgccaacagcgccgugaagaacaacaacaacgaggagcccagcgacaagcacaucaaggaguaccugaacaagauccagaacagccugagcaccgaguggagccccugcagcgugaccugcggcaacggcauccaggugagaaucaagcccggcagcgccaacaagcccaaggacgagcuggacuacgccaacgacaucgagaagaagaucugcaagauggagaagugcagcagcguguucaacguggugaacagcagcaucggccugaucauggugcugagcuuccuguuccugaacugaggacuaguuauaagacugacuagcccgaugggccucccaacgggcccuccuccccuccuugcaccgagauuaaucaaaggcucuuuucagagccaccaaaaaaaaaaaaaaaaaaaaaaaaaaaaaaaaaaaaaaaaaaaaaaaaaaaaaaaaaaaaaaaaaaaaaaaaaaaaaaaaaaaaaaaaaaaaaaaaaaaaa

SEQ ID NO: 8628 - RNA, 1407 nt, Artificial Sequence
  mRNA Design i-3 (hSL-A100) comprising derived and/or modified sequence from Pf(3D7)__XP_001351122.1__IgE_Pf-CSP(19-397) (opt4)
aggagaaagcuuaccauggacuggaccuggauccuguuccugguggccgccgccaccagagugcacagccuguuccaggaguaccagugcuacggcagcagcagcaacaccagagugcugaacgagcugaacuacgacaacgccggcaccaaccuguacaacgagcuggagaugaacuacuacggcaagcaggagaacugguacagccugaagaagaacagcagaagccugggcgagaacgacgacggcaacaacgaggacaacgagaagcugagaaagcccaagcacaagaagcugaagcagcccgccgacggcaaccccgaccccaacgccaaccccaacguggaccccaacgccaaccccaacguggaccccaacgccaaccccaacguggaccccaacgccaaccccaacgccaaccccaacgccaaccccaacgccaaccccaacgccaaccccaacgccaaccccaacgccaaccccaacgccaaccccaacgccaaccccaacgccaaccccaacgccaaccccaacgccaaccccaacgccaaccccaacgccaaccccaacgccaaccccaacgccaaccccaacgccaaccccaacguggaccccaacgccaaccccaacgccaaccccaacgccaaccccaacgccaaccccaacgccaaccccaacgccaaccccaacgccaaccccaacgccaaccccaacgccaaccccaacgccaaccccaacgccaaccccaacgccaaccccaacgccaaccccaacgccaaccccaacgccaaccccaacgccaaccccaacgccaaccccaacgccaaccccaacaagaacaaccagggcaacggccagggccacaacaugcccaacgaccccaacagaaacguggacgagaacgccaacgccaacagcgccgugaagaacaacaacaacgaggagcccagcgacaagcacaucaaggaguaccugaacaagauccagaacagccugagcaccgaguggagccccugcagcgugaccugcggcaacggcauccaggugagaaucaagcccggcagcgccaacaagcccaaggacgagcuggacuacgccaacgacaucgagaagaagaucugcaagauggagaagugcagcagcguguucaacguggugaacagcagcaucggccugaucauggugcugagcuuccuguuccugaacugaggacuaguuauaagacugacuagcccgaugggccucccaacgggcccuccuccccuccuugcaccgagauuaaucaaaggcucuuuucagagccaccaaaaaaaaaaaaaaaaaaaaaaaaaaaaaaaaaaaaaaaaaaaaaaaaaaaaaaaaaaaaaaaaaaaaaaaaaaaaaaaaaaaaaaaaaaaaaaaaaaaaa

SEQ ID NO: 8629 - RNA, 1572 nt, Artificial Sequence
  mRNA Design i-3 (hSL-A100) comprising derived and/or modified sequence from Pf(3D7)__XP_001351122.1__Pf-CSP_L(G4SG4)_TM domain HA (opt4)
aggagaaagcuuaccaugaugagaaagcuggccauccugagcgugagcagcuuccuguucguggaggcccuguuccaggaguaccagugcuacggcagcagcagcaacaccagagugcugaacgagcugaacuacgacaacgccggcaccaaccuguacaacgagcuggagaugaacuacuacggcaagcaggagaacugguacagccugaagaagaacagcagaagccugggcgagaacgacgacggcaacaacgaggacaacgagaagcugagaaagcccaagcacaagaagcugaagcagcccgccgacggcaaccccgaccccaacgccaaccccaacguggaccccaacgccaaccccaacguggaccccaacgccaaccccaacguggaccccaacgccaaccccaacgccaaccccaacgccaaccccaacgccaaccccaacgccaaccccaacgccaaccccaacgccaaccccaacgccaaccccaacgccaaccccaacgccaaccccaacgccaaccccaacgccaaccccaacgccaaccccaacgccaaccccaacgccaaccccaacgccaaccccaacgccaaccccaacguggaccccaacgccaaccccaacgccaaccccaacgccaaccccaacgccaaccccaacgccaaccccaacgccaaccccaacgccaaccccaacgccaaccccaacgccaaccccaacgccaaccccaacgccaaccccaacgccaaccccaacgccaaccccaacgccaaccccaacgccaaccccaacgccaaccccaacgccaaccccaacgccaaccccaacaagaacaaccagggcaacggccagggccacaacaugcccaacgaccccaacagaaacguggacgagaacgccaacgccaacagcgccgugaagaacaacaacaacgaggagcccagcgacaagcacaucaaggaguaccugaacaagauccagaacagccugagcaccgaguggagccccugcagcgugaccugcggcaacggcauccaggugagaaucaagcccggcagcgccaacaagcccaaggacgagcuggacuacgccaacgacaucgagaagaagaucugcaagauggagaagugcagcagcguguucaacguggugaacagcagcaucggccugaucauggugcugagcuuccuguuccugaacggcggcggcggcagcggcggcggcggcaagcuggagagcaccagaaucuaccagauccuggccaucuacagcaccguggccagcagccuggugcugguggugagccugggcgccaucagcuucuggaugugcagcaacggcagccugcagugcagaaucugcaucugaggacuaguuauaagacugacuagcccgaugggccucccaacgggcccuccuccccuccuugcaccgagauuaaucaaaggcucuuuucagagccaccaaaaaaaaaaaaaaaaaaaaaaaaaaaaaaaaaaaaaaaaaaaaaaaaaaaaaaaaaaaaaaaaaaaaaaaaaaaaaaaaaaaaaaaaaaaaaaaaaaaaa

SEQ ID NO: 8630 - RNA, 1446 nt, Artificial Sequence
  mRNA Design i-3 (hSL-A100) comprising derived and/or modified sequence from Pf(3D7)__XP_001351122.1__Pf-CSP(199-377)_L(PVTN)_HBsAg (opt4)
aggagaaagcuuaccauggaccccaacgccaaccccaacgccaaccccaacgccaaccccaacgccaaccccaacgccaaccccaacgccaaccccaacgccaaccccaacgccaaccccaacgccaaccccaacgccaaccccaacgccaaccccaacgccaaccccaacgccaaccccaacgccaaccccaacgccaaccccaacgccaaccccaacgccaaccccaacgccaaccccaacaagaacaaccagggcaacggccagggccacaacaugcccaacgaccccaacagaaacguggacgagaacgccaacgccaacagcgccgugaagaacaacaacaacgaggagcccagcgacaagcacaucaaggaguaccugaacaagauccagaacagccugagcaccgaguggagccccugcagcgugaccugcggcaacggcauccaggugagaaucaagcccggcagcgccaacaagcccaaggacgagcuggacuacgccaacgacaucgagaagaagaucugcaagauggagaagugcagcagcgugcccgugaccaacauggagaacaucaccagcggcuuccugggcccccugcuggugcugcaggccggcuucuuccugcugaccagaauccugaccaucccccagagccuggacagcugguggaccagccugaacuuccugggcggcagccccgugugccugggccagaacagccagagccccaccagcaaccacagccccaccagcugcccccccaucugccccggcuacagauggaugugccugagaagauucaucaucuuccuguucauccugcugcugugccugaucuuccugcuggugcugcuggacuaccagggcaugcugcccgugugcccccugauccccggcagcaccaccaccaacaccggccccugcaagaccugcaccacccccgcccagggcaacagcauguuccccagcugcugcugcaccaagcccaccgacggcaacugcaccugcauccccauccccagcagcugggccuucgccaaguaccugugggagugggccagcgugagauucagcuggcugagccugcuggugcccuucgugcagugguucgugggccugagccccaccguguggcugagcgccaucuggaugaugugguacuggggccccagccuguacagcaucgugagccccuucaucccccugcugcccaucuucuucugccuguggguguacaucugaggacuaguuauaagacugacuagcccgaugggccucccaacgggcccuccuccccuccuugcaccgagauuaaucaaaggcucuuuucagagccaccaaaaaaaaaaaaaaaaaaaaaaaaaaaaaaaaaaaaaaaaaaaaaaaaaaaaaaaaaaaaaaaaaaaaaaaaaaaaaaaaaaaaaaaaaaaaaaaaaaaaa

SEQ ID NO: 8631 - RNA, 1488 nt, Artificial Sequence
  mRNA Design i-3 (hSL-A100) comprising derived and/or modified sequence from Pf(3D7)__XP_001351122.1__Pf-CSP(199-387)_L(PVTN)_HBsAg (opt4)
aggagaaagcuuaccaugauggcccccgaccccaacgccaaccccaacgccaaccccaacgccaaccccaacgccaaccccaacgccaaccccaacgccaaccccaacgccaaccccaacgccaaccccaacgccaaccccaacgccaaccccaacgccaaccccaacgccaaccccaacgccaaccccaacgccaaccccaacgccaaccccaacgccaaccccaacgccaaccccaacgccaaccccaacaagaacaaccagggcaacggccagggccacaacaugcccaacgaccccaacagaaacguggacgagaacgccaacgccaacagcgccgugaagaacaacaacaacgaggagcccagcgacaagcacaucaaggaguaccugaacaagauccagaacagccugagcaccgaguggagccccugcagcgugaccugcggcaacggcauccaggugagaaucaagcccggcagcgccaacaagcccaaggacgagcuggacuacgccaacgacaucgagaagaagaucugcaagauggagaagugcagcagcguguucaacguggugaacagcagcaucggccugggccccgugaccaacauggagaacaucaccagcggcuuccugggcccccugcuggugcugcaggccggcuucuuccugcugaccagaauccugaccaucccccagagccuggacagcugguggaccagccugaacuuccugggcggcagccccgugugccugggccagaacagccagagccccaccagcaaccacagccccaccagcugcccccccaucugccccggcuacagauggaugugccugagaagauucaucaucuuccuguucauccugcugcugugccugaucuuccugcuggugcugcuggacuaccagggcaugcugcccgugugcccccugauccccggcagcaccaccaccaacaccggccccugcaagaccugcaccacccccgcccagggcaacagcauguuccccagcugcugcugcaccaagcccaccgacggcaacugcaccugcauccccauccccagcagcugggccuucgccaaguaccugugggagugggccagcgugagauucagcuggcugagccugcuggugcccuucgugcagugguucgugggccugagccccaccguguggcugagcgccaucuggaugaugugguacuggggccccagccuguacagcaucgugagccccuucaucccccugcugcccaucuucuucugccuguggguguacaucugaggacuaguuauaagacugacuagcccgaugggccucccaacgggcccuccuccccuccuugcaccgagauuaaucaaaggcucuuuucagagccaccaaaaaaaaaaaaaaaaaaaaaaaaaaaaaaaaaaaaaaaaaaaaaaaaaaaaaaaaaaaaaaaaaaaaaaaaaaaaaaaaaaaaaaaaaaaaaaaaaaaaa

SEQ ID NO: 8632 - RNA, 672 nt, Artificial Sequence
  mRNA Design i-3 (hSL-A100) comprising derived and/or modified sequence from Pf(3D7)__XP_001351122.1__HsALB_Pf-CSP(19-152) (opt4)
aggagaaagcuuaccaugaagugggugaccuucaucagccugcuguuccuguucagcagcgccuacagccuguuccaggaguaccagugcuacggcagcagcagcaacaccagagugcugaacgagcugaacuacgacaacgccggcaccaaccuguacaacgagcuggagaugaacuacuacggcaagcaggagaacugguacagccugaagaagaacagcagaagccugggcgagaacgacgacggcaacaacgaggacaacgagaagcugagaaagcccaagcacaagaagcugaagcagcccgccgacggcaaccccgaccccaacgccaaccccaacguggaccccaacgccaaccccaacguggaccccaacgccaaccccaacguggaccccaacgccaaccccaacgccaaccccaacgccaaccccaacgccaaccccaacgccaaccccaacgccaaccccugaggacuaguuauaagacugacuagcccgaugggccucccaacgggcccuccuccccuccuugcaccgagauuaaucaaaggcucuuuucagagccaccaaaaaaaaaaaaaaaaaaaaaaaaaaaaaaaaaaaaaaaaaaaaaaaaaaaaaaaaaaaaaaaaaaaaaaaaaaaaaaaaaaaaaaaaaaaaaaaaaaaaa

SEQ ID NO: 8633 - RNA, 792 nt, Artificial Sequence
  mRNA Design i-3 (hSL-A100) comprising derived and/or modified sequence from Pf(3D7)__XP_001351122.1__HsALB_Pf-CSP(19-192) (opt4)
aggagaaagcuuaccaugaagugggugaccuucaucagccugcuguuccuguucagcagcgccuacagccuguuccaggaguaccagugcuacggcagcagcagcaacaccagagugcugaacgagcugaacuacgacaacgccggcaccaaccuguacaacgagcuggagaugaacuacuacggcaagcaggagaacugguacagccugaagaagaacagcagaagccugggcgagaacgacgacggcaacaacgaggacaacgagaagcugagaaagcccaagcacaagaagcugaagcagcccgccgacggcaaccccgaccccaacgccaaccccaacguggaccccaacgccaaccccaacguggaccccaacgccaaccccaacguggaccccaacgccaaccccaacgccaaccccaacgccaaccccaacgccaaccccaacgccaaccccaacgccaaccccaacgccaaccccaacgccaaccccaacgccaaccccaacgccaaccccaacgccaaccccaacgccaaccccaacgccaaccccaacgccaaccccaacgccaaccccaacgccaaccccugaggacuaguuauaagacugacuagcccgaugggccucccaacgggcccuccuccccuccuugcaccgagauuaaucaaaggcucuuuucagagccaccaaaaaaaaaaaaaaaaaaaaaaaaaaaaaaaaaaaaaaaaaaaaaaaaaaaaaaaaaaaaaaaaaaaaaaaaaaaaaaaaaaaaaaaaaaaaaaaaaaaaa

SEQ ID NO: 8634 - RNA, 1032 nt, Artificial Sequence
  mRNA Design i-3 (hSL-A100) comprising derived and/or modified sequence from Pf(3D7)__XP_001351122.1__HsALB_Pf-CSP(19-272) (opt4)
aggagaaagcuuaccaugaagugggugaccuucaucagccugcuguuccuguucagcagcgccuacagccuguuccaggaguaccagugcuacggcagcagcagcaacaccagagugcugaacgagcugaacuacgacaacgccggcaccaaccuguacaacgagcuggagaugaacuacuacggcaagcaggagaacugguacagccugaagaagaacagcagaagccugggcgagaacgacgacggcaacaacgaggacaacgagaagcugagaaagcccaagcacaagaagcugaagcagcccgccgacggcaaccccgaccccaacgccaaccccaacguggaccccaacgccaaccccaacguggaccccaacgccaaccccaacguggaccccaacgccaaccccaacgccaaccccaacgccaaccccaacgccaaccccaacgccaaccccaacgccaaccccaacgccaaccccaacgccaaccccaacgccaaccccaacgccaaccccaacgccaaccccaacgccaaccccaacgccaaccccaacgccaaccccaacgccaaccccaacgccaaccccaacgccaaccccaacguggaccccaacgccaaccccaacgccaaccccaacgccaaccccaacgccaaccccaacgccaaccccaacgccaaccccaacgccaaccccaacgccaaccccaacgccaaccccaacgccaaccccaacgccaaccccaacgccaaccccaacgccaaccccaacgccaaccccaacgccaaccccaacgccaaccccaacgccaaccccaacgccaaccccugaggacuaguuauaagacugacuagcccgaugggccucccaacgggcccuccuccccuccuugcaccgagauuaaucaaaggcucuuuucagagccaccaaaaaaaaaaaaaaaaaaaaaaaaaaaaaaaaaaaaaaaaaaaaaaaaaaaaaaaaaaaaaaaaaaaaaaaaaaaaaaaaaaaaaaaaaaaaaaaaaaaaa

SEQ ID NO: 8635 - RNA, 1194 nt, Artificial Sequence
  mRNA Design i-3 (hSL-A100) comprising derived and/or modified sequence from Pf(3D7)__XP_001351122.1__HsALB_Pf-CSP(19-272)_L(AAY)_Pf-CSP(310-3 27)_L(AAY)_Pf-CSP(346-375) (opt4)
aggagaaagcuuaccaugaagugggugaccuucaucagccugcuguuccuguucagcagcgccuacagccuguuccaggaguaccagugcuacggcagcagcagcaacaccagagugcugaacgagcugaacuacgacaacgccggcaccaaccuguacaacgagcuggagaugaacuacuacggcaagcaggagaacugguacagccugaagaagaacagcagaagccugggcgagaacgacgacggcaacaacgaggacaacgagaagcugagaaagcccaagcacaagaagcugaagcagcccgccgacggcaaccccgaccccaacgccaaccccaacguggaccccaacgccaaccccaacguggaccccaacgccaaccccaacguggaccccaacgccaaccccaacgccaaccccaacgccaaccccaacgccaaccccaacgccaaccccaacgccaaccccaacgccaaccccaacgccaaccccaacgccaaccccaacgccaaccccaacgccaaccccaacgccaaccccaacgccaaccccaacgccaaccccaacgccaaccccaacgccaaccccaacgccaaccccaacguggaccccaacgccaaccccaacgccaaccccaacgccaaccccaacgccaaccccaacgccaaccccaacgccaaccccaacgccaaccccaacgccaaccccaacgccaaccccaacgccaaccccaacgccaaccccaacgccaaccccaacgccaaccccaacgccaaccccaacgccaaccccaacgccaaccccaacgccaaccccaacgccaaccccgccgccuacgagcccagcgacaagcacaucaaggaguaccugaacaagauccagaacagccuggccgccuacaucaagcccggcagcgccaacaagcccaaggacgagcuggacuacgccaacgacaucgagaagaagaucugcaagauggagaagugcagcugaggacuaguuauaagacugacuagcccgaugggccucccaacgggcccuccuccccuccuugcaccgagauuaaucaaaggcucuuuucagagccaccaaaaaaaaaaaaaaaaaaaaaaaaaaaaaaaaaaaaaaaaaaaaaaaaaaaaaaaaaaaaaaaaaaaaaaaaaaaaaaaaaaaaaaaaaaaaaaaaaaaaa

SEQ ID NO: 8636 - RNA, 1155 nt, Artificial Sequence
  mRNA Design i-3 (hSL-A100) comprising derived and/or modified sequence from Pf(3D7)__XP_001351122.1__HsALB_Pf-CSP(19-272)_L(AAY)_Pf-CSP(346-3 65)_L(AAY)_P2 (opt4)
aggagaaagcuuaccaugaagugggugaccuucaucagccugcuguuccuguucagcagcgccuacagccuguuccaggaguaccagugcuacggcagcagcagcaacaccagagugcugaacgagcugaacuacgacaacgccggcaccaaccuguacaacgagcuggagaugaacuacuacggcaagcaggagaacugguacagccugaagaagaacagcagaagccugggcgagaacgacgacggcaacaacgaggacaacgagaagcugagaaagcccaagcacaagaagcugaagcagcccgccgacggcaaccccgaccccaacgccaaccccaacguggaccccaacgccaaccccaacguggaccccaacgccaaccccaacguggaccccaacgccaaccccaacgccaaccccaacgccaaccccaacgccaaccccaacgccaaccccaacgccaaccccaacgccaaccccaacgccaaccccaacgccaaccccaacgccaaccccaacgccaaccccaacgccaaccccaacgccaaccccaacgccaaccccaacgccaaccccaacgccaaccccaacgccaaccccaacguggaccccaacgccaaccccaacgccaaccccaacgccaaccccaacgccaaccccaacgccaaccccaacgccaaccccaacgccaaccccaacgccaaccccaacgccaaccccaacgccaaccccaacgccaaccccaacgccaaccccaacgccaaccccaacgccaaccccaacgccaaccccaacgccaaccccaacgccaaccccaacgccaaccccgccgccuacaucaagcccggcagcgccaacaagcccaaggacgagcuggacuacgccaacgacaucgaggccgccuaccaguacaucaaggccaacagcaaguucaucggcaucaccgagcugugaggacuaguuauaagacugacuagcccgaugggccucccaacgggcccuccuccccuccuugcaccgagauuaaucaaaggcucuuuucagagccaccaaaaaaaaaaaaaaaaaaaaaaaaaaaaaaaaaaaaaaaaaaaaaaaaaaaaaaaaaaaaaaaaaaaaaaaaaaaaaaaaaaaaaaaaaaaaaaaaaaaaa

SEQ ID NO: 8637 - RNA, 1149 nt, Artificial Sequence
  mRNA Design i-3 (hSL-A100) comprising derived and/or modified sequence from Pf(3D7)__XP_001351122.1__HsALB_Pf-CSP(19-272)_L(AAY)_Pf-CSP(346-3 65)_L(AAY)_PADRE (opt4)
aggagaaagcuuaccaugaagugggugaccuucaucagccugcuguuccuguucagcagcgccuacagccuguuccaggaguaccagugcuacggcagcagcagcaacaccagagugcugaacgagcugaacuacgacaacgccggcaccaaccuguacaacgagcuggagaugaacuacuacggcaagcaggagaacugguacagccugaagaagaacagcagaagccugggcgagaacgacgacggcaacaacgaggacaacgagaagcugagaaagcccaagcacaagaagcugaagcagcccgccgacggcaaccccgaccccaacgccaaccccaacguggaccccaacgccaaccccaacguggaccccaacgccaaccccaacguggaccccaacgccaaccccaacgccaaccccaacgccaaccccaacgccaaccccaacgccaaccccaacgccaaccccaacgccaaccccaacgccaaccccaacgccaaccccaacgccaaccccaacgccaaccccaacgccaaccccaacgccaaccccaacgccaaccccaacgccaaccccaacgccaaccccaacgccaaccccaacguggaccccaacgccaaccccaacgccaaccccaacgccaaccccaacgccaaccccaacgccaaccccaacgccaaccccaacgccaaccccaacgccaaccccaacgccaaccccaacgccaaccccaacgccaaccccaacgccaaccccaacgccaaccccaacgccaaccccaacgccaaccccaacgccaaccccaacgccaaccccaacgccaaccccgccgccuacaucaagcccggcagcgccaacaagcccaaggacgagcuggacuacgccaacgacaucgaggccgccuacgccaaguucguggccgccuggacccugaaggccgccgccugaggacuaguuauaagacugacuagcccgaugggccucccaacgggcccuccuccccuccuugcaccgagauuaaucaaaggcucuuuucagagccaccaaaaaaaaaaaaaaaaaaaaaaaaaaaaaaaaaaaaaaaaaaaaaaaaaaaaaaaaaaaaaaaaaaaaaaaaaaaaaaaaaaaaaaaaaaaaaaaaaaaaa

SEQ ID NO: 8638 - RNA, 1206 nt, Artificial Sequence
  mRNA Design i-3 (hSL-A100) comprising derived and/or modified sequence from Pf(3D7)__XP_001351122.1__HsALB_Pf-CSP(19-272)_L(G4S)_Pf-CSP(310-3 27)_L(G4S)_Pf-CSP(346-375) (opt4)
aggagaaagcuuaccaugaagugggugaccuucaucagccugcuguuccuguucagcagcgccuacagccuguuccaggaguaccagugcuacggcagcagcagcaacaccagagugcugaacgagcugaacuacgacaacgccggcaccaaccuguacaacgagcuggagaugaacuacuacggcaagcaggagaacugguacagccugaagaagaacagcagaagccugggcgagaacgacgacggcaacaacgaggacaacgagaagcugagaaagcccaagcacaagaagcugaagcagcccgccgacggcaaccccgaccccaacgccaaccccaacguggaccccaacgccaaccccaacguggaccccaacgccaaccccaacguggaccccaacgccaaccccaacgccaaccccaacgccaaccccaacgccaaccccaacgccaaccccaacgccaaccccaacgccaaccccaacgccaaccccaacgccaaccccaacgccaaccccaacgccaaccccaacgccaaccccaacgccaaccccaacgccaaccccaacgccaaccccaacgccaaccccaacgccaaccccaacguggaccccaacgccaaccccaacgccaaccccaacgccaaccccaacgccaaccccaacgccaaccccaacgccaaccccaacgccaaccccaacgccaaccccaacgccaaccccaacgccaaccccaacgccaaccccaacgccaaccccaacgccaaccccaacgccaaccccaacgccaaccccaacgccaaccccaacgccaaccccaacgccaaccccggcggcggcggcagcgagcccagcgacaagcacaucaaggaguaccugaacaagauccagaacagccugggcggcggcggcagcaucaagcccggcagcgccaacaagcccaaggacgagcuggacuacgccaacgacaucgagaagaagaucugcaagauggagaagugcagcugaggacuaguuauaagacugacuagcccgaugggccucccaacgggcccuccuccccuccuugcaccgagauuaaucaaaggcucuuuucagagccaccaaaaaaaaaaaaaaaaaaaaaaaaaaaaaaaaaaaaaaaaaaaaaaaaaaaaaaaaaaaaaaaaaaaaaaaaaaaaaaaaaaaaaaaaaaaaaaaaaaaaa

SEQ ID NO: 8639 - RNA, 1191 nt, Artificial Sequence
  mRNA Design i-3 (hSL-A100) comprising derived and/or modified sequence from Pf(3D7)__XP_001351122.1__HsALB_Pf-CSP(19-272)_L(G4S)_Pf-CSP(310-3 27)_Pf-CSP(346-375) (opt4)
aggagaaagcuuaccaugaagugggugaccuucaucagccugcuguuccuguucagcagcgccuacagccuguuccaggaguaccagugcuacggcagcagcagcaacaccagagugcugaacgagcugaacuacgacaacgccggcaccaaccuguacaacgagcuggagaugaacuacuacggcaagcaggagaacugguacagccugaagaagaacagcagaagccugggcgagaacgacgacggcaacaacgaggacaacgagaagcugagaaagcccaagcacaagaagcugaagcagcccgccgacggcaaccccgaccccaacgccaaccccaacguggaccccaacgccaaccccaacguggaccccaacgccaaccccaacguggaccccaacgccaaccccaacgccaaccccaacgccaaccccaacgccaaccccaacgccaaccccaacgccaaccccaacgccaaccccaacgccaaccccaacgccaaccccaacgccaaccccaacgccaaccccaacgccaaccccaacgccaaccccaacgccaaccccaacgccaaccccaacgccaaccccaacgccaaccccaacguggaccccaacgccaaccccaacgccaaccccaacgccaaccccaacgccaaccccaacgccaaccccaacgccaaccccaacgccaaccccaacgccaaccccaacgccaaccccaacgccaaccccaacgccaaccccaacgccaaccccaacgccaaccccaacgccaaccccaacgccaaccccaacgccaaccccaacgccaaccccaacgccaaccccggcggcggcggcagcgagcccagcgacaagcacaucaaggaguaccugaacaagauccagaacagccugaucaagcccggcagcgccaacaagcccaaggacgagcuggacuacgccaacgacaucgagaagaagaucugcaagauggagaagugcagcugaggacuaguuauaagacugacuagcccgaugggccucccaacgggcccuccuccccuccuugcaccgagauuaaucaaaggcucuuuucagagccaccaaaaaaaaaaaaaaaaaaaaaaaaaaaaaaaaaaaaaaaaaaaaaaaaaaaaaaaaaaaaaaaaaaaaaaaaaaaaaaaaaaaaaaaaaaaaaaaaaaaaa

SEQ ID NO: 8640 - RNA, 1191 nt, Artificial Sequence
  mRNA Design i-3 (hSL-A100) comprising derived and/or modified sequence from Pf(3D7)__XP_001351122.1__HsALB_Pf-CSP(19-325) (opt4)
aggagaaagcuuaccaugaagugggugaccuucaucagccugcuguuccuguucagcagcgccuacagccuguuccaggaguaccagugcuacggcagcagcagcaacaccagagugcugaacgagcugaacuacgacaacgccggcaccaaccuguacaacgagcuggagaugaacuacuacggcaagcaggagaacugguacagccugaagaagaacagcagaagccugggcgagaacgacgacggcaacaacgaggacaacgagaagcugagaaagcccaagcacaagaagcugaagcagcccgccgacggcaaccccgaccccaacgccaaccccaacguggaccccaacgccaaccccaacguggaccccaacgccaaccccaacguggaccccaacgccaaccccaacgccaaccccaacgccaaccccaacgccaaccccaacgccaaccccaacgccaaccccaacgccaaccccaacgccaaccccaacgccaaccccaacgccaaccccaacgccaaccccaacgccaaccccaacgccaaccccaacgccaaccccaacgccaaccccaacgccaaccccaacgccaaccccaacguggaccccaacgccaaccccaacgccaaccccaacgccaaccccaacgccaaccccaacgccaaccccaacgccaaccccaacgccaaccccaacgccaaccccaacgccaaccccaacgccaaccccaacgccaaccccaacgccaaccccaacgccaaccccaacgccaaccccaacgccaaccccaacgccaaccccaacgccaaccccaacgccaaccccaacaagaacaaccagggcaacggccagggccacaacaugcccaacgaccccaacagaaacguggacgagaacgccaacgccaacagcgccgugaagaacaacaacaacgaggagcccagcgacaagcacaucaaggaguaccugaacaagauccagaacugaggacuaguuauaagacugacuagcccgaugggccucccaacgggcccuccuccccuccuugcaccgagauuaaucaaaggcucuuuucagagccaccaaaaaaaaaaaaaaaaaaaaaaaaaaaaaaaaaaaaaaaaaaaaaaaaaaaaaaaaaaaaaaaaaaaaaaaaaaaaaaaaaaaaaaaaaaaaaaaaaaaaa

SEQ ID NO: 8641 - RNA, 1368 nt, Artificial Sequence
  mRNA Design i-3 (hSL-A100) comprising derived and/or modified sequence from Pf(3D7)__XP_001351122.1__HsALB_Pf-CSP(19-384) (opt4)
aggagaaagcuuaccaugaagugggugaccuucaucagccugcuguuccuguucagcagcgccuacagccuguuccaggaguaccagugcuacggcagcagcagcaacaccagagugcugaacgagcugaacuacgacaacgccggcaccaaccuguacaacgagcuggagaugaacuacuacggcaagcaggagaacugguacagccugaagaagaacagcagaagccugggcgagaacgacgacggcaacaacgaggacaacgagaagcugagaaagcccaagcacaagaagcugaagcagcccgccgacggcaaccccgaccccaacgccaaccccaacguggaccccaacgccaaccccaacguggaccccaacgccaaccccaacguggaccccaacgccaaccccaacgccaaccccaacgccaaccccaacgccaaccccaacgccaaccccaacgccaaccccaacgccaaccccaacgccaaccccaacgccaaccccaacgccaaccccaacgccaaccccaacgccaaccccaacgccaaccccaacgccaaccccaacgccaaccccaacgccaaccccaacgccaaccccaacguggaccccaacgccaaccccaacgccaaccccaacgccaaccccaacgccaaccccaacgccaaccccaacgccaaccccaacgccaaccccaacgccaaccccaacgccaaccccaacgccaaccccaacgccaaccccaacgccaaccccaacgccaaccccaacgccaaccccaacgccaaccccaacgccaaccccaacgccaaccccaacgccaaccccaacaagaacaaccagggcaacggccagggccacaacaugcccaacgaccccaacagaaacguggacgagaacgccaacgccaacagcgccgugaagaacaacaacaacgaggagcccagcgacaagcacaucaaggaguaccugaacaagauccagaacagccugagcaccgaguggagccccugcagcgugaccugcggcaacggcauccaggugagaaucaagcccggcagcgccaacaagcccaaggacgagcuggacuacgccaacgacaucgagaagaagaucugcaagauggagaagugcagcagcguguucaacguggugaacagcagcugaggacuaguuauaagacugacuagcccgaugggccucccaacgggcccuccuccccuccuugcaccgagauuaaucaaaggcucuuuucagagccaccaaaaaaaaaaaaaaaaaaaaaaaaaaaaaaaaaaaaaaaaaaaaaaaaaaaaaaaaaaaaaaaaaaaaaaaaaaaaaaaaaaaaaaaaaaaaaaaaaaaaa

SEQ ID NO: 8642 - RNA, 1506 nt, Artificial Sequence
  mRNA Design i-3 (hSL-A100) comprising derived and/or modified sequence from Pf(3D7)__XP_001351122.1__HsALB_Pf-CSP(19-384)_TM domain HA (opt4)
aggagaaagcuuaccaugaagugggugaccuucaucagccugcuguuccuguucagcagcgccuacagccuguuccaggaguaccagugcuacggcagcagcagcaacaccagagugcugaacgagcugaacuacgacaacgccggcaccaaccuguacaacgagcuggagaugaacuacuacggcaagcaggagaacugguacagccugaagaagaacagcagaagccugggcgagaacgacgacggcaacaacgaggacaacgagaagcugagaaagcccaagcacaagaagcugaagcagcccgccgacggcaaccccgaccccaacgccaaccccaacguggaccccaacgccaaccccaacguggaccccaacgccaaccccaacguggaccccaacgccaaccccaacgccaaccccaacgccaaccccaacgccaaccccaacgccaaccccaacgccaaccccaacgccaaccccaacgccaaccccaacgccaaccccaacgccaaccccaacgccaaccccaacgccaaccccaacgccaaccccaacgccaaccccaacgccaaccccaacgccaaccccaacgccaaccccaacguggaccccaacgccaaccccaacgccaaccccaacgccaaccccaacgccaaccccaacgccaaccccaacgccaaccccaacgccaaccccaacgccaaccccaacgccaaccccaacgccaaccccaacgccaaccccaacgccaaccccaacgccaaccccaacgccaaccccaacgccaaccccaacgccaaccccaacgccaaccccaacgccaaccccaacaagaacaaccagggcaacggccagggccacaacaugcccaacgaccccaacagaaacguggacgagaacgccaacgccaacagcgccgugaagaacaacaacaacgaggagcccagcgacaagcacaucaaggaguaccugaacaagauccagaacagccugagcaccgaguggagccccugcagcgugaccugcggcaacggcauccaggugagaaucaagcccggcagcgccaacaagcccaaggacgagcuggacuacgccaacgacaucgagaagaagaucugcaagauggagaagugcagcagcguguucaacguggugaacagcagcaagcuggagagcaccagaaucuaccagauccuggccaucuacagcaccguggccagcagccuggugcugguggugagccugggcgccaucagcuucuggaugugcagcaacggcagccugcagugcagaaucugcaucugaggacuaguuauaagacugacuagcccgaugggccucccaacgggcccuccuccccuccuugcaccgagauuaaucaaaggcucuuuucagagccaccaaaaaaaaaaaaaaaaaaaaaaaaaaaaaaaaaaaaaaaaaaaaaaaaaaaaaaaaaaaaaaaaaaaaaaaaaaaaaaaaaaaaaaaaaaaaaaaaaaaaa

SEQ ID NO: 8643 - RNA, 1218 nt, Artificial Sequence
  mRNA Design i-3 (hSL-A100) comprising derived and/or modified sequence from Pf(3D7)__XP_001351122.1__HsALB_Pf-CSP(82-397) (opt4)
aggagaaagcuuaccaugaagugggugaccuucaucagccugcuguuccuguucagcagcgccuacagcgacaacgagaagcugagaaagcccaagcacaagaagcugaagcagcccgccgacggcaaccccgaccccaacgccaaccccaacguggaccccaacgccaaccccaacguggaccccaacgccaaccccaacguggaccccaacgccaaccccaacgccaaccccaacgccaaccccaacgccaaccccaacgccaaccccaacgccaaccccaacgccaaccccaacgccaaccccaacgccaaccccaacgccaaccccaacgccaaccccaacgccaaccccaacgccaaccccaacgccaaccccaacgccaaccccaacgccaaccccaacgccaaccccaacguggaccccaacgccaaccccaacgccaaccccaacgccaaccccaacgccaaccccaacgccaaccccaacgccaaccccaacgccaaccccaacgccaaccccaacgccaaccccaacgccaaccccaacgccaaccccaacgccaaccccaacgccaaccccaacgccaaccccaacgccaaccccaacgccaaccccaacgccaaccccaacgccaaccccaacaagaacaaccagggcaacggccagggccacaacaugcccaacgaccccaacagaaacguggacgagaacgccaacgccaacagcgccgugaagaacaacaacaacgaggagcccagcgacaagcacaucaaggaguaccugaacaagauccagaacagccugagcaccgaguggagccccugcagcgugaccugcggcaacggcauccaggugagaaucaagcccggcagcgccaacaagcccaaggacgagcuggacuacgccaacgacaucgagaagaagaucugcaagauggagaagugcagcagcguguucaacguggugaacagcagcaucggccugaucauggugcugagcuuccuguuccugaacugaggacuaguuauaagacugacuagcccgaugggccucccaacgggcccuccuccccuccuugcaccgagauuaaucaaaggcucuuuucagagccaccaaaaaaaaaaaaaaaaaaaaaaaaaaaaaaaaaaaaaaaaaaaaaaaaaaaaaaaaaaaaaaaaaaaaaaaaaaaaaaaaaaaaaaaaaaaaaaaaaaaaa

SEQ ID NO: 8644 - RNA, 570 nt, Artificial Sequence
  mRNA Design i-3 (hSL-A100) comprising derived and/or modified sequence from Pf(3D7)__XP_001351122.1__HsALB_Pf-CSP(93-192) (opt4)
aggagaaagcuuaccaugaagugggugaccuucaucagccugcuguuccuguucagcagcgccuacagcaagcugaagcagcccgccgacggcaaccccgaccccaacgccaaccccaacguggaccccaacgccaaccccaacguggaccccaacgccaaccccaacguggaccccaacgccaaccccaacgccaaccccaacgccaaccccaacgccaaccccaacgccaaccccaacgccaaccccaacgccaaccccaacgccaaccccaacgccaaccccaacgccaaccccaacgccaaccccaacgccaaccccaacgccaaccccaacgccaaccccaacgccaaccccaacgccaaccccugaggacuaguuauaagacugacuagcccgaugggccucccaacgggcccuccuccccuccuugcaccgagauuaaucaaaggcucuuuucagagccaccaaaaaaaaaaaaaaaaaaaaaaaaaaaaaaaaaaaaaaaaaaaaaaaaaaaaaaaaaaaaaaaaaaaaaaaaaaaaaaaaaaaaaaaaaaaaaaaaaaaaa

SEQ ID NO: 8645 - RNA, 810 nt, Artificial Sequence
  mRNA Design i-3 (hSL-A100) comprising derived and/or modified sequence from Pf(3D7)__XP_001351122.1__HsALB_Pf-CSP(93-272) (opt4)
aggagaaagcuuaccaugaagugggugaccuucaucagccugcuguuccuguucagcagcgccuacagcaagcugaagcagcccgccgacggcaaccccgaccccaacgccaaccccaacguggaccccaacgccaaccccaacguggaccccaacgccaaccccaacguggaccccaacgccaaccccaacgccaaccccaacgccaaccccaacgccaaccccaacgccaaccccaacgccaaccccaacgccaaccccaacgccaaccccaacgccaaccccaacgccaaccccaacgccaaccccaacgccaaccccaacgccaaccccaacgccaaccccaacgccaaccccaacgccaaccccaacgccaaccccaacguggaccccaacgccaaccccaacgccaaccccaacgccaaccccaacgccaaccccaacgccaaccccaacgccaaccccaacgccaaccccaacgccaaccccaacgccaaccccaacgccaaccccaacgccaaccccaacgccaaccccaacgccaaccccaacgccaaccccaacgccaaccccaacgccaaccccaacgccaaccccaacgccaaccccugaggacuaguuauaagacugacuagcccgaugggccucccaacgggcccuccuccccuccuugcaccgagauuaaucaaaggcucuuuucagagccaccaaaaaaaaaaaaaaaaaaaaaaaaaaaaaaaaaaaaaaaaaaaaaaaaaaaaaaaaaaaaaaaaaaaaaaaaaaaaaaaaaaaaaaaaaaaaaaaaaaaaa

SEQ ID NO: 8646 - RNA, 1185 nt, Artificial Sequence
  mRNA Design i-3 (hSL-A100) comprising derived and/or modified sequence from Pf(3D7)__XP_001351122.1__HsALB_Pf-CSP(93-397) (opt4)
aggagaaagcuuaccaugaagugggugaccuucaucagccugcuguuccuguucagcagcgccuacagcaagcugaagcagcccgccgacggcaaccccgaccccaacgccaaccccaacguggaccccaacgccaaccccaacguggaccccaacgccaaccccaacguggaccccaacgccaaccccaacgccaaccccaacgccaaccccaacgccaaccccaacgccaaccccaacgccaaccccaacgccaaccccaacgccaaccccaacgccaaccccaacgccaaccccaacgccaaccccaacgccaaccccaacgccaaccccaacgccaaccccaacgccaaccccaacgccaaccccaacgccaaccccaacguggaccccaacgccaaccccaacgccaaccccaacgccaaccccaacgccaaccccaacgccaaccccaacgccaaccccaacgccaaccccaacgccaaccccaacgccaaccccaacgccaaccccaacgccaaccccaacgccaaccccaacgccaaccccaacgccaaccccaacgccaaccccaacgccaaccccaacgccaaccccaacgccaaccccaacaagaacaaccagggcaacggccagggccacaacaugcccaacgaccccaacagaaacguggacgagaacgccaacgccaacagcgccgugaagaacaacaacaacgaggagcccagcgacaagcacaucaaggaguaccugaacaagauccagaacagccugagcaccgaguggagccccugcagcgugaccugcggcaacggcauccaggugagaaucaagcccggcagcgccaacaagcccaaggacgagcuggacuacgccaacgacaucgagaagaagaucugcaagauggagaagugcagcagcguguucaacguggugaacagcagcaucggccugaucauggugcugagcuuccuguuccugaacugaggacuaguuauaagacugacuagcccgaugggccucccaacgggcccuccuccccuccuugcaccgagauuaaucaaaggcucuuuucagagccaccaaaaaaaaaaaaaaaaaaaaaaaaaaaaaaaaaaaaaaaaaaaaaaaaaaaaaaaaaaaaaaaaaaaaaaaaaaaaaaaaaaaaaaaaaaaaaaaaaaaaa

SEQ ID NO: 8647 - RNA, 555 nt, Artificial Sequence
  mRNA Design i-3 (hSL-A100) comprising derived and/or modified sequence from Pf(3D7)__XP_001351122.1__HsALB_Pf-CSP(98-192) (opt4)
aggagaaagcuuaccaugaagugggugaccuucaucagccugcuguuccuguucagcagcgccuacagcgccgacggcaaccccgaccccaacgccaaccccaacguggaccccaacgccaaccccaacguggaccccaacgccaaccccaacguggaccccaacgccaaccccaacgccaaccccaacgccaaccccaacgccaaccccaacgccaaccccaacgccaaccccaacgccaaccccaacgccaaccccaacgccaaccccaacgccaaccccaacgccaaccccaacgccaaccccaacgccaaccccaacgccaaccccaacgccaaccccaacgccaaccccugaggacuaguuauaagacugacuagcccgaugggccucccaacgggcccuccuccccuccuugcaccgagauuaaucaaaggcucuuuucagagccaccaaaaaaaaaaaaaaaaaaaaaaaaaaaaaaaaaaaaaaaaaaaaaaaaaaaaaaaaaaaaaaaaaaaaaaaaaaaaaaaaaaaaaaaaaaaaaaaaaaaaa

SEQ ID NO: 8648 - RNA, 795 nt, Artificial Sequence
  mRNA Design i-3 (hSL-A100) comprising derived and/or modified sequence from Pf(3D7)__XP_001351122.1__HsALB_Pf-CSP(98-272) (opt4)
aggagaaagcuuaccaugaagugggugaccuucaucagccugcuguuccuguucagcagcgccuacagcgccgacggcaaccccgaccccaacgccaaccccaacguggaccccaacgccaaccccaacguggaccccaacgccaaccccaacguggaccccaacgccaaccccaacgccaaccccaacgccaaccccaacgccaaccccaacgccaaccccaacgccaaccccaacgccaaccccaacgccaaccccaacgccaaccccaacgccaaccccaacgccaaccccaacgccaaccccaacgccaaccccaacgccaaccccaacgccaaccccaacgccaaccccaacgccaaccccaacguggaccccaacgccaaccccaacgccaaccccaacgccaaccccaacgccaaccccaacgccaaccccaacgccaaccccaacgccaaccccaacgccaaccccaacgccaaccccaacgccaaccccaacgccaaccccaacgccaaccccaacgccaaccccaacgccaaccccaacgccaaccccaacgccaaccccaacgccaaccccaacgccaaccccugaggacuaguuauaagacugacuagcccgaugggccucccaacgggcccuccuccccuccuugcaccgagauuaaucaaaggcucuuuucagagccaccaaaaaaaaaaaaaaaaaaaaaaaaaaaaaaaaaaaaaaaaaaaaaaaaaaaaaaaaaaaaaaaaaaaaaaaaaaaaaaaaaaaaaaaaaaaaaaaaaaaaa

SEQ ID NO: 8649 - RNA, 1101 nt, Artificial Sequence
  mRNA Design i-3 (hSL-A100) comprising derived and/or modified sequence from Pf(3D7)__XP_001351122.1__HsALB_Pf-CSP(98-374) (opt4)
aggagaaagcuuaccaugaagugggugaccuucaucagccugcuguuccuguucagcagcgccuacagcgccgacggcaaccccgaccccaacgccaaccccaacguggaccccaacgccaaccccaacguggaccccaacgccaaccccaacguggaccccaacgccaaccccaacgccaaccccaacgccaaccccaacgccaaccccaacgccaaccccaacgccaaccccaacgccaaccccaacgccaaccccaacgccaaccccaacgccaaccccaacgccaaccccaacgccaaccccaacgccaaccccaacgccaaccccaacgccaaccccaacgccaaccccaacgccaaccccaacguggaccccaacgccaaccccaacgccaaccccaacgccaaccccaacgccaaccccaacgccaaccccaacgccaaccccaacgccaaccccaacgccaaccccaacgccaaccccaacgccaaccccaacgccaaccccaacgccaaccccaacgccaaccccaacgccaaccccaacgccaaccccaacgccaaccccaacgccaaccccaacgccaaccccaacaagaacaaccagggcaacggccagggccacaacaugcccaacgaccccaacagaaacguggacgagaacgccaacgccaacagcgccgugaagaacaacaacaacgaggagcccagcgacaagcacaucaaggaguaccugaacaagauccagaacagccugagcaccgaguggagccccugcagcgugaccugcggcaacggcauccaggugagaaucaagcccggcagcgccaacaagcccaaggacgagcuggacuacgccaacgacaucgagaagaagaucugcaagauggagaagugcugaggacuaguuauaagacugacuagcccgaugggccucccaacgggcccuccuccccuccuugcaccgagauuaaucaaaggcucuuuucagagccaccaaaaaaaaaaaaaaaaaaaaaaaaaaaaaaaaaaaaaaaaaaaaaaaaaaaaaaaaaaaaaaaaaaaaaaaaaaaaaaaaaaaaaaaaaaaaaaaaaaaaa

SEQ ID NO: 8650 - RNA, 1170 nt, Artificial Sequence
  mRNA Design i-3 (hSL-A100) comprising derived and/or modified sequence from Pf(3D7)__XP_001351122.1__HsALB_Pf-CSP(98-397) (opt4)
aggagaaagcuuaccaugaagugggugaccuucaucagccugcuguuccuguucagcagcgccuacagcgccgacggcaaccccgaccccaacgccaaccccaacguggaccccaacgccaaccccaacguggaccccaacgccaaccccaacguggaccccaacgccaaccccaacgccaaccccaacgccaaccccaacgccaaccccaacgccaaccccaacgccaaccccaacgccaaccccaacgccaaccccaacgccaaccccaacgccaaccccaacgccaaccccaacgccaaccccaacgccaaccccaacgccaaccccaacgccaaccccaacgccaaccccaacgccaaccccaacguggaccccaacgccaaccccaacgccaaccccaacgccaaccccaacgccaaccccaacgccaaccccaacgccaaccccaacgccaaccccaacgccaaccccaacgccaaccccaacgccaaccccaacgccaaccccaacgccaaccccaacgccaaccccaacgccaaccccaacgccaaccccaacgccaaccccaacgccaaccccaacgccaaccccaacaagaacaaccagggcaacggccagggccacaacaugcccaacgaccccaacagaaacguggacgagaacgccaacgccaacagcgccgugaagaacaacaacaacgaggagcccagcgacaagcacaucaaggaguaccugaacaagauccagaacagccugagcaccgaguggagccccugcagcgugaccugcggcaacggcauccaggugagaaucaagcccggcagcgccaacaagcccaaggacgagcuggacuacgccaacgacaucgagaagaagaucugcaagauggagaagugcagcagcguguucaacguggugaacagcagcaucggccugaucauggugcugagcuuccuguuccugaacugaggacuaguuauaagacugacuagcccgaugggccucccaacgggcccuccuccccuccuugcaccgagauuaaucaaaggcucuuuucagagccaccaaaaaaaaaaaaaaaaaaaaaaaaaaaaaaaaaaaaaaaaaaaaaaaaaaaaaaaaaaaaaaaaaaaaaaaaaaaaaaaaaaaaaaaaaaaaaaaaaaaaa

SEQ ID NO: 8651 - RNA, 1497 nt, Artificial Sequence
  mRNA Design i-3 (hSL-A100) comprising derived and/or modified sequence from Pf(3D7)__XP_001351122.1__HsALB_Pf-CSP(199-377)_L(PVTN)_HBsAg (opt4)
aggagaaagcuuaccaugaagugggugaccuucaucagccugcuguuccuguucagcagcgccuacagcgaccccaacgccaaccccaacgccaaccccaacgccaaccccaacgccaaccccaacgccaaccccaacgccaaccccaacgccaaccccaacgccaaccccaacgccaaccccaacgccaaccccaacgccaaccccaacgccaaccccaacgccaaccccaacgccaaccccaacgccaaccccaacgccaaccccaacgccaaccccaacgccaaccccaacaagaacaaccagggcaacggccagggccacaacaugcccaacgaccccaacagaaacguggacgagaacgccaacgccaacagcgccgugaagaacaacaacaacgaggagcccagcgacaagcacaucaaggaguaccugaacaagauccagaacagccugagcaccgaguggagccccugcagcgugaccugcggcaacggcauccaggugagaaucaagcccggcagcgccaacaagcccaaggacgagcuggacuacgccaacgacaucgagaagaagaucugcaagauggagaagugcagcagcgugcccgugaccaacauggagaacaucaccagcggcuuccugggcccccugcuggugcugcaggccggcuucuuccugcugaccagaauccugaccaucccccagagccuggacagcugguggaccagccugaacuuccugggcggcagccccgugugccugggccagaacagccagagccccaccagcaaccacagccccaccagcugcccccccaucugccccggcuacagauggaugugccugagaagauucaucaucuuccuguucauccugcugcugugccugaucuuccugcuggugcugcuggacuaccagggcaugcugcccgugugcccccugauccccggcagcaccaccaccaacaccggccccugcaagaccugcaccacccccgcccagggcaacagcauguuccccagcugcugcugcaccaagcccaccgacggcaacugcaccugcauccccauccccagcagcugggccuucgccaaguaccugugggagugggccagcgugagauucagcuggcugagccugcuggugcccuucgugcagugguucgugggccugagccccaccguguggcugagcgccaucuggaugaugugguacuggggccccagccuguacagcaucgugagccccuucaucccccugcugcccaucuucuucugccuguggguguacaucugaggacuaguuauaagacugacuagcccgaugggccucccaacgggcccuccuccccuccuugcaccgagauuaaucaaaggcucuuuucagagccaccaaaaaaaaaaaaaaaaaaaaaaaaaaaaaaaaaaaaaaaaaaaaaaaaaaaaaaaaaaaaaaaaaaaaaaaaaaaaaaaaaaaaaaaaaaaaaaaaaaaaa

SEQ ID NO: 8652 - RNA, 1407 nt, Artificial Sequence
  mRNA Design i-3 (hSL-A100) comprising derived and/or modified sequence from Pf(3D7)__XP_001351122.1__Pf-CSP (opt5)
aggagaaagcuuaccaugaugagaaagcuggccauccucagcguguccucuuuccuguuugucgaggcucuuuuccaggaauaccaaugcuauggcagcuccucuaacacccggguucugaaugagcucaacuacgacaaugccgggacaaaccuguauaaugaacuugagaugaacuacuauggaaaacaggaaaauugguacagccugaagaaaaacucccgcucucucggcgagaaugaugacgggaacaaugaggauaacgaaaagcugagaaaacccaagcacaagaaacugaagcagccugcggacggaaauccggaucccaacgcuaauccuaacguggaccccaacgccaauccuaacguggaucccaaugccaacccuaaugucgacccgaacgcuaaucccaacgccaauccuaacgcuaaucccaacgccaauccuaacgcgaaucccaacgccaacccgaaugcuaacccuaaugccaaccccaaugcuaacccuaaugccaaccccaaugcgaaccccaaugccaacccuaaugcuaacccgaaugccaaccccaacgcuaauccuaacgccaaucccaacgccaauccuaacguggaucccaaugcuaacccgaaugcgaacccuaaugccaaccccaaugcuaacccuaaugccaaccccaacgccaauccuaacgcuaaucccaacgccaauccgaacgcgaauccuaacgcuaaucccaacgccaaucccaacgccaauccuaacgcuaauccgaacgccaaucccaacgcuaacccuaaugccaaccccaaugcgaacccuaaugccaaccccaauaaaaacaaucagggcaacgggcaaggacauaauaugccuaacgaccccaaucggaacguugaugagaaugcuaacgccaacagcgcugugaagaauaacaauaacgaggaaccguccgacaaacacauuaaggaguaucucaauaagauccagaacagccugucuacggaaugguccccuuguagcgugaccugcggcaauggcauucagguccgcaucaaacccgggucugccaacaagccuaaagaugagcuugacuacgcgaaugacauugaaaagaaaaucuguaagauggagaaaugcuccagcguuuuuaacguggucaauucuuccaucggacugauuauggugcucagcuuccuguuucuuaacugaggacuaguuauaagacugacuagcccgaugggccucccaacgggcccuccuccccuccuugcaccgagauuaaucaaaggcucuuuucagagccaccaaaaaaaaaaaaaaaaaaaaaaaaaaaaaaaaaaaaaaaaaaaaaaaaaaaaaaaaaaaaaaaaaaaaaaaaaaaaaaaaaaaaaaaaaaaaaaaaaaaaa

SEQ ID NO: 8653 - RNA, 1338 nt, Artificial Sequence
  mRNA Design i-3 (hSL-A100) comprising derived and/or modified sequence from Pf(3D7)__XP_001351122.1__Pf-CSP(1-374) (opt5)
aggagaaagcuuaccaugaugagaaagcuggccauccucagcguguccucuuuccuguuugucgaggcucuuuuccaggaauaccaaugcuauggcagcuccucuaacacccggguucugaaugagcucaacuacgacaaugccgggacaaaccuguauaaugaacuugagaugaacuacuauggaaaacaggaaaauugguacagccugaagaaaaacucccgcucucucggcgagaaugaugacgggaacaaugaggauaacgaaaagcugagaaaacccaagcacaagaaacugaagcagccugcggacggaaauccggaucccaacgcuaauccuaacguggaccccaacgccaauccuaacguggaucccaaugccaacccuaaugucgacccgaacgcuaaucccaacgccaauccuaacgcuaaucccaacgccaauccuaacgcgaaucccaacgccaacccgaaugcuaacccuaaugccaaccccaaugcuaacccuaaugccaaccccaaugcgaaccccaaugccaacccuaaugcuaacccgaaugccaaccccaacgcuaauccuaacgccaaucccaacgccaauccuaacguggaucccaaugcuaacccgaaugcgaacccuaaugccaaccccaaugcuaacccuaaugccaaccccaacgccaauccuaacgcuaaucccaacgccaauccgaacgcgaauccuaacgcuaaucccaacgccaaucccaacgccaauccuaacgcuaauccgaacgccaaucccaacgcuaacccuaaugccaaccccaaugcgaacccuaaugccaaccccaauaaaaacaaucagggcaacgggcaaggacauaauaugccuaacgaccccaaucggaacguugaugagaaugcuaacgccaacagcgcugugaagaauaacaauaacgaggaaccguccgacaaacacauuaaggaguaucucaauaagauccagaacagccugucuacggaaugguccccuuguagcgugaccugcggcaauggcauucagguccgcaucaaacccgggucugccaacaagccuaaagaugagcuugacuacgcgaaugacauugaaaagaaaaucuguaagauggagaaaugcugaggacuaguuauaagacugacuagcccgaugggccucccaacgggcccuccuccccuccuugcaccgagauuaaucaaaggcucuuuucagagccaccaaaaaaaaaaaaaaaaaaaaaaaaaaaaaaaaaaaaaaaaaaaaaaaaaaaaaaaaaaaaaaaaaaaaaaaaaaaaaaaaaaaaaaaaaaaaaaaaaaaaa

SEQ ID NO: 8654 - RNA, 1191 nt, Artificial Sequence
  mRNA Design i-3 (hSL-A100) comprising derived and/or modified sequence from Pf(3D7)__XP_001351122.1__Pf-CSP(1-325) (opt5)
aggagaaagcuuaccaugaugagaaagcuggccauccucagcguguccucuuuccuguuugucgaggcucuuuuccaggaauaccaaugcuauggcagcuccucuaacacccggguucugaaugagcucaacuacgacaaugccgggacaaaccuguauaaugaacuugagaugaacuacuauggaaaacaggaaaauugguacagccugaagaaaaacucccgcucucucggcgagaaugaugacgggaacaaugaggauaacgaaaagcugagaaaacccaagcacaagaaacugaagcagccugcggacggaaauccggaucccaacgcuaauccuaacguggaccccaacgccaauccuaacguggaucccaaugccaacccuaaugucgacccgaacgcuaaucccaacgccaauccuaacgcuaaucccaacgccaauccuaacgcgaaucccaacgccaacccgaaugcuaacccuaaugccaaccccaaugcuaacccuaaugccaaccccaaugcgaaccccaaugccaacccuaaugcuaacccgaaugccaaccccaacgcuaauccuaacgccaaucccaacgccaauccuaacguggaucccaaugcuaacccgaaugcgaacccuaaugccaaccccaaugcuaacccuaaugccaaccccaacgccaauccuaacgcuaaucccaacgccaauccgaacgcgaauccuaacgcuaaucccaacgccaaucccaacgccaauccuaacgcuaauccgaacgccaaucccaacgcuaacccuaaugccaaccccaaugcgaacccuaaugccaaccccaauaaaaacaaucagggcaacgggcaaggacauaauaugccuaacgaccccaaucggaacguugaugagaaugcuaacgccaacagcgcugugaagaauaacaauaacgaggaaccguccgacaaacacauuaaggaguaucucaauaagauccagaacugaggacuaguuauaagacugacuagcccgaugggccucccaacgggcccuccuccccuccuugcaccgagauuaaucaaaggcucuuuucagagccaccaaaaaaaaaaaaaaaaaaaaaaaaaaaaaaaaaaaaaaaaaaaaaaaaaaaaaaaaaaaaaaaaaaaaaaaaaaaaaaaaaaaaaaaaaaaaaaaaaaaaa

SEQ ID NO: 8655 - RNA, 1407 nt, Artificial Sequence
  mRNA Design i-3 (hSL-A100) comprising derived and/or modified sequence from Pf(3D7)__XP_001351122.1__HsALB_Pf-CSP(19-397) (opt5)
aggagaaagcuuaccaugaagugggugaccuucaucagccugcucuuucuguucuccucugccuacagccuuuuucaggaguaucaaugcuacggcuccucuagcaacacaagaguccugaaugaacucaacuaugacaaugcugggacgaaccuguacaaugagcuugaaaugaacuauuacggaaaacaggagaauugguauucccugaagaaaaacucucggagccucggcgaaaaugaugacgggaacaaugaggauaacgagaagcugcgcaaacccaagcacaagaaacugaagcagccugccgacggaaauccggaucccaacgcgaauccuaacguugaccccaacgcuaauccuaacguggaucccaaugccaacccuaauguggacccgaacgccaaucccaacgcuaauccuaacgccaaucccaacgcuaauccuaacgccaaucccaacgcgaacccgaaugccaacccuaaugcuaaccccaaugccaacccuaaugcuaaccccaaugccaaccccaaugcgaacccuaaugccaacccgaaugcuaaccccaacgccaauccuaacgcuaaucccaacgccaauccuaacgucgaucccaaugccaacccgaaugcuaacccuaaugcgaaccccaaugccaacccuaaugcuaaccccaacgccaauccuaacgccaaucccaacgcuaauccgaacgccaauccuaacgcgaaucccaacgcuaaucccaacgccaauccuaacgccaauccgaacgcuaaucccaacgccaacccuaaugcuaaccccaaugccaacccuaaugcgaaccccaauaaaaacaaucagggcaacgggcaaggacauaauaugccuaacgaccccaauagaaacguggaugaaaaugccaacgcuaacuccgccguuaagaauaacaauaacgaggaaccgagcgacaaacacauuaaggaguaccucaauaagauccagaacucucuguccaccgaguggagcccuuguucugugacaugcggcaauggcauucagguccggaucaaacccggguccgcuaacaagccuaaagaugaacuugacuacgccaaugacauugagaagaaaaucuguaagauggaaaaaugcagcucuguguucaacguugucaauuccagcaucggacugauuauggugcucuccuuucuguuccuuaacugaggacuaguuauaagacugacuagcccgaugggccucccaacgggcccuccuccccuccuugcaccgagauuaaucaaaggcucuuuucagagccaccaaaaaaaaaaaaaaaaaaaaaaaaaaaaaaaaaaaaaaaaaaaaaaaaaaaaaaaaaaaaaaaaaaaaaaaaaaaaaaaaaaaaaaaaaaaaaaaaaaaaa

SEQ ID NO: 8656 - RNA, 1425 nt, Artificial Sequence
  mRNA Design i-3 (hSL-A100) comprising derived and/or modified sequence from Pf(3D7)__XP_001351122.1__HsIns-iso1_Pf-CSP(19-397) (opt5)
aggagaaagcuuaccauggcccuguggaugagacuccugccccuucuggcucuccuggcccuuuggggcccugacccggcggcugcccuguuccaggaguaccaaugcuaugggagcuccucuaacacccgggugcucaaugaacugaacuacgauaaugccggaacaaaccuguauaaugagcucgaaaugaacuacuauggcaagcaggagaauugguacagccugaaaaagaacucccgcucucuuggggaaaaugacgauggaaacaaugaggacaacgagaaacugagaaagcccaaacacaagaagcucaaacagccugcugauggcaaucccgacccuaacgccaaucccaacgucgauccuaacgcuaauccgaacguugaccccaaugccaacccuaauguggaucccaacgcgaauccuaacgccaaucccaacgcuaauccgaacgccaauccuaacgcuaaucccaacgccaacccuaaugcgaaccccaaugccaaccccaaugcuaacccuaaugccaacccgaaugcuaaccccaaugccaacccuaaugccaaccccaaugcuaacccuaacgcgaaucccaacgccaauccgaacgcuaauccuaacguggaccccaaugccaacccuaaugccaaccccaaugcuaacccuaaugccaaccccaaugcgaacccgaacgcuaauccuaacgccaaucccaacgccaaucccaacgcuaauccuaacgccaauccgaacgcuaaucccaacgccaauccuaacgcgaaucccaacgccaauccuaacgcuaaccccaaugccaacccuaaugcuaaccccaaugccaacccgaauaagaacaaucaggggaacggacaaggccauaauaugccuaacgaucccaaucggaacgucgacgaaaaugcgaacgccaacagcgcugugaaaaauaacaauaacgaggaaccuuccgauaagcacaucaaagaguaucugaauaagauucagaacucucuuagcacggaguggucccccuguagcguuaccugcggcaaugggauccaggugcgcauuaagccgggaucugccaacaaaccuaaggacgaacuggacuacgcuaaugauaucgagaaaaagauuuguaaaauggaaaagugcuccagcgucuuuaacgugguuaauucuuccaucggccucaucauggugcugagcuuccuguuucucaacugaggacuaguuauaagacugacuagcccgaugggccucccaacgggcccuccuccccuccuugcaccgagauuaaucaaaggcucuuuucagagccaccaaaaaaaaaaaaaaaaaaaaaaaaaaaaaaaaaaaaaaaaaaaaaaaaaaaaaaaaaaaaaaaaaaaaaaaaaaaaaaaaaaaaaaaaaaaaaaaaaaaaa

SEQ ID NO: 8657 - RNA, 1404 nt, Artificial Sequence
  mRNA Design i-3 (hSL-A100) comprising derived and/or modified sequence from Pf(3D7)__XP_001351122.1__HsSPARC_Pf-CSP(19-397) (opt5)
aggagaaagcuuaccaugagagccuggaucuucuuucugcucugccuggcuggccgggcccuugcgcuguuccaggaguaccaauguuaugggagcuccucuaacacccgcgugcucaaugaacugaacuacgacaaugcuggaacaaaccuuuauaaugagcuggaaaugaacuacuauggcaagcaggagaauugguacagccucaaaaagaacuccagaucucugggggaaaaugaugacggaaacaaugaggauaacgagaaacugcggaagcccaaacacaagaagcucaaacagccugccgacggcaauccggaucccaacgccaauccuaacgucgaccccaacgcuaauccuaacguugaucccaaugccaacccuaauguggacccgaacgcuaaucccaacgccaauccuaacgcgaaucccaacgccaauccuaacgcuaaucccaacgccaacccgaaugcuaacccuaaugccaaccccaaugcgaacccuaaugccaaccccaaugcuaaccccaaugccaacccuaaugcuaacccgaaugccaaccccaacgccaauccuaacgcuaaucccaacgcgaauccuaacguggaucccaaugccaacccgaaugcuaacccuaaugccaaccccaaugccaacccuaaugcuaaccccaacgccaauccuaacgcgaaucccaacgcuaauccgaacgccaauccuaacgccaaucccaacgcuaaucccaacgccaauccuaacgcuaauccgaacgccaaucccaacgcgaacccuaaugccaaccccaaugcuaacccuaaugccaaccccaauaagaacaaucaggggaacggacaaggccauaauaugccuaacgaccccaaucgcaacgucgaugaaaaugcuaacgccaacagcgcggugaaaaauaacaauaacgaggaaccguccgacaagcacauuaaagaguaucugaauaagauccagaacucucuuagcacggagugguccccuugcagcguuaccuguggcaaugggauucaggugagaaucaagcccggaucugccaacaaaccuaaggaugaacuggacuacgcuaaugacauugagaaaaagaucugcaaaauggaaaaguguuccagcgucuuuaacgugguuaauucuuccaucggccucauuauggugcugagcuuccuuuuucugaacugaggacuaguuauaagacugacuagcccgaugggccucccaacgggcccuccuccccuccuugcaccgagauuaaucaaaggcucuuuucagagccaccaaaaaaaaaaaaaaaaaaaaaaaaaaaaaaaaaaaaaaaaaaaaaaaaaaaaaaaaaaaaaaaaaaaaaaaaaaaaaaaaaaaaaaaaaaaaaaaaaaaaa

SEQ ID NO: 8658 - RNA, 1407 nt, Artificial Sequence
  mRNA Design i-3 (hSL-A100) comprising derived and/or modified sequence from Pf(3D7)__XP_001351122.1__IgE_Pf-CSP(19-397) (opt5)
aggagaaagcuuaccauggacuggaccuggauccuguuccucguggccgcugccacaagaguccacagccuguuucaggaguaccaaugcuauggcuccucuagcaacacgcggguucuuaaugaacugaacuacgauaaugcggggaccaaccucuauaaugagcuggaaaugaacuacuauggaaagcaggagaauugguacucccuuaaaaagaacucucgcagccugggcgaaaaugacgaugggaacaaugaggacaacgagaaacucagaaagcccaaacauaagaagcugaaacagccugcugauggaaauccggaccccaacgccaauccuaacguggaucccaacgccaauccuaacguggaccccaaugcuaacccuaaugucgauccgaacgccaaucccaacgcuaauccuaacgccaaucccaacgcgaauccuaacgccaaucccaacgcuaacccgaaugccaacccuaaugcuaaccccaaugccaacccuaaugcgaaccccaaugccaaccccaaugcuaacccuaaugccaacccgaaugcuaaccccaacgccaauccuaacgccaaucccaacgcuaauccuaacguggaccccaaugcgaacccgaaugccaacccuaaugcuaaccccaaugccaacccuaaugccaaccccaacgcuaauccuaacgccaaucccaacgcgaauccgaacgcuaauccuaacgccaaucccaacgccaaucccaacgcuaauccuaacgccaauccgaacgcuaaucccaacgccaacccuaaugcgaaccccaaugccaacccuaaugcuaaccccaauaagaacaaucagggcaacgggcaaggacacaauaugccuaacgaucccaaucggaacguugacgaaaaugccaacgcuaacuccgccgugaaaaauaacaauaacgaggaaccgucugauaagcauauuaaagaguaucugaauaagauccagaacagccucuccacagaguggagcccuuguucugugaccugcggcaauggcauucagguccgcaucaagcccggguccgcgaacaaaccuaaggacgaacuggacuacgccaaugauauugagaaaaagaucuguaaaauggaaaagugcagcucuguuuucaacguggucaauuccagcaucggacuuauuauggugcugucuuuucucuuccugaacugaggacuaguuauaagacugacuagcccgaugggccucccaacgggcccuccuccccuccuugcaccgagauuaaucaaaggcucuuuucagagccaccaaaaaaaaaaaaaaaaaaaaaaaaaaaaaaaaaaaaaaaaaaaaaaaaaaaaaaaaaaaaaaaaaaaaaaaaaaaaaaaaaaaaaaaaaaaaaaaaaaaaa

SEQ ID NO: 8659 - RNA, 1572 nt, Artificial Sequence
  mRNA Design i-3 (hSL-A100) comprising derived and/or modified sequence from Pf(3D7)__XP_001351122.1__Pf-CSP_L(G4SG4)_TM domain HA (opt5)
aggagaaagcuuaccaugaugagaaagcuggccauccucagcguguccucuuuccuguuugucgaggcucuuuuccaggaauaccaaugcuauggcagcuccucuaacacccggguucugaaugagcucaacuacgacaaugccgggacaaaccuguauaaugaacuugagaugaacuacuauggaaaacaggaaaauugguacagccugaagaaaaacucccgcucucucggcgagaaugaugacgggaacaaugaggauaacgaaaagcugagaaaacccaagcacaagaaacugaagcagccugcggacggaaauccggaucccaacgcuaauccuaacguggaccccaacgccaauccuaacguggaucccaaugccaacccuaaugucgacccgaacgcuaaucccaacgccaauccuaacgcuaaucccaacgccaauccuaacgcgaaucccaacgccaacccgaaugcuaacccuaaugccaaccccaaugcuaacccuaaugccaaccccaaugcgaaccccaaugccaacccuaaugcuaacccgaaugccaaccccaacgcuaauccuaacgccaaucccaacgccaauccuaacguggaucccaaugcuaacccgaaugcgaacccuaaugccaaccccaaugcuaacccuaaugccaaccccaacgccaauccuaacgcuaaucccaacgccaauccgaacgcgaauccuaacgcuaaucccaacgccaaucccaacgccaauccuaacgcuaauccgaacgccaaucccaacgcuaacccuaaugccaaccccaaugcgaacccuaaugccaaccccaauaaaaacaaucagggcaacgggcaaggacauaauaugccuaacgaccccaaucggaacguugaugagaaugcuaacgccaacagcgcugugaagaauaacaauaacgaggaaccguccgacaaacacauuaaggaguaucucaauaagauccagaacagccugucuacggaaugguccccuuguagcgugaccugcggcaauggcauucagguccgcaucaaacccgggucugccaacaagccuaaagaugagcuugacuacgcgaaugacauugaaaagaaaaucuguaagauggagaaaugcuccagcguuuuuaacguggucaauucuuccaucggacugauuauggugcucagcuuccuguuucuuaacggcgggggaggcuccgggggaggcggcaagcuggaaucuacaagaaucuaccagauucucgccaucuauagcaccguggcuuccagccugguccugguugugucucucggggccauuuccuucuggauguguagcaauggaucucugcaaugccggaucuguauuugaggacuaguuauaagacugacuagcccgaugggccucccaacgggcccuccuccccuccuugcaccgagauuaaucaaaggcucuuuucagagccaccaaaaaaaaaaaaaaaaaaaaaaaaaaaaaaaaaaaaaaaaaaaaaaaaaaaaaaaaaaaaaaaaaaaaaaaaaaaaaaaaaaaaaaaaaaaaaaaaaaaaa

SEQ ID NO: 8660 - RNA, 1446 nt, Artificial Sequence
  mRNA Design i-3 (hSL-A100) comprising derived and/or modified sequence from Pf(3D7)__XP_001351122.1__Pf-CSP(199-377)_L(PVTN)_HBsAg (opt5)
aggagaaagcuuaccauggaccccaacgccaauccuaacgcuaauccgaacgccaaucccaacgcgaauccuaacgcuaaucccaacgccaauccuaacgccaaucccaacgcuaauccuaacgccaacccgaaugcuaaccccaaugccaacccuaaugcgaaccccaaugccaacccuaaugcuaaccccaaugccaacccgaaugcuaacccuaaugccaaccccaacgcgaauccuaacaagaauaaccagggcaaugggcaaggacacaacaugcccaaugaucccaacagaaauguggacgagaacgccaaugcuaacagcgccgucaaaaauaacaauaacgaggaaccuuccgauaagcauaucaaagaauaccugaacaagauucaaaauucucucagcaccgagugguccccgugcucuguuacauguggcaacgggauccaggugcggauuaaacccggaagcgcuaauaagccuaaggacgaacuggauuaugccaacgacaucgagaaaaagauuugcaaaauggagaaguguuccucugugcccgucacgaauauggaaaacaucaccagcggcuuccuugggccucugcucgugcugcaggccggauuuuuccuucugacacgcauccucaccauuccccagucccuggauagcugguggacaucucugaauuuucucggcggcuccccgguuugccuggggcagaacagccagucuccuaccuccaaucacagccccacaucuuguccucccaucugcccuggauacagauggaugugucuucggcgcuucauuaucuuucuguucauucuccugcuuugccugaucuuucuccuggugcugcucgacuaucagggcaugcugcccgucuguccgcuuauuccuggguccaccacgaccaacacaggacccugcaaaaccuguacaacccccgcucaaggcaauagcauguucccuuccugcugcuguacgaagccgacagaugggaacugcaccuguauccccaucccuucuagcugggcguuugccaaguaccugugggagugggcuuccgugagauucagcuggcucucucugcuuguucccuuugugcagugguucgucggacuguccccuacaguguggcucagcgccauuuggaugaugugguauuggggccccucucuguacagcaucguguccccuuuuauuccccugcucccgaucuucuucugccugugggucuauauuugaggacuaguuauaagacugacuagcccgaugggccucccaacgggcccuccuccccuccuugcaccgagauuaaucaaaggcucuuuucagagccaccaaaaaaaaaaaaaaaaaaaaaaaaaaaaaaaaaaaaaaaaaaaaaaaaaaaaaaaaaaaaaaaaaaaaaaaaaaaaaaaaaaaaaaaaaaaaaaaaaaaaa

SEQ ID NO: 8661 - RNA, 1488 nt, Artificial Sequence
  mRNA Design i-3 (hSL-A100) comprising derived and/or modified sequence from Pf(3D7)__XP_001351122.1__Pf-CSP(199-387)_L(PVTN)_HBsAg (opt5)
aggagaaagcuuaccaugauggcccccgacccuaacgcuaauccgaacgccaaucccaacgcgaauccuaacgcuaaucccaacgccaauccuaacgccaaucccaacgcuaauccuaacgccaauccgaacgcuaaccccaaugccaacccuaaugcgaaccccaaugccaacccuaaugcuaaccccaaugccaacccgaaugcuaacccuaaugccaaccccaaugcgaacccuaacgccaaucccaacaagaauaaccagggcaaugggcaaggacacaacaugcccaaugauccuaacagaaauguggacgagaacgcuaaugccaacagcgcugucaaaaauaacaauaacgaggaaccguccgauaagcauaucaaagaauaccugaacaagauucaaaauucucucagcaccgaguggucccccugcucuguuacauguggcaacgggauccaggugcggauuaaaccuggaagcgccaauaagcccaaggacgaacuggauuaugccaacgacaucgagaaaaagauuugcaaaauggagaaguguuccucuguguucaaugucgugaacagcuccaucggccuugggccuguuacgaauauggaaaacaucaccagcggauuucugggcccccuccuggugcuucaggcuggcuucuuucugcucacacgcauucugaccaucccgcagucucuggauuccugguggacaagccucaauuuccuugggggaucuccugucugccugggccagaacucccagagccccaccucuaaucacuccccuacaagcugucccccuauuugccccggguacagauggaugugucugcggcgcuuuaucauuuuccucuuuauccugcuucugugccucauuuuccugcuggugcuccuggacuaucagggaaugcuuccgguuuguccucugauccccggcuccaccacgaccaacacagggcccugcaaaaccuguacaaccccugcgcaaggaaauucuauguuuccgagcugcugcuguacgaagcccacagauggcaacugcaccuguaucccuauucccuccagcugggccuucgcuaaguaccucugggagugggccucugugagauuuuccuggcugagccuucuggucccuuucgugcagugguuugugggccucucucccacagucuggcugagcgccaucuggaugaugugguauugggggccuucccuguacucuauuguuagccccuucaucccgcuccugccuauuuucuuuugccuuuggguguauaucugaggacuaguuauaagacugacuagcccgaugggccucccaacgggcccuccuccccuccuugcaccgagauuaaucaaaggcucuuuucagagccaccaaaaaaaaaaaaaaaaaaaaaaaaaaaaaaaaaaaaaaaaaaaaaaaaaaaaaaaaaaaaaaaaaaaaaaaaaaaaaaaaaaaaaaaaaaaaaaaaaaaaa

SEQ ID NO: 8662 - RNA, 672 nt, Artificial Sequence
  mRNA Design i-3 (hSL-A100) comprising derived and/or modified sequence from Pf(3D7)__XP_001351122.1__HsALB_Pf-CSP(19-152) (opt5)
aggagaaagcuuaccaugaagugggugaccuucaucagccugcucuuucuguucuccucugccuacagccuuuuucaggaguaucaaugcuacggcuccucuagcaacacaagaguccugaaugaacucaacuaugacaaugcugggacgaaccuguacaaugagcuugaaaugaacuauuacggaaaacaggagaauugguauucccugaagaaaaacucucggagccucggcgaaaaugaugacgggaacaaugaggauaacgagaagcugcgcaaacccaagcacaagaaacugaagcagccugccgacggaaauccggaucccaacgcgaauccuaacguugaccccaacgcuaauccuaacguggaucccaaugccaacccuaauguggacccgaacgccaaucccaacgcuaauccuaacgccaaucccaacgcuaauccuaacgccaaucccaacgcgaacccgugaggacuaguuauaagacugacuagcccgaugggccucccaacgggcccuccuccccuccuugcaccgagauuaaucaaaggcucuuuucagagccaccaaaaaaaaaaaaaaaaaaaaaaaaaaaaaaaaaaaaaaaaaaaaaaaaaaaaaaaaaaaaaaaaaaaaaaaaaaaaaaaaaaaaaaaaaaaaaaaaaaaaa

SEQ ID NO: 8663 - RNA, 792 nt, Artificial Sequence
  mRNA Design i-3 (hSL-A100) comprising derived and/or modified sequence from Pf(3D7)__XP_001351122.1__HsALB_Pf-CSP(19-192) (opt5)
aggagaaagcuuaccaugaagugggugaccuucaucagccugcucuuucuguucuccucugccuacagccuuuuucaggaguaucaaugcuacggcuccucuagcaacacaagaguccugaaugaacucaacuaugacaaugcugggacgaaccuguacaaugagcuugaaaugaacuauuacggaaaacaggagaauugguauucccugaagaaaaacucucggagccucggcgaaaaugaugacgggaacaaugaggauaacgagaagcugcgcaaacccaagcacaagaaacugaagcagccugccgacggaaauccggaucccaacgcgaauccuaacguugaccccaacgcuaauccuaacguggaucccaaugccaacccuaauguggacccgaacgccaaucccaacgcuaauccuaacgccaaucccaacgcuaauccuaacgccaaucccaacgcgaacccgaaugccaacccuaaugcuaaccccaaugccaacccuaaugcuaaccccaaugccaaccccaaugcgaacccuaaugccaacccgaaugcuaaccccaacgccaauccuaacgcuaaucccugaggacuaguuauaagacugacuagcccgaugggccucccaacgggcccuccuccccuccuugcaccgagauuaaucaaaggcucuuuucagagccaccaaaaaaaaaaaaaaaaaaaaaaaaaaaaaaaaaaaaaaaaaaaaaaaaaaaaaaaaaaaaaaaaaaaaaaaaaaaaaaaaaaaaaaaaaaaaaaaaaaaaa

SEQ ID NO: 8664 - RNA, 1032 nt, Artificial Sequence
  mRNA Design i-3 (hSL-A100) comprising derived and/or modified sequence from Pf(3D7)__XP_001351122.1__HsALB_Pf-CSP(19-272) (opt5)
aggagaaagcuuaccaugaagugggugaccuucaucagccugcucuuucuguucuccucugccuacagccuuuuucaggaguaucaaugcuacggcuccucuagcaacacaagaguccugaaugaacucaacuaugacaaugcugggacgaaccuguacaaugagcuugaaaugaacuauuacggaaaacaggagaauugguauucccugaagaaaaacucucggagccucggcgaaaaugaugacgggaacaaugaggauaacgagaagcugcgcaaacccaagcacaagaaacugaagcagccugccgacggaaauccggaucccaacgcgaauccuaacguugaccccaacgcuaauccuaacguggaucccaaugccaacccuaauguggacccgaacgccaaucccaacgcuaauccuaacgccaaucccaacgcuaauccuaacgccaaucccaacgcgaacccgaaugccaacccuaaugcuaaccccaaugccaacccuaaugcuaaccccaaugccaaccccaaugcgaacccuaaugccaacccgaaugcuaaccccaacgccaauccuaacgcuaaucccaacgccaauccuaacgucgaucccaaugccaacccgaaugcuaacccuaaugcgaaccccaaugccaacccuaaugcuaaccccaacgccaauccuaacgccaaucccaacgcuaauccgaacgccaauccuaacgcgaaucccaacgcuaaucccaacgccaauccuaacgccaauccgaacgcuaaucccaacgccaacccuaaugcuaaccccaaugccaacccuaaugcgaaccccugaggacuaguuauaagacugacuagcccgaugggccucccaacgggcccuccuccccuccuugcaccgagauuaaucaaaggcucuuuucagagccaccaaaaaaaaaaaaaaaaaaaaaaaaaaaaaaaaaaaaaaaaaaaaaaaaaaaaaaaaaaaaaaaaaaaaaaaaaaaaaaaaaaaaaaaaaaaaaaaaaaaaa

SEQ ID NO: 8665 - RNA, 1194 nt, Artificial Sequence
  mRNA Design i-3 (hSL-A100) comprising derived and/or modified sequence from Pf(3D7)__XP_001351122.1__HsALB_Pf-CSP(19-272)_L(AAY)_Pf-CSP(310-3 27)_L(AAY)_Pf-CSP(346-375) (opt5)
aggagaaagcuuaccaugaagugggugaccuucaucagccugcucuuucuguucuccucugccuacagccuuuuucaggaguaucaaugcuacggcuccucuagcaacacaagaguccugaaugaacucaacuaugacaaugcugggacgaaccuguacaaugagcuugaaaugaacuauuacggaaaacaggagaauugguauucccugaagaaaaacucucggagccucggcgaaaaugaugacgggaacaaugaggauaacgagaagcugcgcaaacccaagcacaagaaacugaagcagccugccgacggaaauccggaucccaacgcgaauccuaacguugaccccaacgcuaauccuaacguggaucccaaugccaacccuaauguggacccgaacgccaaucccaacgcuaauccuaacgccaaucccaacgcuaauccuaacgccaaucccaacgcgaacccgaaugccaacccuaaugcuaaccccaaugccaacccuaaugcuaaccccaaugccaaccccaaugcgaacccuaaugccaacccgaaugcuaaccccaacgccaauccuaacgcuaaucccaacgccaauccuaacgucgaucccaaugccaacccgaaugcuaacccuaaugcgaaccccaaugccaacccuaaugcuaaccccaacgccaauccuaacgccaaucccaacgcuaauccgaacgccaauccuaacgcgaaucccaacgcuaaucccaacgccaauccuaacgccaauccgaacgcuaaucccaacgccaacccuaaugcuaaccccaaugccaacccuaaugcgaaccccgccgcuuacgaaccuuccgacaaacauauuaaggaguaccucaauaaaauccagaacagccuggccgcuuauauuaagcccggcucugccaauaagccgaaagaugaacuugacuacgcgaacgauaucgagaagaaaauuuguaagauggagaaaugcuccugaggacuaguuauaagacugacuagcccgaugggccucccaacgggcccuccuccccuccuugcaccgagauuaaucaaaggcucuuuucagagccaccaaaaaaaaaaaaaaaaaaaaaaaaaaaaaaaaaaaaaaaaaaaaaaaaaaaaaaaaaaaaaaaaaaaaaaaaaaaaaaaaaaaaaaaaaaaaaaaaaaaaa

SEQ ID NO: 8666 - RNA, 1155 nt, Artificial Sequence
  mRNA Design i-3 (hSL-A100) comprising derived and/or modified sequence from Pf(3D7)__XP_001351122.1__HsALB_Pf-CSP(19-272)_L(AAY)_Pf-CSP(346-3 65)_L(AAY)_P2 (opt5)
aggagaaagcuuaccaugaagugggugaccuucaucagccugcucuuucuguucuccucugccuacagccuuuuucaggaguaucaaugcuacggcuccucuagcaacacaagaguccugaaugaacucaacuaugacaaugcugggacgaaccuguacaaugagcuugaaaugaacuauuacggaaaacaggagaauugguauucccugaagaaaaacucucggagccucggcgaaaaugaugacgggaacaaugaggauaacgagaagcugcgcaaacccaagcacaagaaacugaagcagccugccgacggaaauccggaucccaacgcgaauccuaacguugaccccaacgcuaauccuaacguggaucccaaugccaacccuaauguggacccgaacgccaaucccaacgcuaauccuaacgccaaucccaacgcuaauccuaacgccaaucccaacgcgaacccgaaugccaacccuaaugcuaaccccaaugccaacccuaaugcuaaccccaaugccaaccccaaugcgaacccuaaugccaacccgaaugcuaaccccaacgccaauccuaacgcuaaucccaacgccaauccuaacgucgaucccaaugccaacccgaaugcuaacccuaaugcgaaccccaaugccaacccuaaugcuaaccccaacgccaauccuaacgccaaucccaacgcuaauccgaacgccaauccuaacgcgaaucccaacgcuaaucccaacgccaauccuaacgccaauccgaacgcuaaucccaacgccaacccuaaugcuaaccccaaugccaacccuaaugcgaaccccgccgcuuacauuaaaccuggcuccgccaauaagcccaaagacgaacucgauuacgcuaacgacaucgaggccgcguaucaguacauuaaggccaauagcaaguucaucgggauuaccgaacugugaggacuaguuauaagacugacuagcccgaugggccucccaacgggcccuccuccccuccuugcaccgagauuaaucaaaggcucuuuucagagccaccaaaaaaaaaaaaaaaaaaaaaaaaaaaaaaaaaaaaaaaaaaaaaaaaaaaaaaaaaaaaaaaaaaaaaaaaaaaaaaaaaaaaaaaaaaaaaaaaaaaaa

SEQ ID NO: 8667 - RNA, 1149 nt, Artificial Sequence
  mRNA Design i-3 (hSL-A100) comprising derived and/or modified sequence from Pf(3D7)__XP_001351122.1__HsALB_Pf-CSP(19-272)_L(AAY)_Pf-CSP(346-3 65)_L(AAY)_PADRE (opt5)
aggagaaagcuuaccaugaagugggugaccuucaucagccugcucuuucuguucuccucugccuacagccuuuuucaggaguaucaaugcuacggcuccucuagcaacacaagaguccugaaugaacucaacuaugacaaugcugggacgaaccuguacaaugagcuugaaaugaacuauuacggaaaacaggagaauugguauucccugaagaaaaacucucggagccucggcgaaaaugaugacgggaacaaugaggauaacgagaagcugcgcaaacccaagcacaagaaacugaagcagccugccgacggaaauccggaucccaacgcgaauccuaacguugaccccaacgcuaauccuaacguggaucccaaugccaacccuaauguggacccgaacgccaaucccaacgcuaauccuaacgccaaucccaacgcuaauccuaacgccaaucccaacgcgaacccgaaugccaacccuaaugcuaaccccaaugccaacccuaaugcuaaccccaaugccaaccccaaugcgaacccuaaugccaacccgaaugcuaaccccaacgccaauccuaacgcuaaucccaacgccaauccuaacgucgaucccaaugccaacccgaaugcuaacccuaaugcgaaccccaaugccaacccuaaugcuaaccccaacgccaauccuaacgccaaucccaacgcuaauccgaacgccaauccuaacgcgaaucccaacgcuaaucccaacgccaauccuaacgccaauccgaacgcuaaucccaacgccaacccuaaugcuaaccccaaugccaacccuaaugcgaaccccgccgcuuacauuaaaccuggcuccgccaauaagcccaaagacgaacucgauuacgcuaacgacaucgaggccgcguaugccaaguucguggcugccuggacccugaaggcugccgccugaggacuaguuauaagacugacuagcccgaugggccucccaacgggcccuccuccccuccuugcaccgagauuaaucaaaggcucuuuucagagccaccaaaaaaaaaaaaaaaaaaaaaaaaaaaaaaaaaaaaaaaaaaaaaaaaaaaaaaaaaaaaaaaaaaaaaaaaaaaaaaaaaaaaaaaaaaaaaaaaaaaaa

SEQ ID NO: 8668 - RNA, 1206 nt, Artificial Sequence
  mRNA Design i-3 (hSL-A100) comprising derived and/or modified sequence from Pf(3D7)__XP_001351122.1__HsALB_Pf-CSP(19-272)_L(G4S)_Pf-CSP(310-3 27)_L(G4S)_Pf-CSP(346-375) (opt5)
aggagaaagcuuaccaugaagugggugaccuucaucagccugcucuuucuguucuccucugccuacagccuuuuucaggaguaucaaugcuacggcuccucuagcaacacaagaguccugaaugaacucaacuaugacaaugcugggacgaaccuguacaaugagcuugaaaugaacuauuacggaaaacaggagaauugguauucccugaagaaaaacucucggagccucggcgaaaaugaugacgggaacaaugaggauaacgagaagcugcgcaaacccaagcacaagaaacugaagcagccugccgacggaaauccggaucccaacgcgaauccuaacguugaccccaacgcuaauccuaacguggaucccaaugccaacccuaauguggacccgaacgccaaucccaacgcuaauccuaacgccaaucccaacgcuaauccuaacgccaaucccaacgcgaacccgaaugccaacccuaaugcuaaccccaaugccaacccuaaugcuaaccccaaugccaaccccaaugcgaacccuaaugccaacccgaaugcuaaccccaacgccaauccuaacgcuaaucccaacgccaauccuaacgucgaucccaaugccaacccgaaugcuaacccuaaugcgaaccccaaugccaacccuaaugcuaaccccaacgccaauccuaacgccaaucccaacgcuaauccgaacgccaauccuaacgcgaaucccaacgcuaaucccaacgccaauccuaacgccaauccgaacgcuaaucccaacgccaacccuaaugcuaaccccaaugccaacccuaaugcgaaccccggcgggggaggcuccgaaccuagcgacaaacauauuaaggaguaccucaauaaaauccagaacucucugggcgggggaggcuccauuaagcccgggagcgccaauaagccgaaagaugaacuugacuacgcuaacgauaucgagaagaaaauuuguaagauggagaaaugcucuugaggacuaguuauaagacugacuagcccgaugggccucccaacgggcccuccuccccuccuugcaccgagauuaaucaaaggcucuuuucagagccaccaaaaaaaaaaaaaaaaaaaaaaaaaaaaaaaaaaaaaaaaaaaaaaaaaaaaaaaaaaaaaaaaaaaaaaaaaaaaaaaaaaaaaaaaaaaaaaaaaaaaa

SEQ ID NO: 8669 - RNA, 1191 nt, Artificial Sequence
  mRNA Design i-3 (hSL-A100) comprising derived and/or modified sequence from Pf(3D7)__XP_001351122.1__HsALB_Pf-CSP(19-272)_L(G4S)_Pf-CSP(310-3 27)_Pf-CSP(346-375) (opt5)
aggagaaagcuuaccaugaagugggugaccuucaucagccugcucuuucuguucuccucugccuacagccuuuuucaggaguaucaaugcuacggcuccucuagcaacacaagaguccugaaugaacucaacuaugacaaugcugggacgaaccuguacaaugagcuugaaaugaacuauuacggaaaacaggagaauugguauucccugaagaaaaacucucggagccucggcgaaaaugaugacgggaacaaugaggauaacgagaagcugcgcaaacccaagcacaagaaacugaagcagccugccgacggaaauccggaucccaacgcgaauccuaacguugaccccaacgcuaauccuaacguggaucccaaugccaacccuaauguggacccgaacgccaaucccaacgcuaauccuaacgccaaucccaacgcuaauccuaacgccaaucccaacgcgaacccgaaugccaacccuaaugcuaaccccaaugccaacccuaaugcuaaccccaaugccaaccccaaugcgaacccuaaugccaacccgaaugcuaaccccaacgccaauccuaacgcuaaucccaacgccaauccuaacgucgaucccaaugccaacccgaaugcuaacccuaaugcgaaccccaaugccaacccuaaugcuaaccccaacgccaauccuaacgccaaucccaacgcuaauccgaacgccaauccuaacgcgaaucccaacgcuaaucccaacgccaauccuaacgccaauccgaacgcuaaucccaacgccaacccuaaugcuaaccccaaugccaacccuaaugcgaaccccggcgggggaggcuccgaaccuagcgacaaacauauuaaggaguaccucaauaaaauccagaacucucugauuaagcccggcuccgccaauaagccgaaagaugaacuugacuacgcuaacgauaucgagaagaaaauuuguaagauggagaaaugcagcugaggacuaguuauaagacugacuagcccgaugggccucccaacgggcccuccuccccuccuugcaccgagauuaaucaaaggcucuuuucagagccaccaaaaaaaaaaaaaaaaaaaaaaaaaaaaaaaaaaaaaaaaaaaaaaaaaaaaaaaaaaaaaaaaaaaaaaaaaaaaaaaaaaaaaaaaaaaaaaaaaaaaa

SEQ ID NO: 8670 - RNA, 1191 nt, Artificial Sequence
  mRNA Design i-3 (hSL-A100) comprising derived and/or modified sequence from Pf(3D7)__XP_001351122.1__HsALB_Pf-CSP(19-325) (opt5)
aggagaaagcuuaccaugaagugggugaccuucaucagccugcucuuucuguucuccucugccuacagccuuuuucaggaguaucaaugcuacggcuccucuagcaacacaagaguccugaaugaacucaacuaugacaaugcugggacgaaccuguacaaugagcuugaaaugaacuauuacggaaaacaggagaauugguauucccugaagaaaaacucucggagccucggcgaaaaugaugacgggaacaaugaggauaacgagaagcugcgcaaacccaagcacaagaaacugaagcagccugccgacggaaauccggaucccaacgcgaauccuaacguugaccccaacgcuaauccuaacguggaucccaaugccaacccuaauguggacccgaacgccaaucccaacgcuaauccuaacgccaaucccaacgcuaauccuaacgccaaucccaacgcgaacccgaaugccaacccuaaugcuaaccccaaugccaacccuaaugcuaaccccaaugccaaccccaaugcgaacccuaaugccaacccgaaugcuaaccccaacgccaauccuaacgcuaaucccaacgccaauccuaacgucgaucccaaugccaacccgaaugcuaacccuaaugcgaaccccaaugccaacccuaaugcuaaccccaacgccaauccuaacgccaaucccaacgcuaauccgaacgccaauccuaacgcgaaucccaacgcuaaucccaacgccaauccuaacgccaauccgaacgcuaaucccaacgccaacccuaaugcuaaccccaaugccaacccuaaugcgaaccccaauaaaaacaaucagggcaacgggcaaggacauaauaugccuaacgaccccaauagaaacguggaugaaaaugccaacgcuaacuccgccguuaagaauaacaauaacgaggaaccgagcgacaaacacauuaaggaguaccucaauaagauccagaacugaggacuaguuauaagacugacuagcccgaugggccucccaacgggcccuccuccccuccuugcaccgagauuaaucaaaggcucuuuucagagccaccaaaaaaaaaaaaaaaaaaaaaaaaaaaaaaaaaaaaaaaaaaaaaaaaaaaaaaaaaaaaaaaaaaaaaaaaaaaaaaaaaaaaaaaaaaaaaaaaaaaaa

SEQ ID NO: 8671 - RNA, 1368 nt, Artificial Sequence
  mRNA Design i-3 (hSL-A100) comprising derived and/or modified sequence from Pf(3D7)__XP_001351122.1__HsALB_Pf-CSP(19-384) (opt5)
aggagaaagcuuaccaugaagugggugaccuucaucagccugcucuuucuguucuccucugccuacagccuuuuucaggaguaucaaugcuacggcuccucuagcaacacaagagugcugaaugaacucaacuaugacaaugcugggacgaaccuguacaaugagcuugaaaugaacuauuacggaaaacaggagaauugguauucccugaagaaaaacucucggagccucggcgaaaaugaugacgggaacaaugaggauaacgagaagcugcgcaaacccaagcacaagaaacugaagcagccugccgacggaaauccggaucccaacgcgaauccuaacguugaccccaacgcuaauccuaacguggaucccaaugccaacccuaauguggacccgaacgccaaucccaacgcuaauccuaacgccaaucccaacgcuaauccuaacgccaaucccaacgcgaacccgaaugccaacccuaaugcuaaccccaaugccaacccuaaugcuaaccccaaugccaaccccaaugcgaacccuaaugccaacccgaaugcuaaccccaacgccaauccuaacgcuaaucccaacgccaauccuaacgucgaucccaaugccaacccgaaugcuaacccuaaugcgaaccccaaugccaacccuaaugcuaaccccaacgccaauccuaacgccaaucccaacgcuaauccgaacgccaauccuaacgcgaaucccaacgcuaaucccaacgccaauccuaacgccaauccgaacgcuaaucccaacgccaacccuaaugcuaaccccaaugccaacccuaaugcgaaccccaauaaaaacaaucagggcaacgggcaaggacauaauaugccuaacgaccccaauagaaacguggaugaaaaugccaacgcuaacuccgccguuaagaauaacaauaacgaggaaccgagcgacaaacacauuaaggaguaccucaauaagauccagaacucucuguccaccgaguggagcccuuguucugugacaugcggcaauggcauucagguccggaucaaacccggguccgcuaacaagccuaaagaugaacuugacuacgccaaugacauugagaagaaaaucuguaagauggaaaaaugcagcucuguguucaacguugucaauuccagcugaggacuaguuauaagacugacuagcccgaugggccucccaacgggcccuccuccccuccuugcaccgagauuaaucaaaggcucuuuucagagccaccaaaaaaaaaaaaaaaaaaaaaaaaaaaaaaaaaaaaaaaaaaaaaaaaaaaaaaaaaaaaaaaaaaaaaaaaaaaaaaaaaaaaaaaaaaaaaaaaaaaaa

SEQ ID NO: 8672 - RNA, 1506 nt, Artificial Sequence
  mRNA Design i-3 (hSL-A100) comprising derived and/or modified sequence from Pf(3D7)__XP_001351122.1__HsALB_Pf-CSP(19-384)_TM domain HA (opt5)
aggagaaagcuuaccaugaagugggugaccuucaucagccugcucuuucuguucuccucugccuacagccuuuuucaggaguaucaaugcuacggcuccucuagcaacacaagaguccugaaugaacucaacuaugacaaugcugggacgaaccuguacaaugagcuugaaaugaacuauuacggaaaacaggagaauugguauucccugaagaaaaacucucggagccucggcgaaaaugaugacgggaacaaugaggauaacgagaagcugcgcaaacccaagcacaagaaacugaagcagccugccgacggaaauccggaucccaacgcgaauccuaacguugaccccaacgcuaauccuaacguggaucccaaugccaacccuaauguggacccgaacgccaaucccaacgcuaauccuaacgccaaucccaacgcuaauccuaacgccaaucccaacgcgaacccgaaugccaacccuaaugcuaaccccaaugccaacccuaaugcuaaccccaaugccaaccccaaugcgaacccuaaugccaacccgaaugcuaaccccaacgccaauccuaacgcuaaucccaacgccaauccuaacgucgaucccaaugccaacccgaaugcuaacccuaaugcgaaccccaaugccaacccuaaugcuaaccccaacgccaauccuaacgccaaucccaacgcuaauccgaacgccaauccuaacgcgaaucccaacgcuaaucccaacgccaauccuaacgccaauccgaacgcuaaucccaacgccaacccuaaugcuaaccccaaugccaacccuaaugcgaaccccaauaaaaacaaucagggcaacgggcaaggacauaauaugccuaacgaccccaauagaaacguggaugaaaaugccaacgcuaacuccgccguuaagaauaacaauaacgaggaaccgagcgacaaacacauuaaggaguaccucaauaagauccagaacucucuguccaccgaguggagcccuuguucugugacaugcggcaauggcauucagguccggaucaaacccggguccgcuaacaagccuaaagaugaacuugacuacgccaaugacauugagaagaaaaucuguaagauggaaaaaugcagcucuguguucaacguugucaauuccagcaagcuggaguccacccgcaucuaucagauucucgcgaucuacucuacaguggccagcucccuggugcuuguggucagccugggagcuauuucuuuuuggauguguuccaacggcagccuccaaugcagaaucuguauuugaggacuaguuauaagacugacuagcccgaugggccucccaacgggcccuccuccccuccuugcaccgagauuaaucaaaggcucuuuucagagccaccaaaaaaaaaaaaaaaaaaaaaaaaaaaaaaaaaaaaaaaaaaaaaaaaaaaaaaaaaaaaaaaaaaaaaaaaaaaaaaaaaaaaaaaaaaaaaaaaaaaaa

SEQ ID NO: 8673 - RNA, 1218 nt, Artificial Sequence
  mRNA Design i-3 (hSL-A100) comprising derived and/or modified sequence from Pf(3D7)__XP_001351122.1__HsALB_Pf-CSP(82-397) (opt5)
aggagaaagcuuaccaugaagugggugaccuucaucagccugcucuuucuguucuccucugccuacagcgacaacgagaaacuuagaaagcccaaacacaagaaacugaagcagccugcugauggcaauccggaccccaacgccaauccuaacgucgaucccaaugcgaacccuaauguugaccccaacgcuaauccuaacguggauccgaaugccaaccccaaugccaacccuaaugcuaaccccaacgccaauccuaacgcuaaucccaacgccaauccgaacgcgaauccuaacgccaaucccaacgcuaauccuaacgccaaucccaacgcuaaucccaacgccaacccuaaugcgaacccgaaugccaaccccaaugcuaacccuaaugccaaccccaaugcuaacccuaauguggaccccaacgccaauccgaacgccaauccuaacgcuaaccccaaugcgaacccuaaugccaaccccaaugcuaacccuaaugccaaccccaaugccaacccgaaugcuaacccuaaugccaaccccaaugcgaaccccaacgcuaauccuaacgccaauccgaacgccaaucccaacgcuaauccuaacgccaaucccaacgcuaauccuaacgccaaucccaacaagaauaaccaagggaauggacagggccauaacaugccuaacgaucccaaucggaacgucgacgaaaaugcgaacgccaauuccgcugugaaaaacaauaacaaugaggaaccgucugauaagcacauuaaagaguaucucaacaagauccagaauagccuguccacagaauggucuccuugcagcguuacgugugggaacggcauucaggugcgcaucaaacccggauccgccaauaagccuaaggacgagcuugauuacgcuaacgacauugagaaaaagaucugcaaaauggaaaaguguagcucugucuuuaaugugguuaacuccagcaucgggcugauuauggugcucucuuuccuguuucugaacugaggacuaguuauaagacugacuagcccgaugggccucccaacgggcccuccuccccuccuugcaccgagauuaaucaaaggcucuuuucagagccaccaaaaaaaaaaaaaaaaaaaaaaaaaaaaaaaaaaaaaaaaaaaaaaaaaaaaaaaaaaaaaaaaaaaaaaaaaaaaaaaaaaaaaaaaaaaaaaaaaaaaa

SEQ ID NO: 8674 - RNA, 570 nt, Artificial Sequence
  mRNA Design i-3 (hSL-A100) comprising derived and/or modified sequence from Pf(3D7)__XP_001351122.1__HsALB_Pf-CSP(93-192) (opt5)
aggagaaagcuuaccaugaagugggugaccuucaucagccugcucuuucuguucuccucugccuacagcaaacuuaagcagcccgcugacggcaacccugauccgaaugccaaccccaaugucgacccuaacgcgaaucccaacguugauccuaaugcuaaccccaauguggacccuaacgccaauccgaacgccaaucccaacgcuaauccuaacgccaaccccaaugcuaacccuaaugccaaccccaaugcgaacccgaaugccaacccuaaugcuaaccccaaugccaacccuaaugcuaaccccaaugccaaccccaacgcgaauccuaacgccaauccgaacgcuaaucccaacgccaauccuugaggacuaguuauaagacugacuagcccgaugggccucccaacgggcccuccuccccuccuugcaccgagauuaaucaaaggcucuuuucagagccaccaaaaaaaaaaaaaaaaaaaaaaaaaaaaaaaaaaaaaaaaaaaaaaaaaaaaaaaaaaaaaaaaaaaaaaaaaaaaaaaaaaaaaaaaaaaaaaaaaaaaa

SEQ ID NO: 8675 - RNA, 810 nt, Artificial Sequence
  mRNA Design i-3 (hSL-A100) comprising derived and/or modified sequence from Pf(3D7)__XP_001351122.1__HsALB_Pf-CSP(93-272) (opt5)
aggagaaagcuuaccaugaagugggugaccuucaucagccugcucuuucuguucuccucugccuacagcaaacuuaagcagcccgcugacggcaacccugauccgaaugccaaccccaaugucgacccuaacgcgaaucccaacguugauccuaaugcuaaccccaauguggacccuaacgccaauccgaacgccaaucccaacgcuaauccuaacgccaaccccaaugcuaacccuaaugccaaccccaaugcgaacccgaaugccaacccuaaugcuaaccccaaugccaacccuaaugcuaaccccaaugccaaccccaacgcgaauccuaacgccaauccgaacgcuaaucccaacgccaauccuaacgcuaaucccaacguggauccuaaugccaaccccaaugccaacccgaaugcuaacccuaacgcgaaucccaacgccaauccuaacgcuaaucccaacgccaauccuaacgccaaucccaacgcuaauccgaacgccaauccuaacgcgaaucccaacgcuaaccccaaugccaacccuaaugccaacccgaaugcuaaccccaaugccaacccuaaugcuaaccccaaugccaacccuugaggacuaguuauaagacugacuagcccgaugggccucccaacgggcccuccuccccuccuugcaccgagauuaaucaaaggcucuuuucagagccaccaaaaaaaaaaaaaaaaaaaaaaaaaaaaaaaaaaaaaaaaaaaaaaaaaaaaaaaaaaaaaaaaaaaaaaaaaaaaaaaaaaaaaaaaaaaaaaaaaaaaa

SEQ ID NO: 8676 - RNA, 1185 nt, Artificial Sequence
  mRNA Design i-3 (hSL-A100) comprising derived and/or modified sequence from Pf(3D7)__XP_001351122.1__HsALB_Pf-CSP(93-397) (opt5)
aggagaaagcuuaccaugaagugggugaccuucaucagccugcucuuucuguucuccucugccuacagcaaacuuaagcagcccgcugacggcaacccugauccgaaugccaaccccaaugucgacccuaacgcgaaucccaacguugauccuaaugcuaaccccaauguggacccuaacgccaauccgaacgccaaucccaacgcuaauccuaacgccaaccccaaugcuaacccuaaugccaaccccaaugcgaacccgaaugccaacccuaaugcuaaccccaaugccaacccuaaugcuaaccccaaugccaaccccaacgcgaauccuaacgccaauccgaacgcuaaucccaacgccaauccuaacgcuaaucccaacguggauccuaaugccaaccccaaugccaacccgaaugcuaacccuaacgcgaaucccaacgccaauccuaacgcuaaucccaacgccaauccuaacgccaaucccaacgcuaauccgaacgccaauccuaacgcgaaucccaacgcuaaccccaaugccaacccuaaugccaacccgaaugcuaaccccaaugccaacccuaaugcuaaccccaaugccaacccuaauaaaaacaaucaagggaacggacagggccacaauaugcccaacgacccuaacagaaaugucgaugagaacgcgaaugccaacuccgcugugaagaauaacaauaacgaggaacccucugacaaacauauuaaggaauaucugaauaagauccagaacagccucuccacagaguggucuccgugcagcguuacgugugggaauggcauucaggugcggaucaaaccuggauccgccaacaagcccaaagaugaacuggacuacgcuaaugauauugagaagaaaaucugcaagauggagaaguguagcucugucuuuaacgugguuaauuccagcaucgggcuuauuauggugcugucuuuccucuuucugaacugaggacuaguuauaagacugacuagcccgaugggccucccaacgggcccuccuccccuccuugcaccgagauuaaucaaaggcucuuuucagagccaccaaaaaaaaaaaaaaaaaaaaaaaaaaaaaaaaaaaaaaaaaaaaaaaaaaaaaaaaaaaaaaaaaaaaaaaaaaaaaaaaaaaaaaaaaaaaaaaaaaaaa

SEQ ID NO: 8677 - RNA, 555 nt, Artificial Sequence
  mRNA Design i-3 (hSL-A100) comprising derived and/or modified sequence from Pf(3D7)__XP_001351122.1__HsALB_Pf-CSP(98-192) (opt5)
aggagaaagcuuaccaugaagugggugaccuucaucagccugcucuuucuguucuccucugccuacagcgcugacggcaaccccgauccuaaugccaacccgaaugucgaccccaacgcgaauccuaacguugaucccaaugcuaacccuaauguggaccccaacgccaauccuaacgccaauccgaacgcuaaucccaacgccaacccuaaugcuaaccccaaugccaacccuaaugcgaaccccaaugccaacccgaaugcuaacccuaaugccaaccccaaugcuaacccuaaugccaaccccaacgcgaaucccaacgccaauccuaacgcuaauccgaacgccaaucccugaggacuaguuauaagacugacuagcccgaugggccucccaacgggcccuccuccccuccuugcaccgagauuaaucaaaggcucuuuucagagccaccaaaaaaaaaaaaaaaaaaaaaaaaaaaaaaaaaaaaaaaaaaaaaaaaaaaaaaaaaaaaaaaaaaaaaaaaaaaaaaaaaaaaaaaaaaaaaaaaaaaaa

SEQ ID NO: 8678 - RNA, 795 nt, Artificial Sequence
  mRNA Design i-3 (hSL-A100) comprising derived and/or modified sequence from Pf(3D7)__XP_001351122.1__HsALB_Pf-CSP(98-272) (opt5)
aggagaaagcuuaccaugaagugggugaccuucaucagccugcucuuucuguucuccucugccuacagcgcugacggcaaccccgauccuaaugccaacccgaaugucgaccccaacgcgaauccuaacguugaucccaaugcuaacccuaauguggaccccaacgccaauccuaacgccaauccgaacgcuaaucccaacgccaacccuaaugcuaaccccaaugccaacccuaaugcgaaccccaaugccaacccgaaugcuaacccuaaugccaaccccaaugcuaacccuaaugccaaccccaacgcgaaucccaacgccaauccuaacgcuaauccgaacgccaaucccaacgcuaauccuaacguggaucccaaugccaacccuaaugccaaccccaaugcuaacccgaacgcgaauccuaacgccaaucccaacgcuaauccuaacgccaaucccaacgccaauccuaacgcuaaucccaacgccaauccgaacgcgaauccuaacgcuaaccccaaugccaaccccaaugccaacccuaaugcuaacccgaaugccaaccccaaugcuaacccuaaugccaaccccugaggacuaguuauaagacugacuagcccgaugggccucccaacgggcccuccuccccuccuugcaccgagauuaaucaaaggcucuuuucagagccaccaaaaaaaaaaaaaaaaaaaaaaaaaaaaaaaaaaaaaaaaaaaaaaaaaaaaaaaaaaaaaaaaaaaaaaaaaaaaaaaaaaaaaaaaaaaaaaaaaaaaa

SEQ ID NO: 8679 - RNA, 1101 nt, Artificial Sequence
  mRNA Design i-3 (hSL-A100) comprising derived and/or modified sequence from Pf(3D7)__XP_001351122.1__HsALB_Pf-CSP(98-374) (opt5)
aggagaaagcuuaccaugaagugggugaccuucaucagccugcucuuucuguucuccucugccuacagcgcugacggcaaccccgauccuaaugccaacccgaaugucgaccccaacgcgaauccuaacguugaucccaaugcuaacccuaauguggaccccaacgccaauccuaacgccaauccgaacgcuaaucccaacgccaacccuaaugcuaaccccaaugccaacccuaaugcgaaccccaaugccaacccgaaugcuaacccuaaugccaaccccaaugcuaacccuaaugccaaccccaacgcgaaucccaacgccaauccuaacgcuaauccgaacgccaaucccaacgcuaauccuaacguggaucccaaugccaacccuaaugccaaccccaaugcuaacccgaacgcgaauccuaacgccaaucccaacgcuaauccuaacgccaaucccaacgccaauccuaacgcuaaucccaacgccaauccgaacgcgaauccuaacgcuaaccccaaugccaaccccaaugccaacccuaaugcuaacccgaaugccaaccccaaugcuaacccuaaugccaaccccaauaaaaacaaucaggggaacggacaaggccacaauaugccuaacgaccccaacagaaaugucgaugagaacgcgaaugccaacuccgcugugaagaauaacaauaacgaggaaccuucugacaaacauauuaaggaauaucuuaauaaaauccagaacagccuguccacagaguggucucccugcagcguuacgugugggaauggcauucaggugcggaucaagccgggauccgccaacaagccuaaagaugaacucgacuacgcuaaugauauugagaagaaaaucugcaagauggagaaauguugaggacuaguuauaagacugacuagcccgaugggccucccaacgggcccuccuccccuccuugcaccgagauuaaucaaaggcucuuuucagagccaccaaaaaaaaaaaaaaaaaaaaaaaaaaaaaaaaaaaaaaaaaaaaaaaaaaaaaaaaaaaaaaaaaaaaaaaaaaaaaaaaaaaaaaaaaaaaaaaaaaaaa

SEQ ID NO: 8680 - RNA, 1170 nt, Artificial Sequence
  mRNA Design i-3 (hSL-A100) comprising derived and/or modified sequence from Pf(3D7)__XP_001351122.1__HsALB_Pf-CSP(98-397) (opt5)
aggagaaagcuuaccaugaagugggugaccuucaucagccugcucuuucuguucuccucugccuacagcgcugacggcaaccccgauccuaaugccaacccgaaugucgaccccaacgcgaauccuaacguugaucccaaugcuaacccuaauguggaccccaacgccaauccuaacgccaauccgaacgcuaaucccaacgccaacccuaaugcuaaccccaaugccaacccuaaugcgaaccccaaugccaacccgaaugcuaacccuaaugccaaccccaaugcuaacccuaaugccaaccccaacgcgaaucccaacgccaauccuaacgcuaauccgaacgccaaucccaacgcuaauccuaacguggaucccaaugccaacccuaaugccaaccccaaugcuaacccgaacgcgaauccuaacgccaaucccaacgcuaauccuaacgccaaucccaacgccaauccuaacgcuaaucccaacgccaauccgaacgcgaauccuaacgcuaaccccaaugccaaccccaaugccaacccuaaugcuaacccgaaugccaaccccaaugcuaacccuaaugccaaccccaauaaaaacaaucaggggaacggacaaggccacaauaugccuaacgaccccaacagaaaugucgaugagaacgcgaaugccaacuccgcugugaagaauaacaauaacgaggaaccuucugacaaacauauuaaggaauaucuuaauaaaauccagaacagccuguccacagaguggucucccugcagcguuacgugugggaauggcauucaggugcggaucaagccgggauccgccaacaagccuaaagaugaacucgacuacgcuaaugauauugagaagaaaaucugcaagauggagaaauguagcucugucuuuaacgugguuaauuccagcaucgggcugauuauggugcuuucuuuccuguuucucaacugaggacuaguuauaagacugacuagcccgaugggccucccaacgggcccuccuccccuccuugcaccgagauuaaucaaaggcucuuuucagagccaccaaaaaaaaaaaaaaaaaaaaaaaaaaaaaaaaaaaaaaaaaaaaaaaaaaaaaaaaaaaaaaaaaaaaaaaaaaaaaaaaaaaaaaaaaaaaaaaaaaaaa

SEQ ID NO: 8681 - RNA, 1497 nt, Artificial Sequence
  mRNA Design i-3 (hSL-A100) comprising derived and/or modified sequence from Pf(3D7)__XP_001351122.1__HsALB_Pf-CSP(199-377)_L(PVTN)_HBsAg (opt5)
aggagaaagcuuaccaugaagugggugaccuucaucagccugcucuuucuguucuccucugccuacagcgaccccaacgcuaauccuaacgccaauccgaacgcgaaucccaacgcuaauccuaacgccaaucccaacgccaauccuaacgcuaaucccaacgccaauccuaacgcuaacccgaaugccaaccccaaugcgaacccuaaugccaaccccaaugcuaacccuaaugccaaccccaaugcuaacccgaaugccaacccuaaugcgaaccccaacgccaauccuaacaaaaauaaccagggcaaugggcaaggacacaacaugcccaaugaucccaacagaaaugucgacgagaacgcuaaugccaacuccgcuguuaagaauaacaauaacgaggaaccuucugauaaacauauuaaggaauaucuuaacaaaauccagaauagccuguccacagaguggucuccgugcagcgugacguguggcaacgggauucaggugcggaucaagcccggauccgccaauaagccuaaagacgaacucgauuacgccaacgacauugagaagaaaaucugcaagauggagaaauguagcucuguccccgugaccaauauggaaaacaucacauccggcuuucuggggccucuucugguucuccaggcuggauucuuucugcugacccgcauucucacaaucccccaaagccuggauucuugguggaccucccuuaauuuccugggcggcagcccggugugccucgggcagaacucucaguccccuacaagcaaucacucccccaccucuuguccucccauuugcccuggauauagauggaugugucugcggcgcuuuaucauuuuccuuuuuauccugcuccugugccugauuuuccuccugguccuucuggacuaccagggcaugcuccccguguguccgcugaucccugggagcacgaccacaaacaccggacccugcaagacauguaccacgcccgcgcaaggcaauuccauguuuccuagcugcugcuguacaaagccgaccgaugggaacugcacauguauccccauuccuucuuccugggccuucgcuaaauaucuuugggagugggccagcguuagauuuucuuggcugagccuccuggugcccuucguccagugguucgugggacuguccccuaccguguggcucucugccaucuggaugaugugguacuggggccccagccuguauuccauugucagcccuuuuaucccccuucugccgauuuucuuuugccucuggguuuacaucugaggacuaguuauaagacugacuagcccgaugggccucccaacgggcccuccuccccuccuugcaccgagauuaaucaaaggcucuuuucagagccaccaaaaaaaaaaaaaaaaaaaaaaaaaaaaaaaaaaaaaaaaaaaaaaaaaaaaaaaaaaaaaaaaaaaaaaaaaaaaaaaaaaaaaaaaaaaaaaaaaaaaa

SEQ ID NO: 8682 - RNA, 1407 nt, Artificial Sequence
  mRNA Design i-3 (hSL-A100) comprising derived and/or modified sequence from Pf(3D7)__XP_001351122.1__Pf-CSP (opt6)
aggagaaagcuuaccaugaugagaaaacuugcaauacuaagcguaucuucauuccuauucguagaagcacuauuccaagaauaucaaugcuauggaucaagcuccaacacaagaguacuuaacgaacuaaauuacgacaaugcaggaacaaaccuauacaaugaacuugaaaugaauuacuacggcaaacaagaaaacugguacucccuaaaaaaaaacucaaggucauuaggagaaaacgacgacggaaacaacgaagacaacgaaaaacuacgaaaacccaaacacaaaaaauuaaaacaaccagcagacggaaaccccgacccaaacgcaaacccaaacgucgacccaaacgcaaacccgaacguagacccaaacgcgaacccaaacguagacccaaacgcaaacccaaacgcaaacccaaacgcaaacccaaacgcaaacccaaaugcaaacccaaacgcaaacccaaacgccaauccaaacgccaacccaaacgcaaacccaaacgcaaacccaaacgcaaacccaaacgcaaaccccaacgcaaacccaaacgcuaacccaaacgcaaacccuaaugcaaacccuaacgcaaacccaaacgucgacccgaacgcaaacccaaaugcaaacccaaacgcaaacccaaacgcaaaccccaacgccaacccaaaugcaaacccaaaugcaaauccaaacgcaaacccaaacgcaaacccuaacgcaaacccaaacgcaaaccccaacgcaaacccaaacgcaaacccaaacgccaacccaaacgcaaaccccaaugcaaacccaaacgcaaacccaaacgcaaacccaaacaaaaacaaucaaggcaacggacaaggacacaacaugcccaacgacccaaaccgaaacgucgacgaaaacgccaacgcaaacagcgcaguaaaaaacaacaacaacgaagaacccucagacaaacacauaaaagaauacuuaaacaaaauacaaaacucacuaucuacagaauggucacccuguagcguaaccugcggcaacggaauacaaguaagaauaaaaccaggcucagcaaacaaaccaaaagaugaacuagacuacgccaaugauauagaaaaaaaaauauguaaaauggaaaaauguagcucagucuucaacguagucaacucaucaauaggacuaauaaugguacucuccuuccucuuccuaaauuaaggacuaguuauaagacugacuagcccgaugggccucccaacgggcccuccuccccuccuugcaccgagauuaaucaaaggcucuuuucagagccaccaaaaaaaaaaaaaaaaaaaaaaaaaaaaaaaaaaaaaaaaaaaaaaaaaaaaaaaaaaaaaaaaaaaaaaaaaaaaaaaaaaaaaaaaaaaaaaaaaaaaa

SEQ ID NO: 8683 - RNA, 1338 nt, Artificial Sequence
  mRNA Design i-3 (hSL-A100) comprising derived and/or modified sequence from Pf(3D7)__XP_001351122.1__Pf-CSP(1-374) (opt6)
aggagaaagcuuaccaugaugagaaaacuagcaauauuaagcguaagcucauuccuauucguugaagcauuauuccaagaauaccaaugcuacggcucaagcucaaacacaagaguauuaaacgaauuaaacuacgacaaugcaggaaccaaccucuacaacgaacuagaaaugaauuauuacggcaaacaagaaaacugguacucacucaaaaaaaacucacgaucccuaggagaaaacgaugacggaaacaaugaagauaacgaaaaauuaagaaaaccaaaacacaaaaaauuaaaacaaccugcagacggaaacccagacccaaacgcaaauccaaauguagacccaaacgcaaaccccaacguagacccaaaugcaaacccaaacguagacccaaacgcaaacccaaaugcaaacccaaacgcaaacccaaacgcaaacccaaacgcaaaccccaacgcaaacccaaacgcaaacccaaacgccaaccccaacgcaaacccaaacgcaaacccgaaugcaaacccaaacgcaaacccaaacgcaaacccaaacgcaaacccaaacgcaaacccaaacgcaaacccaaaugcaaacccaaacguggauccaaacgcaaauccaaacgcaaacccaaacgcaaacccaaacgcaaaccccaacgcaaauccaaacgcaaaccccaaugcaaauccaaacgcaaacccaaacgccaacccaaacgcaaacccgaacgccaauccaaacgcaaacccaaacgcaaacccaaacgcaaacccaaacgccaacccaaacgcaaacccaaacgcaaacccaaacgcaaaccccaacaaaaacaaccaaggaaacggacaaggacacaacaugccaaacgauccaaacagaaacgucgacgaaaacgccaacgcuaacagcgcaguaaaaaacaauaacaacgaagaaccaucagacaaacauauaaaagaauacuuaaacaaaauccaaaacucacuaucaacagaauggucccccuguuccguaacaugcggaaacggaauacaaguacgaaucaaaccaggaucagccaacaaaccgaaagacgaacuagacuaugccaacgauauagaaaaaaaaauaugcaaaauggaaaaaugcugaggacuaguuauaagacugacuagcccgaugggccucccaacgggcccuccuccccuccuugcaccgagauuaaucaaaggcucuuuucagagccaccaaaaaaaaaaaaaaaaaaaaaaaaaaaaaaaaaaaaaaaaaaaaaaaaaaaaaaaaaaaaaaaaaaaaaaaaaaaaaaaaaaaaaaaaaaaaaaaaaaaaa

SEQ ID NO: 8684 - RNA, 1191 nt, Artificial Sequence
  mRNA Design i-3 (hSL-A100) comprising derived and/or modified sequence from Pf(3D7)__XP_001351122.1__Pf-CSP(1-325) (opt6)
aggagaaagcuuaccaugaugcgaaaauuagcaauacuaagcguaagcucauucuuauucguagaagcacucuuccaagaauaccaaugcuacggaucaagcucaaacacaagaguccuaaacgaauuaaacuaugacaacgcaggaacaaaccuauacaacgaacuagaaaugaacuacuacggaaaacaagaaaacugguacucacucaaaaaaaacagcagaagucuaggagaaaacgacgacggaaacaacgaagacaacgaaaaacuacgaaaaccaaaacacaaaaaacuaaaacaaccagcagacgggaacccagacccaaacgcaaacccaaacguagauccaaacgcaaacccaaauguagacccuaacgcaaacccaaauguagacccaaacgcaaacccuaacgcaaacccaaaugcaaacccaaacgcaaauccaaacgcaaacccaaacgcaaacccaaacgcgaacccaaacgcaaacccaaacgcaaacccaaaugcaaaccccaacgcaaauccaaaugcaaacccaaaugcaaauccaaacgcaaacccaaacgcaaacccaaaugcaaauccaaacgcaaauccaaacguggauccaaacgcaaacccaaacgcaaacccaaacgcaaacccaaacgcaaacccaaacgcaaacccaaacgcaaauccaaacgccaauccaaacgcaaauccaaaugcaaacccaaacgcaaacccaaacgcaaacccaaacgcaaacccaaacgcaaacccaaacgcaaacccaaacgcaaacccaaacgcaaacccaaacgcaaacccaaacgcaaacccaaacaaaaacaaccaaggaaacggacaaggacacaacaugccaaacgacccaaacagaaacguagacgaaaacgccaacgcaaauagcgcagucaaaaacaacaauaacgaagaaccaucggacaaacacauaaaagaauacuuaaacaaaauacaaaacugaggacuaguuauaagacugacuagcccgaugggccucccaacgggcccuccuccccuccuugcaccgagauuaaucaaaggcucuuuucagagccaccaaaaaaaaaaaaaaaaaaaaaaaaaaaaaaaaaaaaaaaaaaaaaaaaaaaaaaaaaaaaaaaaaaaaaaaaaaaaaaaaaaaaaaaaaaaaaaaaaaaaa

SEQ ID NO: 8685 - RNA, 1407 nt, Artificial Sequence
  mRNA Design i-3 (hSL-A100) comprising derived and/or modified sequence from Pf(3D7)__XP_001351122.1__HsALB_Pf-CSP(19-397) (opt6)
aggagaaagcuuaccaugaaaugggucacauuuauuucacuacuauucuuauucucaagcgcauacucacuauuucaagaauaccaaugcuacggcucauccucaaauacacgaguacuaaaugaacucaacuacgacaacgcaggaaccaaucucuacaacgaauuagaaaugaacuacuacggcaaacaagaaaacugguauucacuaaaaaaaaacaguagaucacuaggagaaaaugacgacggaaacaaugaagacaacgaaaaacuaagaaaaccaaaacacaaaaaauuaaaacaaccagcagacggaaacccagacccaaacgcaaacccuaacguagaucccaaugccaacccaaauguagacccaaacgcaaaccccaacgucgauccaaacgcaaacccaaacgcaaacccaaacgcaaacccaaacgcaaacccaaacgcaaacccaaaugcaaaccccaacgcaaacccaaacgcuaacccaaacgcaaacccaaacgcaaacccaaacgcaaacccaaacgcaaacccaaacgccaacccaaacgccaacccaaacgcaaauccaaacgcaaacccaaaugccaauccaaacguugacccaaacgcaaacccaaacgcaaaccccaacgcaaacccaaacgcaaauccaaacgcgaaccccaacgcaaacccaaacgcaaacccaaaugcaaacccaaacgcuaacccaaaugcaaacccaaacgccaacccaaacgccaacccaaacgcaaaccccaacgcaaacccaaacgcaaacccaaacgccaauccaaacgcaaacccaaaugcaaacccaaacaaaaacaaccaaggaaacggacaaggacacaacaugccaaacgaccccaacagaaacguagaugaaaaugcaaaugcuaacucagccguaaaaaacaauaacaacgaagaaccaucagacaaacacauaaaagaauaccuaaauaaaauacaaaauuccuuaucaacagaaugguccccaugcucaguaacuugcgguaacggcauacaaguaagaauaaaaccaggaucagcaaacaaaccaaaagacgaauuagacuaugcaaacgacauagaaaaaaaaauauguaaaauggaaaaaugcagcucaguauucaacguaguaaauuccucaaucggacucaucaugguauuaucauuccuauuuuuaaauuaaggacuaguuauaagacugacuagcccgaugggccucccaacgggcccuccuccccuccuugcaccgagauuaaucaaaggcucuuuucagagccaccaaaaaaaaaaaaaaaaaaaaaaaaaaaaaaaaaaaaaaaaaaaaaaaaaaaaaaaaaaaaaaaaaaaaaaaaaaaaaaaaaaaaaaaaaaaaaaaaaaaaa

SEQ ID NO: 8686 - RNA, 1425 nt, Artificial Sequence
  mRNA Design i-3 (hSL-A100) comprising derived and/or modified sequence from Pf(3D7)__XP_001351122.1__HsIns-iso1_Pf-CSP(19-397) (opt6)
aggagaaagcuuaccauggcacuauggaugagacuacuaccacuacuagcacuccuagccuuauggggacccgauccagccgcagcacucuuccaagaauaccaaugcuauggaucauccuccaacacaagaguccuaaacgaauuaaauuacgacaacgcuggaacaaaccuauacaaugaacuagaaaugaauuauuacggaaaacaagaaaauugguacucacuaaaaaaaaacucuagaagccuaggagaaaacgacgacggaaacaacgaagauaacgaaaaacuaagaaaaccaaaacacaaaaaauuaaaacaacccgcagacggcaacccagacccaaaugcaaauccaaacguagacccaaacgcaaauccaaacguagacccaaacgcaaacccaaauguagacccaaacgcaaauccaaacgcaaacccaaaugcaaacccaaaugcaaacccaaacgcaaauccaaacgcaaaucccaacgccaacccaaacgcaaacccaaacgcaaauccaaacgcaaacccaaacgcaaacccaaacgcaaacccaaacgcaaacccaaaugcaaacccaaaugccaauccaaacgccaacccaaacgcaaacccaaacguagacccaaacgcaaacccaaacgccaacccaaacgcaaaccccaaugcaaacccaaacgcaaacccaaacgcaaaccccaacgcaaauccaaacgcaaacccaaacgcaaauccaaacgcaaauccaaacgccaacccaaacgcaaacccaaacgcaaauccaaacgcaaaccccaacgcaaacccaaacgccaacccaaaugcaaacccaaacgcaaaucccaauaaaaacaaccaaggaaacggacaaggacacaacaugccaaacgauccaaacagaaacguagacgaaaacgcaaacgcaaacucagcagucaaaaacaauaacaacgaagaaccaucagacaaacacauaaaagaauaccuaaacaaaauacaaaacucacuauccacagaauggucaccaugcucaguaaccugcggaaacggaauacaaguaagaauaaaaccaggaucagccaacaaaccaaaagacgaacuagacuaugcuaaugacauagaaaaaaaaauaugcaaaauggaaaaaugcuccucaguauucaacgucguaaacucuucaauaggacuaauaaugguacuauccuucuuauuucuaaacuaaggacuaguuauaagacugacuagcccgaugggccucccaacgggcccuccuccccuccuugcaccgagauuaaucaaaggcucuuuucagagccaccaaaaaaaaaaaaaaaaaaaaaaaaaaaaaaaaaaaaaaaaaaaaaaaaaaaaaaaaaaaaaaaaaaaaaaaaaaaaaaaaaaaaaaaaaaaaaaaaaaaaa

SEQ ID NO: 8687 - RNA, 1404 nt, Artificial Sequence
  mRNA Design i-3 (hSL-A100) comprising derived and/or modified sequence from Pf(3D7)__XP_001351122.1__HsSPARC_Pf-CSP(19-397) (opt6)
aggagaaagcuuaccaugcgcgcauggauauucuuccuccuaugucuagcaggucgagcacuugcacucuuccaagaauaccaauguuacggauccucaagcaacacacgaguacuaaacgaacuaaacuacgauaacgcaggaaccaacuuauacaacgaacuagaaaugaacuacuacggcaaacaagaaaacugguacucacucaaaaaaaacagcagaagccuaggagaaaaugacgacggaaacaacgaagauaacgaaaaauuacgaaaacccaaacacaaaaaauuaaaacaacccgcagauggaaauccagacccgaacgcaaacccaaacguagacccaaacgcaaacccaaacguugacccaaacgcaaacccaaacguagacccaaacgcaaacccuaacgccaacccaaacgcaaacccaaacgcaaacccaaaugcgaacccaaaugcaaacccaaacgccaacccaaaugcaaaccccaacgcaaauccaaacgcaaacccaaaugcaaacccaaacgcaaacccaaacgcaaacccaaacgcaaacccaaacgccaaccccaaugcaaacccaaacgcaaacccaaacgucgacccaaacgcaaacccaaacgcaaacccaaacgcaaauccaaacgcaaauccaaacgcaaacccuaacgcaaacccaaacgcaaacccaaaugcaaauccaaacgcaaacccaaacgcaaacccaaacgcaaauccaaacgcaaacccaaacgcaaacccaaacgcaaacccuaaugcaaacccaaaugcaaauccaaacgcaaacccaaaugcaaaccccaacaaaaacaaccaaggaaacggacaaggacacaauaugccaaacgacccaaacagaaacguagacgaaaacgcaaacgccaacagcgcaguaaaaaacaacaacaacgaagaaccaucagacaaacacauaaaagaauaccuaaacaaaauacaaaacucacuaucaacagaauggucucccugcuccguaacaugcggaaacggcauacaaguacgaauaaaaccuggaucagccaacaaaccaaaagacgaacuagacuaugcaaaugacauagaaaaaaaaauaugcaaaauggaaaaaugcaguucagucuucaacguagucaacagcucaauaggccuaauaaugguacucucauuccuauucuuaaacuaaggacuaguuauaagacugacuagcccgaugggccucccaacgggcccuccuccccuccuugcaccgagauuaaucaaaggcucuuuucagagccaccaaaaaaaaaaaaaaaaaaaaaaaaaaaaaaaaaaaaaaaaaaaaaaaaaaaaaaaaaaaaaaaaaaaaaaaaaaaaaaaaaaaaaaaaaaaaaaaaaaaaa

SEQ ID NO: 8688 - RNA, 1407 nt, Artificial Sequence
  mRNA Design i-3 (hSL-A100) comprising derived and/or modified sequence from Pf(3D7)__XP_001351122.1__IgE_Pf-CSP(19-397) (opt6)
aggagaaagcuuaccauggauuggacauggauucucuuccucguagcagcagccacaagaguacacucuuuauuucaagaauaccaaugcuacggaucaagcucaaacacacgcguacuaaacgaacuaaacuacgacaacgcaggaacaaacuuauacaacgaacuagaaaugaacuauuauggcaaacaagaaaacugguacucacuaaaaaaaaacuccagaagcuuaggagaaaacgacgacggaaacaacgaagacaacgaaaaacuacgcaaaccuaaacacaaaaaacuaaaacaaccugcagacggaaacccagacccaaacgcgaacccaaacguagauccaaacgcaaacccaaacguagaucccaacgcaaacccgaacguagacccuaacgcaaauccaaacgcaaaccccaacgcaaacccgaacgcaaacccaaacgcaaacccaaacgcaaacccaaacgcaaacccaaacgcaaacccaaacgccaacccaaacgcaaauccaaacgcuaacccaaaugcaaacccuaacgcaaacccaaacgccaacccaaacgcaaacccaaacgcaaacccaaacgcaaaucccaauguagacccaaacgcaaacccaaacgcaaacccaaacgcuaacccaaaugcaaacccaaacgcaaacccaaacgcaaacccaaacgcuaaccccaacgcaaacccgaacgcaaacccaaaugcaaacccaaacgcaaacccaaaugcaaacccaaacgcaaacccaaacgcaaaccccaaugccaacccaaacgcaaauccaaaugccaauccaaacgcaaacccaaacaaaaacaaccaaggaaauggacaaggacauaacaugccaaacgaccccaaccgaaauguagacgaaaacgccaacgcaaauagugcagucaaaaacaauaacaaugaagaacccucagauaaacauauaaaagaauacuuaaacaaaauacaaaacucacuaucaaccgaguggucuccuugcucaguaacauguggaaacggaauacaaguacgaauaaaaccaggaucagcaaacaaaccgaaagacgaacuagacuacgccaacgacauagaaaagaaaauauguaaaauggagaaauguaguucaguauucaacgugguaaacagcucaauaggccuaauaaugguacucucuuuccuauuccuaaacuaaggacuaguuauaagacugacuagcccgaugggccucccaacgggcccuccuccccuccuugcaccgagauuaaucaaaggcucuuuucagagccaccaaaaaaaaaaaaaaaaaaaaaaaaaaaaaaaaaaaaaaaaaaaaaaaaaaaaaaaaaaaaaaaaaaaaaaaaaaaaaaaaaaaaaaaaaaaaaaaaaaaaa

SEQ ID NO: 8689 - RNA, 1572 nt, Artificial Sequence
  mRNA Design i-3 (hSL-A100) comprising derived and/or modified sequence from Pf(3D7)__XP_001351122.1__Pf-CSP_L(G4SG4)_TM domain HA (opt6)
aggagaaagcuuaccaugaugcguaaacuagcaauacuaucugucaguucauucuuauucguagaagcacuauuccaagaauaccaauguuacggaucuucaucaaacacaagaguacucaacgaauuaaacuacgauaacgcuggaaccaauuuauacaacgaacuagaaaugaacuacuauggaaaacaagaaaacugguauucacuaaaaaaaaacagcagaaguuuaggagaaaaugacgacggaaacaaugaagacaaugaaaaauuacgaaaaccaaaacacaaaaaauuaaaacaacccgccgacggaaauccagacccaaacgcaaacccaaauguagacccaaacgcaaacccaaauguagaucccaacgcaaacccaaacguagaucccaaugcaaacccaaacgcaaacccaaaugcaaaccccaacgcaaacccaaaugcaaacccuaacgcaaacccgaacgcaaacccaaacgcaaaucccaaugcaaaccccaacgcaaauccaaaugcaaacccuaacgcaaauccgaacgcaaauccaaacgcaaacccaaacgcaaacccaaacgcaaacccaaacgcaaacccaaacgucgacccaaacgccaauccaaacgcaaaccccaaugcaaacccaaaugcaaacccaaacgcaaacccaaaugccaacccaaacgcaaacccaaacgcaaacccaaacgcaaacccaaacgcaaacccaaaugcaaacccaaaugcaaacccaaacgccaacccaaacgcaaacccaaacgcaaacccaaacgccaacccaaacgcaaacccuaacgcaaauccaaacaaaaacaaccaagggaacggacaaggacacaacaugccaaacgacccaaacagaaacguagacgaaaacgccaacgcaaacucagcugucaaaaacaauaacaacgaagaacccuccgauaaacacauaaaagaauaccuaaacaaaauccaaaacucccuuucuacagaauggucacccugcucaguaacaugcggcaacggcauacaaguuagaaucaaaccaggaucagcaaauaaaccaaaagacgaauuagacuaugccaacgacauagaaaaaaaaauauguaaaauggaaaaaugcucaucaguuuucaacguaguaaacagcucaaucggauuaauaaugguacuaucauucuuauuuuuaaacggaggaggaggcuccggcggagguggaaaacuagaaucaacuagaauauaccaaauauuagcaauauacucaacaguagcaucaucacucguauuaguaguaucgcuaggagcaauaaguuucuggaugugcucuaacggaagccuacaaugccgaauaugcauauaaggacuaguuauaagacugacuagcccgaugggccucccaacgggcccuccuccccuccuugcaccgagauuaaucaaaggcucuuuucagagccaccaaaaaaaaaaaaaaaaaaaaaaaaaaaaaaaaaaaaaaaaaaaaaaaaaaaaaaaaaaaaaaaaaaaaaaaaaaaaaaaaaaaaaaaaaaaaaaaaaaaaa

SEQ ID NO: 8690 - RNA, 1446 nt, Artificial Sequence
  mRNA Design i-3 (hSL-A100) comprising derived and/or modified sequence from Pf(3D7)__XP_001351122.1__Pf-CSP(199-377)_L(PVTN)_HBsAg (opt6)
aggagaaagcuuaccauggacccaaacgccaaccccaacgcaaacccaaaugcaaacccaaacgcuaaccccaacgcaaacccaaacgcuaacccuaacgcaaauccaaacgcaaaucccaacgcaaauccaaacgcaaacccaaacgcaaacccaaaugccaacccaaacgcaaacccuaacgcaaaucccaacgcaaauccaaaugcaaaccccaaugcaaacccaaacgcaaauccaaacaaaaauaaucaaggaaauggacaaggacauaacaugccaaacgacccuaaccgaaacgucgacgaaaaugcaaacgcaaacuccgcaguaaaaaacaacaacaacgaagaaccuuccgacaaacacauaaaagaauaccuaaacaaaauacaaaacucucuauccacugaauggucaccaugcucaguaaccugcggaaauggcauacaaguaagaauaaaaccaggaucugcaaauaaaccuaaagacgaacuagauuacgcaaaugacauagaaaaaaaaauaugcaaaauggaaaaaugcucaucagucccaguaacaaacauggaaaacaucacaucaggauucuuaggaccacuacucguauuacaagcaggauucuuucuuuuaacaagaauauuaacaauaccacaaucccuagacucaugguggacaucauuaaacuuccuagguggaucaccagucugccucggacaaaacucacaaucaccaacaucaaaccacucaccaacauccugcccaccaauuuguccaggauacagauggaugugccuacgaagauucauaauauucuuauuuauauuacuacuaugucucauauuuuuacucguacuauuagacuaucagggcauguuacccguauguccacuaauaccaggcucaaccaccacaaacacagguccaugcaaaaccugcaccacaccagcacaaggaaacuccauguuucccucauguugcugcaccaaacccaccgauggaaacugcaccugcauaccaaucccaucuucaugggcauucgcaaaauaucuaugggaaugggcauccguaagauuuucauggcuaucacuauuaguaccauucguacaaugguucguaggauuaucaccaacaguaugguuaucagcaauauggaugaugugguacuggggaccaucacuauacucaauaguauccccuuucauaccauuacucccaauauuuuucugccuuuggguauacauauaaggacuaguuauaagacugacuagcccgaugggccucccaacgggcccuccuccccuccuugcaccgagauuaaucaaaggcucuuuucagagccaccaaaaaaaaaaaaaaaaaaaaaaaaaaaaaaaaaaaaaaaaaaaaaaaaaaaaaaaaaaaaaaaaaaaaaaaaaaaaaaaaaaaaaaaaaaaaaaaaaaaaa

SEQ ID NO: 8691 - RNA, 1488 nt, Artificial Sequence
  mRNA Design i-3 (hSL-A100) comprising derived and/or modified sequence from Pf(3D7)__XP_001351122.1__Pf-CSP(199-387)_L(PVTN)_HBsAg (opt6)
aggagaaagcuuaccaugauggcaccagauccaaacgcaaacccaaacgcaaacccaaacgcaaauccaaaugcaaacccaaacgcaaaucccaaugcaaacccuaacgcaaacccaaacgccaacccaaaugccaacccaaacgcaaacccaaacgcaaauccaaacgcaaacccaaacgcuaacccaaaugcaaaccccaacgcaaauccaaacgcaaacccaaacgcaaauccaaacgcuaacccaaacaaaaauaaccaaggaaacggacaaggacacaauaugccaaaugacccaaauagaaacguagacgaaaacgcaaacgcaaauucagcagucaaaaacaauaacaacgaagaaccauccgauaaacacauaaaagaauacuuaaacaaaauccaaaacucacuaucaacugaauggucaccuuguucaguaacauguggcaacggaauacaaguaagaauaaaaccagguucagccaacaaaccuaaagacgaacuagacuacgcaaacgacauagaaaaaaaaaucugcaaaauggaaaaaugcucaucaguauuuaauguaguaaacucaucaauaggacuaggcccuguaacaaacauggaaaacauaaccucaggauucuuaggcccacuacuaguacuccaagcaggauucuuucuucuaacaagaauauuaaccauuccucaaucauuagacucaugguggacaucccuuaacuuucuaggaggaagccccguaugcuuaggacaaaacagccaauccccaacauccaaccacuccccaacaucaugccccccaauaugcccaggauacagauggaugugccuaagaagauucaucauauuccuauuuauucucuuacucugcuuaauauucuuacucguauuacucgacuaccaaggaauguuaccaguaugcccacuaauaccaggauccacaacaacaaacacgggaccaugcaaaacaugcacaacaccugcccaaggaaauuccauguucccaucaugcugcugcacaaaaccaaccgacggcaacugcacaugcauaccaauaccaucaagcugggccuucgcaaaauaccuaugggaaugggcaucagugagauucucauggcucucauuacuagucccauucguacaaugguuuguaggauuaucaccaacaguuuggcucagcgcaauauggaugaugugguacuggggccccucuuuauauucaauaguauccccauuuauaccacuacucccaauauucuucuguuuauggguauacauauaaggacuaguuauaagacugacuagcccgaugggccucccaacgggcccuccuccccuccuugcaccgagauuaaucaaaggcucuuuucagagccaccaaaaaaaaaaaaaaaaaaaaaaaaaaaaaaaaaaaaaaaaaaaaaaaaaaaaaaaaaaaaaaaaaaaaaaaaaaaaaaaaaaaaaaaaaaaaaaaaaaaaa

SEQ ID NO: 8692 - RNA, 672 nt, Artificial Sequence
  mRNA Design i-3 (hSL-A100) comprising derived and/or modified sequence from Pf(3D7)__XP_001351122.1__HsALB_Pf-CSP(19-152) (opt6)
aggagaaagcuuaccaugaaauggguaacauucauaucacuacuauuccuauucuccagcgcauacucacuauuccaagaauaccaaugcuacggaucaagcucaaacacacgaguacuaaacgaacuaaacuacgacaacgcaggaaccaaccuauacaacgaacuagaaaugaacuacuacggaaaacaagaaaacugguacucacuaaaaaaaaacagcagaucacuaggagaaaacgacgacggaaacaacgaagacaacgaaaaacuaagaaaaccaaaacacaaaaaacuaaaacaacccgcagacggaaacccagacccaaacgcaaacccaaacguagacccaaaugcaaacccaaacguagacccaaacgcaaacccaaacguagacccaaacgcaaacccaaacgcaaacccaaacgcaaacccaaacgcaaacccaaacgcaaacccaaacgcaaacccauaaggacuaguuauaagacugacuagcccgaugggccucccaacgggcccuccuccccuccuugcaccgagauuaaucaaaggcucuuuucagagccaccaaaaaaaaaaaaaaaaaaaaaaaaaaaaaaaaaaaaaaaaaaaaaaaaaaaaaaaaaaaaaaaaaaaaaaaaaaaaaaaaaaaaaaaaaaaaaaaaaaaaa

SEQ ID NO: 8693 - RNA, 792 nt, Artificial Sequence
  mRNA Design i-3 (hSL-A100) comprising derived and/or modified sequence from Pf(3D7)__XP_001351122.1__HsALB_Pf-CSP(19-192) (opt6)
aggagaaagcuuaccaugaaauggguaacauucaucucacuacuauucuuauucucaucagcauacucacuauuccaagaauaccaaugcuacggaucaucaucaaacacacgaguacucaacgaacuaaacuacgacaacgcaggaacaaaccuauacaacgaacuagaaaugaacuacuacggaaaacaagaaaacugguauucacuaaaaaaaaacucaagaucacuaggagaaaacgacgacggaaacaacgaagacaacgaaaaacuaagaaaaccaaaacacaaaaaacuaaaacaaccagcagacggaaacccagacccaaacgcaaacccaaacguagacccaaacgccaacccaaacguagacccaaacgcaaacccaaacguagacccaaacgcaaacccaaacgcaaacccaaacgcaaacccaaacgcaaacccaaacgcaaacccaaacgcaaacccaaacgcaaacccaaacgcaaacccaaacgcaaacccaaacgcaaacccaaacgcaaacccaaacgcaaauccaaacgcaaacccaaacgcaaacccaaacgcaaacccaaacgcaaaccccuaaggacuaguuauaagacugacuagcccgaugggccucccaacgggcccuccuccccuccuugcaccgagauuaaucaaaggcucuuuucagagccaccaaaaaaaaaaaaaaaaaaaaaaaaaaaaaaaaaaaaaaaaaaaaaaaaaaaaaaaaaaaaaaaaaaaaaaaaaaaaaaaaaaaaaaaaaaaaaaaaaaaaa

SEQ ID NO: 8694 - RNA, 1032 nt, Artificial Sequence
  mRNA Design i-3 (hSL-A100) comprising derived and/or modified sequence from Pf(3D7)__XP_001351122.1__HsALB_Pf-CSP(19-272) (opt6)
aggagaaagcuuaccaugaaauggguaacauucauaucacuacuauuccuauucucaagcgcauauucacuauuccaagaauaccaaugcuacggaucaagcucaaacacaagaguacuuaacgaacuaaacuacgacaacgcaggaacaaaccuauacaacgaacuugaaaugaacuacuacggaaaacaagaaaacugguacucacuaaaaaaaaauagcagaagcuuaggagaaaacgacgacggaaacaacgaagacaacgaaaaauuaagaaaaccuaaacacaaaaaacuaaaacaacccgcagacggaaacccagacccuaacgccaacccaaauguagacccaaacgcaaacccaaacguagacccaaacgcaaaccccaacguagacccaaacgcaaacccaaacgcaaacccaaacgcaaacccaaacgcaaaccccaacgcaaacccaaacgcaaacccaaacgcaaacccaaacgcaaacccaaacgcaaacccaaacgcaaacccaaacgcaaacccaaacgcaaacccaaacgcgaacccaaacgcaaacccaaacgcaaacccaaacgcaaacccaaacgcaaacccaaacguagacccaaaugcaaaccccaacgcaaacccaaacgcaaacccaaaugcaaaccccaacgcaaacccaaacgcaaacccaaacgcaaacccaaacgcaaacccaaaugcaaacccaaacgcaaacccaaacgccaacccaaacgcaaacccaaacgcaaacccaaacgcaaacccaaacgcaaacccgaacgcaaacccaaacgcaaacccaaacgcaaacccauaaggacuaguuauaagacugacuagcccgaugggccucccaacgggcccuccuccccuccuugcaccgagauuaaucaaaggcucuuuucagagccaccaaaaaaaaaaaaaaaaaaaaaaaaaaaaaaaaaaaaaaaaaaaaaaaaaaaaaaaaaaaaaaaaaaaaaaaaaaaaaaaaaaaaaaaaaaaaaaaaaaaaa

SEQ ID NO: 8695 - RNA, 1194 nt, Artificial Sequence
  mRNA Design i-3 (hSL-A100) comprising derived and/or modified sequence from Pf(3D7)__XP_001351122.1__HsALB_Pf-CSP(19-272)_L(AAY)_Pf-CSP(310-3 27)_L(AAY)_Pf-CSP(346-375) (opt6)
aggagaaagcuuaccaugaaauggguaacauuuauaucacuccuauuccuuuuuucgucagcauacucacuauuccaagaauaucaaugcuacggaucaagcuccaacacaagaguacuaaacgaacuaaacuacgacaacgcaggaacaaaccuauacaacgaacuagaaaugaacuacuacggaaaacaagaaaacugguacucacuaaaaaaaaacagccgaagcuuaggagaaaaugacgacggaaacaacgaagacaacgaaaaauuacgcaaacccaaacacaaaaaacugaaacaaccagcagacggaaacccagacccaaacgcaaacccaaacguagacccaaacgcaaacccaaacguagacccaaacgcaaacccaaacguagacccaaacgcaaacccaaacgcgaacccaaacgccaacccaaacgcaaacccaaacgcaaacccaaacgcaaacccaaacgcaaacccaaacgcaaacccaaacgccaacccgaacgcaaacccaaacgcaaacccaaacgcaaauccaaacgcaaacccaaacgcaaacccaaacgccaacccaaacgcaaacccaaacgcaaacccaaauguggacccaaacgcaaacccaaacgcaaacccaaacgcaaacccaaaugcaaacccaaacgcaaacccaaacgcaaacccaaacgcaaacccaaacgcaaacccaaaugcaaacccaaacgcaaauccaaacgcaaacccaaacgcaaacccaaacgcaaacccaaacgcaaacccuaacgcaaacccaaacgcaaacccaaacgccaaccccaaugcaaacccagcagcauacgaaccaucagacaaacacauaaaagaauaccuaaacaaaauacaaaacucacucgcagcauauauaaagccaggaagcgccaacaaaccaaaagacgaacuagauuacgcaaacgacauagaaaaaaaaaucuguaaaauggaaaaaugcucauaaggacuaguuauaagacugacuagcccgaugggccucccaacgggcccuccuccccuccuugcaccgagauuaaucaaaggcucuuuucagagccaccaaaaaaaaaaaaaaaaaaaaaaaaaaaaaaaaaaaaaaaaaaaaaaaaaaaaaaaaaaaaaaaaaaaaaaaaaaaaaaaaaaaaaaaaaaaaaaaaaaaaa

SEQ ID NO: 8696 - RNA, 1155 nt, Artificial Sequence
  mRNA Design i-3 (hSL-A100) comprising derived and/or modified sequence from Pf(3D7)__XP_001351122.1__HsALB_Pf-CSP(19-272)_L(AAY)_Pf-CSP(346-3 65)_L(AAY)_P2 (opt6)
aggagaaagcuuaccaugaaauggguaacauucauaucacuauuauuccuuuucucaucagcuuacucacuauuccaagaauaccaaugcuacggaucauccucaaacacaagaguacuaaacgaacuaaacuacgacaacgccggaaccaaccuauacaacgaacucgaaaugaacuacuacggaaaacaagaaaacugguacucacuaaaaaaaaacagccgaucccuaggagaaaacgacgacggaaauaacgaagacaaugaaaaauuaagaaaaccaaaacacaaaaaacuaaaacaaccagcagacggaaacccagacccaaacgcaaacccaaacguagauccaaacgcaaacccaaacguagacccaaacgcaaacccaaacguagacccaaacgcuaacccaaacgcaaacccaaacgcaaacccaaacgcaaacccaaacgcaaacccaaacgcaaacccgaacgcaaaccccaacgcaaacccaaacgcaaacccaaacgcaaaccccaacgcaaacccaaacgcaaacccgaacgcaaacccaaacgcaaacccaaacgcaaacccaaacgcaaacccaaacgcaaacccaaacguagacccaaacgccaacccaaacgcaaacccaaacgcaaacccaaacgcaaacccaaacgcaaacccaaacgcaaacccaaacgcaaacccaaacgcaaacccaaacgcaaacccaaacgcaaaccccaacgcaaacccaaaugcaaacccaaacgcaaacccaaaugcaaaccccaacgcaaacccaaaugccaauccaaacgcaaacccaaacgcaaacccagccgcauacauaaaaccaggauccgcaaacaaaccaaaagacgaacuagacuacgcaaacgacauagaagcagcauaccaauauauaaaagccaacuccaaauucauagguauaacagaacucuaaggacuaguuauaagacugacuagcccgaugggccucccaacgggcccuccuccccuccuugcaccgagauuaaucaaaggcucuuuucagagccaccaaaaaaaaaaaaaaaaaaaaaaaaaaaaaaaaaaaaaaaaaaaaaaaaaaaaaaaaaaaaaaaaaaaaaaaaaaaaaaaaaaaaaaaaaaaaaaaaaaaaa

SEQ ID NO: 8697 - RNA, 1149 nt, Artificial Sequence
  mRNA Design i-3 (hSL-A100) comprising derived and/or modified sequence from Pf(3D7)__XP_001351122.1__HsALB_Pf-CSP(19-272)_L(AAY)_Pf-CSP(346-3 65)_L(AAY)_PADRE (opt6)
aggagaaagcuuaccaugaaauggguaaccuucauaucacuacuauucuuauucucaucagcauacucacucuuccaagaauaccaaugcuacggcucaagcucaaacacaagaguacuaaacgaauuaaacuaugacaacgccggaacaaaccuauacaaugaauuagaaaugaacuacuacggcaaacaagaaaacugguacucacucaaaaaaaacuccagaaguuuaggagaaaaugacgacggaaacaaugaagacaaugaaaaauuacgaaaaccaaaacacaaaaaacuaaaacaacccgccgacggaaaccccgacccgaacgcaaacccaaacguagacccaaacgcaaacccaaacguagacccaaaugcaaacccaaacguagacccaaacgcaaacccaaacgcaaacccaaacgcaaauccaaacgcaaacccaaaugcaaacccaaaugcaaauccaaacgcaaaccccaacgcaaacccaaacgcaaacccaaaugcaaauccaaacgccaacccaaaugcaaacccaaacgcaaauccaaacgcaaacccaaacgcaaauccaaacgcaaacccaaaugcaaacccaaacguagauccaaacgcaaacccaaacgccaacccaaacgcaaacccgaacgcaaacccaaacgcaaacccaaacgccaacccaaacgccaacccaaacgccaacccaaacgcaaacccaaacgcaaacccaaacgcaaacccaaacgcaaacccaaaugcaaacccuaacgcaaacccaaacgcaaacccaaacgcaaacccaaacgccaacccaaacgcaaauccagcagcauacauaaaaccaggaucagcaaacaaaccaaaagaugaacuagacuacgcaaaugacaucgaagcagccuacgcuaaauucguagcagccuggacacuaaaagcagcagccuaaggacuaguuauaagacugacuagcccgaugggccucccaacgggcccuccuccccuccuugcaccgagauuaaucaaaggcucuuuucagagccaccaaaaaaaaaaaaaaaaaaaaaaaaaaaaaaaaaaaaaaaaaaaaaaaaaaaaaaaaaaaaaaaaaaaaaaaaaaaaaaaaaaaaaaaaaaaaaaaaaaaaa

SEQ ID NO: 8698 - RNA, 1206 nt, Artificial Sequence
  mRNA Design i-3 (hSL-A100) comprising derived and/or modified sequence from Pf(3D7)__XP_001351122.1__HsALB_Pf-CSP(19-272)_L(G4S)_Pf-CSP(310-3 27)_L(G4S)_Pf-CSP(346-375) (opt6)
aggagaaagcuuaccaugaaauggguaaccuucaucucacuacuauuccuauucucaagcgcauacucacucuuucaagaauaccaaugcuacggcucaagcucaaacacacgaguacuaaacgaacuaaacuacgacaacgcaggaacaaaccuauauaacgaacucgaaaugaacuacuacggcaaacaagaaaauugguacucacuaaaaaaaaacagcagaagcuuaggagaaaacgacgacggaaacaacgaagauaacgaaaaacuaagaaaaccaaaacacaaaaaacuaaaacaacccgcagacggaaacccagacccaaacgcaaauccaaauguagacccgaacgcaaacccaaacguagacccaaaugcgaacccaaacgucgacccaaacgcaaacccaaaugcaaacccaaaugcgaacccaaacgcaaacccaaacgcaaauccaaacgcaaauccaaaugcaaacccaaacgcgaauccaaacgcaaacccaaacgcaaacccaaacgcaaacccaaacgcaaacccaaacgcaaacccaaacgcaaacccgaacgcuaacccaaacgcaaacccaaacgcaaacccaaacguagauccaaacgcgaacccaaacgcaaacccaaaugcaaacccaaacgcaaacccaaacgcaaacccaaacgcaaacccaaacgcaaacccaaacgcaaacccaaacgcgaacccaaacgcaaauccaaaugcaaacccaaacgcaaacccaaacgcaaacccaaacgcaaacccaaaugcaaacccaaacgcaaacccaaaugcaaacccaaacgcaaacccaggaggaggaggaucagaacccucagacaaacacauaaaagaauaccuaaacaaaauacaaaacucacuaggaggaggaggaucgaucaaaccaggaagcgcaaacaaaccaaaagacgaacucgacuacgcaaacgauauagaaaaaaaaauaugcaaaauggaaaaaugcucguaaggacuaguuauaagacugacuagcccgaugggccucccaacgggcccuccuccccuccuugcaccgagauuaaucaaaggcucuuuucagagccaccaaaaaaaaaaaaaaaaaaaaaaaaaaaaaaaaaaaaaaaaaaaaaaaaaaaaaaaaaaaaaaaaaaaaaaaaaaaaaaaaaaaaaaaaaaaaaaaaaaaaa

SEQ ID NO: 8699 - RNA, 1191 nt, Artificial Sequence
  mRNA Design i-3 (hSL-A100) comprising derived and/or modified sequence from Pf(3D7)__XP_001351122.1__HsALB_Pf-CSP(19-272)_L(G4S)_Pf-CSP(310-3 27)_Pf-CSP(346-375) (opt6)
aggagaaagcuuaccaugaaauggguaacauucauaucacuccuauuccuauucuccucagcauacucccucuuccaagaauaccaaugcuacggcucaagcucaaacacacgaguacuaaacgaacuaaauuacgacaacgccggaacaaaccuauauaaugaacuagaaaugaauuacuacggaaaacaagaaaacugguacucacuuaaaaaaaacucaagaucauuaggagaaaacgacgacggcaacaacgaagacaacgaaaaacuaagaaaaccaaaacacaaaaaacuaaaacaacccgcagacggaaauccagauccaaacgcaaacccaaacguagacccaaacgcaaacccaaacguagacccaaacgcaaacccaaacgucgacccaaacgccaacccaaacgcaaacccaaacgcaaacccaaacgcaaacccaaacgccaacccaaacgcaaacccaaacgcaaacccaaacgcaaacccaaacgcaaacccaaacgcaaacccaaacgcaaacccgaacgcaaacccaaacgcaaauccuaacgcaaacccaaacgcaaacccaaacgcaaauccgaacgcaaacccaaacguagacccaaacgcaaacccaaacgcaaacccaaacgcaaacccaaacgcaaacccaaacgcaaacccuaacgcaaacccaaaugcaaacccaaacgcgaacccaaaugcaaacccaaaugcaaacccaaacgcaaacccaaacgcaaacccaaacgcaaauccaaacgcaaauccaaacgcaaacccaaacgcaaacccaaacgcaaacccaaacgccaacccaggaggagguggaagcgaaccauccgacaaacacauaaaagaauaccuaaacaaaauacaaaacucacuaauaaaacccggcucagcaaacaaaccaaaagacgaacuagacuacgccaacgacauagaaaaaaaaauauguaaaauggaaaaaugcucauaaggacuaguuauaagacugacuagcccgaugggccucccaacgggcccuccuccccuccuugcaccgagauuaaucaaaggcucuuuucagagccaccaaaaaaaaaaaaaaaaaaaaaaaaaaaaaaaaaaaaaaaaaaaaaaaaaaaaaaaaaaaaaaaaaaaaaaaaaaaaaaaaaaaaaaaaaaaaaaaaaaaaa

SEQ ID NO: 8700 - RNA, 1191 nt, Artificial Sequence
  mRNA Design i-3 (hSL-A100) comprising derived and/or modified sequence from Pf(3D7)__XP_001351122.1__HsALB_Pf-CSP(19-325) (opt6)
aggagaaagcuuaccaugaaauggguaacauucauaucacuccuauuccuauucucaagcgcauacucauuauuccaagaauaccaaugcuacggaucaucaucuaacacaagaguacucaacgaacuaaacuacgacaacgcaggaacuaaucucuacaacgaacuagaaaugaacuacuacggaaaacaagaaaacugguauucacuaaaaaaaaacagccgaucauuaggagaaaacgacgacggcaacaacgaagacaacgaaaaacuacgaaaaccaaaacacaaaaaauuaaaacagccagccgacggaaacccagacccaaacgcaaacccaaacguagacccaaacgcaaacccaaacguagacccaaacgcaaacccaaacguagacccaaacgcaaacccaaacgcaaacccaaacgcaaauccaaacgcaaacccaaacgccaacccaaacgcaaacccaaacgcaaaccccaacgcaaacccaaacgcaaacccaaacgcaaacccaaaugccaacccaaacgcaaacccaaacgcaaacccaaacgcaaacccaaacgcaaacccaaaugcaaacccaaacgcaaacccaaacguagacccaaacgcaaacccaaaugcaaacccaaacgcaaaccccaacgcaaacccaaacgcaaacccaaacgcaaacccaaacgcaaacccaaacgccaacccaaacgcaaacccaaacgcaaacccaaacgcaaacccaaacgcaaacccaaacgcaaauccaaacgcaaacccaaacgcaaacccaaacgcaaacccaaacgcaaacccaaacgcaaacccaaauaaaaacaaucaaggaaacggacaaggacacaacaugccaaacgauccaaaucgcaacguagacgaaaacgcaaacgcaaacagcgcagucaaaaacaacaacaacgaagaaccaucagacaaacacauaaaagaauaccuaaauaaaauacaaaacuagggacuaguuauaagacugacuagcccgaugggccucccaacgggcccuccuccccuccuugcaccgagauuaaucaaaggcucuuuucagagccaccaaaaaaaaaaaaaaaaaaaaaaaaaaaaaaaaaaaaaaaaaaaaaaaaaaaaaaaaaaaaaaaaaaaaaaaaaaaaaaaaaaaaaaaaaaaaaaaaaaaaa

SEQ ID NO: 8701 - RNA, 1368 nt, Artificial Sequence
  mRNA Design i-3 (hSL-A100) comprising derived and/or modified sequence from Pf(3D7)__XP_001351122.1__HsALB_Pf-CSP(19-384) (opt6)
aggagaaagcuuaccaugaaauggguaaccuuuauaucacucuuauuccuauuuucaucagcauacucacucuuccaagaauaucaaugcuacggaucaucaucaaacacaagaguccucaaugaauuaaacuaugacaaugcaggaaccaaccuauacaacgaauuagaaaugaacuacuacggcaaacaagaaaacugguacucacucaaaaaaaacucaagauccuuaggagaaaaugaugacggaaacaacgaagacaacgaaaaacuccgaaaaccaaaacacaaaaaacuaaaacaacccgccgacggaaacccagaccccaacgcaaacccaaauguagaccccaacgcaaacccaaacguagacccaaacgcaaacccaaacguagacccaaacgcaaauccaaacgccaacccaaacgcaaacccaaacgccaacccaaacgcaaacccaaacgcaaacccaaacgcaaacccaaacgcaaacccaaaugcaaacccaaaugcaaacccaaacgcaaacccaaacgcaaacccaaacgcaaacccaaacgcaaacccaaaugcaaacccaaacgcaaacccaaacgcaaacccaaacguagacccaaaugcaaacccaaacgcaaacccaaacgcaaauccaaaugcaaauccaaacgcaaauccaaacgcaaacccaaacgcaaacccaaacgcaaacccaaacgcaaauccaaaugcaaacccaaacgcaaacccaaacgcaaacccaaacgcuaacccaaacgccaauccaaacgcaaacccaaacgcaaacccuaaugcaaacccaaacgccaacccaaauaaaaauaaccaaggaaacggacaaggacacaacaugccaaacgacccaaacagaaacgucgaugaaaacgcaaacgcaaauuccgcagucaaaaacaacaacaacgaagaaccaucagacaaacacauaaaagaauaccucaacaaaauacaaaacucccuaucaacagaauggucacccugcuccguuacaugcgguaacggcauacaaguaagaauaaaaccaggaucagcuaacaaacccaaagacgaacuagacuacgccaacgacauagaaaaaaaaauaugcaaaauggaaaaaugcuccucaguauucaacguaguaaacucaucauaaggacuaguuauaagacugacuagcccgaugggccucccaacgggcccuccuccccuccuugcaccgagauuaaucaaaggcucuuuucagagccaccaaaaaaaaaaaaaaaaaaaaaaaaaaaaaaaaaaaaaaaaaaaaaaaaaaaaaaaaaaaaaaaaaaaaaaaaaaaaaaaaaaaaaaaaaaaaaaaaaaaaa

SEQ ID NO: 8702 - RNA, 1506 nt, Artificial Sequence
  mRNA Design i-3 (hSL-A100) comprising derived and/or modified sequence from Pf(3D7)__XP_001351122.1__HsALB_Pf-CSP(19-384)_TM domain HA (opt6)
aggagaaagcuuaccaugaaauggguaacauuuauaucacuacuuuuccuauucucaucagcauacucacucuuccaagaauaucaaugcuauggauccucaucaaacacaagaguacucaacgaauuaaacuacgauaaugccggaacaaaccuauauaacgaacuagaaaugaacuacuacggaaaacaagaaaauugguacucauuaaaaaaaaacuccagaucccuuggagaaaacgacgauggaaacaacgaagauaacgaaaaauuaagaaaaccaaaacacaaaaaauugaaacaaccagcagacgguaacccagacccaaacgccaacccaaacguagacccaaacgcgaauccaaacgucgacccaaacgcaaaucccaacguagacccaaaugcaaauccaaaugccaauccaaacgcaaacccaaacgcaaacccaaaugcaaacccaaacgccaacccaaacgcaaauccaaacgcaaacccaaacgcaaacccaaacgccaacccaaacgccaaccccaaugcaaacccaaaugcaaacccaaacgcaaacccaaacgcaaauccaaacgcaaacccaaacgccaacccaaacguagacccaaacgcaaauccaaacgcaaacccaaacgccaauccaaacgcaaacccaaacgccaacccaaaugcaaaucccaacgcaaacccaaacgcaaauccaaaugcaaaccccaacgcaaauccaaacgcaaacccaaacgcaaauccaaacgcaaauccaaaugcaaacccaaacgcaaacccuaaugcaaacccaaacgcaaacccaaacgccaacccaaacaaaaacaaccaaggaaacggacaaggucacaauaugccaaaugacccaaaccgaaacguagacgaaaacgcaaaugccaauagcgcaguaaaaaacaauaacaacgaagaaccuucagauaaacacauaaaagaauaccuaaacaaaauacaaaacucccuaucaacagaauggucaccuuguucagucacauguggaaacggaauacaaguaagaauaaaaccaggaucagcaaacaaaccaaaagacgaacuagauuacgcaaacgauauagaaaaaaaaauauguaaaauggaaaaaugcuccucagucuucaacguagucaacaguuccaaacuagaaucaaccagaaucuaccaaauacuagcaauauauuccacaguagcaagcucacucguauuaguagucucccuaggagcaauaucauucuggaugugcucaaacggaagcuuacaaugccgaauauguauauaaggacuaguuauaagacugacuagcccgaugggccucccaacgggcccuccuccccuccuugcaccgagauuaaucaaaggcucuuuucagagccaccaaaaaaaaaaaaaaaaaaaaaaaaaaaaaaaaaaaaaaaaaaaaaaaaaaaaaaaaaaaaaaaaaaaaaaaaaaaaaaaaaaaaaaaaaaaaaaaaaaaaa

SEQ ID NO: 8703 - RNA, 1218 nt, Artificial Sequence
  mRNA Design i-3 (hSL-A100) comprising derived and/or modified sequence from Pf(3D7)__XP_001351122.1__HsALB_Pf-CSP(82-397) (opt6)
aggagaaagcuuaccaugaaauggguaacauucauaucacuacuauuccucuucaguucagccuauagcgauaacgaaaaacuaagaaaaccaaaacacaaaaaacucaaacaaccagcagacggaaacccagacccaaacgcaaacccaaacguagacccaaacgcaaacccaaacguagacccaaacgcaaauccaaacguagacccaaaugcaaaccccaacgcaaacccaaacgcaaacccaaacgcaaacccaaacgcaaacccaaaugcgaacccaaaugcaaauccaaacgcaaacccaaacgcaaacccaaacgcaaacccaaacgcuaacccaaacgcaaacccaaacgcaaacccaaaugcaaacccaaacgcaaacccaaacgcaaaccccaacgcaaacccaaacguagacccaaacgcaaacccaaacgcaaacccaaacgcaaacccaaacgccaacccaaaugccaacccaaacgcaaacccaaaugcaaaccccaacgcaaacccaaacgccaacccaaacgcaaacccaaacgcaaacccaaacgcaaaccccaaugcaaacccaaacgcaaacccaaaugcaaauccaaacgcaaacccaaacgcaaacccaaacgcaaacccaaacaaaaacaaccaaggaaacggacaaggacacaacaugccaaacgacccaaaucgaaacgucgaugaaaacgccaacgcaaacucagcaguaaaaaacaacaacaacgaagaaccaucugacaaacacauaaaagaauaccuaaacaaaauacaaaacucauuauccaccgaauggucaccauguucaguaacaugcggcaacggaauacaagucagaauaaaaccaggcucagcaaauaaaccaaaagacgaacuagacuacgcaaacgacauagaaaaaaaaauaugcaaaauggaaaaauguucaucagucuucaacguaguaaacucaucaauaggacucauaaugguacuaucauuccuauucuuaaacuaaggacuaguuauaagacugacuagcccgaugggccucccaacgggcccuccuccccuccuugcaccgagauuaaucaaaggcucuuuucagagccaccaaaaaaaaaaaaaaaaaaaaaaaaaaaaaaaaaaaaaaaaaaaaaaaaaaaaaaaaaaaaaaaaaaaaaaaaaaaaaaaaaaaaaaaaaaaaaaaaaaaaa

SEQ ID NO: 8704 - RNA, 570 nt, Artificial Sequence
  mRNA Design i-3 (hSL-A100) comprising derived and/or modified sequence from Pf(3D7)__XP_001351122.1__HsALB_Pf-CSP(93-192) (opt6)
aggagaaagcuuaccaugaaauggguaacauucaucucacuacuauuccuauucucaagcgcauacucaaaacuaaaacaaccagcagacggaaacccagacccaaacgcaaacccaaacguagacccaaacgcaaacccaaacguagacccaaacgcaaacccaaacguagacccaaacgcaaacccaaacgcaaacccaaacgcaaacccaaacgcaaacccaaacgcaaacccaaacgcaaacccaaacgcaaacccaaacgcaaacccaaacgcaaacccaaacgcaaacccaaacgcaaacccaaacgcaaacccaaacgcaaacccaaacgcaaacccaaacgcaaacccaaacgcaaacccauaaggacuaguuauaagacugacuagcccgaugggccucccaacgggcccuccuccccuccuugcaccgagauuaaucaaaggcucuuuucagagccaccaaaaaaaaaaaaaaaaaaaaaaaaaaaaaaaaaaaaaaaaaaaaaaaaaaaaaaaaaaaaaaaaaaaaaaaaaaaaaaaaaaaaaaaaaaaaaaaaaaaaa

SEQ ID NO: 8705 - RNA, 810 nt, Artificial Sequence
  mRNA Design i-3 (hSL-A100) comprising derived and/or modified sequence from Pf(3D7)__XP_001351122.1__HsALB_Pf-CSP(93-272) (opt6)
aggagaaagcuuaccaugaaaugggucacauucauaucacuccuauuccuauucucaagcgcauacucaaaacuaaaacaaccagcagacggaaacccagacccaaacgcaaacccaaacguagacccaaacgcaaacccaaacguagacccaaacgcaaacccaaacguagacccaaacgcaaacccaaacgcaaacccaaacgccaacccaaacgcaaacccaaacgcaaacccaaacgcaaacccaaacgcaaacccaaacgcaaacccaaacgcaaacccaaacgcaaacccaaacgcaaacccaaacgcaaacccaaacgcaaauccaaacgcaaacccaaacgccaacccaaacgcaaacccaaacgcaaacccaaacguagacccaaacgcaaacccaaacgcaaacccaaacgcaaacccaaacgcaaacccaaacgcaaacccaaacgcaaacccaaacgcaaacccaaacgcaaacccaaacgcaaauccaaacgcaaacccaaacgcaaacccaaacgcaaacccaaacgcaaacccaaacgcaaacccaaacgcaaacccaaacgcaaacccaaacgcaaacccaaacgcaaacccauaaggacuaguuauaagacugacuagcccgaugggccucccaacgggcccuccuccccuccuugcaccgagauuaaucaaaggcucuuuucagagccaccaaaaaaaaaaaaaaaaaaaaaaaaaaaaaaaaaaaaaaaaaaaaaaaaaaaaaaaaaaaaaaaaaaaaaaaaaaaaaaaaaaaaaaaaaaaaaaaaaaaaa

SEQ ID NO: 8706 - RNA, 1185 nt, Artificial Sequence
  mRNA Design i-3 (hSL-A100) comprising derived and/or modified sequence from Pf(3D7)__XP_001351122.1__HsALB_Pf-CSP(93-397) (opt6)
aggagaaagcuuaccaugaaauggguaacauucauaucacuccuauuccuauucucaucagcauacucaaaacuaaaacaacccgcagacggaaacccagacccaaacgccaacccaaacguagacccaaacgcaaacccgaacguagacccaaacgcaaaccccaacguagacccaaacgcaaacccaaaugcaaacccaaacgcaaacccaaacgcaaacccaaacgcaaacccaaacgcaaacccaaacgcaaacccaaacgcaaacccaaacgcaaacccaaacgcgaaucccaacgcaaauccaaacgcaaacccaaacgcaaauccaaacgcaaacccgaacgcaaacccaaacgcaaacccaaacgcaaacccaaacguagauccaaacgcaaauccaaacgcaaacccaaacgcaaauccaaacgcaaacccaaacgcaaacccaaacgcaaaccccaacgcaaacccaaacgcaaacccaaacgcaaacccaaacgcaaauccaaacgccaacccaaacgcaaacccaaacgcaaacccaaacgcgaacccaaacgcgaacccaaacgcaaacccaaacgcaaacccaaacgcaaacccaaacaaaaacaaccaagggaacggacaaggacacaacaugccaaacgauccaaacagaaacguagacgaaaacgcaaacgcaaacucagcaguaaaaaacaacaacaacgaagaaccaucagacaaacacauaaaagaauaccuaaacaaaauacaaaacucacucucaacagaauggucaccaugcaguguaacaugcggaaauggaauacaaguacguauaaaaccaggaucagcaaacaaaccaaaagacgaauuagacuacgccaacgauauagaaaaaaaaauaugcaaaauggaaaaaugcagcucagucuucaacguagucaacagcucaauaggacuaauaaugguccucucauucuuauuucuaaacugaggacuaguuauaagacugacuagcccgaugggccucccaacgggcccuccuccccuccuugcaccgagauuaaucaaaggcucuuuucagagccaccaaaaaaaaaaaaaaaaaaaaaaaaaaaaaaaaaaaaaaaaaaaaaaaaaaaaaaaaaaaaaaaaaaaaaaaaaaaaaaaaaaaaaaaaaaaaaaaaaaaaa

SEQ ID NO: 8707 - RNA, 555 nt, Artificial Sequence
  mRNA Design i-3 (hSL-A100) comprising derived and/or modified sequence from Pf(3D7)__XP_001351122.1__HsALB_Pf-CSP(98-192) (opt6)
aggagaaagcuuaccaugaaauggguaacauucauaagccuacuauuccuauucagcucagcauacagcgcagacggaaacccagacccaaacgcaaacccaaacguagacccaaacgcaaacccaaacguagacccaaacgcaaacccaaacguagacccaaacgcaaacccaaacgcaaacccaaacgcaaacccaaacgcaaacccaaacgcaaacccaaacgcaaacccaaacgcaaacccaaacgcaaacccaaacgcaaacccaaacgcaaacccaaacgcaaacccaaacgcaaacccaaacgcaaacccaaacgcaaacccaaacgcaaacccaaacgcaaacccauaaggacuaguuauaagacugacuagcccgaugggccucccaacgggcccuccuccccuccuugcaccgagauuaaucaaaggcucuuuucagagccaccaaaaaaaaaaaaaaaaaaaaaaaaaaaaaaaaaaaaaaaaaaaaaaaaaaaaaaaaaaaaaaaaaaaaaaaaaaaaaaaaaaaaaaaaaaaaaaaaaaaaa

SEQ ID NO: 8708 - RNA, 795 nt, Artificial Sequence
  mRNA Design i-3 (hSL-A100) comprising derived and/or modified sequence from Pf(3D7)__XP_001351122.1__HsALB_Pf-CSP(98-272) (opt6)
aggagaaagcuuaccaugaaauggguaacauucauaucacuacuauuccuauucagcucagccuacagcgcagacggaaacccagacccaaacgcaaacccaaacguagacccaaacgcaaacccaaacgucgacccaaacgcaaacccaaacguagacccaaacgcaaacccaaacgcaaacccaaacgcaaacccaaacgcaaacccaaacgcaaacccaaacgcaaacccaaacgcaaacccaaacgcaaacccaaacgcaaacccaaacgcaaacccaaacgcaaacccaaacgcaaacccaaacgcaaacccaaacgcaaacccaaacgcaaacccaaacgcaaacccaaacgcaaacccaaacguagacccaaaugcaaacccaaacgcaaacccaaacgcaaacccaaacgcaaacccaaacgcaaacccaaacgcaaacccaaacgcaaacccaaacgcaaacccaaacgcaaacccaaacgcaaacccaaacgcaaacccaaacgcgaacccaaacgcaaacccaaacgcaaacccaaacgcaaacccaaacgcaaacccaaaugcaaacccaaacgcaaacccauaaggacuaguuauaagacugacuagcccgaugggccucccaacgggcccuccuccccuccuugcaccgagauuaaucaaaggcucuuuucagagccaccaaaaaaaaaaaaaaaaaaaaaaaaaaaaaaaaaaaaaaaaaaaaaaaaaaaaaaaaaaaaaaaaaaaaaaaaaaaaaaaaaaaaaaaaaaaaaaaaaaaaa

SEQ ID NO: 8709 - RNA, 1101 nt, Artificial Sequence
  mRNA Design i-3 (hSL-A100) comprising derived and/or modified sequence from Pf(3D7)__XP_001351122.1__HsALB_Pf-CSP(98-374) (opt6)
aggagaaagcuuaccaugaaaugggucacauucauaucccuacuauuccuauucucaucagcauauucagcagauggaaacccagacccaaacgccaacccaaacguagacccaaacgcaaacccaaacguagacccaaacgcaaacccaaacguagacccaaacgcaaacccaaacgcaaacccaaacgcaaacccaaacgcaaacccaaacgcaaacccaaacgcaaacccaaacgcaaacccaaacgcaaacccaaacgcaaacccaaacgcaaacccaaacgcaaacccaaaugcaaauccaaacgcaaauccaaacgcaaacccaaacgccaacccaaacgcaaauccaaacgcaaacccaaacguagacccgaacgcaaacccgaacgcaaacccaaacgcaaacccaaaugcaaacccaaacgcaaacccaaacgccaacccaaacgcaaacccaaacgcaaacccaaaugcaaacccaaacgcaaacccaaacgccaacccaaacgcaaacccaaacgcaaacccaaacgcaaacccaaacgcaaacccaaaugcaaacccaaacgcaaacccaaacgcaaacccaaacaaaaacaaccaaggaaauggacaaggccacaacaugccaaacgacccaaacagaaacguagacgaaaacgcaaacgcaaacuccgcagucaaaaacaacaacaacgaagaaccauccgacaaacacauaaaagaauaccucaauaaaauacaaaacucacuaucaacagaaugguccccaugcucaguaacaugcggaaacggaauacaaguaagaauaaaaccaggauccgcaaacaaaccaaaagacgaacuagacuacgcaaacgauauagaaaaaaaaauaugcaaaauggaaaaaugcuaaggacuaguuauaagacugacuagcccgaugggccucccaacgggcccuccuccccuccuugcaccgagauuaaucaaaggcucuuuucagagccaccaaaaaaaaaaaaaaaaaaaaaaaaaaaaaaaaaaaaaaaaaaaaaaaaaaaaaaaaaaaaaaaaaaaaaaaaaaaaaaaaaaaaaaaaaaaaaaaaaaaaa

SEQ ID NO: 8710 - RNA, 1170 nt, Artificial Sequence
  mRNA Design i-3 (hSL-A100) comprising derived and/or modified sequence from Pf(3D7)__XP_001351122.1__HsALB_Pf-CSP(98-397) (opt6)
aggagaaagcuuaccaugaaauggguaaccuucauaucauuacuauuccuuuucagcucggcauacucagcagacggcaacccagacccaaacgcaaacccaaacgucgacccaaaugcgaacccaaacguagacccaaacgcaaacccaaacguagauccaaacgcaaacccaaacgcaaacccaaacgcaaacccaaacgcaaacccaaacgccaacccaaaugcaaacccaaacgcaaaccccaacgcaaacccaaacgcaaacccaaacgcaaacccaaacgcaaaucccaacgcaaauccaaacgcaaacccaaaugcaaacccaaacgccaacccaaacgcaaacccaaacgcaaaccccaaugucgacccaaacgcaaacccaaacgcaaacccaaacgcaaacccaaacgcaaauccaaacgcaaaccccaacgcaaacccaaacgcaaacccaaacgcaaacccaaacgcaaacccaaacgcaaacccaaacgcaaacccaaacgcaaacccaaacgcaaacccaaacgcaaacccaaacgcaaauccaaacgcaaacccaaacgcaaacccaaacgcaaacccaaacaaaaacaaccaaggaaauggacaaggacacaacaugccaaaugaccccaacagaaacgucgacgaaaacgccaacgcaaacagcgcaguaaaaaacaacaacaaugaagaaccaucagacaaacacauaaaagaauaccuaaacaaaauucaaaacucacuaucaaccgaaugguccccaugcucaguaacaugcggaaacgguauacaaguacgaauaaaaccaggaucagcaaacaaaccaaaagacgaacuagacuacgcaaacgacauagaaaaaaaaauaugcaaaauggaaaaaugcucaucaguuuuuaacguagucaauagcucaaucggacucauaaugguacuaucauuucucuuccuaaauuaaggacuaguuauaagacugacuagcccgaugggccucccaacgggcccuccuccccuccuugcaccgagauuaaucaaaggcucuuuucagagccaccaaaaaaaaaaaaaaaaaaaaaaaaaaaaaaaaaaaaaaaaaaaaaaaaaaaaaaaaaaaaaaaaaaaaaaaaaaaaaaaaaaaaaaaaaaaaaaaaaaaaa

SEQ ID NO: 8711 - RNA, 1497 nt, Artificial Sequence
  mRNA Design i-3 (hSL-A100) comprising derived and/or modified sequence from Pf(3D7)__XP_001351122.1__HsALB_Pf-CSP(199-377)_L(PVTN)_HBsAg (opt6)
aggagaaagcuuaccaugaaauggguaacauuuauauccuuacuauuucucuucuccucagcuuacucugacccaaacgcaaaucccaacgcaaacccaaaugcaaacccaaacgcaaauccaaacgcaaacccaaaugcuaaucccaacgcaaacccaaacgcaaaccccaaugccaacccaaacgcuaacccaaacgcaaacccaaacgccaacccaaaugcaaacccaaacgcaaacccaaacgcaaauccaaaugcaaacccaaacgcaaauccaaacgcaaacccaaacaaaaacaaccaaggaaacggacaaggccauaauaugccuaaugaccccaacagaaacguagacgaaaaugcuaacgccaacucagcaguaaaaaacaacaauaacgaagaaccaucagauaaacacauaaaagaauacuuaaacaaaauacaaaauucauuaucaacagaauggucaccaugcucagucaccugcggaaacgguauacaaguacgcauaaaaccaggcucagcaaauaaaccaaaagacgaacuagauuacgcuaacgacauagaaaaaaaaauaugcaaaauggaaaaaugcucaucaguaccaguaacaaauauggaaaacauaacaucaggauuccuaggcccacucuuaguacuacaagcaggauuuuuucuucuaacaagaaucuuaacuauaccccaaucacucgacucaugguggaccucacuaaauuuccucggaggaucuccaguaugccucggacaaaauucacaaucaccaacauccaaucacucacccaccuccugcccaccaaucugcccaggauacagauggaugugcuuacgaagauucauaauauuccuauucauacuacuucuaugcuuaauauuccuucucguccuacucgacuaucaaggaaugcucccuguaugcccacucauaccaggauccacaacaacuaacacaggacccuguaaaacaugcacaacacccgcccaaggaaauucaauguuccccucuugcugcugcacaaaaccaacagacggaaauugcacaugcauuccaauuccaucaucuugggcauuugcaaaauacuuaugggaaugggcaucaguccgauucucgugguuaucuuuacuaguaccauucguucaaugguuuguaggacuuucaccuacaguaugguuaucugcaauauggaugaugugguacuggggaccaucauuauacucaaucguaucaccauuuauaccacuacuacccauauuuuucugccuauggguauacauauaaggacuaguuauaagacugacuagcccgaugggccucccaacgggcccuccuccccuccuugcaccgagauuaaucaaaggcucuuuucagagccaccaaaaaaaaaaaaaaaaaaaaaaaaaaaaaaaaaaaaaaaaaaaaaaaaaaaaaaaaaaaaaaaaaaaaaaaaaaaaaaaaaaaaaaaaaaaaaaaaaaaaa

SEQ ID NO: 8712 - RNA, 1407 nt, Artificial Sequence
  mRNA Design i-3 (hSL-A100) comprising derived and/or modified sequence from Pf(3D7)__XP_001351122.1__Pf-CSP (opt11)
aggagaaagcuuaccaugaugcgaaagcuugcgauccucagcgucuccucauuccuauucguagaagcacuauuccaagaauaccaaugcuacggcucauccucaaacacacgcguacucaacgaacucaacuacgacaacgcaggaacaaaccucuacaacgaacuagagaugaacuacuacggcaaacaagaaaacugguacucucucaaaaaaaacucacgaagccucggcgagaacgacgacggaaacaacgaagacaacgaaaaacuccgcaaaccaaaacacaaaaaacucaaacaacccgccgacggaaacccagacccaaacgcaaacccaaacguagacccaaacgccaaccccaacguagaccccaacgccaacccuaacgucgaccccaaugcaaaccccaacgcgaacccaaacgcaaaccccaacgcaaaccccaacgcaaacccaaacgccaaccccaacgcaaacccaaacgcaaacccuaacgccaacccaaacgccaacccaaacgccaacccaaacgcaaacccgaacgccaaccccaacgccaacccaaacgcaaacccaaacgcaaaccccaacgccaaccccaacguagaccccaacgcaaaccccaacgcaaacccaaacgccaaccccaacgccaaccccaacgccaaccccaacgccaaccccaaugccaacccaaacgcgaaccccaacgcaaacccgaacgcaaacccaaacgcgaacccaaacgcgaacccaaacgccaaccccaacgccaaccccaacgcaaacccaaacgcgaacccaaacgcaaaccccaacgccaacccaaacaaaaacaaccaaggaaacggacaaggccacaacaugccaaacgaccccaaccgcaacguagacgaaaacgccaacgccaacuccgcugucaagaacaacaacaacgaagaaccauccgacaaacacauaaaagaauaccuaaacaaaauccaaaacucccucucaaccgaauggucccccugcuccgucacaugcggaaacggcauccaaguccgaaucaaaccaggcuccgccaacaaacccaaagacgaacuggacuacgccaacgacaucgaaaaaaaaaucugcaaaauggaaaaaugcucauccgucuucaacguggucaacuccuccaucggacuaauaaugguccucuccuuccuauuccuaaacuaaggacuaguuauaagacugacuagcccgaugggccucccaacgggcccuccuccccuccuugcaccgagauuaaucaaaggcucuuuucagagccaccaaaaaaaaaaaaaaaaaaaaaaaaaaaaaaaaaaaaaaaaaaaaaaaaaaaaaaaaaaaaaaaaaaaaaaaaaaaaaaaaaaaaaaaaaaaaaaaaaaaaa

SEQ ID NO: 8713 - RNA, 1338 nt, Artificial Sequence
  mRNA Design i-3 (hSL-A100) comprising derived and/or modified sequence from Pf(3D7)__XP_001351122.1__Pf-CSP(1-374) (opt11)
aggagaaagcuuaccaugaugcgcaaacucgcaauccucuccgucucaucguuccuauucguagaagcacucuuccaagaauaccaaugcuacggcucaagcuccaacacaagaguacucaacgaacucaacuacgacaaugccggaacaaaccuauacaacgagcuagaaaugaacuacuacggcaaacaagaaaacugguacucgcuaaaaaaaaacagcagaagccuaggugaaaacgacgacggaaacaacgaagacaacgaaaaacugcgcaaaccaaaacacaaaaaacuaaaacaacccgcagacggcaacccagacccaaacgcaaacccaaacguagaccccaacgccaacccaaacguagacccaaacgccaacccaaacguagacccaaacgcaaacccgaacgcaaacccaaacgcaaacccaaacgcaaacccaaacgcaaacccaaacgccaaccccaacgcaaauccaaacgcaaaccccaacgcaaaccccaacgccaacccaaacgcaaaccccaacgcgaacccaaacgccaaccccaacgccaacccaaacgcaaacccaaacgcaaacccaaacgccaaccccaacgucgacccaaacgccaacccaaacgcaaaccccaacgccaaccccaacgcaaacccaaacgccaacccgaacgcaaacccgaacgcaaacccaaacgcaaaccccaacgcaaaccccaacgcaaacccaaacgcaaaccccaacgccaaccccaacgccaaccccaacgcaaacccaaacgcaaacccgaacgcaaaccccaacgcaaaccccaacgccaaucccaacaaaaacaaccaaggcaacggacaaggacacaacaugccaaacgaccccaaccgcaacgucgacgaaaacgccaacgccaacuccgcggucaaaaacaacaacaacgaagagcccucagacaaacacauaaaagaauaccuaaacaaaauccaaaacucccucucgacagaauggucccccugcagcgucaccugcggaaacggcauacaaguacgaauaaaacccggcucagccaacaaaccaaaagacgaacuagacuacgccaacgacauagaaaaaaaaauaugcaaaauggaaaaaugcugaggacuaguuauaagacugacuagcccgaugggccucccaacgggcccuccuccccuccuugcaccgagauuaaucaaaggcucuuuucagagccaccaaaaaaaaaaaaaaaaaaaaaaaaaaaaaaaaaaaaaaaaaaaaaaaaaaaaaaaaaaaaaaaaaaaaaaaaaaaaaaaaaaaaaaaaaaaaaaaaaaaaa

SEQ ID NO: 8714 - RNA, 1191 nt, Artificial Sequence
  mRNA Design i-3 (hSL-A100) comprising derived and/or modified sequence from Pf(3D7)__XP_001351122.1__Pf-CSP(1-325) (opt11)
aggagaaagcuuaccaugaugcgcaaacucgcaauccuaucaguaagcucauuccuguucguagaagcacuauuccaagaauaccaaugcuacggcucauccucaaacacaagaguacuaaacgaacuaaacuacgacaacgccggaaccaaccuauacaacgaacucgaaaugaacuacuacggcaaacaagaaaacugguacucacuaaagaaaaacagcagaagccucggcgaaaacgacgacggcaacaacgaagacaacgagaaacugagaaaaccaaaacacaagaaacuaaaacaacccgcggacgggaacccagacccaaaugcaaacccaaacgucgacccaaacgcaaacccaaacguagacccaaacgcaaaccccaacguagaccccaacgcaaacccaaacgcaaacccaaacgcaaacccaaacgcaaacccaaacgcaaaccccaacgcaaacccaaacgcaaacccaaacgcaaaccccaacgccaacccaaacgccaaccccaacgcaaacccaaacgcaaacccaaacgcaaaccccaacgccaacccgaacgcaaacccaaacgcaaacccaaacgcaaaccccaacguagacccaaacgcaaacccaaacgccaaccccaacgcaaacccaaacgcaaacccgaacgcaaaccccaacgcaaaccccaacgcaaacccaaacgcaaaccccaacgcaaauccaaacgcaaacccaaacgcaaacccaaacgccaacccaaacgcaaaucccaacgcaaacccaaacgcaaaccccaacgcaaacccaaacgcaaacccaaacgcaaacccaaacaaaaacaaccaaggaaacggccaaggacacaacaugccaaacgacccaaaccgaaacguagacgaaaacgccaacgccaacagcgcagucaaaaacaacaauaaugaagaacccuccgacaaacacauaaaagaauaccuaaacaaaauccaaaacugaggacuaguuauaagacugacuagcccgaugggccucccaacgggcccuccuccccuccuugcaccgagauuaaucaaaggcucuuuucagagccaccaaaaaaaaaaaaaaaaaaaaaaaaaaaaaaaaaaaaaaaaaaaaaaaaaaaaaaaaaaaaaaaaaaaaaaaaaaaaaaaaaaaaaaaaaaaaaaaaaaaaa

SEQ ID NO: 8715 - RNA, 1407 nt, Artificial Sequence
  mRNA Design i-3 (hSL-A100) comprising derived and/or modified sequence from Pf(3D7)__XP_001351122.1__HsALB_Pf-CSP(19-397) (opt11)
aggagaaagcuuaccaugaaaugggucaccuucauaucccuccuauuccucuucucaucagccuacucccucuuccaggaauaccaaugcuacggaucguccucaaacacuagaguacucaaugaauuaaacuacgacaacgccggcaccaaccucuacaacgaacucgaaaugaacuacuacggaaaacaagaaaacugguacucacucaaaaaaaacucucgaucccucggcgaaaacgacgacggcaacaacgaagacaacgagaaacuacgcaaaccaaaacacaaaaaauuaaaacaacccgccgacggcaaccccgaccccaacgccaaccccaacguagaccccaacgcgaaccccaacgucgacccaaacgccaaccccaacguggaccccaacgccaacccaaacgccaaccccaacgccaacccaaacgcaaaccccaacgccaacccaaacgccaaccccaacgcaaacccaaacgcgaacccaaacgcaaacccaaacgccaacccaaacgcaaacccaaacgcgaacccaaacgccaacccaaacgccaaccccaacgcaaacccaaacgccaacccaaacgccaacccaaacguagacccaaacgcgaaccccaacgcuaacccaaacgcaaacccaaacgccaacccaaacgccaacccuaacgcaaacccaaacgccaaccccaacgccaaccccaacgccaaccccaacgcaaacccaaacgccaacccaaacgccaaccccaacgccaacccaaacgcaaacccaaacgcaaacccaaacgcaaaccccaacgccaacccaaacgccaacccaaacaaaaauaaccaaggcaaugggcaaggccacaacaugccaaacgaccccaaccgcaaugucgacgaaaacgccaacgccaacucugcaguaaaaaacaauaacaacgaagaacccucagacaaacacaucaaagaauaccucaacaagauccaaaauucccucuccacagaauggucccccugcagcguaaccugcggcaacggcauccaaguccgcaucaaacccggcuccgccaacaaaccgaaagacgaacuagacuacgccaacgacauagaaaaaaaaaucugcaaaauggaaaaaugcagcuccgucuucaacgucgucaacagcuccaucggccucaucaugguccucuccuuccuguuccucaacuaaggacuaguuauaagacugacuagcccgaugggccucccaacgggcccuccuccccuccuugcaccgagauuaaucaaaggcucuuuucagagccaccaaaaaaaaaaaaaaaaaaaaaaaaaaaaaaaaaaaaaaaaaaaaaaaaaaaaaaaaaaaaaaaaaaaaaaaaaaaaaaaaaaaaaaaaaaaaaaaaaaaaa

SEQ ID NO: 8716 - RNA, 1425 nt, Artificial Sequence
  mRNA Design i-3 (hSL-A100) comprising derived and/or modified sequence from Pf(3D7)__XP_001351122.1__HsIns-iso1_Pf-CSP(19-397) (opt11)
aggagaaagcuuaccauggcacucuggaugagacuccucccccuccucgcacuccucgcccuauggggcccagacccagcggcagcccucuuccaagaauaccaaugcuacggcucauccuccaacacccgaguccucaaugaacuaaacuacgacaacgccggcaccaaccuauacaacgaacuagaaaugaacuacuacggcaaacaagaaaacugguacucccucaaaaaaaauucacgcucccuaggugagaacgacgacggaaacaacgaagacaacgaaaaacuccgaaaacccaaacacaaaaaacuaaaacaaccagcagacggcaaccccgaccccaacgcaaaccccaacguagacccaaacgcgaaccccaacgucgauccaaacgccaacccaaacguugaccccaacgcgaaccccaacgcaaacccaaacgcaaacccuaacgcgaaccccaacgcaaaccccaacgccaaccccaacgccaaccccaacgccaacccaaacgcaaaccccaacgccaaccccaacgcaaacccaaacgcaaacccgaacgcaaaccccaacgccaacccaaacgcaaacccaaacgccaacccaaacgcaaaccccaacguagacccaaacgccaaucccaacgcgaaccccaacgcaaacccaaacgcgaacccaaacgccaacccaaacgcaaacccgaacgccaacccaaacgccaaccccaacgcaaaccccaacgcaaacccaaacgccaacccaaacgcaaacccaaacgcaaaccccaacgccaaccccaacgcaaacccaaaugccaaccccaacgccaaccccaacgcaaacccaaacaaaaacaaccaaggaaacggccaaggccacaacaugccgaacgaccccaaccgaaacgucgacgaaaacgcaaacgccaacucagcggucaaaaacaacaacaacgaagaacccucagacaaacacaucaaagaauaccuaaacaagauccagaacucucucucaacagaauggucccccugcuccguaacaugcggcaacggcauccaaguacgaaucaaaccgggaucagccaauaaacccaaagacgaacucgacuacgccaacgacaucgaaaaaaaaauaugcaaaauggaaaaaugcagcucagucuucaacguagucaacagcuccauaggccucaucaugguacucuccuuccuguuccuaaacuaaggacuaguuauaagacugacuagcccgaugggccucccaacgggcccuccuccccuccuugcaccgagauuaaucaaaggcucuuuucagagccaccaaaaaaaaaaaaaaaaaaaaaaaaaaaaaaaaaaaaaaaaaaaaaaaaaaaaaaaaaaaaaaaaaaaaaaaaaaaaaaaaaaaaaaaaaaaaaaaaaaaaa

SEQ ID NO: 8717 - RNA, 1404 nt, Artificial Sequence
  mRNA Design i-3 (hSL-A100) comprising derived and/or modified sequence from Pf(3D7)__XP_001351122.1__HsSPARC_Pf-CSP(19-397) (opt11)
aggagaaagcuuaccaugcgcgccuggauauucuuccuccuaugccuagcaggacgcgcccucgcacucuuccaagaauaccaaugcuacggcucauccucaaacacccgcguacuuaacgaacuaaacuacgacaacgccggaaccaaccuauacaacgaacucgaaaugaacuacuacgguaaacaagaaaacugguacucccucaaaaaaaacagccgaagccuaggagaaaacgacgacggaaacaacgaagacaacgaaaaacugcgcaaacccaaacacaaaaaacucaaacaacccgcagacgggaacccagacccaaacgcaaacccaaacguggacccaaacgccaacccuaacguagaccccaacgcaaaccccaacgucgacccuaaugcaaacccaaacgccaaccccaacgcgaacccaaacgcaaaccccaacgcuaacccgaacgccaaccccaacgccaacccgaacgcaaacccaaacgcaaacccaaacgcgaacccaaacgcaaacccaaacgccaaccccaacgcgaacccaaacgccaauccaaacgccaacccaaacgcaaacccaaacgccaaccccaacguagacccaaacgccaacccaaacgcgaacccaaacgcaaaccccaacgcaaacccaaacgcaaacccaaacgccaacccuaacgcaaacccaaacgccaaccccaacgccaacccaaacgcaaacccaaacgccaacccaaacgccaaccccaacgcaaacccgaacgcaaaccccaacgcaaacccaaacgcaaacccaaacgcgaacccgaacgccaacccaaauaagaacaaccaaggaaacggacaaggccacaacaugccaaacgaccccaaccgcaacgucgacgaaaacgcaaaugccaacuccgcagucaaaaacaacaauaacgaagaacccucggacaaacacaucaaagaauaccucaacaagauccaaaacucacucuccaccgaauggucacccugcagcguaacuugcggcaacggcauccaaguccgcauaaaaccaggcuccgcaaacaaacccaaagacgaacucgacuaugccaacgacaucgaaaaaaaaauaugcaaaauggaaaaaugcagcucagucuucaacguagucaacagcucuaucggacuaauaaugguacucuccuuccuauucuuaaacuaaggacuaguuauaagacugacuagcccgaugggccucccaacgggcccuccuccccuccuugcaccgagauuaaucaaaggcucuuuucagagccaccaaaaaaaaaaaaaaaaaaaaaaaaaaaaaaaaaaaaaaaaaaaaaaaaaaaaaaaaaaaaaaaaaaaaaaaaaaaaaaaaaaaaaaaaaaaaaaaaaaaaa

SEQ ID NO: 8718 - RNA, 1407 nt, Artificial Sequence
  mRNA Design i-3 (hSL-A100) comprising derived and/or modified sequence from Pf(3D7)__XP_001351122.1__IgE_Pf-CSP(19-397) (opt11)
aggagaaagcuuaccauggacuggacauggauccucuuccucgucgccgcggccacacgcguacacucacucuuccaagaauaucaaugcuacggcucaagcucgaacacgcgcguacucaacgaacuaaacuacgacaacgccggcaccaaccuauacaacgaacucgaaaugaacuacuacggcaaacaagaaaacugguacucacuuaagaaaaauucacgaucccucggagaaaacgacgaugggaacaacgaagacaacgaaaaacuacgcaaacccaaacacaagaaacuuaaacaacccgcagacggcaacccagacccaaacgcaaaccccaacguagaccccaacgcaaacccaaacguagacccaaacgccaacccaaacguagacccaaacgcgaacccaaacgccaacccaaacgccaaccccaacgcaaacccaaacgcaaauccaaacgcaaacccaaaugcaaacccgaacgccaauccaaacgcaaaccccaacgcaaacccaaacgcaaaccccaaugccaacccaaacgcaaaccccaacgcaaaccccaacgcaaaccccaacgcaaacccaaacgcgaacccaaacguagaccccaacgccaaccccaacgccaacccaaacgcaaacccaaacgccaacccaaacgccaaccccaacgcaaaccccaacgcaaacccgaacgcaaacccaaacgcaaacccaaacgcaaacccgaacgcaaacccuaacgcgaaccccaacgccaaccccaacgcaaacccaaacgcaaacccaaacgccaacccaaacgcaaacccaaacgcaaacccaaacaaaaacaaccaaggaaacgggcaaggacauaacaugccgaacgaccccaaccgcaacguagacgaaaacgccaacgccaacagcgcagucaaaaacaacaacaacgaagaacccuccgacaaacacaucaaagaauaccuaaacaaaauccagaacucacuauccaccgaauggucccccugcagcgugaccugcggcaacggcauacaaguccgcauaaaaccaggcuccgccaacaaacccaaagacgaacuagacuacgccaacgacauagaaaagaaaauaugcaaaauggaaaaaugcagcucagucuucaauguagucaacuccuccaucggacucauaaugguccuaucauuccucuuccuaaacuaaggacuaguuauaagacugacuagcccgaugggccucccaacgggcccuccuccccuccuugcaccgagauuaaucaaaggcucuuuucagagccaccaaaaaaaaaaaaaaaaaaaaaaaaaaaaaaaaaaaaaaaaaaaaaaaaaaaaaaaaaaaaaaaaaaaaaaaaaaaaaaaaaaaaaaaaaaaaaaaaaaaaa

SEQ ID NO: 8719 - RNA, 1572 nt, Artificial Sequence
  mRNA Design i-3 (hSL-A100) comprising derived and/or modified sequence from Pf(3D7)__XP_001351122.1__Pf-CSP_L(G4SG4)_TM domain HA (opt11)
aggagaaagcuuaccaugaugcgcaaacucgccauccucagcgucagcucguuccucuucgucgaagcacuauuccaagaauaccaguguuacggcucauccucaaacacacgcgugcucaacgaacuaaacuacgacaacgccggcaccaaccucuacaacgaacuagaaaugaacuauuacggcaagcaagaaaacugguacucacucaaaaaaaacagccgaagccuaggcgagaacgacgacgggaacaacgaagacaacgaaaaacuacgcaaacccaagcacaaaaaacugaaacaaccagccgacggaaauccagaccccaacgcaaacccgaacguagaccccaacgcgaaccccaacguggacccgaacgcaaacccgaacguagacccaaacgcaaacccaaacgcgaacccaaacgcaaacccaaacgcuaacccaaacgcaaaccccaacgccaaccccaacgcgaacccaaacgcaaacccaaacgcaaacccaaacgcaaacccgaacgcaaacccaaacgccaacccaaacgcgaacccaaacgccaacccaaacgcaaacccaaacgcaaacccaaacgcaaacccaaacguagacccgaacgccaacccgaaugcaaacccaaacgcaaacccgaacgcaaacccaaacgcgaacccgaacgccaacccaaacgcaaacccgaacgcaaaccccaacgccaacccaaacgcaaaccccaacgcaaaccccaacgcaaacccgaacgcaaacccaaacgcaaacccaaacgccaaccccaacgccaaccccaacgcaaacccgaacgccaacccaaacaaaaacaaccaaggcaacgggcaaggacacaacaugccaaacgaccccaaccgaaacgucgacgaaaacgccaacgccaacuccgcagucaaaaacaacaacaacgaagaacccucagacaaacacauaaaagaauaccucaacaaaauccaaaacucacucucaaccgaguggucacccugcagugugaccuguggcaacggaauacaaguacgcauaaaacccggaucagccaacaaaccgaaagacgaacuagacuacgccaacgacauagaaaaaaaaauaugcaaaauggagaaaugcagcucugucuucaacgucgucaacagcucaaucggacucauaaugguccucuccuuccuauuccucaacggcggagggggcucaggcggcggaggaaaauuagaauccaccagaaucuaucagauucucgccauauacagcacagucgcaagcucgcuuguccuugucguaucacuaggcgcaaucucauucuggaugugcuccaacggaagccugcaaugccgcauuugcauauaaggacuaguuauaagacugacuagcccgaugggccucccaacgggcccuccuccccuccuugcaccgagauuaaucaaaggcucuuuucagagccaccaaaaaaaaaaaaaaaaaaaaaaaaaaaaaaaaaaaaaaaaaaaaaaaaaaaaaaaaaaaaaaaaaaaaaaaaaaaaaaaaaaaaaaaaaaaaaaaaaaaaa

SEQ ID NO: 8720 - RNA, 1446 nt, Artificial Sequence
  mRNA Design i-3 (hSL-A100) comprising derived and/or modified sequence from Pf(3D7)__XP_001351122.1__Pf-CSP(199-377)_L(PVTN)_HBsAg (opt11)
aggagaaagcuuaccauggaccccaacgccaaccccaacgccaaccccaacgccaaucccaacgcuaaccccaacgccaaccccaacgcaaaccccaacgccaacccaaacgccaaccccaacgcaaaccccaacgccaaucccaaugccaaccccaacgccaaccccaacgcgaaccccaacgccaaccccaacgcaaacccaaacgccaaccccaacgccaaccccaacgccaaccccaacaaaaacaaccaaggcaacggccaaggccacaacaugcccaacgaccccaaccgcaacguagacgagaacgccaacgccaacagcgcugucaaaaacaacaacaacgaggaacccuccgacaaacacaucaaagaauaccuuaacaaaauccaaaacucucucuccaccgaguggucccccugcucagucacaugcggcaacggcauacaaguucguaucaaacccggcucagcaaacaaacccaaagacgaacucgacuacgcaaacgacauagaaaagaaaaucugcaaaauggaaaaauguucauccguccccgucaccaacauggaaaacaucacuuccggauuccucgguccccuacucguacuccaagccggcuucuuccuccucacccgcauccucaccaucccccaaucacuugacuccugguggaccucccucaacuuccucggcggcucccccgucugccuaggccaaaacagccaaucccccacuagcaaccacucccccacauccugcccacccaucugccccggauaucgauggaugugccuucgccgauucauaaucuuccucuucauccuccuacucugccucaucuuccuccucguccuucuagauuaccaaggcaugcuccccgucugcccccuuauccccggcuccaccaccacaaacaccggccccugcaaaaccugcacaacccccgcccaaggcaauagcauguuccccuccugcugcugcacuaaaccaacagacggcaacuguaccugcaucccaaucccaucaucaugggccuucgccaaauaccucugggaaugggcaucuguacgauucuccuggcucucccuucucguacccuucguccagugguucgucggccucucccccaccguauggcuauccgccaucuggaugaugugguacuggggccccucccuauacuccaucgucuccccauucauaccacuccuacccaucuucuucugccucugggucuacaucugaggacuaguuauaagacugacuagcccgaugggccucccaacgggcccuccuccccuccuugcaccgagauuaaucaaaggcucuuuucagagccaccaaaaaaaaaaaaaaaaaaaaaaaaaaaaaaaaaaaaaaaaaaaaaaaaaaaaaaaaaaaaaaaaaaaaaaaaaaaaaaaaaaaaaaaaaaaaaaaaaaaaa

SEQ ID NO: 8721 - RNA, 1488 nt, Artificial Sequence
  mRNA Design i-3 (hSL-A100) comprising derived and/or modified sequence from Pf(3D7)__XP_001351122.1__Pf-CSP(199-387)_L(PVTN)_HBsAg (opt11)
aggagaaagcuuaccaugauggcccccgaccccaacgcaaauccaaacgcaaaccccaacgccaacccuaacgcaaaccccaacgccaacccaaacgccaaucccaacgccaacccuaacgccaaccccaacgcaaaccccaacgccaaccccaacgccaacccuaacgcaaaccccaacgccaacccaaacgcaaaccccaacgccaaccccaacgccaaccccaacgcaaacccaaacgcaaaccccaacaaaaacaaccaaggaaacggacaaggccacaacaugccuaacgaccccaaucgcaacgucgacgaaaacgcaaacgccaacuccgccgucaaaaacaacaacaacgaagaacccucugacaaacacaucaaagaauaccucaacaagauccaaaacucccuauccaccgaauggucccccugcuccgucacuugcgguaauggcauccaaguccgcauaaaaccaggauccgcaaacaaacccaaagacgaacuagacuacgccaacgacauagaaaagaaaaucugcaaaauggaaaaaugcuccucagucuucaaugucguaaacuccuccauuggccuaggccccgucaccaacauggaaaacauuaccuccggauuccucgguccucuccucguccuccaagccggauucuuucuccucacacgaauccucacuaucccucaaucccuggacucaugguggaccucccucaacuuccugggcggcucccccgucugccucggccaaaacagccaauccccaaccuccaaucacucccccacaagcugcccucccauaugccccggcuaccgcuggaugugccuccgucgcuucaucauauuccucuucauacuucuccucugccucaucuuccuccuuguccugcuagacuaccaaggcaugcuccccgucugcccacucauccccgguuccaccacaacaaacaccggccccugcaaaacaugcaccacacccgcccaagguaacuccauguuccccuccugcugcugcaccaaaccaaccgacggcaacugcacuugcauucccauccccucauccugggccuucgccaaauaccucugggaaugggcauccguccguuucucauggcuaucucuccuaguaccauucguacaaugguucguuggccucucccccaccguauggcucuccgccauauggaugaugugguacuggggcccuucacuuuacuccaucgucucacccuucaucccacuccuacccaucuucuucugccuuuggguauacaucuaaggacuaguuauaagacugacuagcccgaugggccucccaacgggcccuccuccccuccuugcaccgagauuaaucaaaggcucuuuucagagccaccaaaaaaaaaaaaaaaaaaaaaaaaaaaaaaaaaaaaaaaaaaaaaaaaaaaaaaaaaaaaaaaaaaaaaaaaaaaaaaaaaaaaaaaaaaaaaaaaaaaaa

SEQ ID NO: 8722 - RNA, 672 nt, Artificial Sequence
  mRNA Design i-3 (hSL-A100) comprising derived and/or modified sequence from Pf(3D7)__XP_001351122.1__HsALB_Pf-CSP(19-152) (opt11)
aggagaaagcuuaccaugaaaugggucaccuucaucucccuccucuuccucuucuccagcgcauacucccucuuccaagaauaccaaugcuacggcuccuccuccaacacccgcguccucaacgaacucaacuacgacaacgccggcaccaaccucuacaacgaacucgaaaugaacuacuacggcaaacaagaaaacugguacucccucaaaaaaaacucccgcucccuaggcgaaaacgacgacggaaacaacgaagacaacgaaaaacuccgcaaacccaaacacaaaaaacucaaacaacccgccgacggaaaccccgaccccaacgccaacccaaacgucgaccccaacgccaaccccaacgucgaccccaacgccaaccccaacgucgaccccaacgccaaccccaacgcaaacccaaacgcaaacccaaacgccaaccccaacgccaaccccaacgccaaccccuaaggacuaguuauaagacugacuagcccgaugggccucccaacgggcccuccuccccuccuugcaccgagauuaaucaaaggcucuuuucagagccaccaaaaaaaaaaaaaaaaaaaaaaaaaaaaaaaaaaaaaaaaaaaaaaaaaaaaaaaaaaaaaaaaaaaaaaaaaaaaaaaaaaaaaaaaaaaaaaaaaaaaa

SEQ ID NO: 8723 - RNA, 792 nt, Artificial Sequence
  mRNA Design i-3 (hSL-A100) comprising derived and/or modified sequence from Pf(3D7)__XP_001351122.1__HsALB_Pf-CSP(19-192) (opt11)
aggagaaagcuuaccaugaaauggguaaccuucauaucccuccucuuccuauucucgagcgccuacucccucuuccaagaauaccaaugcuacggcucauccuccaacacccgcguccucaacgaacucaacuacgacaacgccggcaccaaccucuacaacgaacuagagaugaacuacuacggcaaacaagaaaacugguacucacucaaaaaaaacucccgaucccuaggagaaaacgacgacggcaacaacgaagacaacgaaaaacuacgaaaacccaaacacaaaaaacucaaacaacccgccgacggcaaccccgaccccaacgccaaccccaacgucgaccccaacgccaacccaaacguagaccccaacgccaaccccaacgucgacccaaacgccaaccccaacgccaaccccaacgccaacccaaacgcaaacccaaacgcaaacccaaacgccaacccaaacgccaaccccaacgccaaccccaacgcaaaccccaacgcaaaccccaacgccaacccaaacgcaaaccccaacgccaacccaaacgccaacccaaacgccaaccccaacgcaaaccccuaaggacuaguuauaagacugacuagcccgaugggccucccaacgggcccuccuccccuccuugcaccgagauuaaucaaaggcucuuuucagagccaccaaaaaaaaaaaaaaaaaaaaaaaaaaaaaaaaaaaaaaaaaaaaaaaaaaaaaaaaaaaaaaaaaaaaaaaaaaaaaaaaaaaaaaaaaaaaaaaaaaaaa

SEQ ID NO: 8724 - RNA, 1032 nt, Artificial Sequence
  mRNA Design i-3 (hSL-A100) comprising derived and/or modified sequence from Pf(3D7)__XP_001351122.1__HsALB_Pf-CSP(19-272) (opt11)
aggagaaagcuuaccaugaaauggguaaccuucaucucccuccucuuccuauucucaucagcauacucacucuuccaagaauaccaaugcuacggcucgagcucaaacacacgcguacucaacgaacugaacuacgacaacgccggaaccaaccucuacaaugaacucgaaaugaacuacuacggcaaacaagagaacugguacucacucaaaaaaaacagcagaagccucggagaaaacgacgacggaaacaacgaagacaacgaaaaacuccgcaaacccaagcacaaaaaacuaaaacaacccgcagacggaaaccccgaccccaacgcaaacccgaacgucgacccaaacgccaacccaaacguagaccccaacgcgaacccaaacguagacccaaacgccaacccaaacgcaaaccccaacgccaaccccaacgcaaacccaaacgccaacccaaacgcaaaccccaaugcaaaccccaacgcaaacccaaacgccaaccccaacgcaaacccaaacgcaaacccaaacgcaaacccaaacgcaaacccaaacgcgaacccaaacgcaaacccaaacgcaaacccgaacgcaaacccaaacguagacccaaacgcaaaccccaacgccaacccaaacgcaaacccaaacgcaaacccaaacgcaaacccaaacgcgaacccaaacgccaacccaaacgcaaacccaaacgcaaacccaaacgcaaacccaaacgcaaacccaaacgcaaacccaaacgcaaacccgaacgcgaacccaaacgcaaacccaaacgcgaacccgaacgcaaaccccaacgcaaacccauaaggacuaguuauaagacugacuagcccgaugggccucccaacgggcccuccuccccuccuugcaccgagauuaaucaaaggcucuuuucagagccaccaaaaaaaaaaaaaaaaaaaaaaaaaaaaaaaaaaaaaaaaaaaaaaaaaaaaaaaaaaaaaaaaaaaaaaaaaaaaaaaaaaaaaaaaaaaaaaaaaaaaa

SEQ ID NO: 8725 - RNA, 1194 nt, Artificial Sequence
  mRNA Design i-3 (hSL-A100) comprising derived and/or modified sequence from Pf(3D7)__XP_001351122.1__HsALB_Pf-CSP(19-272)_L(AAY)_Pf-CSP(310-3 27)_L(AAY)_Pf-CSP(346-375) (opt11)
aggagaaagcuuaccaugaaaugggucaccuucaucucacuccuauuccuauucuccuccgcauacucacucuuccaagaauaccagugcuacggaucaagcuccaacacacgcguacuaaacgaacugaacuacgacaacgccggaaccaaccucuacaacgaacucgaaaugaauuacuacggcaaacaagagaacugguacucacucaaaaaaaacagcagaucccuaggcgaaaacgacgacggaaacaacgaagacaacgaaaaacuacgcaaacccaaacacaaaaaacuaaaacaacccgcagacggaaacccagauccaaacgcaaacccaaacguagacccaaacgccaacccaaacguagacccaaacgcaaacccaaacguagaccccaacgcaaacccaaacgcaaacccgaacgccaacccaaacgcaaaccccaacgccaacccaaacgcaaacccaaacgcaaacccaaacgcaaacccaaacgccaaccccaacgcgaacccaaacgcaaacccuaacgccaacccaaacgcaaacccaaacgcaaacccgaacgcaaacccaaacgcaaacccaaacgcaaacccgaacguagacccaaacgcaaacccaaacgcaaacccaaacgcaaacccaaacgccaacccaaacgccaacccaaacgcaaaccccaacgcaaaccccaacgcgaacccaaacgccaaccccaacgcaaacccaaacgccaacccaaacgccaacccgaacgcaaacccaaacgccaacccaaacgccaacccgaacgcaaacccaaacgccaacccaaacgccaacccagccgcguacgaacccucagauaaacacauaaaagaauaccucaacaaaauccaaaacucacuagcagccuacaucaaaccaggauccgccaacaaacccaaggacgaacucgacuacgcaaacgacaucgaaaaaaaaaucugcaaaauggaaaaaugcucaugaggacuaguuauaagacugacuagcccgaugggccucccaacgggcccuccuccccuccuugcaccgagauuaaucaaaggcucuuuucagagccaccaaaaaaaaaaaaaaaaaaaaaaaaaaaaaaaaaaaaaaaaaaaaaaaaaaaaaaaaaaaaaaaaaaaaaaaaaaaaaaaaaaaaaaaaaaaaaaaaaaaaa

SEQ ID NO: 8726 - RNA, 1155 nt, Artificial Sequence
  mRNA Design i-3 (hSL-A100) comprising derived and/or modified sequence from Pf(3D7)__XP_001351122.1__HsALB_Pf-CSP(19-272)_L(AAY)_Pf-CSP(346-3 65)_L(AAY)_P2 (opt11)
aggagaaagcuuaccaugaaaugggucaccuucaucucacuccuauuccuauucucgagcgcauacucacucuuccaagaauaccaaugcuauggcuccagcucaaacacacgcguccuaaacgaacucaacuacgacaacgccggaacaaaccucuacaacgaacucgaaaugaacuacuacggcaaacaagaaaacugguacucgcucaaaaaaaacucccgaagucuaggcgaaaacgacgacggaaacaacgaagacaacgaaaaacuacgcaaacccaaacacaaaaaacuaaaacaacccgcagacggaaaccccgacccaaacgcaaaccccaacguagacccaaacgcaaaccccaacguagacccaaacgcaaacccgaacguagacccaaacgccaacccaaacgccaaccccaacgcaaacccaaacgccaaccccaacgcaaacccaaacgcaaacccaaacgcaaacccaaacgcaaacccaaacgccaaccccaacgccaacccaaacgccaaccccaacgcgaaccccaacgcgaacccaaacgccaacccaaacgcaaaccccaacgcaaacccaaacgcaaacccaaacgucgacccaaacgcaaacccaaacgcaaacccgaacgcaaacccaaacgcaaaccccaacgccaacccaaacgcgaacccaaacgccaacccaaacgccaacccaaacgcaaacccaaacgccaacccaaacgcaaacccaaacgcaaaccccaacgcaaaccccaacgcaaacccaaacgccaaccccaacgcaaaccccaacgcaaacccaaacgccaacccagccgcauacauaaaacccggcuccgccaacaaaccaaaagacgaacuagacuacgccaacgacauagaagcagccuaccaauacaucaaagccaacagcaaauucauaggaauaaccgagcuauaaggacuaguuauaagacugacuagcccgaugggccucccaacgggcccuccuccccuccuugcaccgagauuaaucaaaggcucuuuucagagccaccaaaaaaaaaaaaaaaaaaaaaaaaaaaaaaaaaaaaaaaaaaaaaaaaaaaaaaaaaaaaaaaaaaaaaaaaaaaaaaaaaaaaaaaaaaaaaaaaaaaaa

SEQ ID NO: 8727 - RNA, 1149 nt, Artificial Sequence
  mRNA Design i-3 (hSL-A100) comprising derived and/or modified sequence from Pf(3D7)__XP_001351122.1__HsALB_Pf-CSP(19-272)_L(AAY)_Pf-CSP(346-3 65)_L(AAY)_PADRE (opt11)
aggagaaagcuuaccaugaaauggguaaccuucaucucgcuacuguuccucuucucauccgcauacucccucuuccaagaauaccaaugcuacggcucauccucaaacacacgaguacuaaacgaacucaacuacgacaacgccggaaccaaccuauacaacgaacucgaaaugaacuacuacggcaaacaagaaaacugguacucacucaaaaaaaacucccgaucccucggcgaaaacgacgacggaaacaacgaagacaacgaaaaacugagaaaacccaaacacaaaaaacuaaaacaaccagccgacggcaacccagaccccaacgcaaaccccaacguagacccaaacgccaaccccaacguagacccaaacgcaaacccaaacguagaccccaacgccaacccaaacgccaacccaaacgccaaccccaacgcaaacccaaacgcaaacccaaacgcaaacccaaacgccaacccaaacgcaaacccaaacgccaacccgaacgcaaaccccaacgcaaacccaaacgcaaaccccaacgccaacccaaacgcaaacccaaacgcaaaccccaacgcaaacccaaaugcgaacccaaacguggacccgaacgcaaaccccaacgccaacccaaacgcaaaccccaacgccaaccccaacgccaaccccaacgcaaaccccaacgccaaccccaacgccaacccaaacgccaacccaaacgcgaacccaaacgcaaaccccaacgcaaacccaaacgcaaacccaaacgcaaacccaaacgcaaaccccaacgcaaacccaaacgcaaacccaaacgcaaaccccgcagccuacauuaaaccaggcuccgccaacaaacccaaagacgaacucgacuacgccaacgacauagaagcagccuacgccaaauucguagccgcauggacacucaaagccgcagccuaaggacuaguuauaagacugacuagcccgaugggccucccaacgggcccuccuccccuccuugcaccgagauuaaucaaaggcucuuuucagagccaccaaaaaaaaaaaaaaaaaaaaaaaaaaaaaaaaaaaaaaaaaaaaaaaaaaaaaaaaaaaaaaaaaaaaaaaaaaaaaaaaaaaaaaaaaaaaaaaaaaaaa

SEQ ID NO: 8728 - RNA, 1206 nt, Artificial Sequence
  mRNA Design i-3 (hSL-A100) comprising derived and/or modified sequence from Pf(3D7)__XP_001351122.1__HsALB_Pf-CSP(19-272)_L(G4S)_Pf-CSP(310-3 27)_L(G4S)_Pf-CSP(346-375) (opt11)
aggagaaagcuuaccaugaaaugggucaccuucaucucccuacuauuccucuucucaucagccuacucacucuuccaagaguaccaaugcuacggcucaagcucaaacacacgcguacucaacgaacuaaacuacgacaacgcaggcaccaaccucuacaacgaacucgagaugaacuacuacggcaaacaagaaaacugguacucacucaaaaaaaacucccgcagccucggcgaaaacgacgacggcaacaacgaagauaacgagaaacuacgcaaacccaaacacaaaaaacuaaaacaacccgccgacggaaacccagacccaaacgccaacccaaacguagacccaaacgcaaacccaaacguagacccaaacgccaaccccaacguagacccaaacgccaacccaaacgccaacccaaacgcaaacccaaacgcaaacccaaacgcgaacccaaacgcaaaccccaacgccaacccaaacgcaaacccaaacgccaaccccaacgcaaacccaaacgcaaaccccaacgcaaacccaaacgccaaccccaacgcaaaccccaacgcaaacccaaacgcaaacccaaacgcaaacccaaacgucgacccaaacgcaaaccccaacgcaaacccaaacgcaaacccaaacgccaacccaaacgcaaacccaaacgccaacccaaacgcaaaccccaacgcaaaccccaacgccaacccaaacgcaaaccccaacgcgaacccaaacgcaaacccaaacgcaaacccaaacgcaaaccccaacgcaaaccccaacgcaaacccaaacgcaaacccaaacgcaaacccaggcggcggcggaagcgaacccucggacaaacacauaaaagaauaccucaacaaaauccaaaacucccucggaggcggaggcuccaucaaacccggaagcgcaaacaaacccaaagacgaacucgacuacgcaaacgacaucgagaaaaaaauaugcaaaauggaaaaaugcucauaaggacuaguuauaagacugacuagcccgaugggccucccaacgggcccuccuccccuccuugcaccgagauuaaucaaaggcucuuuucagagccaccaaaaaaaaaaaaaaaaaaaaaaaaaaaaaaaaaaaaaaaaaaaaaaaaaaaaaaaaaaaaaaaaaaaaaaaaaaaaaaaaaaaaaaaaaaaaaaaaaaaaa

SEQ ID NO: 8729 - RNA, 1191 nt, Artificial Sequence
  mRNA Design i-3 (hSL-A100) comprising derived and/or modified sequence from Pf(3D7)__XP_001351122.1__HsALB_Pf-CSP(19-272)_L(G4S)_Pf-CSP(310-3 27)_Pf-CSP(346-375) (opt11)
aggagaaagcuuaccaugaaauggguaaccuucaucucacuccuauuccucuucuccuccgcauacucgcucuuccaagaauaccaaugcuacggcucaagcucaaacacccgcguccucaacgaacucaacuacgacaacgccgguaccaaccuauacaacgaacucgaaaugaacuacuacggcaaacaagaaaacugguacucacucaaaaaaaacuccaggucccuaggagaaaacgacgauggcaacaacgaagacaacgaaaaacuccgaaagccaaaacacaaaaaacuaaaacagcccgcagacggcaacccagacccaaacgcaaacccaaacguagacccaaacgcgaaccccaacguagacccaaacgcaaacccaaacguagacccaaacgcaaaccccaacgcaaacccaaacgcaaaccccaacgcaaaccccaacgcaaacccaaacgcaaacccaaacgcaaacccaaacgcaaacccaaacgcaaaccccaacgccaaccccaacgcaaacccaaacgcaaacccaaacgcaaacccaaacgcaaacccaaacgcaaaccccaacgccaacccaaacgcaaacccaaacguagacccaaacgcaaacccaaacgcaaacccaaacgcaaaccccaacgccaacccaaacgcaaacccaaacgcaaacccaaacgcaaacccaaacgcaaauccaaacgcuaacccaaacgcaaacccgaacgcaaaccccaaugcaaaccccaacgcaaacccaaacgccaacccaaacgcaaacccaaacgcgaacccaaacgcaaacccaaacgcaaacccaggcggaggcggauccgaacccuccgacaaacacauaaaagaauaccuaaacaaaauccaaaacucucucauaaaacccggaucagccaacaaaccaaaagacgaacuagacuacgccaaugacauagaaaaaaaaauaugcaagauggaaaaaugcagcuaaggacuaguuauaagacugacuagcccgaugggccucccaacgggcccuccuccccuccuugcaccgagauuaaucaaaggcucuuuucagagccaccaaaaaaaaaaaaaaaaaaaaaaaaaaaaaaaaaaaaaaaaaaaaaaaaaaaaaaaaaaaaaaaaaaaaaaaaaaaaaaaaaaaaaaaaaaaaaaaaaaaaa

SEQ ID NO: 8730 - RNA, 1191 nt, Artificial Sequence
  mRNA Design i-3 (hSL-A100) comprising derived and/or modified sequence from Pf(3D7)__XP_001351122.1__HsALB_Pf-CSP(19-325) (opt11)
aggagaaagcuuaccaugaaauggguaaccuucaucucacuccuguuccuauucucauccgcauacucacucuuccaagaauaccaaugcuacggcucgucuucaaacacccgcguacucaacgaacucaacuacgacaacgccggaaccaaccucuacaacgaacucgaaaugaacuacuacggcaaacaagaaaacugguacucacucaaaaaaaacagccgaagccuaggcgaaaacgacgacggaaacaaugaagacaacgaaaaacuccgcaaacccaaacacaaaaaacucaaacaaccagcagacggaaaccccgacccgaacgcaaacccaaacguagacccaaacgcaaacccaaacguagacccaaacgcgaacccaaacguagaccccaacgcaaacccaaacgcaaacccaaacgcaaacccaaacgccaaccccaacgccaacccaaacgccaacccaaacgcaaacccgaacgcgaacccaaacgcaaaccccaacgcaaacccaaacgcaaacccaaacgcgaacccaaacgccaacccaaacgccaacccaaacgcaaacccaaacgccaacccaaacgcaaaccccaacguggaccccaacgcaaacccaaacgcaaacccaaacgccaaccccaacgcaaacccaaacgcaaacccuaacgcaaacccaaacgcaaaccccaacgcgaacccaaacgcaaacccaaacgcaaacccaaacgcaaaccccaacgcaaacccaaacgccaacccaaacgccaacccaaacgcgaauccaaacgcaaaccccaacgcaaacccaaacgcaaacccgaacaaaaacaaccaagggaacggacaaggacacaacaugccaaacgaccccaaccgcaacgucgacgaaaacgccaacgccaacuccgcaguaaaaaacaacaacaacgaagaacccuccgacaaacacauaaaagaauaccucaacaagauacaaaacuagggacuaguuauaagacugacuagcccgaugggccucccaacgggcccuccuccccuccuugcaccgagauuaaucaaaggcucuuuucagagccaccaaaaaaaaaaaaaaaaaaaaaaaaaaaaaaaaaaaaaaaaaaaaaaaaaaaaaaaaaaaaaaaaaaaaaaaaaaaaaaaaaaaaaaaaaaaaaaaaaaaaa

SEQ ID NO: 8731 - RNA, 1368 nt, Artificial Sequence
  mRNA Design i-3 (hSL-A100) comprising derived and/or modified sequence from Pf(3D7)__XP_001351122.1__HsALB_Pf-CSP(19-384) (opt11)
aggagaaagcuuaccaugaaauggguaaccuucaucucacuacucuuccuauucucaagcgcguacucacucuuccaagaauaccaaugcuacggcucgagcucaaacacccgcguucucaacgaacuaaacuacgacaacgccggaaccaaccuauacaacgaacuugaaaugaacuacuacggcaaacaagaaaacugguacucgcucaaaaaaaacuccaggagccuaggcgaaaacgacgacggaaacaacgaagacaacgagaaacuaagaaaacccaaacacaaaaaacucaaacagcccgcggacggaaaccccgacccaaacgcaaaccccaacguagacccgaacgccaacccaaacguagacccaaacgcaaacccaaacguagaccccaacgcaaacccgaacgccaacccaaacgcaaacccaaaugcgaaccccaacgcgaacccaaacgcaaacccgaacgcaaaccccaacgccaacccaaacgcaaacccaaacgcaaaccccaacgcaaacccaaacgcgaacccaaacgcaaacccaaacgcgaacccgaacgcaaacccaaacgcaaacccgaacgcaaacccaaacguagacccaaacgccaacccaaacgcaaacccaaacgcaaaccccaacgcaaacccaaacgcaaacccgaacgcaaacccaaacgcaaacccaaacgcgaacccaaacgcaaaccccaacgcaaacccaaacgcaaacccuaacgcaaacccgaacgcaaacccaaacgccaacccaaacgcgaaccccaacgcaaacccaaacgccaacccaaacgccaacccgaacaaaaacaaccaaggaaacggacaaggacacaacaugccaaacgaccccaaccgaaacgucgacgaaaacgcaaacgccaacagugccgucaaaaacaacaacaaugaagaacccucagacaaacacauaaaagaauaccuaaacaaaauccagaacucgcucucaaccgaauggucacccugcagcgucaccugcggcaacggaauacaaguacgcaucaaaccaggcucggccaacaaaccaaaagacgaauuagacuacgcaaacgacaucgaaaaaaaaauaugcaaaauggaaaaaugcagcucagucuucaacguagucaauagcucauaaggacuaguuauaagacugacuagcccgaugggccucccaacgggcccuccuccccuccuugcaccgagauuaaucaaaggcucuuuucagagccaccaaaaaaaaaaaaaaaaaaaaaaaaaaaaaaaaaaaaaaaaaaaaaaaaaaaaaaaaaaaaaaaaaaaaaaaaaaaaaaaaaaaaaaaaaaaaaaaaaaaaa

SEQ ID NO: 8732 - RNA, 1506 nt, Artificial Sequence
  mRNA Design i-3 (hSL-A100) comprising derived and/or modified sequence from Pf(3D7)__XP_001351122.1__HsALB_Pf-CSP(19-384)_TM domain HA (opt11)
aggagaaagcuuaccaugaagugggucaccuucaucucccuccuauuccucuucucuagcgcguacucacucuuccaagaauaccaaugcuacggauccagcucaaacacacgcguccucaaugaacugaacuacgauaacgccggaaccaaccucuacaacgaacucgaaaugaacuacuacggcaaacaagaaaacugguacucacuaaagaaaaauagcaggucccucggcgaaaacgacgacgggaacaacgaagauaacgaaaaacuacgcaaacccaagcacaagaaacuaaaacagccagcagacggaaacccagaccccaacgccaacccaaacgucgaccccaacgcaaacccaaacguagauccgaacgcaaacccaaacgucgauccaaacgcaaacccaaacgcaaacccaaacgcuaaccccaacgccaacccaaacgcaaacccgaacgcaaaccccaacgcgaacccgaacgcaaacccaaacgcaaacccaaacgccaacccaaacgcaaacccaaacgcaaacccaaacgccaacccaaacgcaaaccccaacgcgaaccccaacgcaaaccccaacgcaaacccaaacgucgacccaaacgcaaaccccaacgcaaaccccaacgcaaaccccaaugcaaacccaaacgcgaaccccaacgcaaacccaaacgcgaacccaaaugcaaaccccaacgccaaccccaacgccaacccgaacgcaaacccaaacgccaacccaaacgccaacccaaacgcaaaucccaacgccaacccaaacgcgaacccgaacgcaaacccaaacgcaaacccgaacaaaaacaaccaaggaaacggucaaggacacaacaugccaaacgaccccaaccgcaacgucgacgaaaacgccaaugccaacagcgccgucaaaaacaacaacaacgaagaacccucagacaaacacaucaaagaguaccuaaacaagauccaaaacucccucuccaccgaauggucccccugcagcguaaccugcggaaacggcauccaaguccgcauaaaaccaggcucagccaacaaaccaaaagaugaacucgacuacgcaaacgacauagaaaagaaaaucugcaaaauggaaaaaugcagcuccguauucaacgugguuaacuccucaaaacuagaauccacccgcaucuaccaaauacucgcaauauacagcacaguagccagcucacucguccuagucgucucccucggagccaucagcuucuggaugugcuccaacggaaguuuacaaugucgcauaugcauauaaggacuaguuauaagacugacuagcccgaugggccucccaacgggcccuccuccccuccuugcaccgagauuaaucaaaggcucuuuucagagccaccaaaaaaaaaaaaaaaaaaaaaaaaaaaaaaaaaaaaaaaaaaaaaaaaaaaaaaaaaaaaaaaaaaaaaaaaaaaaaaaaaaaaaaaaaaaaaaaaaaaaa

SEQ ID NO: 8733 - RNA, 1218 nt, Artificial Sequence
  mRNA Design i-3 (hSL-A100) comprising derived and/or modified sequence from Pf(3D7)__XP_001351122.1__HsALB_Pf-CSP(82-397) (opt11)
aggagaaagcuuaccaugaaaugggucaccuucaucucacuccuguuccucuucucauccgccuacagcgacaacgaaaaacugcgcaaacccaaacacaagaaacucaaacaaccagccgacggcaaccccgaccccaacgccaacccaaacguagaccccaacgccaaccccaacguagacccaaacgccaacccaaacguggaccccaacgcaaacccaaacgccaacccaaacgccaauccaaacgccaacccaaacgcaaacccaaacgcaaaccccaacgccaacccuaacgccaaccccaacgcaaacccaaacgccaaccccaacgccaaccccaacgcaaaccccaacgcaaacccuaacgccaaccccaacgccaaccccaacgcaaacccaaacgccaaccccaacguagacccaaacgccaaccccaacgcaaaccccaacgccaacccaaacgcaaacccaaacgccaaccccaacgccaaccccaacgcaaacccaaacgcaaacccaaaugcaaaccccaacgccaaccccaacgccaaccccaacgcaaaccccaacgcaaaccccaacgcaaacccgaacgccaacccaaacgccaacccaaacgccaaccccaacgcaaaccccaacaaaaacaaccaaggcaacggacaaggacacaacaugcccaacgaccccaaccgcaacgucgacgaaaacgccaacgccaacuccgccgucaaaaacaacaacaacgaagaacccuccgacaaacacaucaaagaauaccucaacaaaauccaaaacucccucucaaccgaauggucacccugcuccguaaccugcggcaacggcauccaaguccgcaucaaacccggcucagccaacaaacccaaagacgaacucgacuacgccaaugacaucgaaaagaaaauaugcaaaauggaaaaaugcuccuccgucuucaacgucgucaacuccuccaucggccucaucaugguccucucguuccuauuccuaaacuaaggacuaguuauaagacugacuagcccgaugggccucccaacgggcccuccuccccuccuugcaccgagauuaaucaaaggcucuuuucagagccaccaaaaaaaaaaaaaaaaaaaaaaaaaaaaaaaaaaaaaaaaaaaaaaaaaaaaaaaaaaaaaaaaaaaaaaaaaaaaaaaaaaaaaaaaaaaaaaaaaaaaa

SEQ ID NO: 8734 - RNA, 570 nt, Artificial Sequence
  mRNA Design i-3 (hSL-A100) comprising derived and/or modified sequence from Pf(3D7)__XP_001351122.1__HsALB_Pf-CSP(93-192) (opt11)
aggagaaagcuuaccaugaaauggguaaccuucaucucacuccuauuccuauucucaagcgcauacucaaaacuaaaacaacccgcagacggaaacccagacccaaacgcaaacccaaacguagacccaaacgcaaacccaaacguagacccaaacgcaaacccaaacguagacccaaacgcaaacccaaacgcaaacccaaacgcaaacccaaacgcaaacccaaacgcaaaccccaacgcaaacccaaacgcaaacccaaacgcaaacccaaacgcaaacccaaacgcaaacccaaacgcaaacccaaacgcaaacccaaacgcaaacccaaacgcaaacccaaacgccaacccaaacgcaaacccauaaggacuaguuauaagacugacuagcccgaugggccucccaacgggcccuccuccccuccuugcaccgagauuaaucaaaggcucuuuucagagccaccaaaaaaaaaaaaaaaaaaaaaaaaaaaaaaaaaaaaaaaaaaaaaaaaaaaaaaaaaaaaaaaaaaaaaaaaaaaaaaaaaaaaaaaaaaaaaaaaaaaaa

SEQ ID NO: 8735 - RNA, 810 nt, Artificial Sequence
  mRNA Design i-3 (hSL-A100) comprising derived and/or modified sequence from Pf(3D7)__XP_001351122.1__HsALB_Pf-CSP(93-272) (opt11)
aggagaaagcuuaccaugaaaugggucaccuucaucucacuccuauuccuauucucauccgcauacucaaaacuaaaacaacccgccgacggaaacccagacccaaacgcaaacccaaacguagacccaaacgcaaacccaaacguagacccaaacgcaaacccaaacguagacccaaacgcaaacccaaacgccaacccaaacgcaaauccaaacgcaaacccaaacgcaaacccaaacgcaaacccaaacgcaaacccaaacgccaacccaaacgccaacccaaacgcaaacccaaacgcaaacccaaacgcaaacccaaacgcaaacccaaacgcaaacccaaacgccaaccccaacgcaaacccaaacgcaaaccccaacguagacccaaacgcaaacccaaacgccaaccccaacgcaaaccccaacgccaaccccaacgccaacccaaacgccaacccaaacgcaaacccaaacgcaaacccaaacgcaaacccaaacgcaaacccaaacgcaaacccaaacgcaaacccaaacgcaaacccaaacgcaaacccaaacgccaacccaaacgcaaacccaaacgcaaacccgaacgcaaacccauaaggacuaguuauaagacugacuagcccgaugggccucccaacgggcccuccuccccuccuugcaccgagauuaaucaaaggcucuuuucagagccaccaaaaaaaaaaaaaaaaaaaaaaaaaaaaaaaaaaaaaaaaaaaaaaaaaaaaaaaaaaaaaaaaaaaaaaaaaaaaaaaaaaaaaaaaaaaaaaaaaaaaa

SEQ ID NO: 8736 - RNA, 1185 nt, Artificial Sequence
  mRNA Design i-3 (hSL-A100) comprising derived and/or modified sequence from Pf(3D7)__XP_001351122.1__HsALB_Pf-CSP(93-397) (opt11)
aggagaaagcuuaccaugaaaugggucacauucaucucacuccuauuccuauucucaagcgccuacuccaaacucaaacaacccgccgacggcaacccagacccaaacgccaaccccaacgucgacccaaacgccaacccaaacgucgacccaaacgcaaacccaaacgucgaccccaacgccaaccccaacgccaaccccaacgccaacccaaacgccaaucccaacgccaaccccaacgccaacccaaacgcaaaccccaacgccaauccaaacgccaaccccaacgcaaaccccaacgccaaccccaacgcaaacccaaacgcaaacccaaacgcaaaccccaacgccaaccccaacgcaaaccccaacgccaaccccaacgucgaccccaacgccaacccaaacgccaacccaaacgccaaccccaacgccaaccccaacgcaaacccaaacgcgaaccccaacgcaaaccccaacgccaacccgaacgccaacccgaacgcaaacccaaacgccaaccccaacgcaaaccccaacgcaaacccaaacgcgaaccccaacgccaacccaaacgccaacccaaacgcgaacccaaacgccaaccccaacaaaaacaaccaagggaacggacaaggccacaacaugcccaacgaccccaaccgcaacgucgacgaaaacgccaacgccaacuccgccgucaaaaacaacaacaacgaagaacccuccgacaaacacauaaaagaauaccuaaacaaaauccaaaacucacucucuacugaauggucccccugcucagucaccugcggcaacggcauacaaguccgcauaaaacccggcucggccaacaaaccaaaagacgaacuagacuacgcaaacgacaucgaaaaaaaaauaugcaaaauggaaaaaugcuccucagucuucaacguaguaaacuccuccaucggccucauaaugguccucuccuuccuauuccucaacuaaggacuaguuauaagacugacuagcccgaugggccucccaacgggcccuccuccccuccuugcaccgagauuaaucaaaggcucuuuucagagccaccaaaaaaaaaaaaaaaaaaaaaaaaaaaaaaaaaaaaaaaaaaaaaaaaaaaaaaaaaaaaaaaaaaaaaaaaaaaaaaaaaaaaaaaaaaaaaaaaaaaaa

SEQ ID NO: 8737 - RNA, 555 nt, Artificial Sequence
  mRNA Design i-3 (hSL-A100) comprising derived and/or modified sequence from Pf(3D7)__XP_001351122.1__HsALB_Pf-CSP(98-192) (opt11)
aggagaaagcuuaccaugaaaugggucacauucauaagccuacucuuccucuucagcucagccuacuccgcagacggaaacccagacccaaacgcaaacccaaacguagacccaaacgcaaacccaaacguagacccaaacgcaaacccaaacguagacccaaacgcaaacccaaacgcaaacccaaacgcaaacccaaacgcaaacccaaacgcaaacccaaacgcaaacccaaacgcaaacccaaacgcaaacccaaacgcaaacccaaacgcaaaccccaacgcaaacccaaacgcaaacccaaacgcaaacccaaacgcaaacccaaacgcaaacccaaacgcaaacccauaaggacuaguuauaagacugacuagcccgaugggccucccaacgggcccuccuccccuccuugcaccgagauuaaucaaaggcucuuuucagagccaccaaaaaaaaaaaaaaaaaaaaaaaaaaaaaaaaaaaaaaaaaaaaaaaaaaaaaaaaaaaaaaaaaaaaaaaaaaaaaaaaaaaaaaaaaaaaaaaaaaaaa

SEQ ID NO: 8738 - RNA, 795 nt, Artificial Sequence
  mRNA Design i-3 (hSL-A100) comprising derived and/or modified sequence from Pf(3D7)__XP_001351122.1__HsALB_Pf-CSP(98-272) (opt11)
aggagaaagcuuaccaugaaauggguaaccuucauaagccuacucuuccuauucucaucagccuacagcgcagacggaaacccagaccccaacgcaaacccaaacguagacccaaacgcaaacccaaacguagaccccaacgcaaacccaaacguagacccaaacgccaacccaaacgcaaacccaaacgcaaacccaaacgccaacccaaacgcaaacccaaacgccaacccaaacgcaaacccaaacgcaaacccaaacgcaaacccaaacgcaaacccaaacgcaaacccaaacgcaaacccaaacgccaacccaaacgcaaacccaaacgcaaacccaaacgcaaacccaaacgccaaccccaacguagacccaaacgccaaccccaacgcaaacccaaacgcaaacccaaacgcaaacccaaacgcaaacccaaacgcaaacccaaacgcaaacccaaacgcaaacccaaacgcaaacccgaacgccaacccaaacgcaaacccaaacgcaaacccaaacgcaaacccaaacgcaaacccaaacgcaaaccccaacgcaaacccaaacgcaaacccaaacgcaaacccauaaggacuaguuauaagacugacuagcccgaugggccucccaacgggcccuccuccccuccuugcaccgagauuaaucaaaggcucuuuucagagccaccaaaaaaaaaaaaaaaaaaaaaaaaaaaaaaaaaaaaaaaaaaaaaaaaaaaaaaaaaaaaaaaaaaaaaaaaaaaaaaaaaaaaaaaaaaaaaaaaaaaaa

SEQ ID NO: 8739 - RNA, 1101 nt, Artificial Sequence
  mRNA Design i-3 (hSL-A100) comprising derived and/or modified sequence from Pf(3D7)__XP_001351122.1__HsALB_Pf-CSP(98-374) (opt11)
aggagaaagcuuaccaugaaauggguaaccuucauaucccuacucuuccuuuucuccucggccuacuccgcagacggaaacccagacccaaacgcaaaccccaacguagacccaaacgcaaacccaaauguagacccaaacgcaaacccaaacguggacccaaacgcgaaccccaacgcaaaccccaacgcaaacccaaacgccaacccaaacgcaaacccaaacgccaacccaaacgcaaaccccaacgccaaccccaacgccaacccaaacgcaaacccaaacgcaaaccccaacgcaaacccaaacgccaacccaaacgccaacccaaacgccaaccccaacgcaaacccaaacgccaacccaaacguagacccaaacgcaaacccaaacgcaaacccaaacgcaaaccccaacgcaaaccccaacgcaaacccaaacgcaaacccaaacgcaaacccaaacgcaaacccaaacgccaacccaaacgcgaaccccaacgccaacccaaacgcaaacccaaacgccaacccaaacgccaacccaaacgcaaaccccaacgcaaacccaaacgcaaacccaaacgccaacccgaacaaaaacaaccaaggcaacggccaaggacacaacaugccaaacgaccccaaccgcaacguagacgaaaacgccaacgcaaacuccgcagucaaaaacaacaacaacgaagaacccuccgacaaacacauaaaagaauaccuaaacaaaauccaaaacucgcucucaaccgaauggucccccugcuccgucaccugcggcaacggcauccaaguacgcaucaaaccaggcucagcaaacaaaccaaaagacgaacucgacuacgccaacgacauagaaaaaaaaauaugcaaaauggagaaaugcuaaggacuaguuauaagacugacuagcccgaugggccucccaacgggcccuccuccccuccuugcaccgagauuaaucaaaggcucuuuucagagccaccaaaaaaaaaaaaaaaaaaaaaaaaaaaaaaaaaaaaaaaaaaaaaaaaaaaaaaaaaaaaaaaaaaaaaaaaaaaaaaaaaaaaaaaaaaaaaaaaaaaaa

SEQ ID NO: 8740 - RNA, 1170 nt, Artificial Sequence
  mRNA Design i-3 (hSL-A100) comprising derived and/or modified sequence from Pf(3D7)__XP_001351122.1__HsALB_Pf-CSP(98-397) (opt11)
aggagaaagcuuaccaugaaauggguaaccuucaucagccuacuauuccuauucagcuccgccuacagcgccgacggaaacccagacccaaacgccaaccccaacgucgacccaaacgccaaccccaacguagacccaaacgccaaccccaacgucgaccccaacgccaaccccaacgccaacccaaacgccaacccuaacgccaacccaaacgccaacccgaacgccaaccccaacgcgaacccaaacgccaacccaaacgcaaaccccaacgccaaccccaacgccaaccccaacgcaaaccccaacgcaaacccaaacgccaacccaaacgccaaccccaacgccaaccccaaugcaaacccaaacgucgaccccaacgccaacccaaacgccaaccccaacgccaaccccaacgccaaccccaacgcaaaccccaacgccaaccccaacgcgaaccccaacgccaaccccaacgccaacccaaacgccaaccccaacgccaaccccaacgccaaccccaacgcuaaccccaacgcaaacccaaacgccaacccaaacgccaacccaaacgccaaccccaacgccaacccaaacaaaaacaaccaaggcaacggacaaggacacaacaugccaaacgaccccaaccgcaacgucgacgaaaaugccaacgccaacuccgccgucaaaaacaacaacaacgaagaacccuccgacaaacacaucaaagaauaccuaaacaaaauacaaaacucucucucaaccgaauggucccccugcuccgucacaugcggcaacggcauccaaguccgcaucaaaccaggaucagccaauaaacccaaagacgaacucgacuacgccaacgacauagaaaaaaaaaucugcaaaauggaaaaaugcagcucagucuucaacgucgucaacuccucaaucggacuuauaaugguccuauccuuccucuuccuuaacuaaggacuaguuauaagacugacuagcccgaugggccucccaacgggcccuccuccccuccuugcaccgagauuaaucaaaggcucuuuucagagccaccaaaaaaaaaaaaaaaaaaaaaaaaaaaaaaaaaaaaaaaaaaaaaaaaaaaaaaaaaaaaaaaaaaaaaaaaaaaaaaaaaaaaaaaaaaaaaaaaaaaaa

SEQ ID NO: 8741 - RNA, 1497 nt, Artificial Sequence
  mRNA Design i-3 (hSL-A100) comprising derived and/or modified sequence from Pf(3D7)__XP_001351122.1__HsALB_Pf-CSP(199-377)_L(PVTN)_HBsAg (opt11)
aggagaaagcuuaccaugaaaugggucacauucaucucgcuccucuuccuauucuccuccgccuacuccgacccuaacgccaaucccaacgccaaccccaacgccaaccccaacgccaaccccaacgccaaccccaaugcaaacccaaacgcaaaccccaacgccaaccccaacgcaaacccaaaugcaaaccccaacgcaaaccccaacgccaaccccaaugccaaccccaacgcuaaccccaacgccaauccaaacgccaaccccaacgcaaaccccaacgccaacccuaacaaaaauaaccaaggcaacggccaaggacacaacaugcccaacgaccccaaccgaaaugucgacgaaaacgcuaacgcuaacagcgccgucaaaaacaacaacaacgaagaacccuccgacaaacacauuaaagaauaccucaacaaaauccaaaacucccucuccaccgaauggucccccugcucuguaacuugcggcaacggcauccaaguccgcauaaaacccggaucagcaaacaaacccaaagacgaacucgacuacgcaaacgacauugagaagaaaaucugcaaaauggaaaaaugcucaucaguacccgucacuaacauggaaaacaucaccuccggcuuccucggcccccuccuaguccuacaagccgguuucuuccuucuuacacgcauccuaaccaucccacaaucccuagacuccugguggacaucuuuaaacuuccuuggaggauccccugucugccucggccaaaacucccaauccccaaccucuaaccacucucccacauccugcccucccauaugccccgguuaccgcuggaugugccuccgccgcuucaucaucuuccucuucauacuccucuuaugccucaucuuccuccucguacuacucgacuaccaagguaugcuacccguaugcccucucauccccggcuccaccacaaccaacaccggccccugcaaaacaugcaccacccccgcacagggcaauuccauguuccccuccugcuguugcaccaaacccacagacggcaacuguaccugcauccccauccccuccucuugggcauuugccaaauaccucugggaaugggccuccguccgauucucuuggcuuucacuccucguucccuucguacaaugguucgucggccuaucacccaccgucuggcucuccgccaucuggaugaugugguacuggggcccuucacuuuacuccauagucagccccuucauaccacuccuccccaucuucuucugccuauggguauacaucuaaggacuaguuauaagacugacuagcccgaugggccucccaacgggcccuccuccccuccuugcaccgagauuaaucaaaggcucuuuucagagccaccaaaaaaaaaaaaaaaaaaaaaaaaaaaaaaaaaaaaaaaaaaaaaaaaaaaaaaaaaaaaaaaaaaaaaaaaaaaaaaaaaaaaaaaaaaaaaaaaaaaaa

SEQ ID NO: 8742 - protein, 548 aa, Artificial Sequence
  derived and/or modified protein sequence (artificial) from Pf(3D7)__XP_001351122.1__LumSynt_L(GGS4-GGG)_Pf-CSP(19-397)
MQIYEGKLTAEGLRFGIVASRFNHALVDRLVEGAIDAIVRHGGREEDITLVRVPGSWEIPVAAGELARKEDIDAVIAIGVLIRGATPHFDYIASEVSKGLADLSLELRKPITFGVITADTLEQAIERAGTKHGNKGWEAALSAIEMANLFKSLRGGSGGSGGSGGSGGGLFQEYQCYGSSSNTRVLNELNYDNAGTNLYNELEMNYYGKQENWYSLKKNSRSLGENDDGNNEDNEKLRKPKHKKLKQPADGNPDPNANPNVDPNANPNVDPNANPNVDPNANPNANPNANPNANPNANPNANPNANPNANPNANPNANPNANPNANPNANPNANPNANPNANPNANPNVDPNANPNANPNANPNANPNANPNANPNANPNANPNANPNANPNANPNANPNANPNANPNANPNANPNANPNANPNKNNQGNGQGHNMPNDPNRNVDENANANSAVKNNNNEEPSDKHIKEYLNKIQNSLSTEWSPCSVTCGNGIQVRIKPGSANKPKDELDYANDIEKKICKMEKCSSVFNVVNSSIGLIMVLSFLFLN

SEQ ID NO: 8743 - protein, 502 aa, Artificial Sequence
  derived and/or modified protein sequence (artificial) from Pf(3D7)__XP_001351122.1__HsALB_Pf-CSP(19-272)_L(PVTN)_HBsAg
MKWVTFISLLFLFSSAYSLFQEYQCYGSSSNTRVLNELNYDNAGTNLYNELEMNYYGKQENWYSLKKNSRSLGENDDGNNEDNEKLRKPKHKKLKQPADGNPDPNANPNVDPNANPNVDPNANPNVDPNANPNANPNANPNANPNANPNANPNANPNANPNANPNANPNANPNANPNANPNANPNANPNANPNANPNVDPNANPNANPNANPNANPNANPNANPNANPNANPNANPNANPNANPNANPNANPNANPNANPNANPNANPNANPPVTNMENITSGFLGPLLVLQAGFFLLTRILTIPQSLDSWWTSLNFLGGSPVCLGQNSQSPTSNHSPTSCPPICPGYRWMCLRRFIIFLFILLLCLIFLLVLLDYQGMLPVCPLIPGSTTTNTGPCKTCTTPAQGNSMFPSCCCTKPTDGNCTCIPIPSSWAFAKYLWEWASVRFSWLSLLVPFVQWFVGLSPTVWLSAIWMMWYWGPSLYSIVSPFIPLLPIFFCLWVYI

SEQ ID NO: 8744 - protein, 541 aa, Artificial Sequence
  derived and/or modified protein sequence (artificial) from Pf(3D7)__XP_001351122.1__HsALB_Pf-CSP(19-272)_L(AAY)_Pf-CSP(346-3 65)_L(AAY)_PADRE_L(PVTN)_HBsAg
MKWVTFISLLFLFSSAYSLFQEYQCYGSSSNTRVLNELNYDNAGTNLYNELEMNYYGKQENWYSLKKNSRSLGENDDGNNEDNEKLRKPKHKKLKQPADGNPDPNANPNVDPNANPNVDPNANPNVDPNANPNANPNANPNANPNANPNANPNANPNANPNANPNANPNANPNANPNANPNANPNANPNANPNANPNVDPNANPNANPNANPNANPNANPNANPNANPNANPNANPNANPNANPNANPNANPNANPNANPNANPNANPNANPAAYIKPGSANKPKDELDYANDIEAAYAKFVAAWTLKAAAPVTNMENITSGFLGPLLVLQAGFFLLTRILTIPQSLDSWWTSLNFLGGSPVCLGQNSQSPTSNHSPTSCPPICPGYRWMCLRRFIIFLFILLLCLIFLLVLLDYQGMLPVCPLIPGSTTTNTGPCKTCTTPAQGNSMFPSCCCTKPTDGNCTCIPIPSSWAFAKYLWEWASVRFSWLSLLVPFVQWFVGLSPTVWLSAIWMMWYWGPSLYSIVSPFIPLLPIFFCLWVYI

SEQ ID NO: 8745 - protein, 614 aa, Artificial Sequence
  derived and/or modified protein sequence (artificial) from Pf(3D7)__XP_001351122.1__HsALB_Pf-CSP(19-384)_L(PVTN)_HBsAg
MKWVTFISLLFLFSSAYSLFQEYQCYGSSSNTRVLNELNYDNAGTNLYNELEMNYYGKQENWYSLKKNSRSLGENDDGNNEDNEKLRKPKHKKLKQPADGNPDPNANPNVDPNANPNVDPNANPNVDPNANPNANPNANPNANPNANPNANPNANPNANPNANPNANPNANPNANPNANPNANPNANPNANPNANPNVDPNANPNANPNANPNANPNANPNANPNANPNANPNANPNANPNANPNANPNANPNANPNANPNANPNANPNANPNKNNQGNGQGHNMPNDPNRNVDENANANSAVKNNNNEEPSDKHIKEYLNKIQNSLSTEWSPCSVTCGNGIQVRIKPGSANKPKDELDYANDIEKKICKMEKCSSVFNVVNSSPVTNMENITSGFLGPLLVLQAGFFLLTRILTIPQSLDSWWTSLNFLGGSPVCLGQNSQSPTSNHSPTSCPPICPGYRWMCLRRFIIFLFILLLCLIFLLVLLDYQGMLPVCPLIPGSTTTNTGPCKTCTTPAQGNSMFPSCCCTKPTDGNCTCIPIPSSWAFAKYLWEWASVRFSWLSLLVPFVQWFVGLSPTVWLSAIWMMWYWGPSLYSIVSPFIPLLPIFFCLWVYI

SEQ ID NO: 8746 - protein, 553 aa, Artificial Sequence
  derived and/or modified protein sequence (artificial) from Pf(3D7)__XP_001351122.1__HsALB_Pf-CSP(19-384)_L(SGG)_Ferritin
MKWVTFISLLFLFSSAYSLFQEYQCYGSSSNTRVLNELNYDNAGTNLYNELEMNYYGKQENWYSLKKNSRSLGENDDGNNEDNEKLRKPKHKKLKQPADGNPDPNANPNVDPNANPNVDPNANPNVDPNANPNANPNANPNANPNANPNANPNANPNANPNANPNANPNANPNANPNANPNANPNANPNANPNANPNVDPNANPNANPNANPNANPNANPNANPNANPNANPNANPNANPNANPNANPNANPNANPNANPNANPNANPNANPNKNNQGNGQGHNMPNDPNRNVDENANANSAVKNNNNEEPSDKHIKEYLNKIQNSLSTEWSPCSVTCGNGIQVRIKPGSANKPKDELDYANDIEKKICKMEKCSSVFNVVNSSSGGLSKDIIKLLNEQVNKEMNSSNLYMSMSSWCYTHSLDGAGLFLFDHAAEEYEHAKKLIIFLNENNVPVQLTSISAPEHKFEGLTQIFQKAYEHEQHISESINNIVDHAIKSKDHATFNFLQWYVAEQHEEEVLFKDILDKIELIGNENHGLYLADQYVKGIAKSRKS

SEQ ID NO: 8747 - protein, 540 aa, Artificial Sequence
  derived and/or modified protein sequence (artificial) from Pf(3D7)__XP_001351122.1__HsALB_Pf-CSP(93-384)_L(PVTN)_HBsAg
MKWVTFISLLFLFSSAYSKLKQPADGNPDPNANPNVDPNANPNVDPNANPNVDPNANPNANPNANPNANPNANPNANPNANPNANPNANPNANPNANPNANPNANPNANPNANPNANPNANPNVDPNANPNANPNANPNANPNANPNANPNANPNANPNANPNANPNANPNANPNANPNANPNANPNANPNANPNANPNKNNQGNGQGHNMPNDPNRNVDENANANSAVKNNNNEEPSDKHIKEYLNKIQNSLSTEWSPCSVTCGNGIQVRIKPGSANKPKDELDYANDIEKKICKMEKCSSVFNVVNSSPVTNMENITSGFLGPLLVLQAGFFLLTRILTIPQSLDSWWTSLNFLGGSPVCLGQNSQSPTSNHSPTSCPPICPGYRWMCLRRFIIFLFILLLCLIFLLVLLDYQGMLPVCPLIPGSTTTNTGPCKTCTTPAQGNSMFPSCCCTKPTDGNCTCIPIPSSWAFAKYLWEWASVRFSWLSLLVPFVQWFVGLSPTVWLSAIWMMWYWGPSLYSIVSPFIPLLPIFFCLWVYI

SEQ ID NO: 8748 - protein, 427 aa, Artificial Sequence; identical to SEQ ID NO: 30
  derived and/or modified protein sequence (artificial) from Pf(3D7)__XP_001351122.1__HsALB_Pf-CSP(199-377)_L(PVTN)_HBsAg

SEQ ID NO: 8749 - protein, 326 aa, Artificial Sequence
  derived and/or modified protein sequence (artificial) from Pf(3D7)__XP_001351122.1__HsALB_Pf-CSP(19-272)_L(AAY)_Pf-CSP(346-3 75)_L(AAY)_Pf-CSP(310-327)
MKWVTFISLLFLFSSAYSLFQEYQCYGSSSNTRVLNELNYDNAGTNLYNELEMNYYGKQENWYSLKKNSRSLGENDDGNNEDNEKLRKPKHKKLKQPADGNPDPNANPNVDPNANPNVDPNANPNVDPNANPNANPNANPNANPNANPNANPNANPNANPNANPNANPNANPNANPNANPNANPNANPNANPNANPNVDPNANPNANPNANPNANPNANPNANPNANPNANPNANPNANPNANPNANPNANPNANPNANPNANPNANPNANPAAYIKPGSANKPKDELDYANDIEKKICKMEKCSAAYEPSDKHIKEYLNKIQNSL

SEQ ID NO: 8750 - protein, 342 aa, Artificial Sequence
  derived and/or modified protein sequence (artificial) from Pf(3D7)__XP_001351122.1__HsALB_Pf-CSP(19-272)_L(AAY)_Pf-CSP(346-3 75)_L(AAY)_Pf-CSP(310-327)_L(AAY)_PADRE
MKWVTFISLLFLFSSAYSLFQEYQCYGSSSNTRVLNELNYDNAGTNLYNELEMNYYGKQENWYSLKKNSRSLGENDDGNNEDNEKLRKPKHKKLKQPADGNPDPNANPNVDPNANPNVDPNANPNVDPNANPNANPNANPNANPNANPNANPNANPNANPNANPNANPNANPNANPNANPNANPNANPNANPNANPNVDPNANPNANPNANPNANPNANPNANPNANPNANPNANPNANPNANPNANPNANPNANPNANPNANPNANPNANPAAYIKPGSANKPKDELDYANDIEKKICKMEKCSAAYEPSDKHIKEYLNKIQNSLAAYAKFVAAWTLKAAA

SEQ ID NO: 8751 - protein, 342 aa, Artificial Sequence
  derived and/or modified protein sequence (artificial) from Pf(3D7)__XP_001351122.1__HsALB_Pf-CSP(19-272)_L(AAY)_Pf-CSP(310-3 27)_L(AAY)_Pf-CSP(346-375)_L(AAY)_PADRE
MKWVTFISLLFLFSSAYSLFQEYQCYGSSSNTRVLNELNYDNAGTNLYNELEMNYYGKQENWYSLKKNSRSLGENDDGNNEDNEKLRKPKHKKLKQPADGNPDPNANPNVDPNANPNVDPNANPNVDPNANPNANPNANPNANPNANPNANPNANPNANPNANPNANPNANPNANPNANPNANPNANPNANPNANPNVDPNANPNANPNANPNANPNANPNANPNANPNANPNANPNANPNANPNANPNANPNANPNANPNANPNANPNANPAAYEPSDKHIKEYLNKIQNSLAAYIKPGSANKPKDELDYANDIEKKICKMEKCSAAYAKFVAAWTLKAAA

SEQ ID NO: 8752 - protein, 360 aa, Artificial Sequence
  derived and/or modified protein sequence (artificial) from Pf(3D7)__XP_001351122.1__HsALB_Pf-CSP(19-272)_L(AAY)_Pf-CSP(310-3 27)_L(AAY)_Pf-CSP(346-375)_L(AAY)_PADRE_L(AAY)_P2
MKWVTFISLLFLFSSAYSLFQEYQCYGSSSNTRVLNELNYDNAGTNLYNELEMNYYGKQENWYSLKKNSRSLGENDDGNNEDNEKLRKPKHKKLKQPADGNPDPNANPNVDPNANPNVDPNANPNVDPNANPNANPNANPNANPNANPNANPNANPNANPNANPNANPNANPNANPNANPNANPNANPNANPNANPNVDPNANPNANPNANPNANPNANPNANPNANPNANPNANPNANPNANPNANPNANPNANPNANPNANPNANPNANPAAYEPSDKHIKEYLNKIQNSLAAYIKPGSANKPKDELDYANDIEKKICKMEKCSAAYAKFVAAWTLKAAAAAYQYIKANSKFIGITEL

SEQ ID NO: 8753 - protein, 348 aa, Artificial Sequence
  derived and/or modified protein sequence (artificial) from Pf(3D7)__XP_001351122.1__HsALB_Pf-CSP(19-272)_L(AAY)_Pf-CSP(310-3 27)_Linker (AAY)_Pf-CSP(346-397)
MKWVTFISLLFLFSSAYSLFQEYQCYGSSSNTRVLNELNYDNAGTNLYNELEMNYYGKQENWYSLKKNSRSLGENDDGNNEDNEKLRKPKHKKLKQPADGNPDPNANPNVDPNANPNVDPNANPNVDPNANPNANPNANPNANPNANPNANPNANPNANPNANPNANPNANPNANPNANPNANPNANPNANPNANPNVDPNANPNANPNANPNANPNANPNANPNANPNANPNANPNANPNANPNANPNANPNANPNANPNANPNANPNANPAAYEPSDKHIKEYLNKIQNSLAAYIKPGSANKPKDELDYANDIEKKICKMEKCSSVFNVVNSSIGLIMVLSFLFLN

SEQ ID NO: 8754 - RNA, 1647 nt, Artificial Sequence
  derived and/or modified CDS sequence (opt1) from Pf(3D7)__XP_001351122.1__LumSynt_L(GGS4-GGG)_Pf-CSP(19-397)
augcagaucuacgagggcaagcugaccgccgaggggcuccgcuucggcaucguggccagccgguucaaccacgcgcuggucgaccgccugguggagggggccaucgacgccaucgugcggcacggcgggcgcgaggaggacaucacccucguccgggugcccggcuccugggagaucccgguggccgccggcgagcuggcccgcaaggaggacaucgacgcggucaucgccaucggggugcugauccggggcgccacgccccacuucgacuacaucgccagcgagguguccaaggggcucgcggaccugagccuggagcuccgcaagcccaucaccuucggcgucaucaccgccgacacccuggagcaggccaucgagcgggccgggacgaagcacggcaacaagggcugggaggccgcgcuguccgccaucgagauggccaaccucuucaagagccugcgcggcgggagcggcggguccggcgggagcggcggcuccgggggcgggcuguuccaggaguaccagugcuacggcuccagcuccaacacccgggugcucaacgagcugaacuacgacaacgcggggaccaaccuguacaacgagcucgagaugaacuacuacggcaagcaggagaacugguacagccugaagaagaacucccgcagccugggggagaacgacgacggcaacaacgaggacaacgagaagcuccggaagcccaagcacaagaagcugaagcagccggccgacgggaaccccgaccccaacgccaaccccaacguggacccgaacgccaaccccaacgucgaccccaacgccaaccccaacguggacccgaacgcgaaccccaacgccaaccccaacgccaaccccaacgccaacccgaacgcgaaccccaacgccaaccccaacgccaaccccaacgccaacccgaacgccaaccccaacgcgaaccccaacgccaaccccaacgccaacccgaacgccaaccccaacgccaaccccaacgcgaaccccaacgccaacccgaacgccaaccccaacguggaccccaacgccaaccccaacgccaacccgaacgcgaaccccaacgccaaccccaacgccaacccgaacgccaaccccaacgccaaccccaacgcgaaccccaacgccaacccgaacgccaaccccaacgccaaccccaacgcgaaccccaacgccaacccgaacgccaaccccaacgccaaccccaacgccaaccccaacgcgaacccgaacgccaaccccaacaagaacaaccagggcaacggccaggggcacaacaugcccaacgaccccaaccgcaacgucgacgagaacgccaacgccaacuccgccgugaagaacaacaacaacgaggagccgagcgacaagcacaucaaggaguaccugaacaagauccagaacucccucagcacggaguggucccccugcagcgugaccugcggcaacgggauccagguccggaucaagcccggcuccgcgaacaagcccaaggacgagcuggacuacgccaacgacaucgagaagaagaucugcaagauggagaagugcagcuccguguucaacguggucaacagcuccaucgggcugaucauggugcucagcuuccuguuccugaacuga

SEQ ID NO: 8755 - RNA, 1194 nt, Artificial Sequence
  derived and/or modified CDS sequence (opt1) from Pf(3D7)__XP_001351122.1__HsALB_Pf-CSP(19-397)
augaagugggugaccuucaucagccuccuguuccuguucuccagcgccuacucccuguuccaggaguaccagugcuacggcuccagcuccaacacccgggugcucaacgagcugaacuacgacaacgcggggaccaaccuguacaacgagcucgagaugaacuacuacggcaagcaggagaacugguacagccugaagaagaacucccgcagccugggggagaacgacgacggcaacaacgaggacaacgagaagcuccggaagcccaagcacaagaagcugaagcagccggccgacgggaaccccgaccccaacgccaaccccaacguggacccgaacgccaaccccaacgucgaccccaacgccaaccccaacguggacccgaacgcgaaccccaacgccaaccccaacgccaaccccaacgccaacccgaacgcgaaccccaacgccaaccccaacgccaaccccaacgccaacccgaacgccaaccccaacgcgaaccccaacgccaaccccaacgccaacccgaacgccaaccccaacgccaaccccaacgcgaaccccaacgccaacccgaacgccaaccccaacguggaccccaacgccaaccccaacgccaacccgaacgcgaaccccaacgccaaccccaacgccaacccgaacgccaaccccaacgccaaccccaacgcgaaccccaacgccaacccgaacgccaaccccaacgccaaccccaacgcgaaccccaacgccaacccgaacgccaaccccaacgccaaccccaacgccaaccccaacgcgaacccgaacgccaaccccaacaagaacaaccagggcaacggccaggggcacaacaugcccaacgaccccaaccgcaacgucgacgagaacgccaacgccaacuccgccgugaagaacaacaacaacgaggagccgagcgacaagcacaucaaggaguaccugaacaagauccagaacucccucagcacggaguggucccccugcagcgugaccugcggcaacgggauccagguccggaucaagcccggcuccgcgaacaagcccaaggacgagcuggacuacgccaacgacaucgagaagaagaucugcaagauggagaagugcagcuccguguucaacguggucaacagcuccaucgggcugaucauggugcucagcuuccuguuccugaacuga

SEQ ID NO: 8756 - RNA, 1509 nt, Artificial Sequence
  derived and/or modified CDS sequence (opt1) from Pf(3D7)__XP_001351122.1__HsALB_Pf-CSP(19-272)_L(PVTN)_HBsAg
augaagugggugaccuucaucagccugcucuuccuguucuccagcgccuacucccuguuccaggaguaccagugcuacggcuccagcuccaacacccgggugcucaacgagcugaacuacgacaacgcggggaccaaccuguacaacgagcucgagaugaacuacuacggcaagcaggagaacugguacagccugaagaagaacucccgcagccugggggagaacgacgacggcaacaacgaggacaacgagaagcuccggaagcccaagcacaagaagcugaagcagccggccgacgggaaccccgaccccaacgccaaccccaacguggacccgaacgccaaccccaacgucgaccccaacgccaaccccaacguggacccgaacgcgaaccccaacgccaaccccaacgccaaccccaacgccaacccgaacgcgaaccccaacgccaaccccaacgccaaccccaacgccaacccgaacgccaaccccaacgcgaaccccaacgccaaccccaacgccaacccgaacgccaaccccaacgccaaccccaacgcgaaccccaacgccaacccgaacgccaaccccaacguggaccccaacgccaaccccaacgccaacccgaacgcgaaccccaacgccaaccccaacgccaacccgaacgccaaccccaacgccaaccccaacgcgaaccccaacgccaacccgaacgccaaccccaacgccaaccccaacgcgaaccccaacgccaacccgaacgccaaccccaacgccaaccccaacgccaaccccaacgcgaacccgaacgccaaccccccggugacgaacauggagaacaucaccagcggcuuccuggggccccuccuggugcugcaggccggcuucuuccuccugacccgcauccugaccaucccgcagucccucgacagcugguggaccucccugaacuuccucgggggcagccccgucugccuggggcagaacucccagagccccaccuccaaccacagccccaccuccugcccgcccaucugccccggcuaccgguggaugugccugcgccgguucaucaucuuccuguucauccuccugcugugccucaucuuccugcuggugcuccuggacuaccagggcaugcugcccgugugcccgcucauccccgggagcacgaccaccaacaccggccccugcaagacgugcaccacccccgcccaggggaacuccauguucccgagcugcugcugcaccaagcccacggacggcaacugcacgugcauccccauccccuccagcugggcguucgccaaguaccugugggagugggccuccguccgcuucagcuggcugucccuccuggugccguucgugcagugguucgucgggcugagccccaccguguggcucuccgccaucuggaugaugugguacuggggccccagccuguacagcaucgugucccccuucaucccgcugcuccccaucuucuucugccugugggucuacaucuga

SEQ ID NO: 8757 - RNA, 1626 nt, Artificial Sequence
  derived and/or modified CDS sequence (opt1) from Pf(3D7)__XP_001351122.1__HsALB_Pf-CSP(19-272)_L(AAY)_Pf-CSP(346-3 65)_L(AAY)_PADRE_L(PVTN)_HBsAg
augaagugggugaccuucaucagccugcucuuccuguucuccagcgccuacucccuguuccaggaguaccagugcuacggcuccagcuccaacacccgggugcucaacgagcugaacuacgacaacgcggggaccaaccuguacaacgagcucgagaugaacuacuacggcaagcaggagaacugguacagccugaagaagaacucccgcagccugggggagaacgacgacggcaacaacgaggacaacgagaagcuccggaagcccaagcacaagaagcugaagcagccggccgacgggaaccccgaccccaacgccaaccccaacguggacccgaacgccaaccccaacgucgaccccaacgccaaccccaacguggacccgaacgcgaaccccaacgccaaccccaacgccaaccccaacgccaacccgaacgcgaaccccaacgccaaccccaacgccaaccccaacgccaacccgaacgccaaccccaacgcgaaccccaacgccaaccccaacgccaacccgaacgccaaccccaacgccaaccccaacgcgaaccccaacgccaacccgaacgccaaccccaacguggaccccaacgccaaccccaacgccaacccgaacgcgaaccccaacgccaaccccaacgccaacccgaacgccaaccccaacgccaaccccaacgcgaaccccaacgccaacccgaacgccaaccccaacgccaaccccaacgcgaaccccaacgccaacccgaacgccaaccccaacgccaaccccaacgccaaccccaacgcgaacccgaacgccaaccccgccgcguauaucaagcccggcuccgcgaacaagcccaaggacgagcuggacuacgccaacgacaucgaggcggccuacgccaaguucguggccgccuggacccugaaggcggccgccccggugacgaacauggagaacaucaccagcggcuuccuggggccccuccuggugcugcaggccggcuucuuccuccugacccgcauccugaccaucccgcagucccucgacagcugguggaccucccugaacuuccucgggggcagccccgucugccuggggcagaacucccagagccccaccuccaaccacagccccaccuccugcccgcccaucugccccggcuaccgguggaugugccugcgccgguucaucaucuuccuguucauccuccugcugugccucaucuuccugcuggugcuccuggacuaccagggcaugcugcccgugugcccgcucauccccgggagcacgaccaccaacaccggccccugcaagacgugcaccacccccgcccaggggaacuccauguucccgagcugcugcugcaccaagcccacggacggcaacugcacgugcauccccauccccuccagcugggcguucgccaaguaccugugggagugggccuccguccgcuucagcuggcugucccuccuggugccguucgugcagugguucgucgggcugagccccaccguguggcucuccgccaucuggaugaugugguacuggggccccagccuguacagcaucgugucccccuucaucccgcugcuccccaucuucuucugccugugggucuacaucuga

SEQ ID NO: 8758 - RNA, 1626 nt, Artificial Sequence
  derived and/or modified CDS sequence (opt1) from Pf(3D7)__XP_001351122.1__HsALB_Pf-CSP(19-272)_L(AAY)_Pf-CSP(346-3 65)_L(AAY)_PADRE_L(PVTN)_HBsAg
augaagugggugaccuucaucagccuccuguuccuguucuccagcgccuacucccuguuccaggaguaccagugcuacggcuccagcuccaacacccgggugcucaacgagcugaacuacgacaacgcggggaccaaccuguacaacgagcucgagaugaacuacuacggcaagcaggagaacugguacagccugaagaagaacucccgcagccugggggagaacgacgacggcaacaacgaggacaacgagaagcuccggaagcccaagcacaagaagcugaagcagccggccgacgggaaccccgaccccaacgccaaccccaacguggacccgaacgccaaccccaacgucgaccccaacgccaaccccaacguggacccgaacgcgaaccccaacgccaaccccaacgccaaccccaacgccaacccgaacgcgaaccccaacgccaaccccaacgccaaccccaacgccaacccgaacgccaaccccaacgcgaaccccaacgccaaccccaacgccaacccgaacgccaaccccaacgccaaccccaacgcgaaccccaacgccaacccgaacgccaaccccaacguggaccccaacgccaaccccaacgccaacccgaacgcgaaccccaacgccaaccccaacgccaacccgaacgccaaccccaacgccaaccccaacgcgaaccccaacgccaacccgaacgccaaccccaacgccaaccccaacgcgaaccccaacgccaacccgaacgccaaccccaacgccaaccccaacgccaaccccaacgcgaacccgaacgccaaccccgccgcguauaucaagcccggcuccgcgaacaagcccaaggacgagcuggacuacgccaacgacaucgaggcggccuacgccaaguucguggccgccuggacccugaaggcggccgccccggugacgaacauggagaacaucaccagcggcuuccuggggccccuccuggugcugcaggccggcuucuuccuccugacccgcauccugaccaucccgcagucccucgacagcugguggaccucccugaacuuccucgggggcagccccgucugccuggggcagaacucccagagccccaccuccaaccacagccccaccuccugcccgcccaucugccccggcuaccgguggaugugccugcgccgguucaucaucuuccuguucauccuccugcugugccucaucuuccugcuggugcuccuggacuaccagggcaugcugcccgugugcccgcucauccccgggagcacgaccaccaacaccggccccugcaagacgugcaccacccccgcccaggggaacuccauguucccgagcugcugcugcaccaagcccacggacggcaacugcacgugcauccccauccccuccagcugggcguucgccaaguaccugugggagugggccuccguccgcuucagcuggcugucccuccuggugccguucgugcagugguucgucgggcugagccccaccguguggcucuccgccaucuggaugaugugguacuggggccccagccuguacagcaucgugucccccuucaucccgcugcuccccaucuucuucugccugugggucuacaucuga

SEQ ID NO: 8759 - RNA, 1845 nt, Artificial Sequence
  derived and/or modified CDS sequence (opt1) from Pf(3D7)__XP_001351122.1__HsALB_Pf-CSP(19-384)_L(PVTN)_HBsAg
augaagugggugaccuucaucagccugcucuuccuguucuccagcgccuacucccuguuccaggaguaccagugcuacggcuccagcuccaacacccgggugcucaacgagcugaacuacgacaacgcggggaccaaccuguacaacgagcucgagaugaacuacuacggcaagcaggagaacugguacagccugaagaagaacucccgcagccugggggagaacgacgacggcaacaacgaggacaacgagaagcuccggaagcccaagcacaagaagcugaagcagccggccgacgggaaccccgaccccaacgccaaccccaacguggacccgaacgccaaccccaacgucgaccccaacgccaaccccaacguggacccgaacgcgaaccccaacgccaaccccaacgccaaccccaacgccaacccgaacgcgaaccccaacgccaaccccaacgccaaccccaacgccaacccgaacgccaaccccaacgcgaaccccaacgccaaccccaacgccaacccgaacgccaaccccaacgccaaccccaacgcgaaccccaacgccaacccgaacgccaaccccaacguggaccccaacgccaaccccaacgccaacccgaacgcgaaccccaacgccaaccccaacgccaacccgaacgccaaccccaacgccaaccccaacgcgaaccccaacgccaacccgaacgccaaccccaacgccaaccccaacgcgaaccccaacgccaacccgaacgccaaccccaacgccaaccccaacgccaaccccaacgcgaacccgaacgccaaccccaacaagaacaaccagggcaacggccaggggcacaacaugcccaacgaccccaaccgcaacgucgacgagaacgccaacgccaacuccgccgugaagaacaacaacaacgaggagccgagcgacaagcacaucaaggaguaccugaacaagauccagaacucccucagcacggaguggucccccugcagcgugaccugcggcaacgggauccagguccggaucaagcccggcuccgcgaacaagcccaaggacgagcuggacuacgccaacgacaucgagaagaagaucugcaagauggagaagugcagcuccguguucaacguggucaacagcuccccggugacgaacauggagaacaucaccagcggcuuccuggggccccuccuggugcugcaggccggcuucuuccuccugacccgcauccugaccaucccgcagucccucgacagcugguggaccucccugaacuuccucgggggcagccccgucugccuggggcagaacucccagagccccaccuccaaccacagccccaccuccugcccgcccaucugccccggcuaccgguggaugugccugcgccgguucaucaucuuccuguucauccuccugcugugccucaucuuccugcuggugcuccuggacuaccagggcaugcugcccgugugcccgcucauccccgggagcacgaccaccaacaccggccccugcaagacgugcaccacccccgcccaggggaacuccauguucccgagcugcugcugcaccaagcccacggacggcaacugcacgugcauccccauccccuccagcugggcguucgccaaguaccugugggagugggccuccguccgcuucagcuggcugucccuccuggugccguucgugcagugguucgucgggcugagccccaccguguggcucuccgccaucuggaugaugugguacuggggccccagccuguacagcaucgugucccccuucaucccgcugcuccccaucuucuucugccugugggucuacaucuga

SEQ ID NO: 8760 - RNA, 1845 nt, Artificial Sequence
  derived and/or modified CDS sequence (opt1) from Pf(3D7)__XP_001351122.1__HsALB_Pf-CSP(19-384)_L(PVTN)_HBsAg
augaagugggugaccuucaucagccuccuguuccuguucuccagcgccuacucccuguuccaggaguaccagugcuacggcuccagcuccaacacccgggugcucaacgagcugaacuacgacaacgcggggaccaaccuguacaacgagcucgagaugaacuacuacggcaagcaggagaacugguacagccugaagaagaacucccgcagccugggggagaacgacgacggcaacaacgaggacaacgagaagcuccggaagcccaagcacaagaagcugaagcagccggccgacgggaaccccgaccccaacgccaaccccaacguggacccgaacgccaaccccaacgucgaccccaacgccaaccccaacguggacccgaacgcgaaccccaacgccaaccccaacgccaaccccaacgccaacccgaacgcgaaccccaacgccaaccccaacgccaaccccaacgccaacccgaacgccaaccccaacgcgaaccccaacgccaaccccaacgccaacccgaacgccaaccccaacgccaaccccaacgcgaaccccaacgccaacccgaacgccaaccccaacguggaccccaacgccaaccccaacgccaacccgaacgcgaaccccaacgccaaccccaacgccaacccgaacgccaaccccaacgccaaccccaacgcgaaccccaacgccaacccgaacgccaaccccaacgccaaccccaacgcgaaccccaacgccaacccgaacgccaaccccaacgccaaccccaacgccaaccccaacgcgaacccgaacgccaaccccaacaagaacaaccagggcaacggccaggggcacaacaugcccaacgaccccaaccgcaacgucgacgagaacgccaacgccaacuccgccgugaagaacaacaacaacgaggagccgagcgacaagcacaucaaggaguaccugaacaagauccagaacucccucagcacggaguggucccccugcagcgugaccugcggcaacgggauccagguccggaucaagcccggcuccgcgaacaagcccaaggacgagcuggacuacgccaacgacaucgagaagaagaucugcaagauggagaagugcagcuccguguucaacguggucaacagcuccccggugacgaacauggagaacaucaccagcggcuuccuggggccccuccuggugcugcaggccggcuucuuccuccugacccgcauccugaccaucccgcagucccucgacagcugguggaccucccugaacuuccucgggggcagccccgucugccuggggcagaacucccagagccccaccuccaaccacagccccaccuccugcccgcccaucugccccggcuaccgguggaugugccugcgccgguucaucaucuuccuguucauccuccugcugugccucaucuuccugcuggugcuccuggacuaccagggcaugcugcccgugugcccgcucauccccgggagcacgaccaccaacaccggccccugcaagacgugcaccacccccgcccaggggaacuccauguucccgagcugcugcugcaccaagcccacggacggcaacugcacgugcauccccauccccuccagcugggcguucgccaaguaccugugggagugggccuccguccgcuucagcuggcugucccuccuggugccguucgugcagugguucgucgggcugagccccaccguguggcucuccgccaucuggaugaugugguacuggggccccagccuguacagcaucgugucccccuucaucccgcugcuccccaucuucuucugccugugggucuacaucuga

SEQ ID NO: 8761 - RNA, 1662 nt, Artificial Sequence
  derived and/or modified CDS sequence (opt1) from Pf(3D7)__XP_001351122.1__HsALB_Pf-CSP(19-384)_L(SGG)_Ferritin
augaagugggugaccuucaucagccugcucuuccuguucuccagcgccuacucccuguuccaggaguaccagugcuacggcuccagcuccaacacccgggugcucaacgagcugaacuacgacaacgcggggaccaaccuguacaacgagcucgagaugaacuacuacggcaagcaggagaacugguacagccugaagaagaacucccgcagccugggggagaacgacgacggcaacaacgaggacaacgagaagcuccggaagcccaagcacaagaagcugaagcagccggccgacgggaaccccgaccccaacgccaaccccaacguggacccgaacgccaaccccaacgucgaccccaacgccaaccccaacguggacccgaacgcgaaccccaacgccaaccccaacgccaaccccaacgccaacccgaacgcgaaccccaacgccaaccccaacgccaaccccaacgccaacccgaacgccaaccccaacgcgaaccccaacgccaaccccaacgccaacccgaacgccaaccccaacgccaaccccaacgcgaaccccaacgccaacccgaacgccaaccccaacguggaccccaacgccaaccccaacgccaacccgaacgcgaaccccaacgccaaccccaacgccaacccgaacgccaaccccaacgccaaccccaacgcgaaccccaacgccaacccgaacgccaaccccaacgccaaccccaacgcgaaccccaacgccaacccgaacgccaaccccaacgccaaccccaacgccaaccccaacgcgaacccgaacgccaaccccaacaagaacaaccagggcaacggccaggggcacaacaugcccaacgaccccaaccgcaacgucgacgagaacgccaacgccaacuccgccgugaagaacaacaacaacgaggagccgagcgacaagcacaucaaggaguaccugaacaagauccagaacucccucagcacggaguggucccccugcagcgugaccugcggcaacgggauccagguccggaucaagcccggcuccgcgaacaagcccaaggacgagcuggacuacgccaacgacaucgagaagaagaucugcaagauggagaagugcagcuccguguucaacguggucaacagcuccagcggcgggcugagcaaggacaucaucaagcuccugaacgagcaggugaacaaggagaugaacuccagcaaccuguacauguccaugagcuccuggugcuacacccacagccucgacggcgccgggcuguuccuguucgaccacgccgcggaggaguacgagcacgccaagaagcucaucaucuuccugaacgagaacaacguccccgugcagcugaccuccaucagcgccccggagcacaaguucgagggccucacgcagaucuuccagaaggccuacgagcacgagcagcacaucuccgagagcaucaacaacaucguggaccacgccaucaaguccaaggaccacgcgaccuucaacuuccugcagugguacgucgccgagcagcacgaggaggaggugcuguucaaggacauccucgacaagaucgagcugaucgggaacgagaaccacggccuguaccucgccgaccaguacgugaaggggaucgccaagagccgcaaguccuga

SEQ ID NO: 8762 - RNA, 1662 nt, Artificial Sequence
  derived and/or modified CDS sequence (opt1) from Pf(3D7)__XP_001351122.1__HsALB_Pf-CSP(19-384)_L(SGG)_Ferritin
augaagugggugaccuucaucagccuccuguuccuguucuccagcgccuacucccuguuccaggaguaccagugcuacggcuccagcuccaacacccgggugcucaacgagcugaacuacgacaacgcggggaccaaccuguacaacgagcucgagaugaacuacuacggcaagcaggagaacugguacagccugaagaagaacucccgcagccugggggagaacgacgacggcaacaacgaggacaacgagaagcuccggaagcccaagcacaagaagcugaagcagccggccgacgggaaccccgaccccaacgccaaccccaacguggacccgaacgccaaccccaacgucgaccccaacgccaaccccaacguggacccgaacgcgaaccccaacgccaaccccaacgccaaccccaacgccaacccgaacgcgaaccccaacgccaaccccaacgccaaccccaacgccaacccgaacgccaaccccaacgcgaaccccaacgccaaccccaacgccaacccgaacgccaaccccaacgccaaccccaacgcgaaccccaacgccaacccgaacgccaaccccaacguggaccccaacgccaaccccaacgccaacccgaacgcgaaccccaacgccaaccccaacgccaacccgaacgccaaccccaacgccaaccccaacgcgaaccccaacgccaacccgaacgccaaccccaacgccaaccccaacgcgaaccccaacgccaacccgaacgccaaccccaacgccaaccccaacgccaaccccaacgcgaacccgaacgccaaccccaacaagaacaaccagggcaacggccaggggcacaacaugcccaacgaccccaaccgcaacgucgacgagaacgccaacgccaacuccgccgugaagaacaacaacaacgaggagccgagcgacaagcacaucaaggaguaccugaacaagauccagaacucccucagcacggaguggucccccugcagcgugaccugcggcaacgggauccagguccggaucaagcccggcuccgcgaacaagcccaaggacgagcuggacuacgccaacgacaucgagaagaagaucugcaagauggagaagugcagcuccguguucaacguggucaacagcuccagcggcgggcugagcaaggacaucaucaagcuccugaacgagcaggugaacaaggagaugaacuccagcaaccuguacauguccaugagcuccuggugcuacacccacagccucgacggcgccgggcuguuccuguucgaccacgccgcggaggaguacgagcacgccaagaagcucaucaucuuccugaacgagaacaacguccccgugcagcugaccuccaucagcgccccggagcacaaguucgagggccucacgcagaucuuccagaaggccuacgagcacgagcagcacaucuccgagagcaucaacaacaucguggaccacgccaucaaguccaaggaccacgcgaccuucaacuuccugcagugguacgucgccgagcagcacgaggaggaggugcuguucaaggacauccucgacaagaucgagcugaucgggaacgagaaccacggccuguaccucgccgaccaguacgugaaggggaucgccaagagccgcaaguccuga

SEQ ID NO: 8763 - RNA, 1623 nt, Artificial Sequence
  derived and/or modified CDS sequence (opt1) from Pf(3D7)__XP_001351122.1__HsALB_Pf-CSP(93-384)_L(PVTN)_HBsAg
augaagugggugaccuucaucagccugcucuuccuguucuccagcgccuacuccaagcugaagcagccggccgacgggaaccccgaccccaacgccaaccccaacguggacccgaacgccaaccccaacgucgaccccaacgccaaccccaacguggacccgaacgcgaaccccaacgccaaccccaacgccaaccccaacgccaacccgaacgcgaaccccaacgccaaccccaacgccaaccccaacgccaacccgaacgccaaccccaacgcgaaccccaacgccaaccccaacgccaacccgaacgccaaccccaacgccaaccccaacgcgaaccccaacgccaacccgaacgccaaccccaacguggaccccaacgccaaccccaacgccaacccgaacgcgaaccccaacgccaaccccaacgccaacccgaacgccaaccccaacgccaaccccaacgcgaaccccaacgccaacccgaacgccaaccccaacgccaaccccaacgcgaaccccaacgccaacccgaacgccaaccccaacgccaaccccaacgccaaccccaacgcgaacccgaacgccaaccccaacaagaacaaccagggcaacggccaggggcacaacaugcccaacgaccccaaccgcaacgucgacgagaacgccaacgccaacuccgccgugaagaacaacaacaacgaggagccgagcgacaagcacaucaaggaguaccugaacaagauccagaacucccucagcacggaguggucccccugcagcgugaccugcggcaacgggauccagguccggaucaagcccggcuccgcgaacaagcccaaggacgagcuggacuacgccaacgacaucgagaagaagaucugcaagauggagaagugcagcuccguguucaacguggucaacagcuccccggugacgaacauggagaacaucaccagcggcuuccuggggccccuccuggugcugcaggccggcuucuuccuccugacccgcauccugaccaucccgcagucccucgacagcugguggaccucccugaacuuccucgggggcagccccgucugccuggggcagaacucccagagccccaccuccaaccacagccccaccuccugcccgcccaucugccccggcuaccgguggaugugccugcgccgguucaucaucuuccuguucauccuccugcugugccucaucuuccugcuggugcuccuggacuaccagggcaugcugcccgugugcccgcucauccccgggagcacgaccaccaacaccggccccugcaagacgugcaccacccccgcccaggggaacuccauguucccgagcugcugcugcaccaagcccacggacggcaacugcacgugcauccccauccccuccagcugggcguucgccaaguaccugugggagugggccuccguccgcuucagcuggcugucccuccuggugccguucgugcagugguucgucgggcugagccccaccguguggcucuccgccaucuggaugaugugguacuggggccccagccuguacagcaucgugucccccuucaucccgcugcuccccaucuucuucugccugugggucuacaucuga

SEQ ID NO: 8764 - RNA, 1623 nt, Artificial Sequence
  derived and/or modified CDS sequence (opt1) from Pf(3D7)__XP_001351122.1__HsALB_Pf-CSP(93-384)_L(PVTN)_HBsAg
augaagugggugaccuucaucagccuccuguuccuguucuccagcgccuacuccaagcugaagcagccggccgacgggaaccccgaccccaacgccaaccccaacguggacccgaacgccaaccccaacgucgaccccaacgccaaccccaacguggacccgaacgcgaaccccaacgccaaccccaacgccaaccccaacgccaacccgaacgcgaaccccaacgccaaccccaacgccaaccccaacgccaacccgaacgccaaccccaacgcgaaccccaacgccaaccccaacgccaacccgaacgccaaccccaacgccaaccccaacgcgaaccccaacgccaacccgaacgccaaccccaacguggaccccaacgccaaccccaacgccaacccgaacgcgaaccccaacgccaaccccaacgccaacccgaacgccaaccccaacgccaaccccaacgcgaaccccaacgccaacccgaacgccaaccccaacgccaaccccaacgcgaaccccaacgccaacccgaacgccaaccccaacgccaaccccaacgccaaccccaacgcgaacccgaacgccaaccccaacaagaacaaccagggcaacggccaggggcacaacaugcccaacgaccccaaccgcaacgucgacgagaacgccaacgccaacuccgccgugaagaacaacaacaacgaggagccgagcgacaagcacaucaaggaguaccugaacaagauccagaacucccucagcacggaguggucccccugcagcgugaccugcggcaacgggauccagguccggaucaagcccggcuccgcgaacaagcccaaggacgagcuggacuacgccaacgacaucgagaagaagaucugcaagauggagaagugcagcuccguguucaacguggucaacagcuccccggugacgaacauggagaacaucaccagcggcuuccuggggccccuccuggugcugcaggccggcuucuuccuccugacccgcauccugaccaucccgcagucccucgacagcugguggaccucccugaacuuccucgggggcagccccgucugccuggggcagaacucccagagccccaccuccaaccacagccccaccuccugcccgcccaucugccccggcuaccgguggaugugccugcgccgguucaucaucuuccuguucauccuccugcugugccucaucuuccugcuggugcuccuggacuaccagggcaugcugcccgugugcccgcucauccccgggagcacgaccaccaacaccggccccugcaagacgugcaccacccccgcccaggggaacuccauguucccgagcugcugcugcaccaagcccacggacggcaacugcacgugcauccccauccccuccagcugggcguucgccaaguaccugugggagugggccuccguccgcuucagcuggcugucccuccuggugccguucgugcagugguucgucgggcugagccccaccguguggcucuccgccaucuggaugaugugguacuggggccccagccuguacagcaucgugucccccuucaucccgcugcuccccaucuucuucugccugugggucuacaucuga

SEQ ID NO: 8765 - RNA, 1284 nt, Artificial Sequence; identical to SEQ ID NO: 70
  derived and/or modified CDS sequence (opt1) from Pf(3D7)__XP_001351122.1__HsALB_Pf-CSP(199-377)_L(PVTN)_HBsAg

SEQ ID NO: 8766 - RNA, 981 nt, Artificial Sequence
  derived and/or modified CDS sequence (opt1) from Pf(3D7)__XP_001351122.1__HsALB_Pf-CSP(19-272)_L(AAY)_Pf-CSP(310-3 27)_L(AAY)_Pf-CSP(346-375)
augaagugggugaccuucaucagccuccuguuccuguucuccagcgccuacucccuguuccaggaguaccagugcuacggcuccagcuccaacacccgggugcucaacgagcugaacuacgacaacgcggggaccaaccuguacaacgagcucgagaugaacuacuacggcaagcaggagaacugguacagccugaagaagaacucccgcagccugggggagaacgacgacggcaacaacgaggacaacgagaagcuccggaagcccaagcacaagaagcugaagcagccggccgacgggaaccccgaccccaacgccaaccccaacguggacccgaacgccaaccccaacgucgaccccaacgccaaccccaacguggacccgaacgcgaaccccaacgccaaccccaacgccaaccccaacgccaacccgaacgcgaaccccaacgccaaccccaacgccaaccccaacgccaacccgaacgccaaccccaacgcgaaccccaacgccaaccccaacgccaacccgaacgccaaccccaacgccaaccccaacgcgaaccccaacgccaacccgaacgccaaccccaacguggaccccaacgccaaccccaacgccaacccgaacgcgaaccccaacgccaaccccaacgccaacccgaacgccaaccccaacgccaaccccaacgcgaaccccaacgccaacccgaacgccaaccccaacgccaaccccaacgcgaaccccaacgccaacccgaacgccaaccccaacgccaaccccaacgccaaccccaacgcgaacccgaacgccaaccccgccgcguaugagccgagcgacaagcacaucaaggaguaccugaacaagauccagaacucccucgcggccuacaucaagcccggcuccgcgaacaagcccaaggacgagcuggacuacgccaacgacaucgagaagaagaucugcaagauggagaagugcagcuga

SEQ ID NO: 8767 - RNA, 981 nt, Artificial Sequence
  derived and/or modified CDS sequence (opt1) from Pf(3D7)__XP_001351122.1__HsALB_Pf-CSP(19-272)_L(AAY)_Pf-CSP(346-3 75)_L(AAY)_Pf-CSP(310-327)
augaagugggugaccuucaucagccuccuguuccuguucuccagcgccuacucccuguuccaggaguaccagugcuacggcuccagcuccaacacccgggugcucaacgagcugaacuacgacaacgcggggaccaaccuguacaacgagcucgagaugaacuacuacggcaagcaggagaacugguacagccugaagaagaacucccgcagccugggggagaacgacgacggcaacaacgaggacaacgagaagcuccggaagcccaagcacaagaagcugaagcagccggccgacgggaaccccgaccccaacgccaaccccaacguggacccgaacgccaaccccaacgucgaccccaacgccaaccccaacguggacccgaacgcgaaccccaacgccaaccccaacgccaaccccaacgccaacccgaacgcgaaccccaacgccaaccccaacgccaaccccaacgccaacccgaacgccaaccccaacgcgaaccccaacgccaaccccaacgccaacccgaacgccaaccccaacgccaaccccaacgcgaaccccaacgccaacccgaacgccaaccccaacguggaccccaacgccaaccccaacgccaacccgaacgcgaaccccaacgccaaccccaacgccaacccgaacgccaaccccaacgccaaccccaacgcgaaccccaacgccaacccgaacgccaaccccaacgccaaccccaacgcgaaccccaacgccaacccgaacgccaaccccaacgccaaccccaacgccaaccccaacgcgaacccgaacgccaaccccgcggccuacaucaagcccggcuccgcgaacaagcccaaggacgagcuggacuacgccaacgacaucgagaagaagaucugcaagauggagaagugcagcgccgcguaugagccgagcgacaagcacaucaaggaguaccugaacaagauccagaacucccucuga

SEQ ID NO: 8768 - RNA, 1029 nt, Artificial Sequence
  derived and/or modified CDS sequence (opt1) from Pf(3D7)__XP_001351122.1__HsALB_Pf-CSP(19-272)_L(AAY)_Pf-CSP(346-3 75)_L(AAY)_Pf-CSP(310-327)_L(AAY)_PADRE
augaagugggugaccuucaucagccuccuguuccuguucuccagcgccuacucccuguuccaggaguaccagugcuacggcuccagcuccaacacccgggugcucaacgagcugaacuacgacaacgcggggaccaaccuguacaacgagcucgagaugaacuacuacggcaagcaggagaacugguacagccugaagaagaacucccgcagccugggggagaacgacgacggcaacaacgaggacaacgagaagcuccggaagcccaagcacaagaagcugaagcagccggccgacgggaaccccgaccccaacgccaaccccaacguggacccgaacgccaaccccaacgucgaccccaacgccaaccccaacguggacccgaacgcgaaccccaacgccaaccccaacgccaaccccaacgccaacccgaacgcgaaccccaacgccaaccccaacgccaaccccaacgccaacccgaacgccaaccccaacgcgaaccccaacgccaaccccaacgccaacccgaacgccaaccccaacgccaaccccaacgcgaaccccaacgccaacccgaacgccaaccccaacguggaccccaacgccaaccccaacgccaacccgaacgcgaaccccaacgccaaccccaacgccaacccgaacgccaaccccaacgccaaccccaacgcgaaccccaacgccaacccgaacgccaaccccaacgccaaccccaacgcgaaccccaacgccaacccgaacgccaaccccaacgccaaccccaacgccaaccccaacgcgaacccgaacgccaaccccgccgcguauaucaagcccggcuccgcgaacaagcccaaggacgagcuggacuacgccaacgacaucgagaagaagaucugcaagauggagaagugcagcgcggccuacgagccgagcgacaagcacaucaaggaguaccugaacaagauccagaacucccucgccgccuacgccaaguucguggccgccuggacccugaaggcggccgccuga

SEQ ID NO: 8769 - RNA, 1029 nt, Artificial Sequence
  derived and/or modified CDS sequence (opt1) from Pf(3D7)__XP_001351122.1__HsALB_Pf-CSP(19-272)_L(AAY)_Pf-CSP(310-3 27)_L(AAY)_Pf-CSP(346-375)_L(AAY)_PADRE
augaagugggugaccuucaucagccuccuguuccuguucuccagcgccuacucccuguuccaggaguaccagugcuacggcuccagcuccaacacccgggugcucaacgagcugaacuacgacaacgcggggaccaaccuguacaacgagcucgagaugaacuacuacggcaagcaggagaacugguacagccugaagaagaacucccgcagccugggggagaacgacgacggcaacaacgaggacaacgagaagcuccggaagcccaagcacaagaagcugaagcagccggccgacgggaaccccgaccccaacgccaaccccaacguggacccgaacgccaaccccaacgucgaccccaacgccaaccccaacguggacccgaacgcgaaccccaacgccaaccccaacgccaaccccaacgccaacccgaacgcgaaccccaacgccaaccccaacgccaaccccaacgccaacccgaacgccaaccccaacgcgaaccccaacgccaaccccaacgccaacccgaacgccaaccccaacgccaaccccaacgcgaaccccaacgccaacccgaacgccaaccccaacguggaccccaacgccaaccccaacgccaacccgaacgcgaaccccaacgccaaccccaacgccaacccgaacgccaaccccaacgccaaccccaacgcgaaccccaacgccaacccgaacgccaaccccaacgccaaccccaacgcgaaccccaacgccaacccgaacgccaaccccaacgccaaccccaacgccaaccccaacgcgaacccgaacgccaaccccgccgcguaugagccgagcgacaagcacaucaaggaguaccugaacaagauccagaacucccucgcggccuacaucaagcccggcuccgcgaacaagcccaaggacgagcuggacuacgccaacgacaucgagaagaagaucugcaagauggagaagugcagcgccgccuacgccaaguucguggccgccuggacccugaaggcggccgccuga

SEQ ID NO: 8770 - RNA, 1083 nt, Artificial Sequence
  derived and/or modified CDS sequence (opt1) from Pf(3D7)__XP_001351122.1__HsALB_Pf-CSP(19-272)_L(AAY)_Pf-CSP(310-3 27)_L(AAY)_Pf-CSP(346-375)_L(AAY)_PADRE_L(AAY)_P2
augaagugggugaccuucaucagccuccuguuccuguucuccagcgccuacucccuguuccaggaguaccagugcuacggcuccagcuccaacacccgggugcucaacgagcugaacuacgacaacgcggggaccaaccuguacaacgagcucgagaugaacuacuacggcaagcaggagaacugguacagccugaagaagaacucccgcagccugggggagaacgacgacggcaacaacgaggacaacgagaagcuccggaagcccaagcacaagaagcugaagcagccggccgacgggaaccccgaccccaacgccaaccccaacguggacccgaacgccaaccccaacgucgaccccaacgccaaccccaacguggacccgaacgcgaaccccaacgccaaccccaacgccaaccccaacgccaacccgaacgcgaaccccaacgccaaccccaacgccaaccccaacgccaacccgaacgccaaccccaacgcgaaccccaacgccaaccccaacgccaacccgaacgccaaccccaacgccaaccccaacgcgaaccccaacgccaacccgaacgccaaccccaacguggaccccaacgccaaccccaacgccaacccgaacgcgaaccccaacgccaaccccaacgccaacccgaacgccaaccccaacgccaaccccaacgcgaaccccaacgccaacccgaacgccaaccccaacgccaaccccaacgcgaaccccaacgccaacccgaacgccaaccccaacgccaaccccaacgccaaccccaacgcgaacccgaacgccaaccccgcggccuacgagccgagcgacaagcacaucaaggaguaccugaacaagauccagaacucccucgccgcguauaucaagcccggcuccgcgaacaagcccaaggacgagcuggacuacgccaacgacaucgagaagaagaucugcaagauggagaagugcagcgccgccuacgccaaguucguggccgccuggacccugaaggcggccgccgccgcuuaccaguacaucaaggccaacagcaaguucaucggcaucaccgagcuguga

SEQ ID NO: 8771 - RNA, 1047 nt, Artificial Sequence
  derived and/or modified CDS sequence (opt1) from Pf(3D7)__XP_001351122.1__HsALB_Pf-CSP(19-272)_L(AAY)_Pf-CSP(310-3 27)_Linker (AAY)_Pf-CSP(346-397)
augaagugggugaccuucaucagccuccuguuccuguucuccagcgccuacucccuguuccaggaguaccagugcuacggcuccagcuccaacacccgggugcucaacgagcugaacuacgacaacgcggggaccaaccuguacaacgagcucgagaugaacuacuacggcaagcaggagaacugguacagccugaagaagaacucccgcagccugggggagaacgacgacggcaacaacgaggacaacgagaagcuccggaagcccaagcacaagaagcugaagcagccggccgacgggaaccccgaccccaacgccaaccccaacguggacccgaacgccaaccccaacgucgaccccaacgccaaccccaacguggacccgaacgcgaaccccaacgccaaccccaacgccaaccccaacgccaacccgaacgcgaaccccaacgccaaccccaacgccaaccccaacgccaacccgaacgccaaccccaacgcgaaccccaacgccaaccccaacgccaacccgaacgccaaccccaacgccaaccccaacgcgaaccccaacgccaacccgaacgccaaccccaacguggaccccaacgccaaccccaacgccaacccgaacgcgaaccccaacgccaaccccaacgccaacccgaacgccaaccccaacgccaaccccaacgcgaaccccaacgccaacccgaacgccaaccccaacgccaaccccaacgcgaaccccaacgccaacccgaacgccaaccccaacgccaaccccaacgccaaccccaacgcgaacccgaacgccaaccccgcggccuacgagccgagcgacaagcacaucaaggaguaccugaacaagauccagaacucccucgccgcguauaucaagcccggcuccgcgaacaagcccaaggacgagcuggacuacgccaacgacaucgagaagaagaucugcaagauggagaagugcagcuccguguucaacguggucaacagcuccaucgggcugaucauggugcucagcuuccuguuccugaacuga

SEQ ID NO: 8772 - RNA, 1647 nt, Artificial Sequence
  derived and/or modified CDS sequence (opt1) from Pf(3D7)__XP_001351122.1__LumSynt_L(GGS4-GGG)_Pf-CSP(19-397)
augcagaucuacgagggcaagcugaccgccgaggggcuccgcuucggcaucguggccagccgguucaaccacgcgcuggucgaccgccugguggagggggccaucgacgccaucgugcggcacggcgggcgcgaggaggacaucacccucguccgggugcccggcuccugggagaucccgguggccgccggcgagcuggcgcgcaaggaggacaucgacgccgucaucgccaucggggugcugauccggggcgccacgccccacuucgacuacaucgcgagcgagguguccaaggggcucgccgaccugagccuggagcuccgcaagcccaucaccuucggcgucaucaccgccgacacccuggagcaggccaucgagcgggccgggacgaagcacggcaacaagggcugggaggcggcccuguccgccaucgagauggccaaccucuucaagagccugcgcgggggcuccgggggcagcggcggguccggcgggagcggcgggggccuguuccaggaguaccagugcuacggcuccagcuccaacacccgggugcucaacgagcugaacuacgacaacgccgggaccaaccuguacaacgagcucgagaugaacuacuacggcaagcaggagaacugguacagccugaagaagaacucccgcagccugggggagaacgacgacggcaacaacgaggacaacgagaagcuccggaagcccaagcacaagaagcugaagcagccggcggacgggaaccccgaccccaacgccaaccccaacguggacccgaacgccaaccccaacgucgaccccaacgccaaccccaacguggacccgaacgccaaccccaacgcgaaccccaacgccaaccccaacgccaacccgaacgccaaccccaacgccaaccccaacgcgaaccccaacgccaacccgaacgccaaccccaacgccaaccccaacgcgaaccccaacgccaacccgaacgccaaccccaacgccaaccccaacgccaaccccaacgcgaacccgaacgccaaccccaacguggaccccaacgccaacccgaacgccaaccccaacgccaaccccaacgcgaaccccaacgccaacccgaacgccaaccccaacgccaaccccaacgccaaccccaacgcgaacccgaacgccaaccccaacgccaaccccaacgccaaccccaacgcgaacccgaacgccaaccccaacgccaaccccaacgccaaccccaacgccaacccgaacgcgaaccccaacaagaacaaccagggcaacggccaggggcacaacaugcccaacgaccccaaccgcaacgucgacgagaacgccaacgccaacuccgccgugaagaacaacaacaacgaggagccgagcgacaagcacaucaaggaguaccugaacaagauccagaacucccucagcaccgaguggagccccugcuccgugacgugcggcaacgggauccagguccggaucaagcccggcagcgccaacaagcccaaggacgagcuggacuacgcgaacgacaucgagaagaagaucugcaagauggagaagugcuccagcguguucaacguggucaacuccagcaucgggcugaucauggugcucuccuuccuguuccugaacuga

SEQ ID NO: 8773 - RNA, 1509 nt, Artificial Sequence
  derived and/or modified CDS sequence (opt1) from Pf(3D7)__XP_001351122.1__HsALB_Pf-CSP(19-272)_L(PVTN)_HBsAg
augaagugggugaccuucaucagccuccuguuccuguucuccagcgccuacucccuguuccaggaguaccagugcuacggcagcuccagcaacacccgcguccucaacgagcugaacuacgacaacgccgggaccaaccuguacaacgagcucgagaugaacuacuacggcaagcaggagaacugguacucccugaagaagaacagccggucccugggggagaacgacgacggcaacaacgaggacaacgagaagcuccgcaagcccaagcacaagaagcugaagcagccggcggacgggaaccccgaccccaacgccaaccccaacguggacccgaacgccaaccccaacguggaccccaacgccaaccccaacgucgacccgaacgccaaccccaacgcgaaccccaacgccaaccccaacgccaacccgaacgccaaccccaacgcgaaccccaacgccaaccccaacgccaacccgaacgccaaccccaacgccaaccccaacgcgaaccccaacgccaacccgaacgccaaccccaacgccaaccccaacgccaaccccaacgcgaacccgaacgccaaccccaacguggaccccaacgccaaccccaacgccaacccgaacgccaaccccaacgcgaaccccaacgccaacccgaacgccaaccccaacgccaaccccaacgccaaccccaacgcgaacccgaacgccaaccccaacgccaaccccaacgccaaccccaacgcgaacccgaacgccaaccccaacgccaaccccaacgccaaccccaacgccaacccgaacgcgaacccgcccgugaccaacauggagaacaucaccagcggcuuccugggcccccuccugguccugcaggccggguucuuccuccugacccggauccugacgaucccccagucccucgacagcugguggaccucccugaacuuccugggcgggagccccgugugccucggccagaacucccagagccccaccuccaaccacagccccaccuccugcccgcccaucugccccggguaccgcuggaugugccugcggcgcuucaucaucuuccuguucauccuccugcugugccucaucuuccugcuggugcuccuggacuaccagggcaugcugcccgucugcccgcucauccccggcagcacgaccaccaacaccgggcccugcaagacgugcaccaccccggcccagggcaacagcauguuccccuccugcugcugcaccaagcccacggacgggaacugcacgugcauccccaucccgagcuccugggccuucgccaaguaccugugggagugggcgagcgugcgguucuccuggcugagccuccuggugcccuucguccagugguucgugggccugucccccaccguguggcucagcgccaucuggaugaugugguacuggggccccucccuguacagcaucgucuccccguucaucccccugcuccccaucuucuucugccuguggguguacaucuga

SEQ ID NO: 8774 - RNA, 1626 nt, Artificial Sequence
  derived and/or modified CDS sequence (opt1) from Pf(3D7)__XP_001351122.1__HsALB_Pf-CSP(19-272)_L(AAY)_Pf-CSP(346-3 65)_L(AAY)_PADRE_L(PVTN)_HBsAg
augaagugggugaccuucaucagccugcuguuccuguucuccagcgccuacucccuguuccaggaguaccagugcuacggcagcuccagcaacacccgcguccucaacgagcugaacuacgacaacgccgggaccaaccuguacaacgagcucgagaugaacuacuacggcaagcaggagaacugguacucccugaagaagaacagccggucccugggggagaacgacgacggcaacaacgaggacaacgagaagcuccgcaagcccaagcacaagaagcugaagcagccggcggacgggaaccccgaccccaacgccaaccccaacguggacccgaacgccaaccccaacguggaccccaacgccaaccccaacgucgacccgaacgccaaccccaacgcgaaccccaacgccaaccccaacgccaacccgaacgccaaccccaacgcgaaccccaacgccaaccccaacgccaacccgaacgccaaccccaacgccaaccccaacgcgaaccccaacgccaacccgaacgccaaccccaacgccaaccccaacgccaaccccaacgcgaacccgaacgccaaccccaacguggaccccaacgccaaccccaacgccaacccgaacgccaaccccaacgcgaaccccaacgccaacccgaacgccaaccccaacgccaaccccaacgccaaccccaacgcgaacccgaacgccaaccccaacgccaaccccaacgccaaccccaacgcgaacccgaacgccaaccccaacgccaaccccaacgccaaccccaacgccaacccgaacgcgaaccccgccgccuacaucaagcccggcagcgccaacaagcccaaggacgagcuggacuacgccaacgacaucgaggcggccuacgccaaguucguggccgccuggacccucaaggcggccgccccggucaccaacauggagaacaucaccuccggcuuccuggggccccugcucgugcugcaggccggcuucuuccugcucacgcggauccugaccaucccccagagccuggacuccugguggaccagccucaacuuccucgggggcucccccgugugccuggggcagaacagccaguccccgaccagcaaccacucccccacgagcugcccgcccaucugccccggcuaccgcuggaugugccuccggcgcuucaucaucuuccuguucauccugcuccugugccugaucuuccuccugguccugcucgacuaccagggcaugcugcccgugugcccccugaucccggggagcaccaccaccaacacgggccccugcaagaccugcaccacccccgcgcaggggaacuccauguuccccagcugcugcugcacgaagccgaccgacggcaacugcacgugcauccccauccccuccagcugggccuucgccaaguaccucugggagugggccuccgugcgguucagcuggcugucccugcucguccccuucgugcagugguucgugggccugagcccgaccgucuggcuguccgccaucuggaugaugugguacugggggcccagccucuacuccaucgugagccccuucaucccccugcugccgaucuucuucugccucuggguguacaucuga

SEQ ID NO: 8775 - RNA, 1845 nt, Artificial Sequence
  derived and/or modified CDS sequence (opt1) from Pf(3D7)__XP_001351122.1__HsALB_Pf-CSP(19-384)_L(PVTN)_HBsAg
augaagugggugaccuucaucagccugcuguuccuguucuccagcgccuacucccuguuccaggaguaccagugcuacggcagcuccagcaacacccgcguccucaacgagcugaacuacgacaacgccgggacgaaccuguacaacgagcucgagaugaacuacuacggcaagcaggagaacugguacucccugaagaagaacagccggucccugggggagaacgacgacggcaacaacgaggacaacgagaagcuccgcaagcccaagcacaagaagcugaagcagccggcggacgggaaccccgaccccaacgccaaccccaacguggacccgaacgccaaccccaacguggaccccaacgccaaccccaacgucgacccgaacgccaaccccaacgcgaaccccaacgccaaccccaacgccaacccgaacgccaaccccaacgcgaaccccaacgccaaccccaacgccaacccgaacgccaaccccaacgccaaccccaacgcgaaccccaacgccaacccgaacgccaaccccaacgccaaccccaacgccaaccccaacgcgaacccgaacgccaaccccaacguggaccccaacgccaaccccaacgccaacccgaacgccaaccccaacgcgaaccccaacgccaacccgaacgccaaccccaacgccaaccccaacgccaaccccaacgcgaacccgaacgccaaccccaacgccaaccccaacgccaaccccaacgcgaacccgaacgccaaccccaacgccaaccccaacgccaaccccaacgccaacccgaacgcgaaccccaacaagaacaaccagggcaacggccaggggcacaacaugcccaacgaccccaaccggaacguggacgagaacgccaacgccaacagcgccgucaagaacaacaacaacgaggagccguccgacaagcacaucaaggaguaccugaacaagauccagaacagccucuccaccgaguggagccccugcuccgugaccugcggcaacgggauccaggugcgcaucaagcccggcagcgccaacaagcccaaggacgagcuggacuacgcgaacgacaucgagaagaagaucugcaagauggagaagugcuccagcgucuucaacguggugaacuccagcccggucaccaacauggagaacaucacgagcggguuccugggcccccuccuggugcugcaggccggcuucuuccuccugacccggauccugaccaucccccagucccucgacagcugguggaccucccugaacuuccucgggggcagccccgugugccucgggcagaacucccagagcccgacguccaaccacagccccaccuccugcccgcccaucugccccggcuaccgcuggaugugccugcggcgcuucaucaucuuccuguucauccuccugcugugccucaucuuccugcugguccuccuggacuaccagggcaugcugcccgugugcccccucaucccggggagcaccaccacgaacaccggccccugcaagaccugcaccacgcccgcccaggggaacuccauguuccccagcugcugcugcaccaagccgaccgacggcaacugcacgugcauccccauccccuccagcugggccuucgccaaguaccugugggagugggcguccgugcgguucagcuggcugucccuccugguccccuucgugcagugguucguggggcugagcccgaccgucuggcucuccgccaucuggaugaugugguacuggggccccagccuguacagcaucgugucccccuucaucccccugcucccgaucuucuucugccuguggguguacaucuga

SEQ ID NO: 8776 - RNA, 1662 nt, Artificial Sequence
  derived and/or modified CDS sequence (opt1) from Pf(3D7)__XP_001351122.1__HsALB_Pf-CSP(19-384)_L(SGG)_Ferritin
augaagugggugaccuucaucagccuccuguuccuguucuccagcgccuacucccuguuccaggaguaccagugcuacggcagcuccagcaacacccggguccucaacgagcugaacuacgacaacgccgggacgaaccuguacaacgagcucgagaugaacuacuacggcaagcaggagaacugguacucccugaagaagaacagccggucccugggggagaacgacgacggcaacaacgaggacaacgagaagcuccgcaagcccaagcacaagaagcugaagcagccggcggacgggaaccccgaccccaacgccaaccccaacguggacccgaacgccaaccccaacguggaccccaacgccaaccccaacgucgacccgaacgccaaccccaacgcgaaccccaacgccaaccccaacgccaacccgaacgccaaccccaacgcgaaccccaacgccaaccccaacgccaacccgaacgccaaccccaacgccaaccccaacgcgaaccccaacgccaacccgaacgccaaccccaacgccaaccccaacgccaaccccaacgcgaacccgaacgccaaccccaacguggaccccaacgccaaccccaacgccaacccgaacgccaaccccaacgcgaaccccaacgccaacccgaacgccaaccccaacgccaaccccaacgccaaccccaacgcgaacccgaacgccaaccccaacgccaaccccaacgccaaccccaacgcgaacccgaacgccaaccccaacgccaaccccaacgccaaccccaacgccaacccgaacgcgaaccccaacaagaacaaccagggcaacggccaggggcacaacaugcccaacgaccccaaccggaacguggacgagaacgccaacgccaacagcgccgucaagaacaacaacaacgaggagccguccgacaagcacaucaaggaguaccugaacaagauccagaacagccucuccaccgaguggagccccugcuccgugaccugcggcaacgggauccaggugcgcaucaagcccggcagcgccaacaagcccaaggacgagcuggacuacgcgaacgacaucgagaagaagaucugcaagauggagaagugcuccagcgucuucaacguggugaacuccagcagcgggggccuguccaaggacaucaucaagcuccugaacgagcaggucaacaaggagaugaacagcuccaaccuguacaugagcauguccagcuggugcuacacccacucccucgacggcgccgggcuguuccuguucgaccacgccgccgaggaguacgagcacgccaagaagcucaucaucuuccugaacgagaacaacgugccggugcagcugacgagcaucuccgcgcccgagcacaaguucgagggccucacccagaucuuccagaaggccuacgagcacgagcagcacaucagcgaguccaucaacaacaucgucgaccacgccaucaagagcaaggaccacgccaccuucaacuuccugcagugguacguggcggagcagcacgaggaggaggugcuguucaaggacauccucgacaagaucgagcugaucgggaacgagaaccacggccuguaccucgccgaccaguacgucaagggcaucgccaagucccgcaagagcuga

SEQ ID NO: 8777 - RNA, 1623 nt, Artificial Sequence
  derived and/or modified CDS sequence (opt1) from Pf(3D7)__XP_001351122.1__HsALB_Pf-CSP(93-384)_L(PVTN)_HBsAg
augaagugggugaccuucaucagccuccuguuccuguucuccagcgccuacuccaagcugaagcagcccgccgacggcaacccggaccccaacgcgaaccccaacgucgaccccaacgccaacccgaacguggaccccaacgccaaccccaacguggaccccaacgccaacccgaacgccaaccccaacgcgaaccccaacgccaaccccaacgccaacccgaacgccaaccccaacgcgaaccccaacgccaaccccaacgccaacccgaacgccaaccccaacgccaaccccaacgcgaaccccaacgccaacccgaacgccaaccccaacgccaaccccaacgccaaccccaacgcgaacccgaacgucgaccccaacgccaaccccaacgccaaccccaacgccaacccgaacgccaaccccaacgcgaaccccaacgccaacccgaacgccaaccccaacgccaaccccaacgccaaccccaacgcgaacccgaacgccaaccccaacgccaaccccaacgccaaccccaacgcgaacccgaacgccaaccccaacgccaaccccaacgccaaccccaacgccaacccgaacaagaacaaccaggggaacggccaggggcacaacaugcccaacgaccccaaccgcaacguggacgagaacgcgaacgccaacagcgccgugaagaacaacaacaacgaggagcccuccgacaagcacaucaaggaguaccucaacaagauccagaacagccuguccaccgaguggagcccgugcuccgugaccugcggcaacgggauccagguccggaucaagcccggcagcgccaacaagcccaaggacgagcuggacuacgccaacgacaucgagaagaagaucugcaagauggagaagugcuccagcguguucaacgucgugaacuccagccccgugaccaacauggagaacaucaccuccggcuuccucgggccgcugcugguccuccaggcgggcuucuuccugcugacccgcauccucacgaucccccagagccuggacuccugguggaccagccugaacuuccucgggggcucccccgugugccuggggcagaacagccagagccccaccuccaaccacagcccgaccuccugcccgcccaucugccccggcuaccgguggaugugccugcgccgguucaucaucuuccucuucauccugcugcucugccugaucuuccugcucgugcugcuggacuaccagggcaugcuccccgucugcccccugauccccgggagcacgaccaccaacaccggcccgugcaagacgugcaccacccccgcccaggggaacuccauguuccccagcugcugcugcaccaagcccacggacggcaacugcacgugcaucccgauccccuccagcugggccuucgccaaguaccugugggagugggccuccgugcgcuucagcuggcucucccugcuggugcccuucguccagugguucgugggccucagccccaccguguggcuguccgcgaucuggaugaugugguacugggggccgagccuguacuccaucgucagccccuucaucccccuccugcccaucuucuucugccuguggguguacaucuga

SEQ ID NO: 8778 - RNA, 1284 nt, Artificial Sequence; identical to SEQ ID NO: 106
  derived and/or modified CDS sequence (opt1) from Pf(3D7)__XP_001351122.1__HsALB_Pf-CSP(199-377)_L(PVTN)_HBsAg

SEQ ID NO: 8779 - RNA, 981 nt, Artificial Sequence
  derived and/or modified CDS sequence (opt1) from Pf(3D7)__XP_001351122.1__HsALB_Pf-CSP(19-272)_L(AAY)_Pf-CSP(346-3 75)_L(AAY)_Pf-CSP(310-327)
augaagugggugaccuucaucagccuccuguuccuguucuccagcgccuacucccuguuccaggaguaccagugcuacggcagcuccagcaacacccgcguccucaacgagcugaacuacgacaacgccgggacgaaccuguacaacgagcucgagaugaacuacuacggcaagcaggagaacugguacucccugaagaagaacagccggucccugggggagaacgacgacggcaacaacgaggacaacgagaagcuccgcaagcccaagcacaagaagcugaagcagccggcggacgggaaccccgaccccaacgccaaccccaacguggacccgaacgccaaccccaacguggaccccaacgccaaccccaacgucgacccgaacgccaaccccaacgcgaaccccaacgccaaccccaacgccaacccgaacgccaaccccaacgcgaaccccaacgccaaccccaacgccaacccgaacgccaaccccaacgccaaccccaacgcgaaccccaacgccaacccgaacgccaaccccaacgccaaccccaacgccaaccccaacgcgaacccgaacgccaaccccaacguggaccccaacgccaaccccaacgccaacccgaacgccaaccccaacgcgaaccccaacgccaacccgaacgccaaccccaacgccaaccccaacgccaaccccaacgcgaacccgaacgccaaccccaacgccaaccccaacgccaaccccaacgcgaacccgaacgccaaccccaacgccaaccccaacgccaaccccaacgccaacccgaacgcgaaccccgccgccuacaucaagcccggcagcgccaacaagcccaaggacgagcuggacuacgccaacgacaucgagaagaagaucugcaagauggagaagugcuccgcggccuacgagccgagcgacaagcacaucaaggaguaccucaacaagauccagaacucccuguga

SEQ ID NO: 8780 - RNA, 1029 nt, Artificial Sequence
  derived and/or modified CDS sequence (opt1) from Pf(3D7)__XP_001351122.1__HsALB_Pf-CSP(19-272)_L(AAY)_Pf-CSP(346-3 75)_L(AAY)_Pf-CSP(310-327)_L(AAY)_PADRE
augaagugggugaccuucaucagccuccuguuccuguucuccagcgccuacucccuguuccaggaguaccagugcuacggcagcuccagcaacacccgcguccucaacgagcugaacuacgacaacgccgggacgaaccuguacaacgagcucgagaugaacuacuacggcaagcaggagaacugguacucccugaagaagaacagccggucccugggggagaacgacgacggcaacaacgaggacaacgagaagcuccgcaagcccaagcacaagaagcugaagcagccggcggacgggaaccccgaccccaacgccaaccccaacguggacccgaacgccaaccccaacguggaccccaacgccaaccccaacgucgacccgaacgccaaccccaacgcgaaccccaacgccaaccccaacgccaacccgaacgccaaccccaacgcgaaccccaacgccaaccccaacgccaacccgaacgccaaccccaacgccaaccccaacgcgaaccccaacgccaacccgaacgccaaccccaacgccaaccccaacgccaaccccaacgcgaacccgaacgccaaccccaacguggaccccaacgccaaccccaacgccaacccgaacgccaaccccaacgcgaaccccaacgccaacccgaacgccaaccccaacgccaaccccaacgccaaccccaacgcgaacccgaacgccaaccccaacgccaaccccaacgccaaccccaacgcgaacccgaacgccaaccccaacgccaaccccaacgccaaccccaacgccaacccgaacgcgaaccccgccgccuacaucaagcccggcagcgccaacaagcccaaggacgagcuggacuacgccaacgacaucgagaagaagaucugcaagauggagaagugcuccgcggccuacgagccgagcgacaagcacaucaaggaguaccucaacaagauccagaacucccuggccgccuacgccaaguucguggcggccuggacccugaaggccgccgcguga

SEQ ID NO: 8781 - RNA, 1029 nt, Artificial Sequence
  derived and/or modified CDS sequence (opt1) from Pf(3D7)__XP_001351122.1__HsALB_Pf-CSP(19-272)_L(AAY)_Pf-CSP(310-3 27)_L(AAY)_Pf-CSP(346-375)_L(AAY)_PADRE
augaagugggugaccuucaucagccuccuguuccuguucuccagcgccuacucccuguuccaggaguaccagugcuacggcagcuccagcaacacccgcguccucaacgagcugaacuacgacaacgccgggacgaaccuguacaacgagcucgagaugaacuacuacggcaagcaggagaacugguacucccugaagaagaacagccggucccugggggagaacgacgacggcaacaacgaggacaacgagaagcuccgcaagcccaagcacaagaagcugaagcagccggcggacgggaaccccgaccccaacgccaaccccaacguggacccgaacgccaaccccaacguggaccccaacgccaaccccaacgucgacccgaacgccaaccccaacgcgaaccccaacgccaaccccaacgccaacccgaacgccaaccccaacgcgaaccccaacgccaaccccaacgccaacccgaacgccaaccccaacgccaaccccaacgcgaaccccaacgccaacccgaacgccaaccccaacgccaaccccaacgccaaccccaacgcgaacccgaacgccaaccccaacguggaccccaacgccaaccccaacgccaacccgaacgccaaccccaacgcgaaccccaacgccaacccgaacgccaaccccaacgccaaccccaacgccaaccccaacgcgaacccgaacgccaaccccaacgccaaccccaacgccaaccccaacgcgaacccgaacgccaaccccaacgccaaccccaacgccaaccccaacgccaacccgaacgcgaaccccgccgccuacgagcccagcgacaagcacaucaaggaguaccugaacaagauccagaacucccucgccgccuacaucaagcccggcagcgcgaacaagccgaaggacgagcuggacuacgccaacgacaucgagaagaagaucugcaagauggagaagugcuccgccgccuacgccaaguucguggcggccuggacccugaaggccgccgcguga

SEQ ID NO: 8782 - RNA, 1083 nt, Artificial Sequence
  derived and/or modified CDS sequence (opt1) from Pf(3D7)__XP_001351122.1__HsALB_Pf-CSP(19-272)_L(AAY)_Pf-CSP(310-3 27)_L(AAY)_Pf-CSP(346-375)_L(AAY)_PADRE_L(AAY)_P2
augaagugggugaccuucaucagccuccuguuccuguucuccagcgccuacucccuguuccaggaguaccagugcuacggcagcuccagcaacacccgcguccucaacgagcugaacuacgacaacgccgggacgaaccuguacaacgagcucgagaugaacuacuacggcaagcaggagaacugguacucccugaagaagaacagccggucccugggggagaacgacgacggcaacaacgaggacaacgagaagcuccgcaagcccaagcacaagaagcugaagcagccggcggacgggaaccccgaccccaacgccaaccccaacguggacccgaacgccaaccccaacguggaccccaacgccaaccccaacgucgacccgaacgccaaccccaacgcgaaccccaacgccaaccccaacgccaacccgaacgccaaccccaacgcgaaccccaacgccaaccccaacgccaacccgaacgccaaccccaacgccaaccccaacgcgaaccccaacgccaacccgaacgccaaccccaacgccaaccccaacgccaaccccaacgcgaacccgaacgccaaccccaacguggaccccaacgccaaccccaacgccaacccgaacgccaaccccaacgcgaaccccaacgccaacccgaacgccaaccccaacgccaaccccaacgccaaccccaacgcgaacccgaacgccaaccccaacgccaaccccaacgccaaccccaacgcgaacccgaacgccaaccccaacgccaaccccaacgccaaccccaacgccaacccgaacgcgaaccccgccgccuacgagcccagcgacaagcacaucaaggaguaccugaacaagauccagaacucccucgccgccuacaucaagcccggcagcgcgaacaagccgaaggacgagcuggacuacgccaacgacaucgagaagaagaucugcaagauggagaagugcuccgccgccuacgccaaguucguggcggccuggacccugaaggccgccgcggccgccuaccaguacaucaaggccaacagcaaguucaucggcaucaccgagcucuga

SEQ ID NO: 8783 - RNA, 1047 nt, Artificial Sequence
  derived and/or modified CDS sequence (opt1) from Pf(3D7)__XP_001351122.1__HsALB_Pf-CSP(19-272)_L(AAY)_Pf-CSP(310-3 27)_Linker (AAY)_Pf-CSP(346-397)
augaagugggugaccuucaucagccuccuguuccuguucuccagcgccuacucccuguuccaggaguaccagugcuacggcagcuccagcaacacccgcguccucaacgagcugaacuacgacaacgccgggacgaaccuguacaacgagcucgagaugaacuacuacggcaagcaggagaacugguacucccugaagaagaacagccggucccugggggagaacgacgacggcaacaacgaggacaacgagaagcuccgcaagcccaagcacaagaagcugaagcagccggcggacgggaaccccgaccccaacgccaaccccaacguggacccgaacgccaaccccaacguggaccccaacgccaaccccaacgucgacccgaacgccaaccccaacgcgaaccccaacgccaaccccaacgccaacccgaacgccaaccccaacgcgaaccccaacgccaaccccaacgccaacccgaacgccaaccccaacgccaaccccaacgcgaaccccaacgccaacccgaacgccaaccccaacgccaaccccaacgccaaccccaacgcgaacccgaacgccaaccccaacguggaccccaacgccaaccccaacgccaacccgaacgccaaccccaacgcgaaccccaacgccaacccgaacgccaaccccaacgccaaccccaacgccaaccccaacgcgaacccgaacgccaaccccaacgccaaccccaacgccaaccccaacgcgaacccgaacgccaaccccaacgccaaccccaacgccaaccccaacgccaacccgaacgcgaaccccgccgccuacgagcccagcgacaagcacaucaaggaguaccugaacaagauccagaacucccucgccgccuacaucaagcccggcagcgcgaacaagccgaaggacgagcuggacuacgccaacgacaucgagaagaagaucugcaagauggagaagugcuccagcguguucaacgucgugaacuccagcaucggccugaucauggugcucuccuuccuguuccugaacuga

SEQ ID NO: 8784 - RNA, 1647 nt, Artificial Sequence
  derived and/or modified CDS sequence (opt2) from Pf(3D7)__XP_001351122.1__LumSynt_L(GGS4-GGG)_Pf-CSP(19-397)
augcagaucuacgagggcaagcucaccgccgagggccuccgcuucggcaucgucgccucccgcuucaaccacgcccucgucgaccgccucgucgagggcgccaucgacgccaucguccgccacggcggccgcgaggaggacaucacccucguccgcguccccggcuccugggagauccccgucgccgccggcgagcucgcccgcaaggaggacaucgacgccgucaucgccaucggcguccucauccgcggcgccaccccccacuucgacuacaucgccuccgaggucuccaagggccucgccgaccucucccucgagcuccgcaagcccaucaccuucggcgucaucaccgccgacacccucgagcaggccaucgagcgcgccggcaccaagcacggcaacaagggcugggaggccgcccucuccgccaucgagauggccaaccucuucaagucccuccgcggcggcuccggcggcuccggcggcuccggcggcuccggcggcggccucuuccaggaguaccagugcuacggcuccuccuccaacacccgcguccucaacgagcucaacuacgacaacgccggcaccaaccucuacaacgagcucgagaugaacuacuacggcaagcaggagaacugguacucccucaagaagaacucccgcucccucggcgagaacgacgacggcaacaacgaggacaacgagaagcuccgcaagcccaagcacaagaagcucaagcagcccgccgacggcaaccccgaccccaacgccaaccccaacgucgaccccaacgccaaccccaacgucgaccccaacgccaaccccaacgucgaccccaacgccaaccccaacgccaaccccaacgccaaccccaacgccaaccccaacgccaaccccaacgccaaccccaacgccaaccccaacgccaaccccaacgccaaccccaacgccaaccccaacgccaaccccaacgccaaccccaacgccaaccccaacgccaaccccaacgccaaccccaacgccaaccccaacgccaaccccaacgucgaccccaacgccaaccccaacgccaaccccaacgccaaccccaacgccaaccccaacgccaaccccaacgccaaccccaacgccaaccccaacgccaaccccaacgccaaccccaacgccaaccccaacgccaaccccaacgccaaccccaacgccaaccccaacgccaaccccaacgccaaccccaacgccaaccccaacgccaaccccaacgccaaccccaacaagaacaaccagggcaacggccagggccacaacaugcccaacgaccccaaccgcaacgucgacgagaacgccaacgccaacuccgccgucaagaacaacaacaacgaggagcccuccgacaagcacaucaaggaguaccucaacaagauccagaacucccucuccaccgaguggucccccugcuccgucaccugcggcaacggcauccagguccgcaucaagcccggcuccgccaacaagcccaaggacgagcucgacuacgccaacgacaucgagaagaagaucugcaagauggagaagugcuccuccgucuucaacgucgucaacuccuccaucggccucaucaugguccucuccuuccucuuccucaacuga

SEQ ID NO: 8785 - RNA, 1509 nt, Artificial Sequence
  derived and/or modified CDS sequence (opt2) from Pf(3D7)__XP_001351122.1__HsALB_Pf-CSP(19-272)_L(PVTN)_HBsAg
augaagugggucaccuucaucucccuccucuuccucuucuccuccgccuacucccucuuccaggaguaccagugcuacggcuccuccuccaacacccgcguccucaacgagcucaacuacgacaacgccggcaccaaccucuacaacgagcucgagaugaacuacuacggcaagcaggagaacugguacucccucaagaagaacucccgcucccucggcgagaacgacgacggcaacaacgaggacaacgagaagcuccgcaagcccaagcacaagaagcucaagcagcccgccgacggcaaccccgaccccaacgccaaccccaacgucgaccccaacgccaaccccaacgucgaccccaacgccaaccccaacgucgaccccaacgccaaccccaacgccaaccccaacgccaaccccaacgccaaccccaacgccaaccccaacgccaaccccaacgccaaccccaacgccaaccccaacgccaaccccaacgccaaccccaacgccaaccccaacgccaaccccaacgccaaccccaacgccaaccccaacgccaaccccaacgccaaccccaacgccaaccccaacgucgaccccaacgccaaccccaacgccaaccccaacgccaaccccaacgccaaccccaacgccaaccccaacgccaaccccaacgccaaccccaacgccaaccccaacgccaaccccaacgccaaccccaacgccaaccccaacgccaaccccaacgccaaccccaacgccaaccccaacgccaaccccaacgccaaccccaacgccaaccccaacgccaacccccccgucaccaacauggagaacaucaccuccggcuuccucggcccccuccucguccuccaggccggcuucuuccuccucacccgcauccucaccaucccccagucccucgacuccugguggaccucccucaacuuccucggcggcucccccgucugccucggccagaacucccagucccccaccuccaaccacucccccaccuccugcccccccaucugccccggcuaccgcuggaugugccuccgccgcuucaucaucuuccucuucauccuccuccucugccucaucuuccuccucguccuccucgacuaccagggcaugcuccccgucugcccccucauccccggcuccaccaccaccaacaccggccccugcaagaccugcaccacccccgcccagggcaacuccauguuccccuccugcugcugcaccaagcccaccgacggcaacugcaccugcauccccauccccuccuccugggccuucgccaaguaccucugggagugggccuccguccgcuucuccuggcucucccuccucguccccuucguccagugguucgucggccucucccccaccgucuggcucuccgccaucuggaugaugugguacuggggccccucccucuacuccaucgucucccccuucaucccccuccuccccaucuucuucugccucugggucuacaucuga

SEQ ID NO: 8786 - RNA, 1626 nt, Artificial Sequence
  derived and/or modified CDS sequence (opt2) from Pf(3D7)__XP_001351122.1__HsALB_Pf-CSP(19-272)_L(AAY)_Pf-CSP(346-3 65)_L(AAY)_PADRE_L(PVTN)_HBsAg
augaagugggucaccuucaucucccuccucuuccucuucuccuccgccuacucccucuuccaggaguaccagugcuacggcuccuccuccaacacccgcguccucaacgagcucaacuacgacaacgccggcaccaaccucuacaacgagcucgagaugaacuacuacggcaagcaggagaacugguacucccucaagaagaacucccgcucccucggcgagaacgacgacggcaacaacgaggacaacgagaagcuccgcaagcccaagcacaagaagcucaagcagcccgccgacggcaaccccgaccccaacgccaaccccaacgucgaccccaacgccaaccccaacgucgaccccaacgccaaccccaacgucgaccccaacgccaaccccaacgccaaccccaacgccaaccccaacgccaaccccaacgccaaccccaacgccaaccccaacgccaaccccaacgccaaccccaacgccaaccccaacgccaaccccaacgccaaccccaacgccaaccccaacgccaaccccaacgccaaccccaacgccaaccccaacgccaaccccaacgccaaccccaacgucgaccccaacgccaaccccaacgccaaccccaacgccaaccccaacgccaaccccaacgccaaccccaacgccaaccccaacgccaaccccaacgccaaccccaacgccaaccccaacgccaaccccaacgccaaccccaacgccaaccccaacgccaaccccaacgccaaccccaacgccaaccccaacgccaaccccaacgccaaccccaacgccaaccccgccgccuacaucaagcccggcuccgccaacaagcccaaggacgagcucgacuacgccaacgacaucgaggccgccuacgccaaguucgucgccgccuggacccucaaggccgccgcccccgucaccaacauggagaacaucaccuccggcuuccucggcccccuccucguccuccaggccggcuucuuccuccucacccgcauccucaccaucccccagucccucgacuccugguggaccucccucaacuuccucggcggcucccccgucugccucggccagaacucccagucccccaccuccaaccacucccccaccuccugcccccccaucugccccggcuaccgcuggaugugccuccgccgcuucaucaucuuccucuucauccuccuccucugccucaucuuccuccucguccuccucgacuaccagggcaugcuccccgucugcccccucauccccggcuccaccaccaccaacaccggccccugcaagaccugcaccacccccgcccagggcaacuccauguuccccuccugcugcugcaccaagcccaccgacggcaacugcaccugcauccccauccccuccuccugggccuucgccaaguaccucugggagugggccuccguccgcuucuccuggcucucccuccucguccccuucguccagugguucgucggccucucccccaccgucuggcucuccgccaucuggaugaugugguacuggggccccucccucuacuccaucgucucccccuucaucccccuccuccccaucuucuucugccucugggucuacaucuga

SEQ ID NO: 8787 - RNA, 1845 nt, Artificial Sequence
  derived and/or modified CDS sequence (opt2) from Pf(3D7)__XP_001351122.1__HsALB_Pf-CSP(19-384)_L(PVTN)_HBsAg
augaagugggucaccuucaucucccuccucuuccucuucuccuccgccuacucccucuuccaggaguaccagugcuacggcuccuccuccaacacccgcguccucaacgagcucaacuacgacaacgccggcaccaaccucuacaacgagcucgagaugaacuacuacggcaagcaggagaacugguacucccucaagaagaacucccgcucccucggcgagaacgacgacggcaacaacgaggacaacgagaagcuccgcaagcccaagcacaagaagcucaagcagcccgccgacggcaaccccgaccccaacgccaaccccaacgucgaccccaacgccaaccccaacgucgaccccaacgccaaccccaacgucgaccccaacgccaaccccaacgccaaccccaacgccaaccccaacgccaaccccaacgccaaccccaacgccaaccccaacgccaaccccaacgccaaccccaacgccaaccccaacgccaaccccaacgccaaccccaacgccaaccccaacgccaaccccaacgccaaccccaacgccaaccccaacgccaaccccaacgccaaccccaacgucgaccccaacgccaaccccaacgccaaccccaacgccaaccccaacgccaaccccaacgccaaccccaacgccaaccccaacgccaaccccaacgccaaccccaacgccaaccccaacgccaaccccaacgccaaccccaacgccaaccccaacgccaaccccaacgccaaccccaacgccaaccccaacgccaaccccaacgccaaccccaacgccaaccccaacaagaacaaccagggcaacggccagggccacaacaugcccaacgaccccaaccgcaacgucgacgagaacgccaacgccaacuccgccgucaagaacaacaacaacgaggagcccuccgacaagcacaucaaggaguaccucaacaagauccagaacucccucuccaccgaguggucccccugcuccgucaccugcggcaacggcauccagguccgcaucaagcccggcuccgccaacaagcccaaggacgagcucgacuacgccaacgacaucgagaagaagaucugcaagauggagaagugcuccuccgucuucaacgucgucaacuccucccccgucaccaacauggagaacaucaccuccggcuuccucggcccccuccucguccuccaggccggcuucuuccuccucacccgcauccucaccaucccccagucccucgacuccugguggaccucccucaacuuccucggcggcucccccgucugccucggccagaacucccagucccccaccuccaaccacucccccaccuccugcccccccaucugccccggcuaccgcuggaugugccuccgccgcuucaucaucuuccucuucauccuccuccucugccucaucuuccuccucguccuccucgacuaccagggcaugcuccccgucugcccccucauccccggcuccaccaccaccaacaccggccccugcaagaccugcaccacccccgcccagggcaacuccauguuccccuccugcugcugcaccaagcccaccgacggcaacugcaccugcauccccauccccuccuccugggccuucgccaaguaccucugggagugggccuccguccgcuucuccuggcucucccuccucguccccuucguccagugguucgucggccucucccccaccgucuggcucuccgccaucuggaugaugugguacuggggccccucccucuacuccaucgucucccccuucaucccccuccuccccaucuucuucugccucugggucuacaucuga

SEQ ID NO: 8788 - RNA, 1662 nt, Artificial Sequence
  derived and/or modified CDS sequence (opt2) from Pf(3D7)__XP_001351122.1__HsALB_Pf-CSP(19-384)_L(SGG)_Ferritin
augaagugggucaccuucaucucccuccucuuccucuucuccuccgccuacucccucuuccaggaguaccagugcuacggcuccuccuccaacacccgcguccucaacgagcucaacuacgacaacgccggcaccaaccucuacaacgagcucgagaugaacuacuacggcaagcaggagaacugguacucccucaagaagaacucccgcucccucggcgagaacgacgacggcaacaacgaggacaacgagaagcuccgcaagcccaagcacaagaagcucaagcagcccgccgacggcaaccccgaccccaacgccaaccccaacgucgaccccaacgccaaccccaacgucgaccccaacgccaaccccaacgucgaccccaacgccaaccccaacgccaaccccaacgccaaccccaacgccaaccccaacgccaaccccaacgccaaccccaacgccaaccccaacgccaaccccaacgccaaccccaacgccaaccccaacgccaaccccaacgccaaccccaacgccaaccccaacgccaaccccaacgccaaccccaacgccaaccccaacgccaaccccaacgucgaccccaacgccaaccccaacgccaaccccaacgccaaccccaacgccaaccccaacgccaaccccaacgccaaccccaacgccaaccccaacgccaaccccaacgccaaccccaacgccaaccccaacgccaaccccaacgccaaccccaacgccaaccccaacgccaaccccaacgccaaccccaacgccaaccccaacgccaaccccaacgccaaccccaacaagaacaaccagggcaacggccagggccacaacaugcccaacgaccccaaccgcaacgucgacgagaacgccaacgccaacuccgccgucaagaacaacaacaacgaggagcccuccgacaagcacaucaaggaguaccucaacaagauccagaacucccucuccaccgaguggucccccugcuccgucaccugcggcaacggcauccagguccgcaucaagcccggcuccgccaacaagcccaaggacgagcucgacuacgccaacgacaucgagaagaagaucugcaagauggagaagugcuccuccgucuucaacgucgucaacuccuccuccggcggccucuccaaggacaucaucaagcuccucaacgagcaggucaacaaggagaugaacuccuccaaccucuacauguccauguccuccuggugcuacacccacucccucgacggcgccggccucuuccucuucgaccacgccgccgaggaguacgagcacgccaagaagcucaucaucuuccucaacgagaacaacguccccguccagcucaccuccaucuccgcccccgagcacaaguucgagggccucacccagaucuuccagaaggccuacgagcacgagcagcacaucuccgaguccaucaacaacaucgucgaccacgccaucaaguccaaggaccacgccaccuucaacuuccuccagugguacgucgccgagcagcacgaggaggagguccucuucaaggacauccucgacaagaucgagcucaucggcaacgagaaccacggccucuaccucgccgaccaguacgucaagggcaucgccaagucccgcaaguccuga

SEQ ID NO: 8789 - RNA, 1623 nt, Artificial Sequence
  derived and/or modified CDS sequence (opt2) from Pf(3D7)__XP_001351122.1__HsALB_Pf-CSP(93-384)_L(PVTN)_HBsAg
augaagugggucaccuucaucucccuccucuuccucuucuccuccgccuacuccaagcucaagcagcccgccgacggcaaccccgaccccaacgccaaccccaacgucgaccccaacgccaaccccaacgucgaccccaacgccaaccccaacgucgaccccaacgccaaccccaacgccaaccccaacgccaaccccaacgccaaccccaacgccaaccccaacgccaaccccaacgccaaccccaacgccaaccccaacgccaaccccaacgccaaccccaacgccaaccccaacgccaaccccaacgccaaccccaacgccaaccccaacgccaaccccaacgccaaccccaacgccaaccccaacgucgaccccaacgccaaccccaacgccaaccccaacgccaaccccaacgccaaccccaacgccaaccccaacgccaaccccaacgccaaccccaacgccaaccccaacgccaaccccaacgccaaccccaacgccaaccccaacgccaaccccaacgccaaccccaacgccaaccccaacgccaaccccaacgccaaccccaacgccaaccccaacgccaaccccaacaagaacaaccagggcaacggccagggccacaacaugcccaacgaccccaaccgcaacgucgacgagaacgccaacgccaacuccgccgucaagaacaacaacaacgaggagcccuccgacaagcacaucaaggaguaccucaacaagauccagaacucccucuccaccgaguggucccccugcuccgucaccugcggcaacggcauccagguccgcaucaagcccggcuccgccaacaagcccaaggacgagcucgacuacgccaacgacaucgagaagaagaucugcaagauggagaagugcuccuccgucuucaacgucgucaacuccucccccgucaccaacauggagaacaucaccuccggcuuccucggcccccuccucguccuccaggccggcuucuuccuccucacccgcauccucaccaucccccagucccucgacuccugguggaccucccucaacuuccucggcggcucccccgucugccucggccagaacucccagucccccaccuccaaccacucccccaccuccugcccccccaucugccccggcuaccgcuggaugugccuccgccgcuucaucaucuuccucuucauccuccuccucugccucaucuuccuccucguccuccucgacuaccagggcaugcuccccgucugcccccucauccccggcuccaccaccaccaacaccggccccugcaagaccugcaccacccccgcccagggcaacuccauguuccccuccugcugcugcaccaagcccaccgacggcaacugcaccugcauccccauccccuccuccugggccuucgccaaguaccucugggagugggccuccguccgcuucuccuggcucucccuccucguccccuucguccagugguucgucggccucucccccaccgucuggcucuccgccaucuggaugaugugguacuggggccccucccucuacuccaucgucucccccuucaucccccuccuccccaucuucuucugccucugggucuacaucuga

SEQ ID NO: 8790 - RNA, 1284 nt, Artificial Sequence; identical to SEQ ID NO: 142
  derived and/or modified CDS sequence (opt2) from Pf(3D7)__XP_001351122.1__HsALB_Pf-CSP(199-377)_L(PVTN)_HBsAg

SEQ ID NO: 8791 - RNA, 981 nt, Artificial Sequence
  derived and/or modified CDS sequence (opt2) from Pf(3D7)__XP_001351122.1__HsALB_Pf-CSP(19-272)_L(AAY)_Pf-CSP(346-3 75)_L(AAY)_Pf-CSP(310-327)
augaagugggucaccuucaucucccuccucuuccucuucuccuccgccuacucccucuuccaggaguaccagugcuacggcuccuccuccaacacccgcguccucaacgagcucaacuacgacaacgccggcaccaaccucuacaacgagcucgagaugaacuacuacggcaagcaggagaacugguacucccucaagaagaacucccgcucccucggcgagaacgacgacggcaacaacgaggacaacgagaagcuccgcaagcccaagcacaagaagcucaagcagcccgccgacggcaaccccgaccccaacgccaaccccaacgucgaccccaacgccaaccccaacgucgaccccaacgccaaccccaacgucgaccccaacgccaaccccaacgccaaccccaacgccaaccccaacgccaaccccaacgccaaccccaacgccaaccccaacgccaaccccaacgccaaccccaacgccaaccccaacgccaaccccaacgccaaccccaacgccaaccccaacgccaaccccaacgccaaccccaacgccaaccccaacgccaaccccaacgccaaccccaacgucgaccccaacgccaaccccaacgccaaccccaacgccaaccccaacgccaaccccaacgccaaccccaacgccaaccccaacgccaaccccaacgccaaccccaacgccaaccccaacgccaaccccaacgccaaccccaacgccaaccccaacgccaaccccaacgccaaccccaacgccaaccccaacgccaaccccaacgccaaccccaacgccaaccccgccgccuacaucaagcccggcuccgccaacaagcccaaggacgagcucgacuacgccaacgacaucgagaagaagaucugcaagauggagaagugcuccgccgccuacgagcccuccgacaagcacaucaaggaguaccucaacaagauccagaacucccucuga

SEQ ID NO: 8792 - RNA, 1029 nt, Artificial Sequence
  derived and/or modified CDS sequence (opt2) from Pf(3D7)__XP_001351122.1__HsALB_Pf-CSP(19-272)_L(AAY)_Pf-CSP(346-3 75)_L(AAY)_Pf-CSP(310-327)_L(AAY)_PADRE
augaagugggucaccuucaucucccuccucuuccucuucuccuccgccuacucccucuuccaggaguaccagugcuacggcuccuccuccaacacccgcguccucaacgagcucaacuacgacaacgccggcaccaaccucuacaacgagcucgagaugaacuacuacggcaagcaggagaacugguacucccucaagaagaacucccgcucccucggcgagaacgacgacggcaacaacgaggacaacgagaagcuccgcaagcccaagcacaagaagcucaagcagcccgccgacggcaaccccgaccccaacgccaaccccaacgucgaccccaacgccaaccccaacgucgaccccaacgccaaccccaacgucgaccccaacgccaaccccaacgccaaccccaacgccaaccccaacgccaaccccaacgccaaccccaacgccaaccccaacgccaaccccaacgccaaccccaacgccaaccccaacgccaaccccaacgccaaccccaacgccaaccccaacgccaaccccaacgccaaccccaacgccaaccccaacgccaaccccaacgccaaccccaacgucgaccccaacgccaaccccaacgccaaccccaacgccaaccccaacgccaaccccaacgccaaccccaacgccaaccccaacgccaaccccaacgccaaccccaacgccaaccccaacgccaaccccaacgccaaccccaacgccaaccccaacgccaaccccaacgccaaccccaacgccaaccccaacgccaaccccaacgccaaccccaacgccaaccccgccgccuacaucaagcccggcuccgccaacaagcccaaggacgagcucgacuacgccaacgacaucgagaagaagaucugcaagauggagaagugcuccgccgccuacgagcccuccgacaagcacaucaaggaguaccucaacaagauccagaacucccucgccgccuacgccaaguucgucgccgccuggacccucaaggccgccgccuga

SEQ ID NO: 8793 - RNA, 1029 nt, Artificial Sequence
  derived and/or modified CDS sequence (opt2) from Pf(3D7)__XP_001351122.1__HsALB_Pf-CSP(19-272)_L(AAY)_Pf-CSP(310-3 27)_L(AAY)_Pf-CSP(346-375)_L(AAY)_PADRE
augaagugggucaccuucaucucccuccucuuccucuucuccuccgccuacucccucuuccaggaguaccagugcuacggcuccuccuccaacacccgcguccucaacgagcucaacuacgacaacgccggcaccaaccucuacaacgagcucgagaugaacuacuacggcaagcaggagaacugguacucccucaagaagaacucccgcucccucggcgagaacgacgacggcaacaacgaggacaacgagaagcuccgcaagcccaagcacaagaagcucaagcagcccgccgacggcaaccccgaccccaacgccaaccccaacgucgaccccaacgccaaccccaacgucgaccccaacgccaaccccaacgucgaccccaacgccaaccccaacgccaaccccaacgccaaccccaacgccaaccccaacgccaaccccaacgccaaccccaacgccaaccccaacgccaaccccaacgccaaccccaacgccaaccccaacgccaaccccaacgccaaccccaacgccaaccccaacgccaaccccaacgccaaccccaacgccaaccccaacgccaaccccaacgucgaccccaacgccaaccccaacgccaaccccaacgccaaccccaacgccaaccccaacgccaaccccaacgccaaccccaacgccaaccccaacgccaaccccaacgccaaccccaacgccaaccccaacgccaaccccaacgccaaccccaacgccaaccccaacgccaaccccaacgccaaccccaacgccaaccccaacgccaaccccaacgccaaccccgccgccuacgagcccuccgacaagcacaucaaggaguaccucaacaagauccagaacucccucgccgccuacaucaagcccggcuccgccaacaagcccaaggacgagcucgacuacgccaacgacaucgagaagaagaucugcaagauggagaagugcuccgccgccuacgccaaguucgucgccgccuggacccucaaggccgccgccuga

SEQ ID NO: 8794 - RNA, 1083 nt, Artificial Sequence
  derived and/or modified CDS sequence (opt2) from Pf(3D7)__XP_001351122.1__HsALB_Pf-CSP(19-272)_L(AAY)_Pf-CSP(310-3 27)_L(AAY)_Pf-CSP(346-375)_L(AAY)_PADRE_L(AAY)_P2
augaagugggucaccuucaucucccuccucuuccucuucuccuccgccuacucccucuuccaggaguaccagugcuacggcuccuccuccaacacccgcguccucaacgagcucaacuacgacaacgccggcaccaaccucuacaacgagcucgagaugaacuacuacggcaagcaggagaacugguacucccucaagaagaacucccgcucccucggcgagaacgacgacggcaacaacgaggacaacgagaagcuccgcaagcccaagcacaagaagcucaagcagcccgccgacggcaaccccgaccccaacgccaaccccaacgucgaccccaacgccaaccccaacgucgaccccaacgccaaccccaacgucgaccccaacgccaaccccaacgccaaccccaacgccaaccccaacgccaaccccaacgccaaccccaacgccaaccccaacgccaaccccaacgccaaccccaacgccaaccccaacgccaaccccaacgccaaccccaacgccaaccccaacgccaaccccaacgccaaccccaacgccaaccccaacgccaaccccaacgccaaccccaacgucgaccccaacgccaaccccaacgccaaccccaacgccaaccccaacgccaaccccaacgccaaccccaacgccaaccccaacgccaaccccaacgccaaccccaacgccaaccccaacgccaaccccaacgccaaccccaacgccaaccccaacgccaaccccaacgccaaccccaacgccaaccccaacgccaaccccaacgccaaccccaacgccaaccccgccgccuacgagcccuccgacaagcacaucaaggaguaccucaacaagauccagaacucccucgccgccuacaucaagcccggcuccgccaacaagcccaaggacgagcucgacuacgccaacgacaucgagaagaagaucugcaagauggagaagugcuccgccgccuacgccaaguucgucgccgccuggacccucaaggccgccgccgccgccuaccaguacaucaaggccaacuccaaguucaucggcaucaccgagcucuga

SEQ ID NO: 8795 - RNA, 1047 nt, Artificial Sequence
  derived and/or modified CDS sequence (opt2) from Pf(3D7)__XP_001351122.1__HsALB_Pf-CSP(19-272)_L(AAY)_Pf-CSP(310-3 27)_Linker (AAY)_Pf-CSP(346-397)
augaagugggucaccuucaucucccuccucuuccucuucuccuccgccuacucccucuuccaggaguaccagugcuacggcuccuccuccaacacccgcguccucaacgagcucaacuacgacaacgccggcaccaaccucuacaacgagcucgagaugaacuacuacggcaagcaggagaacugguacucccucaagaagaacucccgcucccucggcgagaacgacgacggcaacaacgaggacaacgagaagcuccgcaagcccaagcacaagaagcucaagcagcccgccgacggcaaccccgaccccaacgccaaccccaacgucgaccccaacgccaaccccaacgucgaccccaacgccaaccccaacgucgaccccaacgccaaccccaacgccaaccccaacgccaaccccaacgccaaccccaacgccaaccccaacgccaaccccaacgccaaccccaacgccaaccccaacgccaaccccaacgccaaccccaacgccaaccccaacgccaaccccaacgccaaccccaacgccaaccccaacgccaaccccaacgccaaccccaacgccaaccccaacgucgaccccaacgccaaccccaacgccaaccccaacgccaaccccaacgccaaccccaacgccaaccccaacgccaaccccaacgccaaccccaacgccaaccccaacgccaaccccaacgccaaccccaacgccaaccccaacgccaaccccaacgccaaccccaacgccaaccccaacgccaaccccaacgccaaccccaacgccaaccccaacgccaaccccgccgccuacgagcccuccgacaagcacaucaaggaguaccucaacaagauccagaacucccucgccgccuacaucaagcccggcuccgccaacaagcccaaggacgagcucgacuacgccaacgacaucgagaagaagaucugcaagauggagaagugcuccuccgucuucaacgucgucaacuccuccaucggccucaucaugguccucuccuuccucuuccucaacuga

SEQ ID NO: 8796 - RNA, 1647 nt, Artificial Sequence
  derived and/or modified CDS sequence (opt3) from Pf(3D7)__XP_001351122.1__LumSynt_L(GGS4-GGG)_Pf-CSP(19-397)
augcagaucuacgagggcaagcugaccgccgaagggcucagauucggaauuguggcuagcagguuuaaccacgcacuugucgaccggcugguugagggugccauagaugcgaucgugcgccauggcgggcgagaagaggacauuacauugguacgugugcccggauccugggaaaucccugucgcugccggcgaguuagcaagaaaagaggauauugacgccgugaucgcuauagguguucugaucaggggagcaacuccacacuucgauuauauugccucugaagugucaaaggggcuagcugaccucagucuggagcuucggaaaccgaucacguuuggcgucauuaccgccgauacacuggaacaagcgaucgagcgcgcaggcacuaagcaugggaauaaaggaugggaggccgcuuugagcgccauagaaauggcaaaccucuucaagucccugagagguggcucugggggaucgggcgguucagggggaagcggcggcgggcuguuucaggaguaccagugcuauggaaguuccucuaauaccagggugcucaacgaauuaaauuacgacaacgcugguacaaaucuguauaacgagcuugaaaugaauuacuauggcaagcaggagaacugguacagcuugaaaaagaacucccggucacugggggagaaugaugacggaaauaacgaagauaaugagaaacuacgcaagcccaaacacaagaagcucaaacaaccugccgacggcaacccagaucccaacgcgaauccuaacguagacccaaaugccaaccccaauguugacccuaacgcaaauccaaacguggauccgaaugcuaaccccaaugccaacccuaaugcuaacccaaaugccaaccccaacgcaaauccuaacgccaauccaaacgcuaaucccaacgcgaauccgaacgcaaauccuaacgccaaucccaacgcuaauccaaacgccaauccuaacgcaaaccccaaugccaacccaaaugcuaaccccaaugccaacccuaaugcaaacccaaaugucgacccgaacgcgaaucccaacgcuaauccuaacgccaauccaaacgcaaaccccaaugccaacccuaaugcuaacccaaaugccaaccccaaugcaaacccgaaugcuaacccuaaugccaacccaaaugcgaaccccaaugccaacccuaaugcuaaccccaacgcaaauccaaacgccaauccuaacgcuaaucccaacgccaauccaaacgcaaauccgaacaagaauaaccaggguaaugggcagggccauaacaugccuaaugaucccaaccgaaacguggacgaaaaugcgaacgccaauagugcugugaaaaacaauaacaaugaggaaccaagcgauaagcacauuaaagaguaccugaacaagauccaaaauucucuuuccaccgaguggucacccugcagcgucacuugcggaaacggcauucagguuagaaucaaaccugggagugccaauaagccaaaggacgaacuggauuaugcaaacgacaucgagaaaaagauuuguaaaauggaaaaguguucuuccguguucaauguagugaacagcucgauaggauugaucaugguccucucuuuucuguucuuaaauuga

SEQ ID NO: 8797 - RNA, 1509 nt, Artificial Sequence
  derived and/or modified CDS sequence (opt3) from Pf(3D7)__XP_001351122.1__HsALB_Pf-CSP(19-272)_L(PVTN)_HBsAg
augaagugggugaccuucaucagccugcucuuucuuuucuccucugccuacucacuguuucaggaguaucaaugcuacggcaguagcuccaacacaagagucuugaaugaauuaaacuaugacaaugcugggacuaaccuguacaaugagcuagaaaugaacuauuacggaaaacaggagaauugguauucucucaagaaaaacucgaggucacugggugaaaaugaugacggcaacaaugaggauaacgagaaacuucggaagcccaagcacaagaaacugaagcagccugcagacgggaauccagauccgaacgccaaucccaacguugacccuaacgcgaauccaaacguggaucccaaugcuaacccuaauguagacccaaacgccaaucccaacgcaaauccuaacgccaauccaaacgcuaauccgaacgcaaaucccaacgccaacccuaaugcuaacccaaaugccaaccccaaugcgaacccuaaugcaaacccaaaugccaaccccaaugcuaacccgaaugccaacccuaaugcaaaccccaacgcuaauccaaacgccaauccuaacgcgaaucccaacguggauccaaaugccaaccccaaugcaaacccuaaugcuaacccaaaugccaacccgaaugcuaaccccaacgccaauccuaacgcaaauccaaacgccaaucccaacgcuaauccuaacgcgaauccaaacgcaaaucccaacgccaauccgaacgcuaauccuaacgccaauccaaacgcaaaccccaaugccaacccuaaugcuaaccccaaugccaacccaccugucacgaauauggaaaacauuaccagcggauucuugggcccccuccuggugcugcaggcaggguuuuuccucuuaacacgcauacugacuaucccacaaagucuugacuccugguggaccucuuugaauuuucuggguggaagcccgguuugucuaggccagaacucccagucaccuacaaguaaucauagccccaccucuugcccacccauuuguccuggcuaccgauggaugugccuccguagauucaucauuuuucuguucauccuucuguugugucucauauuucuguuagugcugcucgauuaccaggggaugcuuccagucugcccccugaucccuggauccacuacaaccaacacggguccguguaaaacuugcaccacaccagcgcaaggcaauucaauguuccccagcuguugcuguacuaagccuaccgacgggaacugcacaugcauuccaauccccaguucuugggcuuuugccaaauauuugugggagugggcauccgugagguucagcuggcuaucgcugcucguaccuuucguucagugguuugugggacugucuccgaccgucuggcuuuccgccauuuggaugaugugguacuggggccccucacuguauaguaucgugagcccauucauaccuuugcuccccaucuuuuucugucuguggguguacauuuga

SEQ ID NO: 8798 - RNA, 1626 nt, Artificial Sequence
  derived and/or modified CDS sequence (opt3) from Pf(3D7)__XP_001351122.1__HsALB_Pf-CSP(19-272)_L(AAY)_Pf-CSP(346-3 65)_L(AAY)_PADRE_L(PVTN)_HBsAg
augaagugggugaccuucaucagccugcucuuucuuuucuccucugccuacucacuguuucaggaguaucaaugcuacggcaguagcuccaacacaagagucuugaaugaauuaaacuaugacaaugcugggacuaaccuguacaaugagcuagaaaugaacuauuacggaaaacaggagaauugguauucucucaagaaaaacucgaggucacugggugaaaaugaugacggcaacaaugaggauaacgagaaacuucggaagcccaagcacaagaaacugaagcagccugcagacgggaauccagauccgaacgccaaucccaacguugacccuaacgcgaauccaaacguggaucccaaugcuaacccuaauguagacccaaacgccaaucccaacgcaaauccuaacgccaauccaaacgcuaauccgaacgcaaaucccaacgccaacccuaaugcuaacccaaaugccaaccccaaugcgaacccuaaugcaaacccaaaugccaaccccaaugcuaacccgaaugccaacccuaaugcaaaccccaacgcuaauccaaacgccaauccuaacgcgaaucccaacguggauccaaaugccaaccccaaugcaaacccuaaugcuaacccaaaugccaacccgaaugcuaaccccaacgccaauccuaacgcaaauccaaacgccaaucccaacgcuaauccuaacgcgaauccaaacgcaaaucccaacgccaauccgaacgcuaauccuaacgccaauccaaacgcaaaccccaaugccaacccuaaugcuaaccccaaugccaacccagcagcguacauuaaaccuggaagcgcuaauaagcccaaagacgaauuggauuacgccaacgacauagaggcagccuaugcuaaguucgucgccgcauggacgcucaaggcugccgcgccagugaccaauauggaaaacaucacaaguggcuuucuggguccgcugcucguuuuacaggccggguucuuucugcuuacucgcauuuugaccaucccucaaucccuggauucuugguggacaagccuaaauuuccucggaggcucccccgugugucugggccagaacucacagaguccaaccagcaaucauucucccacuuccugcccuccaauuugucccggguaccgauggaugugccuucguagauuuaucauauuccuguuuaucuugcuccuguguuuaauuuuccugcucguccuucuggacuaucagggaauguugccugugugcccgcuaaucccagguucaacaaccacgaacacuggccccuguaaaaccugcacaacuccugcucaagggaauagcauguuuccaaguuguugcuguaccaagcccacagacggaaacuguaccugcauuccuaucccgucuuccugggcauucgccaaauaccugugggagugggcuagcguaagguucucguggcucucucugcuuguucccuuugugcagugguucgucggccuguccccaacggugugguugucagccauauggaugaugugguauugggguccuagucucuacagcauugugucccccuuuaucccacuguuaccuauuuucuuuugccugugggucuauaucuga

SEQ ID NO: 8799 - RNA, 1845 nt, Artificial Sequence
  derived and/or modified CDS sequence (opt3) from Pf(3D7)__XP_001351122.1__HsALB_Pf-CSP(19-384)_L(PVTN)_HBsAg
augaagugggugaccuucaucagccugcucuuucuuuucuccucugccuacucacuguuucaggaguaucaaugcuacggcaguagcuccaacacaagagucuugaaugaauuaaacuaugacaaugcugggacuaaccuguacaaugagcuagaaaugaacuauuacggaaaacaggagaauugguauucucucaagaaaaacucgaggucacugggugaaaaugaugacggcaacaaugaggauaacgagaaacuucggaagcccaagcacaagaaacugaagcagccugcagacgggaauccagauccgaacgccaaucccaacguugacccuaacgcgaauccaaacguggaucccaaugcuaacccuaauguagacccaaacgccaaucccaacgcaaauccuaacgccaauccaaacgcuaauccgaacgcaaaucccaacgccaacccuaaugcuaacccaaaugccaaccccaaugcgaacccuaaugcaaacccaaaugccaaccccaaugcuaacccgaaugccaacccuaaugcaaaccccaacgcuaauccaaacgccaauccuaacgcgaaucccaacguggauccaaaugccaaccccaaugcaaacccuaaugcuaacccaaaugccaacccgaaugcuaaccccaacgccaauccuaacgcaaauccaaacgccaaucccaacgcuaauccuaacgcgaauccaaacgcaaaucccaacgccaauccgaacgcuaauccuaacgccaauccaaacgcaaaccccaaugccaacccuaaugcuaaccccaaugccaacccaaauaaaaacaaucagggaaacggccaaggucauaauaugccuaacgaccccaaucgcaacgucgaugaaaaugcaaacgcgaacagcgcugugaagaauaacaauaacgaggaaccaagugacaaacacauuaaggaguacuugaauaagauacagaacucccucucuacggaguggagcccguguuccguuaccugcgggaauggaauccaggugcgaauuaaaccuggcucagccaacaagcccaaagaugaacuggacuacgcaaaugacaucgagaagaaaauuuguaagauggaaaaaugcaguagcgucuucaacgugguaaauucuuccccaguuacaaacauggagaauaucacuucaggcuuucuggggccccucuuagugcugcaggccggauucuuucuuuugacccguauacugacaaucccucaaagccuagauaguugguggaccucucucaacuuccuggguggcuccccagucugucuugggcagaauagccagucgcccacuucuaaccauuccccuacaucaugcccgccaauuugucccggauauagauggaugugccugaggcgguuuaucauuuucuuguuuauccuccuguuaugucugauauuccuccuugugcuguuggacuaccagggcaugcuaccugugugcccacugauucccgguaguaccacgacuaacaccgggccuuguaagacaugcacuaccccggcucaaggaaauagcauguuucccuccugcuguugcacaaagccaaccgauggcaacuguacgugcaucccuauucccucuagcugggccuucgcaaaauaucucugggaaugggcuucaguccgcuucaguuggcugucccuucugguuccauuugugcagugguucguaggcuugagcccuacuguguggcucucugccaucuggaugaugugguacugggggcccucacuguauaguaucgucagcccauuuauuccguuacugccuauauucuuuugucuauggguguacaucuga

SEQ ID NO: 8800 - RNA, 1662 nt, Artificial Sequence
  derived and/or modified CDS sequence (opt3) from Pf(3D7)__XP_001351122.1__HsALB_Pf-CSP(19-384)_L(SGG)_Ferritin
augaagugggugaccuucaucagccugcucuuucuuuucuccucugccuacucacuguuucaggaguaucaaugcuacggcaguagcuccaacacaagagucuugaaugaauuaaacuaugacaaugcugggacuaaccuguacaaugagcuagaaaugaacuauuacggaaaacaggagaauugguauucucucaagaaaaacucgaggucacugggugaaaaugaugacggcaacaaugaggauaacgagaaacuucggaagcccaagcacaagaaacugaagcagccugcagacgggaauccagauccgaacgccaaucccaacguugacccuaacgcgaauccaaacguggaucccaaugcuaacccuaauguagacccaaacgccaaucccaacgcaaauccuaacgccaauccaaacgcuaauccgaacgcaaaucccaacgccaacccuaaugcuaacccaaaugccaaccccaaugcgaacccuaaugcaaacccaaaugccaaccccaaugcuaacccgaaugccaacccuaaugcaaaccccaacgcuaauccaaacgccaauccuaacgcgaaucccaacguggauccaaaugccaaccccaaugcaaacccuaaugcuaacccaaaugccaacccgaaugcuaaccccaacgccaauccuaacgcaaauccaaacgccaaucccaacgcuaauccuaacgcgaauccaaacgcaaaucccaacgccaauccgaacgcuaauccuaacgccaauccaaacgcaaaccccaaugccaacccuaaugcuaaccccaaugccaacccaaauaaaaacaaucagggaaacggccaaggucauaauaugccuaacgaccccaaucgcaacgucgaugaaaaugcaaacgcgaacagcgcugugaagaauaacaauaacgaggaaccaagugacaaacacauuaaggaguacuugaauaagauacagaacucccucucuacggaguggagcccguguuccguuaccugcgggaauggaauccaggugcgaauuaaaccuggcucagccaacaagcccaaagaugaacuggacuacgcaaaugacaucgagaagaaaauuuguaagauggaaaaaugcaguagcgucuucaacgugguaaauucuuccucaggcgggcugagcaaggauaucauaaagcucuuaaacgagcagguuaauaaagaaaugaacaguucuaaucuguauauguccaugagcucgugguguuacacacauucucuugacggagccgguuuguuucuguucgaucacgcugccgaggaguaugaacaugcaaagaaacuaaucauuuuucucaacgagaacaaugugccaguccaacugacuuccaucucagcucccgaacacaaguucgagggccuuacccagauuuuucagaaagccuacgaacacgagcagcauaucagugagagcauaaacaauauuguggaccacgcgaucaaguccaaggaucaugccacauucaacuuucugcaaugguauguggcugaacagcacgaggaagaggucuuguucaaagacauucucgauaagaucgaacugaucgggaaugagaaccacggauuauaccuggcagaccaguauguuaaaggcauugccaagucucguaaaagcuga

SEQ ID NO: 8801 - RNA, 1623 nt, Artificial Sequence
  derived and/or modified CDS sequence (opt3) from Pf(3D7)__XP_001351122.1__HsALB_Pf-CSP(93-384)_L(PVTN)_HBsAg
augaagugggugaccuucaucagccugcucuuucuuuucuccucugccuacucaaaacugaagcagcccgcugacggcaacccugauccaaaugcaaacccgaaugucgaccccaacgccaauccuaacguugauccaaaugcgaaccccaauguggacccuaacgcuaauccaaacgccaaucccaacgcaaauccuaacgccaacccaaaugcuaacccgaaugcaaaccccaaugccaacccuaaugcuaacccaaaugccaaccccaaugcgaacccuaaugcaaacccaaaugccaaccccaacgcuaauccgaacgccaauccuaacgcaaaucccaacgcuaauccaaacgccaauccuaacguagaucccaaugcgaacccaaaugccaaccccaaugcaaacccuaacgcuaauccaaacgccaauccgaacgcuaaucccaacgccaauccuaacgcaaauccaaacgccaaucccaacgcuaauccuaacgcgaauccaaacgcaaaccccaaugccaacccgaaugcuaacccuaaugccaacccaaaugcaaaccccaaugccaacccuaaugcuaaccccaauaaaaacaaucaagggaacggacagggucacaauaugccaaacgacccuaacagaaauguggaugagaacgccaaugcaaacagugcggucaagaauaacaauaacgaggaacccagcgacaaacauauuaaggaauauuugaauaagauacagaacuccuuaucuacagaguggucgccaugcucagugacuuguggcaaugggauccagguuaggauuaaaccgggaagcgcuaacaagccuaaagaugaacuggacuacgccaaugauaucgagaagaaaauuugcaagauggagaaguguaguuccguguuuaacgucguaaauucuagccccgugacgaacauggaaaacaucaccuccggcuuccuagguccacuccugguucuucaagcaggguuuuuccuguugacacggauacucacuaucccccagucacuggacaguugguggaccagccugaauuuucucggaggcucuccugugugcuuaggccagaacucccagucaccaacaagcaaucacagucccaccucuuguccuccgauuugcccaggguaucgcuggaugugucugcgacguuucaucauuuuucuuuucaucuugcugcuaugccucauauuucugcuuguccuguuggauuaccaaggaaugcuccccguguguccucugauuccagguuccacuacaaccaacacgggccccugcaaaacuuguaccacuccugcccaggggaauagcauguucccgucgugcugcuguacaaagcccaccgacggaaacugcacauguaucccaauuccuucuuccugggcuuuugccaaauauuuaugggagugggcaucagugagauucaguuggcugagccuccuuguccccuucguucagugguuugugggccuguccccaaccguaugguugucugcuaucuggaugaugugguacugggguccuagccuauauucaaucgugagucccuucauuccacugcucccgauauuuuucugccugugggucuacaucuga

SEQ ID NO: 8802 - RNA, 1284 nt, Artificial Sequence; identical to SEQ ID NO: 178
  derived and/or modified CDS sequence (opt3) from Pf(3D7)__XP_001351122.1__HsALB_Pf-CSP(199-377)_L(PVTN)_HBsAg

SEQ ID NO: 8803 - RNA, 981 nt, Artificial Sequence
  derived and/or modified CDS sequence (opt3) from Pf(3D7)__XP_001351122.1__HsALB_Pf-CSP(19-272)_L(AAY)_Pf-CSP(346-3 75)_L(AAY)_Pf-CSP(310-327)
augaagugggugaccuucaucagccugcucuuucuuuucuccucugccuacucacuguuucaggaguaucaaugcuacggcaguagcuccaacacaagagucuugaaugaauuaaacuaugacaaugcugggacuaaccuguacaaugagcuagaaaugaacuauuacggaaaacaggagaauugguauucucucaagaaaaacucgaggucacugggugaaaaugaugacggcaacaaugaggauaacgagaaacuucggaagcccaagcacaagaaacugaagcagccugcagacgggaauccagauccgaacgccaaucccaacguugacccuaacgcgaauccaaacguggaucccaaugcuaacccuaauguagacccaaacgccaaucccaacgcaaauccuaacgccaauccaaacgcuaauccgaacgcaaaucccaacgccaacccuaaugcuaacccaaaugccaaccccaaugcgaacccuaaugcaaacccaaaugccaaccccaaugcuaacccgaaugccaacccuaaugcaaaccccaacgcuaauccaaacgccaauccuaacgcgaaucccaacguggauccaaaugccaaccccaaugcaaacccuaaugcuaacccaaaugccaacccgaaugcuaaccccaacgccaauccuaacgcaaauccaaacgccaaucccaacgcuaauccuaacgcgaauccaaacgcaaaucccaacgccaauccgaacgcuaauccuaacgccaauccaaacgcaaaccccaaugccaacccuaaugcuaaccccaaugccaacccagcagcguacauuaaaccuggaagcgcuaauaagcccaaagacgaauuggauuacgccaacgacauagagaagaagaucuguaaaauggaaaagugcagugcagccuaugagccauccgauaaacauauuaaggaguaccucaauaaaauccagaacucucuguga

SEQ ID NO: 8804 - RNA, 1029 nt, Artificial Sequence
  derived and/or modified CDS sequence (opt3) from Pf(3D7)__XP_001351122.1__HsALB_Pf-CSP(19-272)_L(AAY)_Pf-CSP(346-3 75)_L(AAY)_Pf-CSP(310-327)_L(AAY)_PADRE
augaagugggugaccuucaucagccugcucuuucuuuucuccucugccuacucacuguuucaggaguaucaaugcuacggcaguagcuccaacacaagagucuugaaugaauuaaacuaugacaaugcugggacuaaccuguacaaugagcuagaaaugaacuauuacggaaaacaggagaauugguauucucucaagaaaaacucgaggucacugggugaaaaugaugacggcaacaaugaggauaacgagaaacuucggaagcccaagcacaagaaacugaagcagccugcagacgggaauccagauccgaacgccaaucccaacguugacccuaacgcgaauccaaacguggaucccaaugcuaacccuaauguagacccaaacgccaaucccaacgcaaauccuaacgccaauccaaacgcuaauccgaacgcaaaucccaacgccaacccuaaugcuaacccaaaugccaaccccaaugcgaacccuaaugcaaacccaaaugccaaccccaaugcuaacccgaaugccaacccuaaugcaaaccccaacgcuaauccaaacgccaauccuaacgcgaaucccaacguggauccaaaugccaaccccaaugcaaacccuaaugcuaacccaaaugccaacccgaaugcuaaccccaacgccaauccuaacgcaaauccaaacgccaaucccaacgcuaauccuaacgcgaauccaaacgcaaaucccaacgccaauccgaacgcuaauccuaacgccaauccaaacgcaaaccccaaugccaacccuaaugcuaaccccaaugccaacccagcagcguacauuaaaccuggaagcgcuaauaagcccaaagacgaauuggauuacgccaacgacauagagaagaagaucuguaaaauggaaaagugcagugcagccuaugagccauccgauaaacauauuaaggaguaccucaauaaaauccagaacucucuggcugccuaugcaaaguucgucgcugccuggacgcugaaagcggccgcuuga
